United States Patent Application Publication US 2008/0034453 A1 - sequence listing, part 4

SEQ ID NO: 26474 - DNA, 252 bp, Zea mays
agaccaactagcaacatagaaagcacaatagtgtaccaacaatggcagccaaaatattttgcttccttatgctccttggtctttctgcaagtgctgctaccgcaaccattttcccacaatgctcacaagctcctatagcttcctttcttcccccatacctctcaccagcggtgtcttcagtatgtgaaaacccaattcttcaaccctacaggatccaacaggcaatcgcagcaggcatcttacctttatcac

SEQ ID NO: 26475 - DNA, 249 bp, Zea mays
gactgccggtgtggagttgccatactcgtgccgtgctggggcttgctccacctgtgccggcaaaatcgagtctggttcggttgaccagtcggatgggtccttccttgatgacgggcagcaggaggaaggttatgtgctgacatgcgtctcctacccaaagtccgactgcgtcatccacacccacaaggaaggcgacctgtactagggctagggctttccaatttggcgagggacaaaaaatgctctcga

SEQ ID NO: 26476 - DNA, 252 bp, Zea mays
cagcaacaactgctttcatctagcccgctcgctgtggccaatgcacctacatacctgcaacaacaattgttgcaacagattgtaccagctctgactcagctagttgtggcaaaccctgctgcctacttgcaacagctgcttccattcaaccaactgactatgtcgaactctgctgcgtacctacaacagcgacaacagttacttaatccactagcagtggctaacccattggtcgctgccttcctacagcag

SEQ ID NO: 26477 - DNA, 168 bp, Zea mays
caaactatgtgctgtagtatagccgctggctagctagctagttgagtcatttagcggcgatgattgagtaataatgtgtcacgcatcaccatgggtggcagtgtcagtgtgagcaatgacctgaatgaacaattgaaatgaaaagaaaaaaagtactccatctgttcc

SEQ ID NO: 26478 - DNA, 249 bp, Zea mays
tagcaacatagaaagcacaatagtgtaccaacaatggcagccaaaatattttgcttccttatgctccttggtctttctgcaagtcttgctaccgcaaccattttcccacaatgctcacaagctcctatagcttcccttcttcccccatacctctcaccagcggtgtcttcaatgtgtgaaaacccaattgttcaaccctacaggatccaacaggcaatcgcaacaggcatcttaccattatcacccttg

SEQ ID NO: 26479 - DNA, 247 bp, Zea mays
gcagcagccattcagtttcagcattggtcagggttcagtgatcaaaggatgggacgagggagttatgaccatgcaagtgggtgaagttgctcgtatccagtgcacgcctgattatgcttatggagccggcgggttcccagcctggggaattcaaccaaactcagtgcttgtgttcgagattgaagtcctcagtgcccagtaattcgcatctgtcagctatggaaacgttggccatgcttctcaagta

SEQ ID NO: 26480 - DNA, 248 bp, Zea mays
cccgtacctctcaccagcggtgtcttcggtatgtgaaaacccaattcttcaaccctacaggatccaacaggcaatcacagctggcatcttacctttatcacccttgttcctccaacaatcatcagccctattacatcagttacctttggtgcatttattggcacaaaacatcagggcacaacaactacaacaacttgtgctagcaaaccttgctgcctactctcagcaacagcagtttcttccattca

SEQ ID NO: 26481 - DNA, 153 bp, Zea mays
agccgctgactagctacctagctcgctagtttactcatttagcggcgatgagtaacgtagtgtcacccatcaccatgggtggcagtgtgagcaatgacctgaatgaaccattgaaatggaaaggaataatatataaggaaaaaagatgattgg

SEQ ID NO: 26482 - DNA, 248 bp, Zea mays
gcttcccttcttcccccataccttccatcaatgatagcttcagtatgtgaaaacccagctcttcaaccctataggctccaacaagcaatcgcagcaagcaacatacctttatcacccttgtttcaacaatcgccagccctatctttggtgcagtcattggtacaaaccatcagggcacagcagctgcagcaactcgtgctacctgtgatcaaccaagtagctctggcaaacctttctccctactctca

SEQ ID NO: 26483 - DNA, 245 bp, Zea mays
ctcagaactttgattgaaactttgcatacatagctcatttatatatatttgatcatatctcttttaagtctatgactaatgtgttttcaagtttattaatatgctaagtcgtagattgaaagggaaatggagtcttcggtgaagacaaggcttccactccactctatcggtattatttacccttcgccgtcactccgcaccattctccactatgaccgatggtataaagaaaataacaagtatcc

SEQ ID NO: 26484 - DNA, 247 bp, Zea mays
caatggcggccaagatattttccatccttatgctccttgctctttctgcatgtgttgctaacgcgaccatttttcctcaatactcacaagctcctatagctgcccttcttcccccataccttccatcaatgaccgcttcagtttgtgaaaacccagcccttcaaccctacaggctccaacaagcaatcgcaacaagcaacttacctttatcacccctgttctttcaacaatcgccagccctatcttt

SEQ ID NO: 26485 - DNA, 248 bp, Zea mays
gaaaacccaattcttcaaccctataggatccaacaggcaatcgcagctggcatcttacctttatcacccttgttcctccaacaatcatcagccctattacagcagttacctttggtgcatttattggcacaaaacatcagggcacaacaactacaacaacttgtgctagcaaaccttgctgcctactctcagcaacaacagtttcttccattcaaccaactagctgcattgaactctgcttcttattt

SEQ ID NO: 26486 - DNA, 245 bp, Zea mays
gaaaacccagctcttcaaccatataggcttcaacaagcaatcgcagcaagcaacatacctttatcgcccttgttgtttcaacaatcaccagccctatctttggtgcagtcattggtacaaaccatcagggcacaacagctgcagcaactcgtgctacctgtgatcaaccaagtagctctggcaaacctttctccctactctcagcaacaacaatttcttccattcaaccaactgtctacactgaa

SEQ ID NO: 26487 - DNA, 262 bp, Zea mays
ggcagcaccccgatcctgggccagtgcgtcgagtttctgaggcatcagtgcagcccgacggcgacgccctactgctcgcctcagtgccagtcgttgcggcacagtgttgccagcagctcaggcaggtggagccgcagcaccggtaccaggcgatcttcggcttggtcctccagtccatcctgcagcagcagccgcaaagcggccaggtcgcggggctgttggcggcgcagatagcgcacaactgacggcgatgtgcggcctg

SEQ ID NO: 26488 - DNA, 259 bp, Zea mays
ccaactagcaacatagaaagcacaatagtgtaccaacaatggcagccaaaatattttgcctccttatgctccttggtctttctgcaagtgctgctacggcgaccattttcccacaatgctcacaagctcctatagcttcccttcttcccccgtacctctcaccagtggtgtcttcggtatgtgtaaacccaattcttcaaccctataggatccaacaggtaatcgcagctggcatcttacctttatcacccttgttcct

SEQ ID NO: 26489 - DNA, 258 bp, Zea mays
tggtcagcctagcaattagctcatcgactccagattggtgaactcgacaccatgaaggtgctgatcgttgcccttgctctcctggcgctcgctgcgagtgctgcctccagtacaagcggtggctgtggctgccagacaccaccgtttcatctaccgcctccgttctatatgccgcctccgttctatctgccgccgcagcagcagccgcaggcctggcaataccccactcaaccaccgcagctaagcccgtgccagcag

SEQ ID NO: 26490 - DNA, 254 bp, Zea mays
ctcgtcgtgtgcctggctctgtcagcagccagcgcctctgcaatgcagatgccctgcccctgcgcggggctgcagggcttgtacggcgctggcgccggcctgacgacgatgatgggcgccggtgggctgtacccctacgcggagtacctgtggcagccgcagtgcagcccgctggcggcggcgccctactacgccgggtgtgggcagacgagcgccatgtaccagccgctccggcaacagtgctgccagcagca

SEQ ID NO: 26491 - DNA, 254 bp, Zea mays
gcggcgtcggcagcgtcggcagcccgttcctgtgccagtgcgtcgagttcctgaggcaccagtgcagcccggcggcgacccctacggctcgccacagtgccaggcgctgcagcagcagtgctgccaccagatcaggcaggtggagtcgctgcaccggtaccaggcgacatacggtgtggtcctgcagtccttcctgcagcagcagccgcagggcgagctcgcggcgctgatggcggcccaggtagcgcacagct

SEQ ID NO: 26492 - DNA, 251 bp, Zea mays
cactacaacaacttgtgctagcaaaccttgctgcctactctcagcaacagcagtttcttccattcaaccaactagctgcattgaactctgcttcttatttgcaacaacaacaactaccattcagccagctacctgctgcctacccccagcaatttcttccattcaaccaactggcagcattgaactctcctgcttatttacagcagcaacaactactaccattcagccagctagctggtgtgagccctgct

SEQ ID NO: 26493 - DNA, 253 bp, Zea mays
aaccatcagggcacagcagctgcagcaactcgtgctacctgtgatcaaccaagtagctctggcaaacctttctccctactctcagcaacaacaatttcttccattcaaccaactgtctacactgaaccctgctgcttatttgcagcaacaactattaccattcagccagctagctactgcctactctcagcaacaacaacttcttccatttaaccaattggccgtactgaaccccgctgcttatttgcagcag

SEQ ID NO: 26494 - DNA, 254 bp, Zea mays
acagctgcttccattcaaccaactgactgtgtcgaactctgctgcgtacctacaacagtgacaacagttacttaatccactagcggtggctaacccattggtcgctgccttcctacagcagcaacaattgctgtcatacaaccagttctctttgatgaaccctgccttgttgtggcagcaacccatcgttggaggtgccatcttttagattacatatgagatgtactcgataatggtgccctcatagcggcatg

SEQ ID NO: 26495 - DNA, 253 bp, Zea mays
ccaacaatcatcagccctattacatcagttacctttggtgcatttattggcacaaaacatcagggcacaacaactacaacaacttgtgctagcaaaccttgctgcctactctcagcaacagcagtttcttccattcaaccaactagctgcattgaactctgcttcttatttgcaacaacaacaactaccattcagccagctacctgctgcctacccccagcaatttcttccattcaaccaactggcagcattg

SEQ ID NO: 26496 - DNA, 245 bp, Zea mays
acacgtctcattgccttgcgtctggcgacattatgatttcttgccttggggacaaggaggggaatgcagctggcaatggcttcctgctgttggattcagagtttaatgtcaaaggacgttgggaaaagccaggtcacagtcccttgtttggatatgacttctggtaccagcctcgccacaagacgatgatcagttcgtcatggggagccctgcagcgttcaggacaggttcgatcttcaacatgt

SEQ ID NO: 26497 - DNA, 241 bp, Zea mays
cgacgagcagtgggcggcccacaagagcagcagcaagctgatggtgatcgacttctcggcgtcctggtgcgggccctgccgcttcatcgagccggccttcaaggagctggcctcccgcttcaccgatgccatcttcatcaaggtcgacgtcgacgagctcgcggaggtcgcaaggacatggaaggtagaggcgatgccaacgttcgtgctggtcaaggatgggaaggatgtaggccgtgtg

SEQ ID NO: 26498 - DNA, 250 bp, Zea mays
gaccaactagcaacatagaaagcacaatagtgtaccaacaatggtagccaaaatattttgcttccttatgctccttggtctttctgcaagtgctgctaccgcaaccattttcccacaatgctcacaagctcctatagcttcctttcttcccccatacctctcaccagcggtgtcttcagtatgtgaaaacccaattcttcaaccctacaggatccaacaggcaatcgcagcaggcatcttacctttatca

SEQ ID NO: 26499 - DNA, 251 bp, Zea mays
gcagtttcttccattcaaccaactaggttcattgaactctgcttcttatttgcaacaacaacaactaccattcagccagctacctgctgcctacccccagcaatttcttccattcaaccaactagcagcattgaactctcctgcttatttacagcagcaacaactactaccattcagccagctagctggtgtgagccctgctaccttcttgacacaaccacagttgttgccgttctaccagcacgttgcgc

SEQ ID NO: 26500 - DNA, 250 bp, Zea mays
cgacaccatgaaggtgctgatcgttgcccttgctctcctggcgctcgctgcgagcgccgcctccagtacaagtggcggctgtggctgccagacaccaccgtttcatctaccgcctccgttctatatgccgcctccgttacatctgccgtcgcagcagcagccgcagccatggcaataccccactcaaccaccgcagctaagcccgtgccagcagttcggatcctgcggcgtcggtagcgtcggcagtccg

SEQ ID NO: 26501 - DNA, 250 bp, Zea mays
caacagttgcaacagtttctgccagcgctcagtcaactagccatggtgaaccctatcgcctacctacaacagcaacaacttctttcatctagcccgctcgctatgggcaatgcacctacatacctgcaacaacagttgttgcaacaacagttgctgcaacaaattgtaccagctcttactcagctagctgtggcaaaccctgctgcctacttgcaacaactacttccattcaaccaactgactgtgtcga

SEQ ID NO: 26502 - DNA, 113 bp, Zea mays
caacaacccatcattggtggtgccctcttttagatttcttatgagtcatagttcaataataaagttttttatctgatgtttgtgcgttcccagaaataagaaagtacatttct

SEQ ID NO: 26503 - DNA, 240 bp, Zea mays
caaagcgtcagtgcgtagagaggatcgtcgaacagaacagcatgaagatggtcatcgttctcgtcgtgtgcctggctctgtcagcagccagcgcctctgcaatgcagatgccctgcccctgcgcggggctgcagggcttgtacggcgctggcgccggcctgacgacgatgatgggcgccggcgggctgtacccctacgcggagtacctgaggcagccgcagtgcagcccgctggcggcgg

SEQ ID NO: 26504 - DNA, 245 bp, Zea mays
gctcgctggcggtggcgccctactacgccgggtgtgggcagccgagcgccatgttccagccgctccggcaacagtgctgccagcagcagatgaggatgatggacgtgcagtccgtcgtgcacagctgcagatgatgatgcagcttgagcgtgccgctgccgccagcagcagcctgtacgagccagctctgatgcagcagcagcagcagctgctggcagcccagggtctcaaccccatggccatga

SEQ ID NO: 26505 - DNA, 246 bp, Zea mays
caccagatcaggcaggtggagccgctgcaccggtaccaggcgacatacggtgtggtcctgcagtccttcctgcagcagcagccgcagggcgagctcgcggcgctgatggcggcccaggtagcgcacagctgacggcgatgtgcggcctgcagctgcagcagccaggtccctgcccttgcaacgcagctgccggcggtgtctactactgaggaaactatgtactgtagtaataatgtaatggagccg

SEQ ID NO: 26506 - DNA, 246 bp, Zea mays
ggcggctgtggctgccagacaccaccgtttcatctaccgcctccgttctatatgccgcctccgttctatctgtcgccgcagcagcagccgcagccatggcaataccccactcaaccaccgcagctaagcccgtgccagcagttcggatcctgtggcgtcggcagcgtcggcagcccgttcctgggccagtgcgtcgagttcctgaggcaccagtgcagcccggtggtgatgccctacggctcgcca

SEQ ID NO: 26507 - DNA, 137 bp, Zea mays
gaaatctcctctatccatccctctctatctatatatgtaataatgcagtaagacgacacacattatcatgtgtggtatgaccaataatatatgcatcataataaagttttggttttgaagtgcagaaagaaaaagat

SEQ ID NO: 26508 - DNA, 250 bp, Zea mays
ctgagccaactagctgtggtgaaccctatcgcctacttgcaatagcagatgcttgcatccaacccacttgctctggcaaatgtagctacataccaacaacaacaattgcaacagtttctaccagcgcttagtcaactagccatggtgaaccctgccgcctacctacaacagcaacaactgctttcatctagccctctcgctatggttaatgcacctacatacctgcaacaacagttgttgcaacagattg

SEQ ID NO: 26509 - DNA, 243 bp, Zea mays
gtgggcaagactatcgggtacaaagttggaacaatgattgagatccccagggcagctctggtggctgatgagatagcggagcaggctgaattcttctccttcggaacgaacgacctgacgcagatgacctttgggtacagcagggatgatgtgggaaagttcattcccgtctatcttgctcagggcattctccaacatgaccccttcgaggtcctggaccagaggggagtgggcgagctggtg

SEQ ID NO: 26510 - DNA, 246 bp, Zea mays
atcctgcagcagcagccgcaaagcgccaggtcgcggggctgttggcggcgcagatagcgcacaactgacggcgatgtgcggcctgcagcagccgactccatgcccctacgctgctgccggcggtgtcccccactgaagaaactatgtgctgtagtatagccgctggctagctagctagttgagtcatttagcggcgatgattgagtaataatgtgtcacgcatcaccatgggtggcagtgtcagtg

SEQ ID NO: 26511 - DNA, 119 bp, Zea mays
acaacacatcattggtggtgccctcttttagattgcttatgagtcatagttcaataatgaagttttttggatgatgtttgtggcgtcccagaaataagaaagtacatttctagattctt

SEQ ID NO: 26512 - DNA, 243 bp, Zea mays
cattaacccttacatgtcctccccttgccacattgagctgattctgtcagagaaggaagagcctgtgaagaaagaggctgacaacattgtcgcggcaaggaagcagtgaagtatgttagcctgctgataatggcatcctttcgaagcattatagccgtagctcttttatgtaccttttcaggctggtaccgataccgtggatctggatttgccatgttttgtactgtgctcgagtgtaaggtc

SEQ ID NO: 26513 - DNA, 242 bp, Zea mays
accttgctgcctactctcagcaacagcagtttcttccattcaaccaactggctgcattgaactctgctgcttatttgcaacaacaactaccattcagtcagctagctgctgcctacccccagcaatttcttccattcaaccaactggcagcattgaactctgctgcttatttacaacagcaacagctaccaccattcagccagctagctgatgtgagtcctgttgccttcttgacacaacaa

SEQ ID NO: 26514 - DNA, 242 bp, Zea mays
gtaccccagggctacctcgtcgccaccaaggcgcagggagaaggcttccagtacatcgccttcgagacgaaccctgacaccatggtcagccacgtcgccgggaagaactccgtcctgagcgacttgccggccgccgtcatcgccagctcgtatgccatctccatggaggaagctgcagagctcaagaacggtaggaagcatgagctggctgtgcttactcctgctggcagtggcagctacca

SEQ ID NO: 26515 - DNA, 242 bp, Zea mays
accttgctgcctactctcagcaacagcagtttcttccattcaaccaactggctgcattgaactctgctgcttatttgcaacaacaactaccattcagtcagctagctgctgcctacccccagcaatttcttccattcaaccaactggcagcattgaactctgctgcttatttacaacagcaacagctaccaccattcagccagctagctgatgtgagccctgttgccttcttgacacaacaa

SEQ ID NO: 26516 - DNA, 243 bp, Zea mays
ctgccgccgcagcagcagccgcagccatggcaataccccactgcaaccaccgcagctaagcccgtgccagcagttcggatcctgtggtgtcggcagtgtcggcagtccgttcctgggtcagtgcgtcgagttcctgaggcaccagtgcagtccggcggtgacgccctacggctcgccacagtgccaggcgctgtagcagcagtgctgccaccagatcaggcaggtggagccgctgcaccggta

SEQ ID NO: 26517 - DNA, 238 bp, Zea mays
aataataataaaaatggtgtttggagtgttatacctgggagtagatgaaggttccgaggatggcgatggcggctccgagcgcgttgatgggctggacgggcgtctggaagatgatgatggaggcgacgatgacggagatcctcttcatggtgttgccgatggagaacgtgagcggcgagatctcgtccagcgacatgtacgacacctggttgtacaggtggtagaacacgctctgcgc

SEQ ID NO: 26518 - DNA, 190 bp, Zea mays
gctatcgctatcctactggacgtggaatgcctgatcctggcatgcacagtgttggtgctgtgatgccaccttcatatgagatgggagggatgccaatgagagaagctgccccccaacctgttccaattggggcgctaccactgcacttgctaacgccccaccagatcagcagagacttatgcttggtgag

SEQ ID NO: 26519 - DNA, 194 bp, Zea mays
caccaagcgaacacattagcaacaacctaacaacaatggctaccaagatattatccctccttgcgcttcttgcgctttttgcgagtgcaacaaatgcgttcattattccacaatgctcacttgctccaagttccattattacacagttcctcccaccagttacttcaatgggcttcgaacacccagctgtgcaa

SEQ ID NO: 26520 - DNA, 160 bp, Zea mays
acggtgaccattttcccgcaatgctcgtaagctcctatagcttcccttcttcccccgtacctctcaccagcggtgtcttcggtatgtgaaaacccaattcttcaaccctacaggatccaacaggcaatcacagctggcatcttacctttatcacccttgt

SEQ ID NO: 26521 - DNA, 257 bp, Zea mays
gaagtcataagatcaaatttgtgttcccttgacaatttattacacatggcataacaactataaggaaaaccttatcgcaggtggaagcggaaggccaggttctcccagatggaactcttcttgtaggtggccagaaagttgctgtagtgtattttagagctggctatgcaccacatgattacccttcagaagcagaatggagtgcaagacttatgatggaacaatcatctgctgtgaagtgccttcaatatcatatc

SEQ ID NO: 26522 - DNA, 194 bp, Zea mays
ctacaggatccaacaggcaatcgcagctggcatcttacctttatcacccttgttcctccaacaatcatcagccctattacatcagttacctttggtgcatttattggcacaaaacatcagggcacaacaactacaacaacttgtgctagcaaaccttgctgcctactctcagcaacagcagtttcttccattca

SEQ ID NO: 26523 - DNA, 194 bp, Zea mays
gcagcaacaactattaccattcagccagctagctactgcctactctcagcaacaacaacttcttccatttaaccaattggccgcactgaaccccgctgcttatttgcagcagcaaatactactaccatttagccagctagctgcagcaaaccgtgcttccttcttgacacagcaacagttgctgcctttctacc

SEQ ID NO: 26524 - DNA, 162 bp, Zea mays
cttgctcctagtgccattattccacagttcctcccaccagttacttcaatgggcttcgaacacctagctgtgcaagccatcatgcaacaacaagcgcttgtggcgagcgtcttacaacaaccaattgcccaattgcaacaacaatccttgccacatctaaca

SEQ ID NO: 26525 - DNA, 160 bp, Zea mays
gcaattagctcatcgactccagattggagaactcgacaccatgaaggtgctgatcgttgcccttgctctcctggcgctcgctgcgagtgccgcctccagtacaagcggcggctgtggctgccagacaccaccgtttcatctaccgcctccgttctatatg

SEQ ID NO: 26526 - DNA, 259 bp, Zea mays
caaccatataggcttcaacaagcaatcgcagcaagcaacatacctttatcgcccttgttgtttcaacaatcaccagccctatctttggtgcagtcattggtacaaaccatcagggcacaacagctgcagcaactcgtgctacctgtgatcaaccaagtagctctggcaaacctttctccctactctcagcaacaacaatttcttccattcaaccaactgtctacactgaacactgctgcttatttgcagcaacaactat

SEQ ID NO: 26527 - DNA, 194 bp, Zea mays
agaacttcaaccctttcggtgagaatggagagcagggtacagggtgggcattcgcacccctaaccacagaaaacatgttgtggacattgcgaactgcaatatctacatacagggaacacaagtcctcctgggaagggctaatgatgcgatgcatgtcaaaagacttcacgtgggaccatgccgctgaacaatac

SEQ ID NO: 26528 - DNA, 187 bp, Zea mays
aagcgatcgcactagcaacgacctaacaacaatggctaccaagatattagccctccttgcgcttcttgccctttttgtgtgcgcaacaaatgtgttcattattccacaatgctcacttgctcctagtgccattattccacagttcctcccaccagttacttcaatgggcttcgaacacctagctgtg

SEQ ID NO: 26529 - DNA, 185 bp, Zea mays
gtcgctgccgcctccgtggccgactctgcctacggcgtccagtcgtccttctccatggtcacccccagctccgccgtgttccaggtgatcgtcggtgctgtcggtggtggtgcaatgatggtgagcggaggtggcggcggcggtgctgctgcatctggtggtgctgctgccgaggctcccaagga

SEQ ID NO: 26530 - DNA, 248 bp, Zea mays
gttacctttggtgcatttattggcacaaaacatcagggcacaacaactacaacaacttgtgctagcaaaccttgctgcctactctcagcaacagcagtttcttccattcaaccaactaggttcattgaactctgcttcttatttgcaacaacaacaactaccattcagccagctacctgctgcctacccccagcaatttcttccattcaaccaactagcagcattgaactcctctggttatttacagc

SEQ ID NO: 26531 - DNA, 155 bp, Zea mays
gcctagcaattagctcatcgactccagattggagaactcgacaccatgaaggtgctgatcgttgcccttgctctcctggcgctcgctgcgagtgctgcctccagtacaagcggcggctgtggctgccagacaccaccgtttcatctaccgcctcc

SEQ ID NO: 26532 - DNA, 125 bp, Zea mays
cttacagcaaccctttgttggtgctgcattctagatagagatattcgtgttgtatcgaataatgagttgacatgccatcgcgtgtgactcattattaacaataaaacaagtttcctcttattatc

SEQ ID NO: 26533 - DNA, 248 bp, Zea mays
gcaaagcaggcttttgacgaggccatctcggaactggacaccctgagcgaggagtcctacaaggacagcactttgatcatgcagctccttcgtgataacttgaccctatggacttctgacatctcggaggaccctgcggtagagatcagggaggcgcccaagcacgactcgagcgaggggcagtaaagccggctttacgtgcctagaagctagtacctagtgtttgctgctgtctaatgacactatgc

SEQ ID NO: 26534 - DNA, 244 bp, Zea mays
gtcggtttctactctgcctaccttgttgcagagagggttgtcgtgaccactaagcacaatgatgatgagcagtacgtgtgggagtctcaggctggtggctccttcactgtcgcacgtgatacctctggggagcaacttggcaggggtacaaagatgaccctctacctcaaggatgatcagttggagtaccttgaggagcgccgcctcaaggatctgatcaagaagcactccgagttcatcagct

SEQ ID NO: 26535 - DNA, 247 bp, Zea mays
cggaaacaagtacccgaagcgccctcaccacagaggtgcgtcgatacctcataacggcgtcaagtatggatgcaaaggaggttacaaatggagggacacgaagaaggcaaaccctaacatccttgttggagcaatggtggctggccctgacaggcgtgacggctacaaagatgtccgcacgaactacaactacacagagcctacccttgcggcaaacgctggtctggttgcagcactgatttctata

SEQ ID NO: 26536 - DNA, 248 bp, Zea mays
agaagagccgcaagccatgctgaagcttggcatgaagcccatcactggtgtcagccgggtcactgtgaagaaaagcaagaatatgctttttgtcatctcgaagccagatgtgttcaagagcccaaactcggacacctatgtcatattcggcgaggcgaagatcgaggacctcagctcccagctgcagacccaagctgcagagcagttcaaggctcctgacctgagccaaatgatcccgaagcctgaga

SEQ ID NO: 26537 - DNA, 251 bp, Zea mays
gtcaaggtgcttcctttcttgaaacctataatcgaaagaaattctcttaagtcagttatccaaggcttcttgccaggaatcatattgaaaatctttcttatacttctcccaacaattctaatggccatgagcaagattgaaggacacacatcgctctctggattggacaggaaaacagcaacgaagtactacattttccttttcgtaaatgtgttcttggggagtgtaataactggaacagcattccaaca

SEQ ID NO: 26538 - DNA, 187 bp, Zea mays
caaggtcttgtgtgggatccacagaaggatgagtgaagaggataagactgctgcttctgctgagcagccgaagagggcccctaagctcaatgaaaggatcctctcttctctgtccaggaggtccgtagctgctcatccatggcatgatcttgagatcggtcctgatgctcctgctgttttcaatgtt

SEQ ID NO: 26539 - DNA, 245 bp, Zea mays
cagaaacacaccaagcgaacacattagcaacaacctaacaacaatggctaccaagatattatccctccttgcgcttcttgcgctttttgcgagtgcaacaaatgtgttcattattccacaatgctcacttgctccaagttccattattacacagttcctcccaccagttacttcaatgggcttcgaacacccagctgtgcaagcctataggctacaacaagctattgtggtgagcgtcttacaac

SEQ ID NO: 26540 - DNA, 238 bp, Zea mays
cttgggattaagagaaattcaggtttggaaagatgttgatggtgttttaacatgtgacccaaatatccatcctaaggcaaaacctgtgccatacttgacatttgatgaggcagctgaacttgcctattttggagcgcaggttttgcatccacaatcaatgcggccagctagagaaggcgatgtacctgtgagggttaagaattcttataaccgtcgagcccctggtacccttatcact

SEQ ID NO: 26541 - DNA, 246 bp, Zea mays
cttcttcccccataccttccatcaattatagcttcaatatgtgaaaacccagctcttcaaccatataggcttcaacaagcaatcgcagcaagcaacatacctttatcgcccttgttgtttcaacaatcgccagccctatctttggtgcagtcattggtacaaaccatcagggcacaacagctgcagcaactcgtgctacctctgatcaaccaagtagctctggcatacctttctccctactctcag

SEQ ID NO: 26542 - DNA, 149 bp, Zea mays
tgggtcgtcagcctagcaattagctcatcgactccagattggagaactcgacaccatgaaggtgctgatcgtagcccttgctctcctggcgctcgctgtgagtgtcgcctccagtacaagtggtggctgtggctgtcagacaccaccgt

SEQ ID NO: 26543 - DNA, 244 bp, Zea mays
gcccgtgccagctgcagggaacctgcggtgttggcagcaccccgatcctgggtcagtgcgtcgagttcctgaggcatcagtgcagcccgacggtgacgccctactgctcgcctcagtgccagtcgttgcggcagcagtgttgccagcagctcaggcaggtggagccgcagcaccggtaccaggcgatcttcggcttggtcctccagtccatcctgcagcagcagccgcaaagcggccaggtcgc

SEQ ID NO: 26544 - DNA, 245 bp, Zea mays
cccacttgctttggcaaacgtagctgcataccaacaacaacaacagttgcaacagtttctgccagcgctcagtcaactagccatggtgaaccctatcgcctacctacaacagcaacaacttctttcatctagcccgttcgctatgggcaatgcacctacatacctgcaacaacagttgttgcaacaacagttgctgcaacaaattgtaccagctcttactcagctagctgtggcaaaccctgctg

SEQ ID NO: 26545 - DNA, 244 bp, Zea mays
ctaacaatacaagccatcacaacgcaacagcaacaacagttcctaccagcactgagccacctagccatggtgaaccctgccgcctacttgcaagagcagctgcttgcatccaacccacttgctctggcgaacgtagttgcaaaccagcaacaacaacagctacaacagtttctgccaacgctcagtcaactagccatggtgaaccctgccgcctacgtacaacaacaacaactggtttcatcta

SEQ ID NO: 26546 - DNA, 243 bp, Zea mays
gaactgtatgtgccagataccgtggacgtggcgggtggcaaccgggcccagagatcatccgggtgctgttaaggcacgaggcatcacgaggcgttgtgaccatcatcgtcggttatgcagtgaccaaacaataccttagcattgctgggtttccgtggttatctacgtatccgtattccatttgttacctttccagtctcactgctatgtacccaatggcgcctgtcaattcggtggactttg

SEQ ID NO: 26547 - DNA, 180 bp, Zea mays
gagaccaacaagcaacatagaaagtggaatccagtagcaacaacagagcaacaatggcgaccaagatattttccctccttatgctccttgctctttctgcatgtgttgctaacgcgacaattttccctcaatgctcacaagctcctatagcttcccttcttcccccataccttccatcaa

SEQ ID NO: 26548 - DNA, 244 bp, Zea mays
cgcaacaaatgcgttcattattccacaatgctcacttgctccaagttccattattacacagttcctcccaccagttacttcaatgggcttcgaacacccagctgtgcaagcctataggctacaacaagcaattgcggcgagcgtcttacaacaaccaatttcccagttgcaacaacaatccttggcacatctaacaatacaaaccatcgcaacgcaacagcaacaacaattcctaccagcactg

SEQ ID NO: 26549 - DNA, 181 bp, Zea mays
gcaacatagaaagcacaatagtgtaccaacaatggcagccaaaatattttgcctccttatgctccttggtctttctgcaagtgctgctacggcgaccattttcccgcaatgctcgcaagctcctatagcttcccttcttcccccgtacctctcaccagcggtgtcttcggtatgtgtaaac

SEQ ID NO: 26550 - DNA, 247 bp, Zea mays
cgaggacgaggccgccccgcctccgagatacagcggtcgcatcgagctcgcgccagaggtttacaggatggacaagatcaaggcggagatgaagaacggcgtgctcaaggtggtcgtgccgaaggtgaaggagcagcagcgcaaggacgtgttccaagtcaacgtcgagtagatgtttccaaatagaagcaagtgccggtacgggatggaggattggaggggcactgccaaactaggatttctctct

SEQ ID NO: 26551 - DNA, 247 bp, Zea mays
gtacactagcaacatcttagcaccaatgggagccaagattttttccctccttgccctccttgctctttcagcaagcgctgctacctctactattattccacaatgctcacaacaatacctctctccggtgacagccgtgggatttcaacacccaactatacaatcctacatgctacatgaggccatcgtagcaagcatcttacggtcattagcattaaccctccaacagccatatgccctattgcaa

SEQ ID NO: 26552 - DNA, 247 bp, Zea mays
acgagggtgagcgcgcgaggaccaaggacaacaacctcctcggcaagttcgaactctccggcatccctcctgctccccgcggcgtgccccagatcacggttaccttcgacatcgatgccaacggcatcctcaacgtctctgccgaggacaagaccaccggccagaagaacaagatcacgatcaccaacgacaagggccggcttagcaaggaggagatcgagaagatggtgcaggaggctgagaagta

SEQ ID NO: 26553 - DNA, 258 bp, Zea mays
agcccgctggcggcggcgccctactacgccgggtgtgggcagccgagcgccatgttccagccgctccggcaacagtgctgccagcagcagatgaggatgatggacgtgcagtccgtcgcgcacagctgcagatgatgatgcagcttgagcgtgccgctgccgccagcagcagcctgtacgagccagctctgatgcagcagcagcagcagctgctagcagcccagggtctcaactccatggccatgatgatggcgcaga

SEQ ID NO: 26554 - DNA, 253 bp, Zea mays
agcaactgaaggagcttggcgacaaagtccccgctcctgtgaaagagaaggtggatgtgaagctccaggagctcaaagacgccatttctggtggatcaacacagagtatgaaagatgccatggctgctctgaaccaggaggtgatgcagattggccaggcaatgtataaccagcctggtgccagtgctgctgggcctactcctggtgctgaggccggacctacgcctggtaccggaccaacgcagaatgatgg

SEQ ID NO: 26555 - DNA, 246 bp, Zea mays
gtacatggagattactggcttcagtgctccagtaagagagcagatctacaagatagcttcagtgaacctatgctccaatatcactggtcaaatccttgcgagcctcgtcatgaatccaccaaaggttggagacgaatcatatgcttcctacaaggcagagaaagatggaatccttgagtctttagctcgtcgtgcaaaggcgttggaggatgcattcaacaagcttgagggattttcatgtaacaa

SEQ ID NO: 26556 - DNA, 245 bp, Zea mays
tcgaccgtggagagaagggcattggtgatgggacagtgagctatagaatggatgatgctgatgacatctacatgcggtcatggactggtaccatcattggccctcacaatactgtacatgagggtcgcatctaccagctgaagttgttttgtgacaaagactatccggagaagccaccatctgtcagattccactcaagaatcaacatgacatgcgttaatcacgagacaggaatggttgatcca

SEQ ID NO: 26557 - DNA, 244 bp, Zea mays
ttaatgataggcctctggaggaaaccgacattgttctctggtacgtgttctggctcacccatatccccaggctagaagatttgccagtcatgccggtgtagcacataggcttcatgctcatgctacatggattcttcaactgctcgccttctgacgacgtgcctcccagctcgtccgatgcggatgtcaaggaagccgagtcgcccaatgccatccagaatagcctcatatcgaagctgtgagc

SEQ ID NO: 26558 - DNA, 114 bp, Zea mays
actcggctccagcagacccatgcatcaaccagcatggactgtggatcgatggatgctgttactcctgtcaggatttgttctaagttaatcctaaggaaaaaatggtgcttcttg

SEQ ID NO: 26559 - DNA, 92 bp, Zea mays
tggacgtcagcctagcaattagctcatcgactccagattggagaactcgacaccatgaaggtgctgatcgttgcccttgctctcctggcgct

SEQ ID NO: 26560 - DNA, 248 bp, Zea mays
tccgtggaaaacctcaaccccaaggtcttaaaatgtgagtatgcagtccgtggggagattgtcatccatgctcagcgcctgcagcaacaactacaaacacaaccagggtctcttccttttgatgagatcctctattgcaatattgggaatccccaatctcttggtcagcaacctgtgacattcttcagggaggttcttgctctttgtgattatccgtgcctcttggaaaaagaggaaaccaaatcatt

SEQ ID NO: 26561 - DNA, 252 bp, Zea mays
caacaatacctctctccggtgacagccgcgagatttgaatacccaactatacaatcctacaggctacaagaggccatcgcagcaagcatcttacggtcgttagcattgaccgtccaacaaccatatgccctattgcaacaaccatccttaatgaatctatatctccaaagaatcgcagcacaacaactacgacaacagttgcttccaacaatcaatcaagtagttgcagcgaaccttgctgcttacctccag

SEQ ID NO: 26562 - DNA, 251 bp, Zea mays
gggtcttcagaccattagctttatctactccagagcgcagaagaacccgatcgacaccatgagggtgttgctcgttgccctcgctctcctggctctcgctgcgagcgccacctccacgcatacaagcggcggctgcggctgccagccaccgccgccggttcatctaccgccgccggtgcatctgccacctccggttcacctgccacctccggtgcatctcccaccgccggtccacctgccgccgccggtcc

SEQ ID NO: 26563 - DNA, 208 bp, Zea mays
aaccctgctgcctacttgcaacaactacttccattcaaccaactgactgtgtcgaactctgctgcgtacctacaacagcgacaacagttacttaatccactagcggtggctaacccattggtcgctgccttcctacagcagcaacaattgctgccatacaaccagttctctttgatgaaccctgccttgtcgtggcagcaaccatcgt

SEQ ID NO: 26564 - DNA, 223 bp, Zea mays
tgcttatttacagcagcaacaactactaccattcagccagctagctggtgtgagccctgctaccttcttgacacaaccacaattgttgccgttctaccagcacgctgcgcctaacgctggcaccctcttacaactgcaacaattgctgccattcaaccaacttgctttgacaaacccaacagcattctaccaacaacccatcattggtggtgccctctttaga

SEQ ID NO: 26565 - DNA, 249 bp, Zea mays
agaccaactagcaacatagaaagcacaatagtgtaccaacaatggcagccaaaatattttgcttccttatgctccttggtctttctgcaagtgctgctaccgcaaccattttcccacaatgctcacaagctcctatagcttcctttcttcccccatacctctcaccagcggtgtcttcagtatgtgaaaacccaattcttcaaccctacaggatccaacaggcaatcgcagcaggcatcttacctttat

SEQ ID NO: 26566 - DNA, 242 bp, Zea mays
attcctgttggtggtcttgcttactatgtaactgccccatcaagtttggctgatgtccttgcaaatccattccatgcactgttttatgtggtcttcatgctgtcagcctgtgctctgttctcaaagacatggattgaagtttctggttcatcagcaaaggatgttgctaagcagctcaaggaacaacaaatggtgatgccaggccatcgtgagtcgaacttgcagaaggaacttaaccgata

SEQ ID NO: 26567 - DNA, 247 bp, Zea mays
tcctgcagtccttcctgcagcagcagccgcagggcgatgctcgcggcgctgatatgcggcccatgtagcgcagcagctgacggcgatgtgcggcctgcagctgcagcagccaggtccctgcccttgcaacgcagctgccggcggtgtctactactgaggaaactatgtactgtagtaataatgtaatggagccgctggctagctacctagctcgctagtttactcatttagctgcgatgagtaacgt

SEQ ID NO: 26568 - DNA, 241 bp, Zea mays
ctctcggccaggtctccctctccccggctctccgccttcctcttccagtccccgcgcgcgagatcgccgccccgtgtgggccctagatcccgatggcctcgcgccgccgcaccctgctcaaggtcatcatcctcggcgatagtggggttgggaagacttccttgatgaaccaatatgtgaacaagaagttcagcaatcagtacaaggctacgatcggcgcggatttcctcaccaatgaggt

SEQ ID NO: 26569 - DNA, 237 bp, Zea mays
cgcagtccttcctgcagcagacccgcaggcgagctcgcggcgctgatggcggcccatgtagcgacagctgacggcgatgtgcggcctgcagctgcagcagccaggtccctgcccttgcaacgcagctgccggcggtgtctactactgaggaaactatgtactgtagtaataatgtaatggagccgctgactagctacctatagggctatagctagttcactcgtttagcggcgatga

SEQ ID NO: 26570 - DNA, 240 bp, Zea mays
atccaggacaaagagggcatccccccagaccagcagcgtctgatcttcgctggcaagcagctggaggatggccgcaccctagcagactacaacatccagaaggagagcactctccacctggtgctccgcctccgtggtggtcagtaagccatggttcatttaagctgctgctgtacctgggtatctgcgtcgtctggtgccctctggtgtacctctatatggatgtcgtcgtctaataaa

SEQ ID NO: 26571 - DNA, 166 bp, Zea mays
acaattgctgccatacaaccagttctctttgataaaccctgtcttgtcgaggcagcaacccatcgttggaggtgccatcttttagattacatatgagatgtactcgataatggtgccctcattccggcatgtgtttcctagaaataatcaatatattgattgagat

SEQ ID NO: 26572 - DNA, 247 bp, Zea mays
acaagcaattgcggcgagcgtcttacaacaaccaatttcccagttgcaacaacaatccttggcacatctaacaatacaaaccatcgcaacgcaacagcaacaacaattcctaccagcactgagccacctagccatggtgaaccctgccgcctacttgcaacagcagttgcttgcatcaaacccacttgctctggcaaacgtagttgcaaaccagccacaacaacagctgcaacagtttctgccagcg

SEQ ID NO: 26573 - DNA, 102 bp, Zea mays
cagtaccagctgcccagctaccgcaccaacccctgtggcgtctccgctgccattccgccctactactgattcatgatatttgggaaatctcctctatcgatg

SEQ ID NO: 26574 - DNA, 247 bp, Zea mays
aaagcggcagtgcgtagagaggatcgtcgaacagaacagcatgaagatggtcatcgttctcgtcgtgtgcctggctctgtcagctgccagcgcctctgcaatgcagatgccctgcccctgcgcggggctgcagggcttgtacggcgctggcgccggcctgacgacgatgatgggcgccggcgggctgtacccctacgcggagtacctgaggcagccgcagtgcagcccgctggcggcggcgccctac

SEQ ID NO: 26575 - DNA, 247 bp, Zea mays
cgcactctcgcggactacaacatccagaaggagagcacccttcaccttgttctccgcctcaggggtggtatgcagatctttgtgaagaccctgactggaaaaaccataaccctggaggttgagagctcggacaccatcgacaatgtgaaggcgaagatccaggacaaggagggcatcccctcggaccagcagcgtctgatcttcgccggcaaacagctggaggatggccgcaccctagcagactaca

SEQ ID NO: 26576 - DNA, 246 bp, Zea mays
ccctataggatccaacaggcaatcgcagctggcatcttacctttatcacccttgttcctccaacaatcatcagccctattacagcagttacctttggtgcatttattggcacaaaacatcagggcacaacaactacaacaacttgtgctagcaaaccttgctgcctactctcagcaacaacagtttcttccattcaaccaactagctgcattgaactctgcttcttatttgcaacaacaacaacta

SEQ ID NO: 26577 - DNA, 243 bp, Zea mays
gcaacatagaaagcacaatagtgtaccaacaatggcagctaaaatattttgcctccttatgctccttggtctttctgcaagtgctgctacggcgaccattttcccacaatgctcacaagctcctatagcttcccttcttcccccgtacctctcaccaacggtgtcttcggtatgtgaaaacccaattcttcaaccctacaggatccaacaggcaatcgcagctggcatcttacctttatcacc

SEQ ID NO: 26578 - DNA, 243 bp, Zea mays
gctgtgcaagcctacaggctacaacaagcgcttgcggcgagcgtcttacaacaaccaattaaccaattgcaacaacaatccttggcacatctaaccatacaaaccatcgcaacacaacagcaacaacagttcctaccagcactgagccaactagatgtggtgaaccctgtcgcctacttgcaacagcaggtgcttgcatccaacccacttgctctggcaaacgtagctgcataccaacaacaa

SEQ ID NO: 26579 - DNA, 239 bp, Zea mays
attggagaactcgacaccatgaaggtgctgatcgttgcccttgctctcctggcgctcgctgcgagtccgcctccagtacaagcggcggctgtggctgccagacaccaccgtttcatctaccgcctccgttctatatgccgcctccgttctatctagacgccgcagcagcagccgcagccatggcaataccccactcaaccaccgcagctaagcccgtgccagcagttcggatcctgcgg

SEQ ID NO: 26580 - DNA, 239 bp, Zea mays
agctcatcgactccagattggagaactcgacaccatgaaggtgctgatcgttgcccttgctctcctggcgctcgctgcgagcgccgcctccagtacaagcggcggctgtggctgccagacaccaccgtttcatctaccgcctccgttctatatgccgcctccgttctatctgccgccgcagcaacagccgcagccatggcaataccccactcaaccaccgcagctaagcccgtgccagc

SEQ ID NO: 26581 - DNA, 235 bp, Zea mays
cggcagtgcgtagagaggatcgtcgaacagaacagcatgaagatggtcatcgttctcgtcgtgtgcctggctctgtcagctgccagcgcctctgcaatgcagatgccctgcccctgcgcggggctgcagggcttgtacggcgctggcgccggcctgacgacgatgatgggcgccggcgggctgtacccctacgcggagtacctgaggcagccgcagtgcagcccgctggcggcgg

SEQ ID NO: 26582 - DNA, 237 bp, Zea mays
cgaagcggatgccatggaggagaaggcgggagtgcttgatgagtaagacgggcttctggggtcgatttgcttctgagttgtatattttatatcgtcgcaatttcgtggttgtcgtttggttattctgtgaagcagccaagccaggctattgttatgaaaatttgtcgtctgtacgcatgtgaacttccgatgttgccacatgctggatcagtctgaataagtaagtatgcagctcta

SEQ ID NO: 26583 - DNA, 238 bp, Zea mays
cgtgcattaagaataagtgatttcatacatgcgcatgaacaggtgtgtgcaagtgtttcctcagattccagtaacatgaacgagcttgtgcaatggaatgatctctatggagaaggcgggtcaaggaaaaagacaacgctaagctacttcatgtagctgatgttgcaagtatatcgggagaagtgccctggcacaaagcagaaatggttggaggcagttgggggtgtgtatcgggtgc

SEQ ID NO: 26584 - DNA, 245 bp, Zea mays
cttgctcctagtgccagtattccacagttcctcccaccagttacttcaatgggcttcgaacatccagccgtgcaagcctacaggctacaactagcgcttgcggcgagcgccttacaacaaccaattgcccaattgcaacaacaatccttggcacatctaaccctacaaaccattgcaacgcaacaacaacaacaacagtttctgccatcactgagccacctagccgtggtgtacgctgtcaccta

SEQ ID NO: 26585 - DNA, 247 bp, Zea mays
acaaaacatcagggcacaacaactacaacaacttgtgctagcaaaccttgctgcatactctcagcaacatcagtttcttccattcaaccaactggctgcattgaactctgctgcttatttgcaacaacaattaccattcagccagctagttgctgcctacccccagcaatttcttccattcaaccaactagcagcattgaactctgctgcttatttacagcagcaacaactactaccattcagccag

SEQ ID NO: 26586 - DNA, 278 bp, Zea mays
gcgagttgacgctgttgtggtggatgaggaggcgattggttccgttgataggccaggttgtggggctaaaattctccgaggggatggtgcattggaccagtacataacaagaaccaatgtgatgaatttacaggaaactaacgatggtttggccggggagctcgaggaagcgtacatgctgtctagaattgttagcttgtaatttgaaaggctggggaggaagcgtatatgctgagttctgaccaacttcgtacatcgtgtaacatgtctaccccaac

SEQ ID NO: 26587 - DNA, 275 bp, Zea mays
cagcaaagcggcagtgcgtagagaggatcgtcgaacagaacagcatgaagatggtcatcgttctcgtcgtgtgcctggctctgtcagctgccagcgcctctgcaatgcagatgccctgcccctgcgcggggctgcagggcttgtacggcgctggcgccggcctgacgacgatgatgggcgccggcgggctgtacccctacgcggagtacctgaggcagccgcagtgcagcccgctggcggcggcgccctactacgccgggtgtgggcagccgagc

SEQ ID NO: 26588 - DNA, 276 bp, Zea mays
cagcagttacctttggtgcatttgttggcacaaaacatcaaggcacaacaactacaacaacttgtgctaggaaaccttgctgcctactctcagcaacagcagtttcttccattcaaccaactggctgcattgaactctgctgcttatttgcaacaacaactaccattcagtcagctagctgctgcctacccccagcaatttcttccattcaaccaactggcagcattgaactctgctgcttatttacaacagcaacagctaccaccattcagccag

SEQ ID NO: 26589 - DNA, 275 bp, Zea mays
caaagcggcagtgcgtagagaggatcgtcgaacagaacagcatgaagatggtcatcgttctcgtcgtgtgcctggctctgtcagctgccagcgcctctgcaatgcagatgccctgcccctgcgcggggctgcagggcttgtacggcgctggcgccggcctgacgacgatgatgggcgccggcgggctgtacccctacgcggagtacctgaggcagccgcagtgcagcccgctggcggcggcgccctactacgccgggtgtgggcagacgagcgcc

SEQ ID NO: 26590 - DNA, 276 bp, Zea mays
cgtcacctagcaattagctcatcgactccagattggagaactcgacaccatgaaggtgctgatcgttgcccttgctctcctggcgctcgctgcgagcgccgcctccagtacaagcggcggctgtggctgccagacaccaccgtttcatctaccgcctccgttctatatgccgcctccgttctatctgccgccgcagcagcagccgcagccatggcaataccccaatcaaccaccgcagctaagcccgtgccagcagttcggatcctgcggcgtcgg

SEQ ID NO: 26591 - DNA, 273 bp, Zea mays
ccaactagcaacatagaaagcacaatagtgtaccaacaatggcagccagaatattttgcctccttatgctccttggtctttctgcaagtgctgctacggcgaccattttcccgcaatgctcgcaagctcctatagcttcccttcttcccccgtacctctcaccagcggtgtcttcggtatgtgaaaacccaattcttcaaccctacaggatccaacaggcaatcgcagctggcatcttacctttatcacccttgttcctccaacaatcatcag

SEQ ID NO: 26592 - DNA, 271 bp, Zea mays
cgcaacaacaacaacaacaacagtttctgccatcactgagccacctagccgtggtgaaccctgtcacctacttgcaacagcagctgcttgtcatccaacccacttgctctggcgaacgtagctgcataccagcaactacaacagctgcaacagtttatgccagtgctcagtcagctagccatggcgaaccctgccgtctatctacaactactttcatctatcccgctcgcggtgggcaatgcacctacgtacctacgacaacagttgctgc

SEQ ID NO: 26593 - DNA, 273 bp, Zea mays
cacatatctactatactatactctaggaagcaaggacaccaccgccatggcagccaagatgcttgcattgttcgctctcctagctctttgtgcaagcgccactagtgcgacccatattccagggcacttgccaccagtcatgccattgggtaccatgaacccatgcatgcagtactgcatgatgcaacaggggcttgccagcttgatggcgtgtccgtccctgatgctgcagcaactgttggccttaccgcttcagacgatgccagtgatgat

SEQ ID NO: 26594 - DNA, 274 bp, Zea mays
gcagctgcagcaactcgtgctacctgtgatcaaccaagtagctctggcaaacctttctccctactatcagcaacaacaatttcttccattcaaccaactatctacactgaaccctgctgcttatttgcagcaacaactattaccattcagccagctagctactgcctactctcatcaacaacaacttcttccatttaaccaattggccgcactgaacctcgctgcttatttgcagcagcaaatattactaccatttagccagctagctgcagca

SEQ ID NO: 26595 - DNA, 274 bp, Zea mays
ctttggtgcatttgttggcacaaaacatcaaggcacaacaactacaacaacttgtgctaggaaaccttgctgcctactctcagcaacagcagtttcttccattcaaccaactggctgcattgaactctgctgcttatttgcaacaacaactaccattcagtcagctagctgctgcctacccccagcaatttcttccattcaaccaactggcagcattgaactctgctgcttatttacaacagcaacagctaccaccattcagccagctagctga

SEQ ID NO: 26596 - DNA, 232 bp, Zea mays
caatggtattgcatcgatggatcgtgtaaccttggtatggtaagagccgcttgacaggaagtcgagcgttcgggcgcaagatgcgttgtctggcatgctgttccttgaccatttgtgctgctagtatgtactgttataagctgccctagaagttgcagcaaacctttttatgaacctttgtatttccattacctgctttggatcaactatatctgtcatcctatatattact

SEQ ID NO: 26597 - DNA, 280 bp, Zea mays
acatagaaagcacaatagtgtaccaacaatggcagccaaaatattttgcttccttatgctccttggtctttctgcaagtgttgctaccgcaaccattttcccacaatgctcacaagctcctatagcttcccttcttcccccatacctctcaccagcggtgtcttcaatgtgtgaaaccccaattgttcaaccctacaggatccaacaggcaatcgcaacaggcatcttaccattatcacccttgttcctccaacaaccgtcagccctattacagcagtta

SEQ ID NO: 26598 - DNA, 279 bp, Zea mays
ttcagaaacacaccaagcgaacgtcactagcaacgacctaacaacaatggctaccaagatattagccctccttgcgcttcttgccctttttgtgagcgcaacaaatgcgttcattattccacaatgctcacttgctcctagtgccattattccacagttcctcccaccagttacttcaatgggcttcgaacacctagctgtgcaagccaacatgcaacaacaagcgcttgcggcgagcgtcttacaacaaccaattgcccaattgcaacaacaatcctt

SEQ ID NO: 26599 - DNA, 106 bp, Zea mays
ctagcaacatagagagcacaatagtgtaccaacgatggcagccaaaatattttgcttccgtatgctccttggtctttctgcaagtgctgctaccgcaaccattttc

SEQ ID NO: 26600 - DNA, 272 bp, Zea mays
cggaaaggggaagatgagccggagcctggggatcccggtgaagttgctccatgaggcagcgggtcacgtggtgacggtggagctcaagaccggcgaagtgtaccgggggtcattggtcgagtgcgaggataactggaattgccagctcgagaacataaccttcactgccaaggatgggaaggtttcgcagctggagcacgtcttcatcagaggaagcagagtgagatttatgattatacctgatatgctcaagaacgctcccatgttcaagc

SEQ ID NO: 26601 - DNA, 270 bp, Zea mays
gaaagtggaatccagtagcaacaatagagcaacaatggcgaccaagatattttccctccttatgctccttgctctttctacatgtgttgctaacgcgacaattttccctcaatgctcacaagctcctatagcttcccttcttcccccataccttccatcaattatagcttcaatatgtgaaaacccagctcttcaaccatataggcttcaacaagcaatcgcagcaagcaacatacctttatcgcccttgttgtttcaacaatcgccagc

SEQ ID NO: 26602 - DNA, 268 bp, Zea mays
ccccttgagaagaggcagtctgaggctaatcggatcagagagaagtaccctgacagaattccagtgattgttgagaaggctgagaggagtgacattcctgacatcgacaagaaaaagtacctcgtccctgctgatcttacggttggacaattcgtgtatgttgttaggaagagaatcaagctcagtgctgagaaagctatcttcatctttgtgaagaacacccttccaccaacagctgctctgatgtcttcaatctatgaagagaaca

SEQ ID NO: 26603 - DNA, 267 bp, Zea mays
ctatcgcctacctacaacagcaacaacttctttcatctagcccgctcgctatgggcaatgcacctacatacctgcaacaacagttgttgcaacaacagttgctgcaacaaattgtaccagctcttactcagctagctgtggcaaaccctgctgcctacttgcaacaactacttccattcaaccaactgactgtgtcgaactctgctgcgtacctacaacagcgacaacagttacttaatccactagcggtggctaacccattggtcg

SEQ ID NO: 26604 - DNA, 269 bp, Zea mays
agctcatcgactccagattggagaactcgacaccatgaaggtgctgatcgttgcccttgctctcctggcgctcgctgcgagcgccgcctccagtacaagcggcggctgtggctgccagacaccaccgtttcatctaccgcctccgttctatatgccgcctccgttctatctgccgccgcagcagcagccgcagccatgagcataccccactcaaccaccgcagctaagcccgtgccagcagttcggatcctgcggcgtcggcagcgtcg

SEQ ID NO: 26605 - DNA, 268 bp, Zea mays
atggccgcacccttgcggattacaacatccagaaggagagcactctccacctggtgctccgcctcaggggtggcatgcagatttttgtgaagacattgactggcaagaccatcaccttggaggtggagagctctgacaccattgacaatgtgaaggccaagatccaggacaaggagggcattcccccagaccagcagcgtctgatctttgcgggcaagcagctggaggatggccgcactctcgcggactacaacatccagaaggagag

SEQ ID NO: 26606 - DNA, 266 bp, Zea mays
cagaaacacaccaagcgaacacattagcaacaacctaacaacaatggctaccaagatattatccctccttgcgcttcttgcgctttttgcgagcgcaacaaatgcgttcattattccacaatgctcacttgctccaagttccattattacacagttcctcccaccagttacttcaatgggcttcgaacacccagctgtgcaagcctataggctacaacaagcaattgcggcgagcgtcttacaacaaccaatttcccagttgcaac

SEQ ID NO: 26607 - DNA, 269 bp, Zea mays
ccctactctcagcaacaacaatttcttccattcaaccaactgtctacactgaaccctgctgcttatttgcagcaacaactattaccatttagccagctagctactgcctactctcagcaacaacaacttcttccatttaaccaattggccgcactgaaccccgctgcttatttgcagcagcaaatactactaccatttagccagctagctgcagcaaaccgtgcttccttcttgacacagcaacagttgctgcctttctaccagcagtt

SEQ ID NO: 26608 - DNA, 267 bp, Zea mays
atcagcaaagcggcagtgcgtagagaggatcgtcgaacagaacagcatgaagatggtcatcgttctcgtcgtgtgcctggctctgtcagctgccagcgcctctgcaatgcagatgccctgcccctgcgcggggctgcagggcttgtacggcgctggcgccggcctgacgacgatgatgggcgccggcgggctgtacccctacgcggagtacctgaggcagccgcagtgcagcccgctggcggcggcgccctactactccgggtgtgg

SEQ ID NO: 26609 - DNA, 263 bp, Zea mays
gaaacttggaagatgggtgatattgtgcacacactgacaaataggaggtggttagagaagtgtgtaacttatgctgaaagtcatgatcaagcattagtcggcgacaagactattgcgttttggttgatggacaaggatatgtatgatttcatggccctcgatagaccttcaactcctaccattgatcgtgggatagcattacataagatgattagacttatcacaatgggtttaggaggagagggctatcttaatttcatggg

SEQ ID NO: 26610 - DNA, 253 bp, Zea mays
cttcttcccccataccttccatcaatgatagcttcagtatgtgaaaacccagctcttcagccctataggctccaacaagcaatcgcagcaagcaacatacctttatcacccttgttgtttcaacaatcgccagccctatctttggtgcagtcattggtacaaaccatcagggcacagcagctgcagcaactcgtgctacctgtgatcaaccaagtagctctggcaaacctttctccctactctcagcaacaac

SEQ ID NO: 26611 - DNA, 262 bp, Zea mays
cggcagcgtcggcagcccgttcctgggccagtgcgtcgagttcctgaggcaccagtgcagcccggcggcgacgcctacggctcgccacagtgccaggcgctgcagcagcagtgctgccaccagatcaggcaggtggagccgctgcaccggtaccaggcgacatacggtgtggtcctgcagtccttcctgcagcagcagccgcaaggcgagctcgcggcgctgatggcggcccaggtagcgcagagctgacggcgatgtgcgg

SEQ ID NO: 26612 - DNA, 261 bp, Zea mays
tagcaacatagatagcacaatagtgtaccaacaatggcagccaaaatattttgcttccttatgctccttggtctttctgcaagtgctgctaccgcaaccattttcccacaatgctcacaagctcctatagcttcctttcttcccccatacctctcaccagcggtgtcttcagtatgtgaaaacccaattcttcaaccctacaggatccaacaggcaatcgcagcaggcatcttacctttatcacccttgttcctccaacaa

SEQ ID NO: 26613 - DNA, 263 bp, Zea mays
agaagcacccgatcgacaccatgagggtgttgctcgttgccctcgctctcctggctctcgctgcgagcgccacctccacgcatacaagcacaggctgccgctgccatccaccgccgccggttcatctaccgccgccggtgcatctgccacctccggttcacctgccacctccggtgcatctcccaccgccggtccacctgccgccgccggtccacctgccaccgccggtccatgtgccgccgccggttcatctgccgccgcca

SEQ ID NO: 26614 - DNA, 260 bp, Zea mays
attttgagcattcagaaacacaccaagcgaacgcactagcaacgacctaacaacaatggctaccaagatattagccctccttgcgcttcttgccctttttgtgagcgcaacaaatgcgttcattattccacaatgctcacttgctcctagtgccattattccacagttcctcccaccagttacttcaatgggcttcgaacacctagctgtgcaagccaacatgcaacaacaagcgcttgcggcgagcgtcttacaacaac

SEQ ID NO: 26615 - DNA, 261 bp, Zea mays
gtcttcctctccggtggacagagcgaggaggaggccaccctgaatctcaatgccatgaacaagctcagcaccaagaagccatgggccctgtccttctccttcggccgtgccctccaggcgagcaccctcaaggcctgggctggcaaggtggagaacgtggagaacgctagagcggccttcctcgccaggtgcaaggccaactccgaggctaccctcggcacctacaagggtgatgctgccgccgacaccgagagccttcac

SEQ ID NO: 26616 - DNA, 262 bp, Zea mays
cctccaccttgtgctccgtctcaggggaggcatgcagatctttgtgaaaaccctgaccggcaagactatcaccctcgaggtggagtcctctgacaccattgacaacgtcaacgccaagatccaggacaaggagggcatccctccagaccagcagcggctcatctttgctgggaagcagcttgaggacgggcgcacgcttgacgactacaacatccagaaggagagcaccctccacttggtgctgcgcctcaggggatgcatg

SEQ ID NO: 26617 - DNA, 262 bp, Zea mays
aagcaacatagaaagtggaatacagtagcaaaaatagagcaacaatggcggccaagatattttccatccttatgctccttgctctttctgcatgtgttgctaacgcgaccatttttcctcaatactcacaagctcctatagctgcccttcttcccccataccttccatcaatgaccgctttagtatgtgaaaacccagcccttcaaccctacaggatccagcaagcaatcgcaacaagcaacttacctttatcacacctgtt

SEQ ID NO: 26618 - DNA, 262 bp, Zea mays
ccggttcatctgccgccgccaccatgccactaccctactcaaccgccccggcctcagcctcatccccagccacacccatgcccgtgccaacagccgcatccaagcccgtgccagctgcagggaacctgcggcgttggcagcaccccgatcctgggccagtgcgtcgagttcctgaggcatcagtgcagcccgacggcgacgccctactgctcgcctcagtgccagtcgttgcggcacagtgttgccagcagctcaggcaggt

SEQ ID NO: 26619 - DNA, 249 bp, Zea mays
ctggacgtcagcctagcaattagctcatcgactccagattggagaactcgacaccatgaaggtgctgatcgttgcccttgctctcctggcgctcgctgcgagcgccgcctccagtacaagcggcggctgtggctgccagacaccaccgtttcatctaccgcctccgttctatatgccgcctccgttctatctgccgccgcagcagcagccgcagccatggcgatagcccactcaaccaccgcagctaag

SEQ ID NO: 26620 - DNA, 263 bp, Zea mays
ccagtatcaacaatagatcaacaatggcgaccaagatattttccctccttatgctccttgctctatctacatgtgttgctaacgctacaattttccctcaatgctcaacaagcaatcgcagcaagcaacatacctttatcgcccttgttgtttcaacaatcgccagccctatctttggtgcagtcattggtacaaaccatcagggcacaacagctgcagcaactcgtgctacctctgatcaaccaagtagctctggcaaacct

SEQ ID NO: 26621 - DNA, 263 bp, Zea mays
caatatcagcagggccaggaaaaatcacaacagcaacaatgtcattgccaggagcagcaacagactacaaggtgcagctataactactatagcagtagctcaaatctaaaaaattgtcatgaattcctaaggcagcagtgcagccctttggtaatgccttttctccaatcacgtttgatacaaccaagtagctgccaggtattgcagcaacaatgttgtcatgatcttaggcagattgagccacaatacattcaccaagcaat

SEQ ID NO: 26622 - DNA, 261 bp, Zea mays
agctttatcaattgcaagtggagttttagtcccagaggttgatgctgttgttgctttctatgggacaccatcttctgagcttgctgatccttctaaggctaaggctcctatacaggctcatttcggggagcatgacaattttgttggtttttcagatgtcactgcagccaagtccctggaggagaagctcaaatcttccgggatatcatatgaagttcacatataccctggatgttcgcatgccttcatgaacacttcgcc

SEQ ID NO: 26623 - DNA, 261 bp, Zea mays
gcctgcagcaaggtcaactgttcctggaggtcctagtgtggcctgcagcactgccaaagctgttgaatgggacgcatcctggtccaagaaccttgatccttctggccgtgctgctttgggtgttcacgatgctgcgtatgaagacactgcagggaaaactcctgcctctgctgatcctgtctcagacaagggccttcgtccagctattggcgaaagcctagggacacccgttgcttcagccacagctgtctaaccttatgt

SEQ ID NO: 26624 - DNA, 261 bp, Zea mays
gagacaaaatcagagattttgcagaatctagctgagttccagttttcttgtgtcctgtacaatggtgccctagagaatgcatgcagtgagcttggagcccgtatgtctgccatggacagctctagcagaaatgctggcgatatgcttgatcgtctcactctcacttacaacaggacacgccaagcatccatcaccacagagcttactgagattatatctggtgcatcggcccttgaggggtagtgaagagactgcggactt

SEQ ID NO: 26625 - DNA, 260 bp, Zea mays
gttaccgctctcttggttttcgttttggtgatgtatgctatataagtgatgtcagtgatatacccgaagaaacatacaagcttctggaaaactgtgaacttcttataatggatgctctaagacctgatcgttcttcatcaacacacttcggactaccaagggctcttgaggaagttaggaaaatcaaaccaacgaaaacactgtttactggaatgatgcatttgatggaccatgagaaagtaaacagtgatcttgccagg

SEQ ID NO: 26626 - DNA, 258 bp, Zea mays
gcgtacagaggatcgtcgaacagaacagcatgaagatggtcatcgttctcgtcgtgtgcctggctctgtcagctgccagcgcctctgcaatgcagatgccctgcccctgcgcggggctgcagggcttgtacggagctggcgccgcctgacgacgatgatgggcgccggcgggctgtacccctacgcggagtacctgaagcagccgcagtgcagcccgctggcggcggcgccctactacgccgggtgtgggcagacgag

SEQ ID NO: 26627 - DNA, 262 bp, Zea mays
caaatgcgttcattattccacagtgctcacttgctcctagtgccattattccacagttcctcccaccagttacttcaatgggcttcgaacatccagccgtgcaagcctacaggctacaactagcgcttgcggcgagcgccttacaacaaccaattgcccaattgcaacaacaatccttggcacatctaaccctacaaaccattgcaacgcaacaacaacaacaacaacagtttctgccatcactgagccacctagccgtggt

SEQ ID NO: 26628 - DNA, 260 bp, Zea mays
tgagcattcagaaacacaccaagcgaagctactagcaacgacctaacaacaatggctaccaagatattagccctccttgcgcttcttgccctttttgtgagcgcaacaaatgcgttcattattccacaatgctcacttgctcctagtgccattattccacagttcctcccaccagttacttcaatgggcttcgaacacctagctgtgcaagccaacatgcaacaacaagcgcttgcggcgagcgtcttacaacaaccaat

SEQ ID NO: 26629 - DNA, 121 bp, Zea mays
caacaacccatcattggtggtgccctcttttagatttcttatgagttatagttcaataataaagttttttgtctgatgtttgtggcttcccagaaataagaaagtacatttctagattctt

SEQ ID NO: 26630 - DNA, 258 bp, Zea mays
tgccgctgccgccagcagcagcctgtacgagccagctctgatgcagcagcagcagcagctgctggcagcccagggtctcaaccccatggccatgatgatggcgcagaacatgccggccatgggtggactctaccagtaccagtaccagctgcccagctaccgcaccaacccctgtggcgtctccgctgccattccgccctactactgattcatgatatttgggaaatctcctctatccatccctctctatctatatat

SEQ ID NO: 26631 - DNA, 260 bp, Zea mays
acatcagttacctttggtgcatttattggcacaaaacatcagggcacaacaactacaacaacttgtgctagcaaaccttgctgcctactctcagcaacagcagtttcttccattcaaccaactagctgcattgaactctgcttcttatttgcaacaacaacaactaccattcagccagctacctgctgcctacccccagcaatttcttccattcaaccaactggcagcattgaactctcctgcttatttacagcagcaac

SEQ ID NO: 26632 - DNA, 259 bp, Zea mays
agaggatcgtcgaacagaacagcatgaagatggtcatcgttctcgtcgtgtgcctggctctgtcagctgccagcgcctctgcaatgcagatgccctgcccctgcgcggggctgcagggcttgtacggcgctggcgccggcctgacgacgatgatgggcgccggcgggctgtacccctacgcggagtacctgatgcagccgcagtgcagcccgctggcggcggcgccctactacgccgggtgtgggcagccgagcgccat

SEQ ID NO: 26633 - DNA, 155 bp, Zea mays
gtaagcatgtgaacttccgacgttgccacatgctggatcagtctgaataagtaagtatgcagctctaggtggtcagctgcgtctaccacaatgagcatgtacgtatggagaaatatctgtgaacccattttgtttatgaataagatttgtttttt

SEQ ID NO: 26634 - DNA, 258 bp, Zea mays
ccttgctgcatactctcagcaacatcagtttcttccattcaaccaactggctgcattgaactctgctgcttatttgcaacaacaattaccattcagccagctagttgctgcctacccccagcaatttcttccattcaaccaactagcagcattgaactctgctgcttatttacagcagcaacaactactaccattcagccagctagctgatgtgagccctgctgccttcttgacacaacaacagttgttgccgttcta

SEQ ID NO: 26635 - DNA, 257 bp, Zea mays
atcagctgctcttctccctcctgctctcccgcaaggacgacgtgatccccaccttccgctccaacttctcctcgctcctcgccaccgtggaggcggagctggccaagggcggcaaggccgagttcaacaagctcaacgacgtcacctccttcgacttcatcggcgaggcctacttcggcgtgcgcccctcggcgaccgagctcggcaagggcgggccgagcaatgcggccaagtggctcatctggcagctccacccg

SEQ ID NO: 26636 - DNA, 258 bp, Zea mays
gatcaatatcatgatgaccaaggtgaaccatactggcaaagtgtaccacatgagggccaagcggcaaatggctcaaagcctcggccagattgcgaagttcaaacgtcgatatgagcaggaagcagaggaaagcaaagacaagtaggatggtgttgggaaggaggtgtagcctctgtggtcatagtcagttgtgttgactgcgaagttttcagctaaggaatttcgattgaatgattttattttagatcacatcatctt

SEQ ID NO: 26637 - DNA, 256 bp, Zea mays
gcacaatagtgtaccaacaatggcagccaaaatattttgcctccttatgctccttggtctttctgcaagtgctgctacggcgaccattttcccgcaatgctcgcaagctcctatagcttcccttcttcccccgtacctctcaccagcggtgtcttcggtatgtgaaaacccaattcttcaaccctacaggatccaacaggcaatcacagctggcatcttacctttatcacccttgttcctccaacaatcatcagcc

SEQ ID NO: 26638 - DNA, 257 bp, Zea mays
attgggtaccatgaacccatgcatgcagtactgcatgatgcaacaggggcttgccagcttgatggcgtgtccgtccctgatgctgcagcaactgttggccttaccgcttcagacgatgccagtgatgatgccacagatgatgacgcctaacatgatgtcaccattgatgatgccgagcatgatgtcaccaatggtcttgccgagcatgatgtcgcaaatgatgatgccacaatgtcactgcgacgccgtctcgcaga

SEQ ID NO: 26639 - DNA, 256 bp, Zea mays
atcgactccagattggagaactcgacaccatgaaggtgctgatcgttgcccttgctctcctggcgctcgctgctaggccgcctccagtacaagcggcggctgtggctgccatacaccaccgtttcatctaccgcctccgttctatatgccgcctccgttctatctgccgccgcagcaggctccgcatccatggcaataccccactcaaccaccgcagctaagcccgtgccagcacttcggatcctgcggcgtcggc

SEQ ID NO: 26640 - DNA, 256 bp, Zea mays
ctagcaacgacttaacaacaatggctaccaagatattagccctccttgcgcttcttgccctttttgtgagcgcaacaaatgcgttcattattccacaatgctcacttgctcctagtgccattataccacagttcctccgaccagttacttcaatgggcttcgaacacctagctgtgcaagcctacaggctacaacaagcgcttgcggcgagcgtcttacaacaaccaattaaccaattgcaacaacaatccttggc

SEQ ID NO: 26641 - DNA, 257 bp, Zea mays
gagagagagagaagagagagagaagagagagagagagagaggagtgggagacccgcgagaggctgccgtgtagggaccgtagactcagcgactgcgaaggagggataaggggatggccgggatcggaccgatcaggcaggactgggagccggtcgttgtgcggaagaaggcacccaccgccgccgccaagaaggatgagaaggccgtcaacgccgcgcgccgcgccggtgcggagatcgataccatgaagaagtaca

SEQ ID NO: 26642 - DNA, 256 bp, Zea mays
tcgagatgtacggcaagaacgcgcgcctgagggagctggcgaacctcgtgatcgttgccggtgaccacggcaaggagtccaaggacagggaggagcaggcggagttcaagaagatgtacagcctcatcgacgagtacaagttgaagggccatatccggtggatctcggcgcagatgaaccgcgtccgcaacggggagctgtaccgctacatttgcgatacgaagggcgcattcgtgcagcctgcgttctacgaagc

SEQ ID NO: 26643 - DNA, 254 bp, Zea mays
cgcaaatgctggattagagtcatcccgtgttgatttctatgagattaatgaagccttttcggctgttgcgcttgcaaatcaaaaacttcttggaattccttcagaaaagattaatgttcatggaggagctgtatccttaggacatcctctcgggtgcagtggtgctcgcattttggttacccttattggtgttctcagggcgaagagtggcaagatcggagttgctggtgtctgcaacggtggaggcggacatc

SEQ ID NO: 26644 - DNA, 251 bp, Zea mays
tgagaccaacaagcaacatagaaagtggaatccagtagcaacaacagagcaacaatggcgaccaagatattttccctccttatgctccttgctctttctgcatgtgttgctaacgcgacaattttccctcaatgctcacaagctcctatagcttcccttcttcccccataccttccatcaatgatagcttcagtatgtgaaaacccagctcttcagccctataggctccaacaagcaatcgcagcaagcaa

SEQ ID NO: 26645 - DNA, 252 bp, Zea mays
gcaagacaacaatgtgccttacaatgtgctcatttctgactgtggcaagagggttttcctgttcccccagtgctacgcagagaagcaggctctgggtgaagtgagccaggagctgctggacactcaggtgaacccagctgtgtgggagatcagtggacacatggtgctgaaacggaggatggactatgaggaggcatctgaaacctccgcgtggaaactcctcgccgaggtctctctctccgaggagcgctt

SEQ ID NO: 26646 - DNA, 252 bp, Zea mays
cgctgcttatttgcagcagcaaatactactaccatttagccagctagctgcagcaaaccgtgcttccttcttgacacagcaacagttgctgcctttctaccagcagtttgcggctaaccccgcaaccctcttacaactacaacaattgttgccctttgtccaacttgctttgacagacccagcggcctcctaccaacaacacatcattggtggtgccctcttttagattgcttattagttgtaattcaataa

SEQ ID NO: 26647 - DNA, 251 bp, Zea mays
gacaagaagaagccgatcatcttctcgatggcgcgtctcgaccgcgtgaagaacatgacaggcctggtggagatgtacggcaagaacgcgcgcctgagggagctggcgaacctcgtgatcgtcgccggtgaccacggcaaggagtccaaggacagggaggagcaggcggagttcaagaagatgtacagcctcatcgacgagtacaagttgaagggccatatccggtggatctcggcgcagatgaaccgcgt

SEQ ID NO: 26648 - DNA, 252 bp, Zea mays
gccaccagtcatgccattgggtaccatgaacccatgcatgcagtactgcatgatgcaacaggggcttgccagcttgatggcgtgtccgtccctgatgctgcagcaactgttggccttaccgcttcagacgatgccagtgatgatgccacagatgatgacgcctaacatgatgtcaccattgatgatgccgagcatgatgtcaccaatggtcttgccgagcatgatgtcgcaaatgatgatgccacaatgtca

SEQ ID NO: 26649 - DNA, 250 bp, Zea mays
caggatgcgacaaacgttggggatgaaggtggttttgcacctaacattcaggaaaacaaagaaggccttgaactattgaaggcagccatagaaaaggctggctacactggaaaggtggtcattggaatggatgttgctgcttctgaattcttcggtgagaaagacaagacttatgatcttaatttcaaggaggagaacaacgatggctcaaacaaaatttcaggcgacagctgaaagacctgtacaagtc

SEQ ID NO: 26650 - DNA, 251 bp, Zea mays
gcggcagtgcgtagagaggatcgtcgaacagaacagcatgaagatggtcatcgttctcgtcgtgtgcctggctctgtcagctgccagcgcctctgcaatgcagatgccctgcccctgcgcggggctgcagggcttgtacggcgctggcgcctgcctgacgacgatgatgggcgccggcgggctgtacccctacgcggagtacctgatgcagccgcagtgcagcccgctggcggcggcgccctactacgccg

SEQ ID NO: 26651 - DNA, 252 bp, Zea mays
agcctataggctacaacaagcgcttgcagcgagcgtcttagaacaaccaattgcccaattacaacaacaatccttggcacatctaaccatacaaaccatcgcaacgcagcagcaacaagcactgagccacctagccgtggtgaaccctatcgcctacttgcaacaacagctgcttgcatccaacccacttgctttggcaaacgtagctgcataccaacaacaacaacagttgcaacagtttctaccagcgct

SEQ ID NO: 26652 - DNA, 251 bp, Zea mays
gatccaacaggcaatcgcagcaggcatcttacctttatcacccttgttcctccaacaatcatcagccctattacagcagttacctttggtgcatttattggcacaaaacatcagggcacaacaactacaacaactcgtgctagcaaaccttgctgcctactctcagcaacagcagttacctttggtgcatttgttggcacaaaacatcagggcacaacaactacaacaactcgtgctagcaaaccttgctg

SEQ ID NO: 26653 - DNA, 248 bp, Zea mays
gccagagatgctcagacagtggtgtccttggggttgttccgggagtgattggttgcttacaagctctggaggctataaaggttgcaactggtgttggtgagcccctatgcggaagaatgctactatttgatgcactctctgctcgtattagagttgttaaacttcgtggaagctctccagattgcacccattgtggcgaaaactccgttttcacagaagaagactttcagaagtttgactatgagagc

SEQ ID NO: 26654 - DNA, 266 bp, Zea mays
gcacaatagtgtaccaacaatggcagccaaaatattttgcctccttatgctccttggtctttctgcaagtgctgctacggcgaccattttcccacaatgctcacaagctcctatagcttcccttcttcccccgtacctctcaccagcggtgtcttcggtatgtgaaaacccagttcttcaaccctataggatccaacaggcaatcgcagctggcatcttacctttatcaaccttgttcctccaacaatcatcagcgctattacagc

SEQ ID NO: 26655 - DNA, 266 bp, Zea mays
tggctctgtcagctgccagcgcctctgcaatgcagatgccctgcccctgcgcggggctgcagggcttgtacggcgctggcgccggcctgacgacgatgatgggcgccggcgggctgtacccctacgcggagtacctgaggcagccgcagtgcagcccgctggcggcggcgccctactacgccgggtgtgggcagacgagcgccatgtaccagccgctccggcaacagtgctgccagcagcagatgaggatgatggacgtgcagtcc

SEQ ID NO: 26656 - DNA, 265 bp, Zea mays
gccatggtgaaccctgccgtctacctacaactactttcatctagcccgctcgcggtgggcaatgcacctacgtacctacaacaacagttgctgcaacaaattgtaccagctctgactcagctagctgtggcaaaccctgctgcctacttacaacagttgcttccattcaaccaactggctgtgtcaaactctgctgcgtacctacaacagcgacaacagttacttaatccattggcagtggctaacccattggtcgctaccttcc

SEQ ID NO: 26657 - DNA, 264 bp, Zea mays
tgctccggatgcggtgctgccagcagctccaggacgtgagccgcgagtgccgctgcgccgccatccggagcatggtcaggggctacgaggaggccatgccgcctctggagaaaggctggtggccatgggggcggcagcagcagccgccgccgcatggaggaggaggaggacaggggggctactactacccctgcagccgggcaggagagggataccaaacgcagatgtatccaccgtgtcgtcccggcaccaccgggccaagga

SEQ ID NO: 26658 - DNA, 262 bp, Zea mays
ggccagtgcgtcgagttcctgaggcatcagtgcagcccgacggcgacgccctactgctcgcctcagtgccagtcgttgcggcagcagtgttgccagcagctcaggcaggtggagccgcagcaccggtaccaggcgatcttcggcttggtcctccagtccatcctgcagcagcagccgcaaagcggccaggtcgcggggctgttggcggcgcagatagcgcagaactgacggcgatgtgcggcctgcagcagccgactccatg

SEQ ID NO: 26659 - DNA, 259 bp, Zea mays
tagcaacatagaaagcacaatagtgtaccaacaatggcagccaaaatattttgcctccttatgctccttggtctttctgcaagtgctgctacggcgaccattttcccgcaatgctcgcaagctcctatagcttcccttcttcccccgtacctctcaccagcggtgtcttcggtatgtgaaaacccaattcttcaaccctacaggatccaacaggcaatcgcagctggcatcttacctttatcacccttgttcctccaac

SEQ ID NO: 26660 - DNA, 261 bp, Zea mays
atgttctttcaacaatcgccagccctatctttggtgcagtcattggtacaaaccatcagggcacaacagctgcaacaactcgtgctaccagtgatcagccaagtagctctggcaaacctttctccctactctcagcaacaacaatttcttccattcaaccaactgtctacactgaaccctgctgcttatttacaacaacaacaactactaccattcagccagctagctactgcctactctcagcagcaacaatttcttcca

SEQ ID NO: 26661 - DNA, 250 bp, Zea mays
cgcctacttgcaagagcagctgcttgcatccaacccacttgctctggcgaacgtagttgcaaaccagcaacaacaacagctacaacagtttctgccaacgctcagtcaactagccatggtgaaccctgccgcctacgtacaacaacaacaactgctttcatctagcccgctcgctgtgggcaatgcacctacatacctgcaacaacaattgttgcaacagattgtaccagctctgactcaactagctgtg

SEQ ID NO: 26662 - DNA, 137 bp, Zea mays
caaactcaacagtgttctaccaacaacccatcattggtggtgccctcttttagattgcttatgagttatagttcaataatgaagttttttggatgatgtttgtggcgtcccagaaataagaaagtacatttctagaa

SEQ ID NO: 26663 - DNA, 257 bp, Zea mays
gccctgctaccttcttgacacaaccacaattgttgccgttctaccagcacgctgcgcctaacgctggcaccctcttacaactgcaacaattgctgccattcaaccaacttgctttgacaaacccaacagcattctaccaacaacccatcattggtggtgccctcttttagatttcttatgagttatagttcaataataaagtttttttgtctgatgtttgtggcttcccagaaataagaaagtacatttctagaaaa

SEQ ID NO: 26664 - DNA, 261 bp, Zea mays
gaccaactagcaacatagaaagcacaatagtgtaccaacaatggcagccaaaatattttgcctccttatgctccttggtctttctgcaagtgctgctacggcgaccattttcccacaatgctcacaagctcctatagcttcccttcttcccccgtacctctcaccagcggtgtcttcggtatgtgaaaacccaattcttcaaccctataggatccaacaggcaatcgcagctggcatcttacctttatcacccttgttcct

SEQ ID NO: 26665 - DNA, 261 bp, Zea mays
gtttctgccatcactgagccacctagccgtggtgaaccctgtcacctacttgcaacagcagctgcttgcatccaacccacttgctctggcgaacgtagctgcataccagcaacaacaacagctgcaacagtttatgccagtgctcagtcaactagccatggtgaaccctgccgtctacctacaactactttcatctagcccgctcgcggtgggcaatgcacctacgtacctacaacaacagttgctgcaacaaattgtacc

SEQ ID NO: 26666 - DNA, 260 bp, Zea mays
cagccctattacatcagttacctttggtgcatttattggcacaaaacatcagggcacaacaactacaacaacttgtgctagcaaaccttgctgcctactctcagcaacagcagtttcttccattcaaccaactagctgcattgaactctgcttcttatttgcaacaacaacaactaccattcagccagctacctgctgcctacccccagcaatttcttccattcaaccaactggcagcattgaactctcctgcttattta

SEQ ID NO: 26667 - DNA, 258 bp, Zea mays
aacagcaacaacaattcctaccagcactgagccacctagccatggtgaaccctgccgcctacttgcaacagcagttgcttgcatcaaacccacttgctctggcaaacgtagttgcaaaccagccacaacaacagctgcaacagtttctgccagcgctcagtcaactagccatggtgaaccctgccgcctacctacaacagcaacaactgctttcatctagcccgctcgctgtggccaatgcacctacatacctgcaac

SEQ ID NO: 26668 - DNA, 255 bp, Zea mays
ttcccgcaatgctcgcaagctcctatagcttcccttcttcccccgtacctctcaccagcggtgtcttcggtatgtgaaaacccaattcttcaaccctacaggatccaacaggcaatcgcagctggcatcttacctttatcacccttgttcctccaacaatcatcagccctattacaacagttacctttggtgcatttattggcacaaaacatcagggcacaacaactacaacaacttgtgctagcaaaccttgct

SEQ ID NO: 26669 - DNA, 249 bp, Zea mays
gtaccagccgctccggcaacagtgctgccagcagcagatgaggatgatggacgtgcagtccgtcgcgcacagctgcagatgatgatgcagcttgagcgtgccgctgccgccagcagcagcctgtacgagccagctctgatgcagcagcagcagcagctgctggcagcccagggtctcaaccccatggccatgatgatggcgcagaacatgccggccatgggtggactctaccagtaccagtaccagctg

SEQ ID NO: 26670 - DNA, 130 bp, Zea mays
aacagcatgaagatggtcatcgttctcgtcgtgtgcctggatctgtcagctgccagcgcctctgcaatgcagatgccctgcacatgcgcggggctgcagggcttgtacggcgctggcgccggcctgacga

SEQ ID NO: 26671 - DNA, 261 bp, Zea mays
ctgacattgccgacgacggcacgccccagctcgacgccgcgtccggcgaggagctggtccgtgtggaccgcaccgtggctgtcgcccttggaccccgctcgccggagtccccggggactctgttcgtcaccaccaggagggtgatttggctcagcgaacgtatgaagggcaagggctacgcggtggacttcctcgccatctcgcttcacgctgtgtcgcgcgacctcgaggcgtactcctcgccctgtatctacactcaga

SEQ ID NO: 26672 - DNA, 256 bp, Zea mays
acattactaaagcaccgaatcccatcagaactctgaagttaagcgtgcttgggcgagagtagtactaggatgggtgaccttctgggaagtcctcgtgttgcattccttttttttggttttatttttgtttgtttttcgaacaccaaaccatagtaaaaatgggtgaccgttctcgtgttaaattaccttttatttgttttaaggggcgtttttcgggtactttgtgcggaggaaggatgtccagtgccgtgggcga

SEQ ID NO: 26673 - DNA, 257 bp, Zea mays
gaagaccagttcccctctcctgatcgtcctgttcctcacagcagcagccatggcggccgagccggagaagcaggcggcccccgcggcacaggagacggccgtgcacatcgtgtacgttgaccgccccgaggacgccgaccctgaggagttccacatccgcaccctcacccccgtcctcggcagcgaacagaaggccagggacgcagtgctctaccactacaagaacgccgccagcgtgttctccgcgaactcacccc

SEQ ID NO: 26674 - DNA, 255 bp, Zea mays
gcttcttgccctttttgtgagcgcaacaaatgcgttcattattccacaatgctcacttgctcctagtgccattattccacagttcctcccaccagttacttcaatgggcttcgaacacctagctgtgcaagccaacatgcaacaacaagcgcttgcggcgagcgtcttacaacaaccaattgcccaattgcaacaacaatccttgccacatctaacaatacaagccatcacaacgcaacagcaacaacagttcct

SEQ ID NO: 26675 - DNA, 250 bp, Zea mays
ctccatatgagatgggagggatggcaatgagagatgctggtgtctcacaacctgttccaattggggcactagccactgcgcttgctaacgcctcaccagatcagcaaagactgatgcttggtgagaacctgtatcctcttgttgaacagctggagcgtgagcaggctgccaaggtcactggcatgcttttggagatggaccagacggaggttcttcacctgctggagtcgccagatgctctcaaggctaa

SEQ ID NO: 26676 - DNA, 243 bp, Zea mays
ccaacaaccgtcagccctattacagcagttacctttggtgcatttgttggcacaaaacatcaaggcacaacaactacaacaacttgtgctaggaaaccttgctgcctactctcagcaacagcagtttcttccattcaaccaactggctgcattgaactctgctgcttatttgcaacaacaactaccattcagtcagctagctgctgcctacccccagcaatttcttccattcaaccaactggc

SEQ ID NO: 26677 - DNA, 249 bp, Zea mays
aaaccatcagggcacaacagctgcagcaactcgtgctacctgtgatcaaccaagtagctctggcaaacctttctccctactctcagcaacaacaatttcttccattcaaccaactgtctacactgaaccctgctgcttatttgcagcaacaactattaccatttagccagctagctactgcctactctcagcaacaacaacttcttccatttaaccaattggccgcactgaaccccgctgcttatttgc

SEQ ID NO: 26678 - DNA, 246 bp, Zea mays
ctagggttttgctgctctccgaccccgagctccgaatgccgcagcatcaggcgcgccccccctcgcgtgtgaccgagatggcgctgccgaatcaggggaccgttgattaccccagcttcaagctcgtcatcgtcggcgatggtggaactggtaaaactacatttgtgaagacgcatctcactggagagtttgagaagaaatatgaaccaaccattggtgtggaagttcatccgttggatttcacca

SEQ ID NO: 26679 - DNA, 91 bp, Zea mays
caacaacccatcattggtggtgccctcttttagatttcttatgagttatagttcaataataaagttttttgtctgatgtttgtggcttccc

SEQ ID NO: 26680 - DNA, 244 bp, Zea mays
cgttgtcctggtaaaggcgagccatactcagacgaagctattgctttgatgaggagaaggatacttcaacgagatgtggagatagaggttgaagcagttgataggacaggaacgttcataggttctttgtgggagtccaagaccaacatgggctctgtgcttctggaagctggacttgccaagctgagttcatttggcttggataggacctcagatgcttatatcctaacaagagctgaacagt

SEQ ID NO: 26681 - DNA, 246 bp, Zea mays
gagccacctagccatggtgaaccctgccgcctacttgcaacagcagttgcttgcatcaaacccacttgctctggcaaacgtagttgcaaaccagccacaacaacagctgcaacagtttctgccagcgctcagtcaactagccatggtgaaccctgccgcctacctacaacagcaacaactgctttcatctagcccgctcgctgtggccaatgcacctacatacctgcaacaacaattgttgcaaca

SEQ ID NO: 26682 - DNA, 147 bp, Zea mays
cagcagcactggcctcactatttcttctaaattaccaagattctcggacatgtacactctcacaatagcaagtgcggatccacagtctatctctgcaaacaagccagttcatttcactaagagcgtaacaaagtggtttacaaagga

SEQ ID NO: 26683 - DNA, 274 bp, Zea mays
gatcattgtccccgagatgattggcagcattgttggtgtctacaatggcaagaccttcaaccaggttgagatcaagcctgagatgattggccactatcttgcagagttctccatttcctacaagccggtcaagcacggtaggcccggtattggtgccactcactcctcgcggtttatccctctgaaatgagttgttacccagatctgtagcgtcccaagggtgtccagtagcattgccctttcagctttgctgcttgtttcgaacaagttacat

SEQ ID NO: 26684 - DNA, 274 bp, Zea mays
ggatccaacaggcaatcgcagctggcatcttacctttatcacccttgttcctccaacaatcatcagccctattacaacagttacctttggtgcatttattggcacaaaacatcagggcacaacaactacaacaacttgtgctagcaaaccttgctgcctactctcagcaacagcagtttcttccattcaaccaactaggttcattgaactctgcttcttatttgcaacaacaacaactaccattcagccagctacctgctgcctacccccagca

SEQ ID NO: 26685 - DNA, 272 bp, Zea mays
atatcattaagcaaattgggatgtttactttcactgggctgaatagcgaacaagtcgcattcatgaggcaggaataccacatttatatgacatctgatgggaggatcagcatggccggtttgagcatgaggactgtgccccatcttgcagatgccatacacgctgcagttactcaactgaaatgaggatagtatcgcagctttcgtgaataaaacctgaatcacccacaacaatgttctaagtactcagccagtggtatctactggttgacc

SEQ ID NO: 26686 - DNA, 270 bp, Zea mays
cagcagcactggcctcactatttcttctaaattaccaagattctcggacatgtacactctcacaatagcaagtgcggatccacagtctatctctgcaaacaagccagttcatttcactaagagcgtaacaaagtggtttacaaaggaaggagttcttgtggagggcctgttctggaaggatgtcgagaagctgattgatgactacaacagtgagcgcaagagtaaatgaattggtagctcgtgtctctggccatctggggagacatcgct

SEQ ID NO: 26687 - DNA, 268 bp, Zea mays
cattgacaatgtcaaggccaagatccaggacaaggagggcatcccacccgaccagcagcgcctcatcttcgccggcaagcagctggaggatggccgcaccctggcggattacaacatccagaaggagagcactctccacctggtgctccgcctcaggggtggcatgcagatttttgtgaagacattgactggcaagaccatcaccttggaggtggagagctctgacaccattgacaatgtgaaggccaagatccaggacaaggagggc

SEQ ID NO: 26688 - DNA, 270 bp, Zea mays
agcacatctaaccatacaaaccatcgcaacgcagcagcaacaagcactgagccacctagccgtggtgaaccctatcgcctacttgcaacaacagctgcttgcatccaacccacttgctttggcaaacgtagctgcataccaacaacaacaacagttgcaacagtttctgccagcgctcagtcaactagccatggtgaaccctatcgcctacctacaacagcaacaacttctttcatctagcccgctcgctatgggcaatgcacctacata

SEQ ID NO: 26689 - DNA, 267 bp, Zea mays
gaagtttgcagctggcactgaggcgattgccacgaagctagctgagcttacaaccacgaagggtgtcactatcatcatcggcgtcggcgactctgttgctgctgtcgagaaggctgggctggccgacaagatgagccacatttcgaccggcggcggtgcgagcttggaactcttggaaggcaagactctacctggtgtccttgccctctatgacgcctagatccgctgctgctgctgctactcaggttctgccaactttgcgtgtca

SEQ ID NO: 26690 - DNA, 265 bp, Zea mays
gcaagtggtttgctcttcaagctacttcagagattcctggaaatgttgcaaatgttcagaagctgctgtctcaccctgctttcgacctgaggaatcccaacaaggtgtactcactaatcgggggattctgtggctcacctgtgaacttccacgcgaaagatggttctgggtacaagttcttgggtgagatcgttttgcagcttgacaagataaaccctcaggtggcctcccgcatggtttcagcattttctcggtggaggcggta

SEQ ID NO: 26691 - DNA, 265 bp, Zea mays
agcaaaccgtgcttccttcttgacacagcaacagttgctgcctttctaccagcagtttgcggctaaccccgcaaccctcttacaactacaacaattgttgccctttgtccaacttgctttgacagaccgagcggcctcctaccaacaacacatcattggtggtgccctcttttagattgcttattagttgtaattcaataataaagttttttggatgatgtatgtggccaaccagaaataagaagttacatttccagattttaat

SEQ ID NO: 26692 - DNA, 266 bp, Zea mays
cattcaaccaactgtctacactgaaccctgctgcttatttgcagcaacaactattaccattcagccagctagctactgcctactctcagcaacaacaacttcttccatttaaccaattggccgcactgaaccccgctgcttatttgcagcagcaaatactactaccatttagccagctagctgcagcaaaccgtgcttccttcttgacacagcaacagttgctgcctttctaccagcagtttgcggctaaccccgcaaccctctta

SEQ ID NO: 26693 - DNA, 265 bp, Zea mays
caacaagcaacatagaaagtggaatacagtagcaaaaatagagcaacaatggcggccaagatattttccatccttatgctccttgctctttctgcatgtgttgctaacgcgaccatttttcctcaatactcacaagctcctatagctgcccttcttcccccataccttccatcaatgaccgctttagtatgtgaaaacccagcccttcaaccctacaggatccagcaagcaatcgcaacaagcaacttacctttatcacacctgt

SEQ ID NO: 26694 - DNA, 265 bp, Zea mays
ccaacaagcaacatagaaagtggaatacagtagcaacaatagagcaacaatggcggccaagatattttccatccttatgctccttgctctttctgcatgtgttgctaacgcgaccatttttcctcaatactcacaagctcctatagctgcccttcttcccccataccttccatcaatgaccgcttcagtatgtgaaaacccagcccttcaaccctacaggctccaacaagcaatcgcaacaagcaacttacctttatcacccctg

SEQ ID NO: 26695 - DNA, 269 bp, Zea mays
caacaatggctaccaagatattatccctctttgcgcttcttgccctttttgtgagcgcaacaaatgcgttcattattccacaatgctcacttgctcctagtgccattattccacagttcctccctccagttacttcaatgggcttcgaacacccagctgtgcaagcctacaggctacaacaagcgcttgcggcgagcgtcttacaacaaccaattgcccaattacaacaacaatccttggcacatctaaccatacaaaccatcgcaacg

SEQ ID NO: 26696 - DNA, 265 bp, Zea mays
cagcaaagcggcagtgcgtagagaggatcgtcgaacagaacagcatgaagatggtcatcgttctcgtcgtgtgcctggctctgtcagccgccagcgcctctgcaatgcagatgccctgcccctgcgcggggctgcagggcttgtacggcgctggcgccggcctgacgacgatgatgggcgccggcgggctgtacccctacgcggagtacctgaggcagccgcagtgcagcccgctggcggcggcgccctactacgccgggtgtgg

SEQ ID NO: 26697 - DNA, 265 bp, Zea mays
attgagaccaactagcaacatagaaagcacaatagtgtaccaacaatggcagccaaaatattttgcctccttatgctccttggtctttctgcaagtgctgctacggcgaccattttcccgcaatgctcgcaagctcctatagcttcccttcttcccccgtacctctcaccagcggtgtcttcggtatgtgaaaacccaattcttcaaccctacaggatccaacaggcaatcacagctggcatcttacctttatcacccttgttcc

SEQ ID NO: 26698 - DNA, 263 bp, Zea mays
acaacttctttcatctagcccgctcgctatgggcaatgcacctacatacctgcaacaacagttgttgcaacaacagttgctgcaacaaattgtaccagctcttactcagctagctgtggcaaaccctgctgcctacttgcaacaactacttccattcaaccaactgactgtgtcgaactctgctgcgtacctacaacagcgacaacagttacttaatccactagcggtggctaacccattggtcgctgccttcctacagcagc

SEQ ID NO: 26699 - DNA, 262 bp, Zea mays
gcaaagcggcagtgcgtagagaggatcgtcgaacagaacagcatgaagatggtcatcgttctcgtcgtgtgcctggctctgtcagctgccagcgcctctgcaatgcagatgccctgcccctgcgcggggctgcagggcttgtacggcgctggcgccggcctgacgacgatgatgggcgccggcgggctgtacccctacgcggagtacctgaggcagccgcagtgcagcccgctggcggcggcgccctactacgccgggtgtg

SEQ ID NO: 26700 - DNA, 262 bp, Zea mays
agctcatcaacagcgacgtcgagaactccgagcacaagttcgtgctgaaggacaagaagaagccgatcatcttctcgatggcgcgtctcgaccgcgtgaagaacatgacaggcctggtggagatgtacggcaagaacgcgcgcctgagggagctggcgaacctcgtgatcgtcgccggtgaccacggcaaggagtccaaggacagggaggagcaggcggagttcaagaagatgtacagcctcatcgacgagtacaagttgaa

SEQ ID NO: 26701 - DNA, 260 bp, Zea mays
cccgatccgaatcgtcctcctcgcgagcctcgtcgatcccccactcccctcccctcgcttcaagatgcagatctttgtgaagaccctcaccggcaagactatcaccctcgaggtggagtcttctgacaccattgacaatgtcaaggctaagatccaggacaaggagggcatccctcctgaccagcagcggcttatcttcgccggcaagcagcttgaggacggccgcacacttgctgactacaacatccagaaggagtcaa

SEQ ID NO: 26702 - DNA, 256 bp, Zea mays
gccagctgcgccaagagttccatgttgctgctcagaactgctgggtgaagaagggaggtgctttcactggtgaagtcagtgctgagatgctcgtcaaccttggtgttccctgggtcattcttggacactctgaaaggagagctctgctgggagaatcaaatgaatttgttggagacaaggttgcgtatgccctgtctcagggactaaaggtcattgcatgtgttggtgagacccttgagcagagggaggctgggtc

SEQ ID NO: 26703 - DNA, 214 bp, Zea mays
ctgacggcgatgtgcggcctgcagcagccgactccatgcccctacgctgctgccggcggtgtcccccactgaagaaactatgtgctgtagtatagccgctggctagctagctagttgagtcatttagcggcgatgattgagtaataatgtgtcacgcatcaccatgggtggcagtgtcagtgtgagcaatgacctgaatgaacaattgaaatga

SEQ ID NO: 26704 - DNA, 260 bp, Zea mays
gcaacatagaaagtggaatacagtagcaaaaatagagcaacaatggcggccaagatattttccatccttatgctccttgctctttctgcatgtgttgctaacgcgaccatttttcctcaatactcacaagctcctatagctgcccttcttcccccataccttccatcaatgaccgctttagtatgtgaaaacccagcccttcaaccctacaggatccagcaagcaatcgcaacaagcaacttacctttatcacacctgtt

SEQ ID NO: 26705 - DNA, 260 bp, Zea mays
gcttgatgagtaccttctcactcgcagctacatcactggctaccaagcttccaaggatgacttggctgtctacacttcgttttcggctgctccctcgtccaagtatatcaacgtagcaaggtggtttaaccacattgatgcgctcgtgaggctgagcggaattactgcagagggccaaggtgtgaaggttgaatcctcagcagttccttcagccccaactccagatgttgctgaagcacaggccccagttgctgaggagg

SEQ ID NO: 26706 - DNA, 260 bp, Zea mays
gaagaacccgatcgacaccatgagggtgttgctcgttgccctcgctctcctggctctcgctgcgagcgccacctccacgcatacaagcggcggctgcggctgccagccaccgccgccggttcatctaccgccgccggtgcatctgccacctccggttcacctgccacctccggtgcatctcccaccgccggtccacctgccgccgccggtccacctgccaccgccggtccatgtgccgccgccggttcatctgccgccgc

SEQ ID NO: 26707 - DNA, 84 bp, Zea mays
gcagtaagacgacacacattatcatgtgtggtatgaccaataatatatgcatggtcataataaagttttggttttaatgaatct

SEQ ID NO: 26708 - DNA, 257 bp, Zea mays
ggaagttcactgagactgtggaacttcagattggtctgaagaattatgatccacagaaggacaagcgtttcagtggctctgttaagttgccccatatccctcgtcccaagatgaaggtgtgcatgcttggtgatgcccagcatgttgaggagccgagaagatgggacttgactacatggatgttgaggctctcaagaaaatgaacaagaacaagaagcttgttaagaggcttgccaagaagtaccatgctttcttgg

SEQ ID NO: 26709 - DNA, 257 bp, Zea mays
tgcatattgtgtcaagggtggtccagaaaaagagctaaaagcaatgcagtacttggagagaagagagtgtgagtacgaccagaagatatccattgatttctacaaggaaggagatcccttgaaaccagctgtgacaggcgtcttagtgttcgtttccactccagatccaattggcaacaagtactatcttggccctgctcctttgcaggatatggcaaggcaaattgctacagccaatggccctactggctataata

SEQ ID NO: 26710 - DNA, 255 bp, Zea mays
gccatggtgaaccctgccgcctacctacaacagcaacaactgctttcatctagcccgctcgctgtggccaatgcacctacatacctgcaacaacaattgttgcaacagattgtaccagctctgactcagctagttgtggcaaaccctgctgcctacttgcaacagctgcttccattcaaccaactgactatgtcgaactctgctgcgtacctacaacagcgacaacagttacttaatccactagcagtggctaac

SEQ ID NO: 26711 - DNA, 254 bp, Zea mays
cacatgttgagaaaattagaactactctgaagccatacactaagagagcagttcatgcatatgggtcatttctcaagtcggcaaccacataccatcgacaggctcaagcaagcatcatggactaccttcaccagcgtgatataacaaaatcattggcaactaaggagttagtttggttcctggcttctgctttgctggctctgcctgtcttcattatatacaggcttctagtagggaccttctgctccaaaaag

SEQ ID NO: 26712 - DNA, 255 bp, Zea mays
caactagcaacatagaaagcacaatagtgtaccaacaatggcagccaaaatattttgcctccttatgctccttggtctttctgcaagtgctgctacggcgaccattttcccacaatgctcacaagctcctatagcttcccttcttcccccgtacctctcaccagcggtgtcttcggtatgtgaaaacccaattcttcaaccctataggatccaacaggcaatcgcagctggcatcttacctttatcacccttgtt

SEQ ID NO: 26713 - DNA, 252 bp, Zea mays
gcgatttctattttatgcttatttattacctttgtaagggtgatgatttggacactgcccttggactatacaatgaaatagcagctaagaattgggtgccatgcttctcaaccatgaaaatgcttgtgaatggacttgctgggagctcaaggatcgatgaggcaaagggaatcattgagaagatgaaagagaagttcccagataaaactgaggggtggaaggaggtggaggaagcatttcctcattagagta

SEQ ID NO: 26714 - DNA, 92 bp, Zea mays
gccctcttttagattgcttatgagtcatagttcaataatgaagttttttggatgatgtttgtggcttcccagacataagacagtacatttct

SEQ ID NO: 26715 - DNA, 270 bp, Zea mays
ccctccttgctctttcagcaagcgctgctacctcgacttttattccacaatgctcacaacaatacctctctccggtgacagccgcgggatttcaatacccaactatacaatcctacatggtacaagaggccatccaagcaagcatcttacggtcattagcattaaccctccaacaaccatatgctctattgcaacagccatccttagtgcatctgtatctccaaagaatcgcggcacaacaactacaacaacagttgctaccaacaatca

SEQ ID NO: 26716 - DNA, 268 bp, Zea mays
atctactatactatactctaggaagcaaggacaccaccgccatggcagccaagatgcttgcattgttcgctctcctagctctttgtgcaagcgccactagtgcgacccatattccagggcacttgccaccagtcatgccattgggtaccatgaacccatgcatgcagtactgcatgatgcaacaggggcttgccagcttgatggcgtgtccgtccctgatgctgcagcaactgttgggcttaccgcttcagacgatgccagtgatgat

SEQ ID NO: 26717 - DNA, 266 bp, Zea mays
gctaccagtgatcagccaagtagctctggcaaacctttctccctactctcagcaacaacaatttcttccattcaaccaactgtctacactgaaccctgctgcttatttgcagcaacaacaactactaccattcagccagctagctactgcctactctcagcagcaacaatttcttccatttaaccaattcgccgcactgaacccctctgcttatttccagcagcaaatactactaccatttggccagctagctacaacaagccccg

SEQ ID NO: 26718 - DNA, 266 bp, Zea mays
tagcaacatagaaagcacaatagtgtaccaacaatggcagctaaaatattttgcctccttatgctccttggtctttctgcaagtgctgctacggcgaccattttcccacaatgctcacaagctcctatagcttcccttcttcccccgtacctctcaccaacggtgtcttcggtatgtgaaaacccaattcttcaaccctacaggatccaacaggcaatcgcagctggcatcttacctttatcacccttgttcctccaacaatcatc

SEQ ID NO: 26719 - DNA, 264 bp, Zea mays
cggcaacagtgctgccagcagcagatgaggatgatggacgtgcagtccgtcgcgcacagctgcagatgatgatgcagcttgagcgtgccgctgccgccagcagcagcctgtacgagccagctctgatgcagcagcagcagcagctgctggcagcccagggtctcaaccccatggccatgatgatggcgcagaacatgccggccatgggtggactctaccagtaccagtaccagctgcccagctaccgcaccaacccctgtggcg

SEQ ID NO: 26720 - DNA, 264 bp, Zea mays
cagcagcaacaactactaccattcagccagctagctgatgtgagccctgctgccttcttgacacaacaacagttgttgccgttctacctgcacgctatgcctaacgctggcaccctcttacaactgcaacaattgctgccattcaaccaacttgctttgacaaactcaacagtgttctaccaacaacccatcattggtggtgccctcttttagattgcttatgagttatagttcaataatgaagttttttggatgatgtttgtg

SEQ ID NO: 26721 - DNA, 260 bp, Zea mays
gccagctgcagggaacctgcggcgttggcagcaccccgatcctgggccagtgcgtcgagtttctgaggcatcagtgcagcccgacggcgacgccctactgctcgcctcagtgccagtcgttgcggcacagtgttgccagcagctcaggcaggtggagccgcagcaccggtaccaggcgatcttcggcttggtcctccagtccatcctgcagcagcagccgcaaagcggccaggtcgcggggctgttggcggcgcagatag

SEQ ID NO: 26722 - DNA, 261 bp, Zea mays
attttgagcattcagaaacacaccaagcgaacgcgatctagcaacgacctaacaacaatggctaccaagatattagccctccttgcgcttcttgccctttttgtgagcgcaacaaatgcgttcattattccacaatgctcacttgctcctagtgccattattccacagttcctcccaccagttacttcaatgggcttcgaacacctagctgtgcaagccaacatgcaacaacaagcgcttgcggcgagcgtcttacaacaa

SEQ ID NO: 26723 - DNA, 184 bp, Zea mays
ccctcttacaactgcaacaattgctgccattcaaccaacttgctttgacaaacccaacaacgttctaccaacaacccatcattggcggtgccctcttttagatttcttatgagttatagttcaataataaagttttttgtctgatgtttgtggcttcccagaaataagaaagtacatttctaga

SEQ ID NO: 26724 - DNA, 264 bp, Zea mays
ctatctttggtgcagtcattggtacaaaccatcagggcacagcagctgcagcaactcgtgctacctgtgatcaaccaagtagctctggcaaacctttctccctactctcagcaacaacaatttcttccattcaaccaactgtctacactgaaccctgctgcttatttgcagcaacaactattaccattcagccagctagctactgcctactctcagcaacaacaacttcttccatttaaccaattggccgcactgaaccccgct

SEQ ID NO: 26725 - DNA, 264 bp, Zea mays
cggcaccatgctatggagcttaaatccgtttgcctcaaatttgctgccgaaaacctgtcagctgtgatccggactgagggtttcgactatctcaaagacaactgcccatctctgcagtcagagatactgcggacagttgccgggtgtgaggagccatgtagcagcggcttgaaaagccagagcgtgtgggcgcactctctgacggcggcgacaccagcgggcgcagggtgaggccaagggtctgagacgcaaaccccggaagca

SEQ ID NO: 26726 - DNA, 265 bp, Zea mays
ccctactgctcgcctcagtgccagtcgttgcggcacagtgttgccagcagctcaggcaggtggagccgcagcaccggtaccaggcgatcttcggcttggtcctccagtccatcctgcagcagcagccgcaaagcggccaggtcgcggggctgttggcggcgcagatagcgcacaactgacggcgatgtgcggcctgcagcagccgactccatgcccctacgctgctgccggcggtgtcccccactgaagaaactatgtgctgtag

SEQ ID NO: 26727 - DNA, 269 bp, Zea mays
gcaccaaagccaaagccaaagaatcctcttgacttgctgccaccaagcaagatggtccttgatgactggaagaggctatactcaaacacaaagactaacttccgggaggttgccatcaaaggtttctgggacatgtacgacccagagggctactctttgtggttctgtgactacaagtacaatgatgagaacaccgtctcctttgtgaccctgaacaaggttggtggattcctgcagcggatggacctgtgccgcaagtacgcctttgg

SEQ ID NO: 26728 - DNA, 253 bp, Zea mays
gtcagcctagcaattagctcatcgactccagattggagaactcgacaccatgaaggtgctgatcgttgcccttgctctcctggcgctcgctgcgagcgccgcctccagtacaagcggcggctgtggctgccagacaccaccgtttcatctaccgcctccgttctatatgccgcctccgttctatctgccgccgcagcagcagccgcagccatggcaataccccactcaagccccgcagctaagcccgtgccag

SEQ ID NO: 26729 - DNA, 266 bp, Zea mays
tgcgaacgatcgcgacctgccatggtggccctgctgagatcatcgtggacggggtatctggcctgcacattgacccttaccacagcgacaaggccgcggatatcctggtcaacttctttgacaaatgcaaggcagatccgagctactgggacaagatctcacagggcggcctgcagagaatttatgagaagtacacctggaagctctactccgagaggctgatgaccctgaccggcgtgtacgggttctggaagtacgtgagcaac

SEQ ID NO: 26730 - DNA, 260 bp, Zea mays
cagaccattagctttatctactccagagcgcagaagaacccgatcgacaccatgagggtgttgctcgttgccctcgctctcctggctctcgctgcgagcgccacctccacgcatacaagcggcggctgcggctgccagccaccgccgccggttcatctaccgccgccggtgcatctgccacctccggttcacctgccacctccggtgcatctcccaccgccggtccacctgccgccgccggtccacctgccaccgccggt

SEQ ID NO: 26731 - DNA, 261 bp, Zea mays
caagaaggttgtcatctctgctcctagcaaggatgcccccatgtttgtcgttggtgtcaacgagaaggagtacaagtctgacattaacattgtctccaatgctagctgcacaaccaactgccttgctcctcttgctaaggtcatcaatgacaagttcggtatcgttgagggtctgatgaccactgtccatgccatcactgctacccagaagactgttgatgggccctcgtctaaggactggaggggtggaagggctgctat

SEQ ID NO: 26732 - DNA, 261 bp, Zea mays
  unsure (1)..(261): unsure at all n locations
attttgagcattcagaaacacaccaagcgaacggnactagcaacgacctaacaacaatggctaccaagatattagccctccttgcgcttcttgccctttttgtgagcgcaacaaatgcgttcattattccacaatgctcacttgctcctagtgccattattccacagttcctcccaccagttacttcaatgggcttcgaacacctagctgtgcaagccaacatgcaacaacaagcgcttgcggcgagcgtcttacaacaac

SEQ ID NO: 26733 - DNA, 260 bp, Zea mays
cacagttcctccctccagttacttcaatgggcttcgaacacccagctgtgcaagcctataggctacaacaagcgcttgcggcgagcgtcttagaacaaccaattgcccaattacaacaacaatccttagcacatctaaccatacaaaccatcgcaacgcagcagcaacaagcactgagccacctagccgtggtgaaccctatcgcctacttgcaacaacagctgcttgcatccaacccacttgctttggcaaacgtagct

SEQ ID NO: 26734 - DNA, 258 bp, Zea mays
ctttcgttcctcctcgccccagcgacgcggcctcccgtagaccgagcaaggcaacccaccactgagaggcacgcagaggagcaggaagccggagaccaagatgtcgtcggtgttcagcggcgatgagacggcccccttcttcggtttcctcggcgccgccgccgccctcgtcttctcatgcatgggcgcacgtacgggaccgcgaagagcggcgtcggcgtggcgtcgatgggtgtgatgcggccggagctcgtcatg

SEQ ID NO: 26735 - DNA, 256 bp, Zea mays
agcggacaggctgaattcttctccttcggaacgaacgacctgacgcagatgacctttgggtacagcagggatgatgtgggaaagttcattcccgtctatcttgctcagggcattctccaacatgaccccttcgaggtcctggaccagaggggagtgggcgagctggtgaagcttgctacagagaggggccgcaaagctaggcctaacttgaaggtgggcatttgtggagaacacggtggagagccttcctctgtgg

SEQ ID NO: 26736 - DNA, 258 bp, Zea mays
cgttctcgtcgtgtgcctggctctgtcagccgccagcgcctctgcaatgcagatgccctgcccctgcgcggggctgcagggcttgtacggcgctggcgccggcctgacgacgatgatgggcgccggcgggctgtacccctacgcggagtacctgaggcagccgcagtgcagcccgctggcggcggcgccctactacgccgggtgtgggcagacgagcgccatgtaccagccgctccggcaacagtgctgccagcagca

SEQ ID NO: 26737 - DNA, 260 bp, Zea mays
cctacttgcaacagcagctgcttgcatccaacccacttgctctggcgaacgtagctgcataccagcaacaacaacagctgcaacagtttatgccagtgctcagtcaactagccatggtgaaccctgccgtctacctacaactactttcatctagcccgctcgcggtgggcaatgcacctacgtacctacaacaacagttgctgcaacaaattgtaccagctctgactcagctagctgtggcaaaccctgctgcctactta

SEQ ID NO: 26738 - DNA, 232 bp, Zea mays
aagaagaagaagaagcccaggccggagaaccatcgcctgcatttcgatctgtttcaccgcaattcgcattgttagtcgtgtattggagttatgtgtacttggtttccaagaactttggttccttgtttttttttctttcttgtttgagcgtttttgggcagcgctggcctggttcctagtatggtgagaattggctgcaccttttgcttcgaataaaaatgcctgctcgttc

SEQ ID NO: 26739 - DNA, 261 bp, Zea mays
cgatggccgccgagggcgagaagaagatgataaccctcaaaagctccgatggcgaggagttcgaggtggaagaggcggtggcgatggagtcgcagaccatccgccacatgatcgaggatgactgcgccgacaacggcatccctcttcctaacgtcaactccaagatcctatccaaggtaatcgagtactgcaacaagcacgtacatgccgccgcagccgcagccgccgcctcgaaggccggttccgacgacgtgggtgccg

SEQ ID NO: 26740 - DNA, 248 bp, Zea mays
tcctggcgcacagccagccccccacaggagcttctctgaggaagttgctgcacttaaccgctactttggcggcctgaaatctggtggtaatgcttatgtgattggagatccagcaagacctggacagaagtggcacgtcttctacgccactgagtacccagagcaaccaatggttaaccttgagatgtgcatgactggtctggacaagaagacacttgtgtcttttcaagataatgctgatgggacac

SEQ ID NO: 26741 - DNA, 255 bp, Zea mays
aacaacatcaacaacaattccagggtcatgacaagcagcaacaaccacaacagcctcagcaatatcagcagggccaggaaaaatcacaacagcaacaatgtcattgccaggagcagcaacagactacaaggtgcagctataactactatagcagtagctcaaatctaaaaaattgtcatgaattcctaaggcagcagtgcagccctttggtaatgccttttctccaatcacgtttgatacaaccaagtagctgcc

SEQ ID NO: 26742 - DNA, 253 bp, Zea mays
gcgcacagctgcagatgatgatgcagcttgagcgtgccgctgccgccagcagcagcctgtacgagccagctctgatgcagcagcagcagcagctgctggcagcccagggtctcaaccccatggccatgatgatggcgcagaacatgccggccatgggtggactctaccagtaccagctgcccagctaccgcaccaacccctgtggcgtctccgctgccattccgccctactactgattcatgatatttgggaa

SEQ ID NO: 26743 - DNA, 252 bp, Zea mays
agctgtggcaaaccctgttgcctacttgcaacagctgcttccattcaaccaactaactatgtcgaactctgttgcgtacctacaacagcgacaacagttacttaatccattggcagtggctaacccattggtcgctgccttcctacagcagcaacaattgctgccatacaaccggttctctttgatgaatcctgtcttgtcgaggcagcaacccatcgttggaggtgccatcttttagattacatatgagat

SEQ ID NO: 26744 - DNA, 248 bp, Zea mays
tgcaatgcagatgccctgcccctgcgcggggctgcagggcttgtacggcgctggcgccggcctgacgacgatgatgggcgccggcgggctgtacccctacgcggagtacctgaggcagccgcagtgcagcccgctggcggcggcgccctactacgccgggtgtgggcagccgagcgccatgttccagccgctccggcaacagtgctgccagcagcagatgaggatgatggacgtgcagtccgtcgcgc

SEQ ID NO: 26745 - DNA, 252 bp, Zea mays
atagtgtaccaacaatggcagccaaaatattttgcctccttatgctccttggtctttctgcaagtgctgctacggcgaccattttcccacaatgctcacaagctcctatagcttcccttcttcccccgtacctctcaccagcggtgtcttcggtatgtgaaaacccaattcttcaaccctataggatccaacaggcaatcgcagctggcatcttacctttatcacccttgttcctccaacaatcatcagccc

SEQ ID NO: 26746 - DNA, 248 bp, Zea mays
gtcacgtctgcggttgtccgtcagaacctgaggccggagataccacgctgctgcccgagctctctatcgaacgtgatgaagcgctgctgggacgccaaccccgacaagcgacctgagatggccgaggcggtgtccatgctggaggcgatcgacacgtcgaagggtggaggcatgatccctgtggaccagcggccaggatgccttgcgtgcttccggcagtacagaggtccatgacagataggtggaaa

SEQ ID NO: 26747 - DNA, 254 bp, Zea mays
ggctgccagacaccaccgtttcatctaccgcctccgttctatatgccgcctccgttctatctgccgccgcagcagcagccgcagccatggcaataccccactcaaccaccgcagctaagcccgtgccagcagttcggatcctgcggcgtcggcagcgtcggcagcccgttcctgggccagtgcgtcgagttcctgaggcaccagtgcagcccggcggcgacgccctacggctcgccacagtgccaggcgctgca

SEQ ID NO: 26748 - DNA, 80 bp, Zea mays
gtaagacgacacacattatcatgtgtggcatgaccaataatatatgcatggtcataataaagttttggttttaatgaatc

SEQ ID NO: 26749 - DNA, 255 bp, Zea mays
agctcaggcaggtggagccgcagcaccggtaccaggcgatcttcggcttggtcctccagtccatcctgcagcagcagccgcaaagcggccaggtcgcggggctgttggcggcgcagatagcgcagcaactgacggcgatgtgcggcctgcagcagccgactccatgcccctacgctgctgccggcggtgtcccccactgaagaaactatgtgctgtagtatagccgctggctagctagctagttgagtcatttag

SEQ ID NO: 26750 - DNA, 254 bp, Zea mays
attttcagcattcaaaaacacaccaagcgaacgcactagcaacgacctaacaccaatggctaccaagatattagccctccttgcgcttcttgcccttttagtgagcgcaacaaatgcgttcattattccacagtgctcacttgctcctagtgccagtattccacagttcctcccaccagttacttcaatgggcttcgaacatccagccgtgcaagcctacaggctacaactagcgcttgcggcgagcgccttac

SEQ ID NO: 26751 - DNA, 266 bp, Zea mays
gcggctacggcggtggcaaccgtggcggcggctacggcaactccgacgggaactggaggaactgagcggtggggcccgcgcggccaagttatcctgttcgctaccgtgatgtttaccctagtccagagggtttatcttcgttcgtctcgtttgttgttgcccatctgtgtttttgattgcaaggtcgctctgtgtcagttgttagtgctgtgttcatcctcggctccagcagacccatgcatcaaccagcatggactgtggatcga

SEQ ID NO: 26752 - DNA, 214 bp, Zea mays
atgacggcgatgtgcggcctgcagcagccgactccatgcccctacgctgctgccggcggtgtcccccactgaagaaactatgtgctgtagtatagccgctggctagctagctagttgagtcatttagcggcgatgattgagtaataatgtgtcacgcatcaccatgggtggcagtgtcagtgtgagcaatgacctgaatgaacaattgaaatga

SEQ ID NO: 26753 - DNA, 264 bp, Zea mays
aaaaagcatttgctgatgctggagcagatgttctatttattgatgcccttgcttcagtagaagagatgaaagcattttgtgcggttgcaccagaagttccaaagatggcaaacatgttagaaggtggtggtaaaactcccatattgagccctgctgaacttgaggaaattggtttcaggcttgtagtatatcctttatccttagttggggtatcaatgcgtgcaatgcaggatgctctagttgcgataaaagacggcggtgtac

SEQ ID NO: 26754 - DNA, 262 bp, Zea mays
ggacaccaccgccatggcagccaagatgcttgcattgttcgctctcctagctctttgtgcaagcgccactagtgcgacccatattccagggcacttgccaccagtcatgccattgggtaccatgaacccatgcatgcagtactgcatgatgcaacaggggcttgccagcttgatggcgtgtccgtccctgatgctgcagcaactgttggccttaccgcttcagacgatgccagtgatgatgccacagatgatgacgcctaac

SEQ ID NO: 26755 - DNA, 261 bp, Zea mays
aacaaatgcgttcattattccacaatgctcacttgctccgagtgccattattccacagttcctccctccagttacttcaatgggcttcgaacacccagctgtgcaagcctataggctacaacaagcgcttgcggcgagcgtcttagaacaaccaattgcccaattacaacaacaatccttggcacatctaaccatacaaaccatcgcaacgcagcagcaacaagcactgagccacctagccgtggtgaaccctatcgccta

SEQ ID NO: 26756 - DNA, 201 bp, Zea mays
agctgcgcctaacgctggcacactcttacaactgcaacaattgctgccattcaaccaacttgctttgacaaacccagcagcattctaccaacaacccatcattggtggtgccctcttttagatttcttatgagttatagttcaataataaagttttttgtctgatgtttgtggcttcccagaaataagaaagtacatttct

SEQ ID NO: 26757 - DNA, 256 bp, Zea mays
caatcgccagccctatctttggtgcagtcattggtacaaaccatcaaggcacagcagctgcagcaactcgtgctacctgtgatcaaccaagtagctctggcaaacctttctccctactatcagcaacaacaatttcttccattcaaccaactatctacactgaaccctgctgcttatttgcagcaacaactattaccattcagccagctagctactgcctactctcatcaacaacaacttcttccatttaaccaat

SEQ ID NO: 26758 - DNA, 256 bp, Zea mays
gaactctgcttcttatttgcaacaacaacaactaccattcagccagctacctgctgcctacccccagcaatttcttccattcaaccaactggcagcattgaactctcctgcttatttacagcagcaacaactactaccattcagccagctagctggtgtgagccctgctaccttcttgatacaaccacagttgttgccgttctaccagcacgctgcgcctaacgctggcaccctcttacaactgcaacaattgctg

SEQ ID NO: 26759 - DNA, 258 bp, Zea mays
cgagcgtcttacaacaaccaatttcccagttgcaacaacaatccttggcacatctaacaatacaaaccatcgcaacgcaacagcaacaacaattcctaccagcactgagccacctagccatggtgaaccctgccgcctacttgcaacagcagttgcttgcatcaaacccacttgctctggcaaacgtagttgcaaaccagccacaacaacagctgcaacagtttctgccagcgctcagtcaactagccatggtgaacc

SEQ ID NO: 26760 - DNA, 260 bp, Zea mays
attggcacaaaacatcagggcacaacaactacaacaacttgtgctagcaaaccttgctgcctactctcagcaacagcagtttcttccattcaaccaactaggttcattgaactctgcttcttatttgcaacaacaacaactaccattcagccagctacctgctgcctacccccagcaatttcttccattcaaccaactagcagcattgaactctcctgcttatttacagcagcaacaactactaccattcagccagctag

SEQ ID NO: 26761 - DNA, 259 bp, Zea mays
attttcagcattcaaaaacacaccaagcgaagtcactagcaacgacctaacaccaatggctaccaagatattagccctccttgcgcttcttgcccttttagtgagcgcaacaaatgcgttcattattccacagtgctcacttgctcctagtgccattattccacagttcctcccaccagttacttcaatgggcttcgaacatccagccgtgcaagcctacaggctacaactagcgcttgcggcgagcgccttacaacaa

SEQ ID NO: 26762 - DNA, 264 bp, Zea mays
agaccaacaagcaacatagaaagtggaatccagtagcaacaacagagcaacaatggcgaccaagatattttccctccttatgctccttgctctttctgcatgtgctgctaacgcgacaattttccctcaatgctcacaagctcctatagcttcccttcttcccccataccttccatcaatgatagcttcagtatgtgaaaacccagctcttcagccctataggctccaacaagcaatcgcagcaagcaacatacctttatcacc

SEQ ID NO: 26763 - DNA, 261 bp, Zea mays
cgacaattttccctcaatgctcacaagctcctatagcttcccttcttcccccataccttccatcaatgatagcttcagtatgtgaaaacccagctcttcaaccctataggctccaacaagcaatcgcagcaagcaacatacctttatcacccttgtttcaacaatcgccagccctatctttggtgcagtcattggtacaaaccatcagggcacagcagctgcagcaactcgtgctacctgtgatcaaccaagtagctctgg

SEQ ID NO: 26764 - DNA, 259 bp, Zea mays
gatccaacaggcaatcgcagctggcatcttacctttatcacccttgttcctccaacaatcatcagccctattacagcagttacctttggtgcatttattggcacaaaacatcagggcacaacaactacaacaacttgtgctagcaaaccttgctgcctactctcagcaacagcagtttcttccattcaaccaactagctgcattgaactctgcttcttatttgcaacaacaacaactaccattcagccagctacctgtt

SEQ ID NO: 26765 - DNA, 259 bp, Zea mays
ttgcaacaacaatccttgccacatctaacaatacaagccatcacaacgcaacagcaacaacagttcctaccagcactgagccacctagccatggtgaaccctgccgcctacttgcaagagcagctgcttgcatccaacccacttgctctggcgaacgtagttgcaaaccagcaacaacaacagctacaacagtttctgccaacgctcagtcaactagccatggtgaaccctgccgcctacgtacaacaacaacaactgc

SEQ ID NO: 26766 - DNA, 257 bp, Zea mays
tagcaacatagaaagcacaatagtgtaccaacaatggcagccaaaatattttgcttccttatgctccttggtctttctgcaagtgttgctaccgcaaccattttcccacaatgctcacaagctcctatagcttcccttcttcccccatacctctcaccagcggtgtcttcaatgtgtgaaaccccaattgttcaaccctacaggatccaacaggcaatcgcaacaggcatcttaccattatcacccttgttcctcca

SEQ ID NO: 26767 - DNA, 255 bp, Zea mays
cagggcacaacaactacaacaacttgtgctagcaaaccttgctgcctactctcagcaacagcagtttcttccattcaaccaactagctgcattgaactctgcttcttatttgcaacaacaacaactaccattcagccagctacctgctgcctacccccagcaatttcttccattcaaccaactggcagcattgaactctcctgcttatttacagcagcaacaactactaccattcagccagctagctggtgtgag

SEQ ID NO: 26768 - DNA, 253 bp, Zea mays
aagcaacatagaaagtggaatccagtagcaacaatagagcaacaatggcgaccaagatactttccctccttatgctccttgctctttctgcatgtgttgctaacgcgacaattttccctcaatgctcacaagctcctatagcttcccttcttcacccatacgttccatcgatgatagcatcagtatgcgaacacccagctctgcagcactatagggtgtaacaagcaatcgcagcaagcaacatacctttatt

SEQ ID NO: 26769 - DNA, 252 bp, Zea mays
gaccaactagcaacatagagagcacaatagtgtaccaacaatggcagctaaaatattttgcctccttatgctccttggtctttctgcaagtgctgctacggcgaccattttcccacaatgctcacaagctcctatagcttcccttcttcccccgtacctctcaccaacggtgtcttcggtatgtgaaaacccaattcttcaaccctacaggatccaacaggcaatcgcagctggcatcttacctttatcacc

SEQ ID NO: 26770 - DNA, 253 bp, Zea mays
attgagaccaacaagcaacatagaaagtggaatccagtagcaacaacagagcaacaatggcgaccaagatattttccctccttatgctccttgctctttctgcatgtgttgctaacgcgacaattttccctcaatgctcacaagctcctatagcttcccttcttcccccataccttccatcaatgatagcttcagtatgtgaaaacccagctcttcagccctataggctccaacaagcaatcgcagcaagcaa

SEQ ID NO: 26771 - DNA, 253 bp, Zea mays
gagtgtttgagttcgagaagtttgcagctggcactgaggcgattgccaagaagctagctgagcttacaaccacgaagggtgtcactaccatcatcggcggcggcgactctgttgctgctgtcgagaaggctgggctggccgacaagatgagccacatttcgaccggcggcggtgcgagcttggaactcttggaaggcaagactctacctggtgtccttgccctcgatgacgcctagatccgctgctgctgctg

SEQ ID NO: 26772 - DNA, 256 bp, Zea mays
cagctaagcccgtgccagcagttcggatcctgcggcgtcggcagcgtcggcagcccgttcctgggccagtgcgtcgagttcctgaggcaccagtgcagcccggcggcgacgccctacggctcgccacagtgccaggcgctgcagcagcagtgctgccaccagatcaggcaggtggagccgctgcaccggtaccaggcgacatacggtgtggtcctgcagtccttcctgcagcagcagccgcagggcgagctcgcgg

SEQ ID NO: 26773 - DNA, 257 bp, Zea mays
attttgagcattcagaaacacaccaagcgaactgacctagcaacgacttaacaacaatggctaccaagatattagccctccttgcgcttcttgccctttttgtgagcgcaacaaatgcgttcattattccacaatgctcacttgctcctagtgccattataccacagttcctccgaccagttacttcaatgggcttcgaacacctagctgtgcaagcctacaggctacaacaagcgcttgcggcgagcgtcttacaa

SEQ ID NO: 26774 - DNA, 255 bp, Zea mays
caaccatataggcttcaacaagcaatcgcagcaagcaacatacctttatcgcccttgttgtttcaacaatcgccagccctatctttggtgcagtcattggtacaaaccatcagggcacaacagctgcagcaactcgtgctacctctgatcaaccaagtagctctggcaaacctttctccctactctcagcaacaacaatttcttccattcaaccaactgtctacactgaaccctgctgcttatttgcagcaacaa

SEQ ID NO: 26775 - DNA, 254 bp, Zea mays
acagaacagcatgaagatggtcatcgttctcgtcgtgtgcctggctctgtcagctgccagcgcctctgcaatgcagatgccctgcccctgcgcggggctgcagggcttgtacggcgctggcgccggcctgacgacgatgatgggcgccggcgggctgtacccctacgcggagtacctgaggcagccgcagtgcagcccgctggcggcggcgccctactacgccgggtgtgggcagccgagcgccatgttccagc

SEQ ID NO: 26776 - DNA, 253 bp, Zea mays
cacaacagctactaccattcaaccaacttgtcgggagccctgctgccatcttattgcagcaacagttgctgccattccgtctacaagttgttgcaaacattgctgctttcttgcaacaacaacaattgctgccattttacccacaggttgtgggaaacattaacgccttcttgcaacaacaacaattgctgccattctacccacaggatgtggcaaacattgtcgccttcttacaacaacagcaattgctgcc

SEQ ID NO: 26777 - DNA, 251 bp, Zea mays
ccttgttcctccaacaaccgtcagccctattacagcagttacctttggtgcatttgttggcacaaaacatcaaggcacaacaactacaacaacttgtgctaggaaaccttgctgcctactctcagcaacagcagtttcttccattcaaccaactggctgcattgaactctgctgcttatttgcaacaacaactaccattcagtcagctagctgctgcctacccccagcaatttcttccattcaaccaactg

SEQ ID NO: 26778 - DNA, 248 bp, Zea mays
tgctcaggcatcccagatccgtcagatccgccgtaagatggttgagattatgatcaaccaggcttctacatgtgacctgaaagaacttgtttcgaagttcattccagaagttattggtaaggagattgagcagtctacctccagcatcttcccacttcaaaacgtcttcatccgcaaggtgaagatactcaaggcccccaagttcgatcttgggaaactcatggaggttcatggcgactacaaagagg

SEQ ID NO: 26779 - DNA, 250 bp, Zea mays
cagcactgagccacctagccatggtgaaccctgccgcctacttgcaagagcagctgcttgcatccaacccacttgctctggcgaacgtagttgcaaaccagcaacaacaacagctacaacagtttctgccaacgctcagtcaactagccatggtgaaccctgccgcctacgtacaacaacaacaactgctttcatctagcccgctcgctgtgggcaatgcacctacatacctgcaacaacaattgttgca

SEQ ID NO: 26780 - DNA, 249 bp, Zea mays
gaaccctatcgcctacctacaacagcaacaacttctttcatctagcccgctcgctatgggcaatgcacctacatacctgcaacaacagttgttgcaacaacagttgctgcaacaaattgtaccagctcttactcagctagctgtggcaaaccctgctgcctacttgcaacaactacttccattcaaccaactgactgtgtcgaactctgctgcgtacctacaacagcgacaacagttacttaatccact

SEQ ID NO: 26781 - DNA, 249 bp, Zea mays
acaaccccatggccatgatgatggcgcagaacatgccggccatgggtggactctaccagtaccagtaccagctgcccagctaccgcaccaacccctgtggcgtctccgctgccattccgccctactactgattcatgatatttgggaaatctcctctatccatccctctctatctatatatgtaataatgcagtaagacgacacacattatcatgtgtggtatgaccaataatatatgcatcataataa

SEQ ID NO: 26782 - DNA, 253 bp, Zea mays
cagctaagcccgtgccagcagttcggatcctgcggcgtcggcagcgtcggcagcccgttcctgggccagtgcgtcgagttcctgaggcaccagtgcagcccggcggcgacgccctacggctcgccacagtgccagtcgctgcagcagcagtgctgccaccagatcaggcaggtggagccgctgcaccggtaccaggcgacatacggtgtggtcctgcagtccttcctgcagcagcagccgcatggcgagctcg

SEQ ID NO: 26783 - DNA, 250 bp, Zea mays
attttgagcattcagaaacacaccaagcgaacgcactagcaacgacctaacaacaatggctaccaagatattagccctccttgcgcttcttgccctttttgtgagcgcaacaaatgcgttcattattccacaatgctcacttgctcctagtgccattattccacagttcctcccaccagttacttcaatgggcttcgaacacctagctgtgcaagccaacatgcaacaacaagcgcttgcggcgagcgtc

SEQ ID NO: 26784 - DNA, 255 bp, Zea mays
ctacatacctgcaacaacagttgttgcaacaacagttgctgcaacaaattgtaccagctcttactcagctagctgtggcaaaccctgctgcctacttgcaacaactacttccattcaaccaactgactgtgtcgaactctgctgcgtacctacaacagcgacaacagttacttaatccactagcggtggctaacccattggtcgctgccttcctacagcagcaacaattgctgccatacaaccagttctctttga

SEQ ID NO: 26785 - DNA, 263 bp, Zea mays
aaacaacaacaacaacaacaacagcaccaacaacaacatcaatgtgaaggccaacaacaacatcaccaacaatcacaaggccatgtgcaacaacacgaacagagccatgagcaacaccaaggacagagccatgagcaacaacatcaacaacaattccagggtcatgacaagcagcaacaaccacaacagcctcagcaatatcagcagggccaggaaaaatcacaacagcaacaatgtcattgccaggagcagcaacagactac

SEQ ID NO: 26786 - DNA, 258 bp, Zea mays
cagcagttgcttgcatcaaacccacttgctctggcaaacgtagttgcaaaccagccacaacgacagctgcaacagtttctgccagcgctcagtcaactagccatggtgaaccctgccgcctacctacaacagcaacaactgctttcatctagcccgctcgctgtggccaatgcacctacatacctgcatcaacaattgttgtcacagattgcaccagctctgactcacctagttgtggcaaaccctgctgcctacttg

SEQ ID NO: 26787 - DNA, 253 bp, Zea mays
ggacgtcagcctagcaattagctcatcgactccagattggagaactcgacaccatgaaggtgctgatcgttgcccttgctctcctggcgctcgctgcgagcgccgcctccagtacaaacggcggctgtggctgccagacaccaccgtttcatctaccgcctccgtactatatgccgcctccgttctatctgccgccgcagcagcagccgcagccatggcaatacaccactcatccaccgcagctaagctcgtg

SEQ ID NO: 26788 - DNA, 251 bp, Zea mays
acaccgtgtcccgcacggtggacgaggggttcaacagccagcacggggagaccttgaccgtgacgcatgggaagcaggtgcagaagtgggacaggatctccaaggcggccttcgagtgggctgaccaccccaccgctgtgatccccgacatgcagaaaccttgcatcaaggattagaacgaagcagccaagatcgttgcgctcgttaagaatcaaactactgccgctgccgctactgctgccagtgctgac

SEQ ID NO: 26789 - DNA, 245 bp, Zea mays
ccagatttgagaactcgacaccatgtaggtgcttatcgttgcccttgctctccttgcgctcgctgcgagcgtcgcctccagtacaagcggcggctgtggctgctagacaccaccgtttcatctacctcctccgttctatatgtcgtctccgttctatctgtcgcttagcagcagtcgacgctatggcaataccccactcgatcaccgcatctatgcccgtgccagtagttctgatcctgctgcgt

SEQ ID NO: 26790 - DNA, 258 bp, Zea mays
ctcccaccagttacttcaatggccttcgaacacccagctgtgcaagcctataggctacaacaagcgattgcggcgagcgtcttacaacaaccaattgcccaattgcaacaacaatccttggcacatctaacaatacaaaccatcgcaacgcaacagcaacaacagttcctaccagcactgagccacctagccatggtgaaccctgtcgcctacttgcaacagcagctgcttgcatccaacccacttgctctagcaaac

SEQ ID NO: 26791 - DNA, 246 bp, Zea mays
ccatgatgatggcgcagaacatgccggccatgggtggactctaccagtaccagctgcccagctaccgcaccaacccctgtggcgtctccgctgccattccgccctactactgattcatgatatttgggaaatctcctctatccatctctctctatctatatatgtaataatgcagtaagacgacacacattatcatgtgtggtatgaccaataatatatgcatggtcataataaagttttggtttt

SEQ ID NO: 26792 - DNA, 260 bp, Zea mays
atagaaagcacaatagtgtaccaacaatggcagccaaaatattttgcttccttatgctccttggtctttctgcaagtattgctaccgcaaccattttcccacaatgctcacaagctcctatagcttcccttcttcccccatacctctcaccagcggtgtcttcaatgtgtgaaaccccaattgttcaaccctacaggatccaacaggcaatcgcaacaggcatcttaccattatcacccttgttcctccaacaaccgtca

SEQ ID NO: 26793 - DNA, 260 bp, Zea mays
ggcaaggttcattctgtactccatatagaatatcctgattggcccgaccatggagtggcaactaatacagatgctgtacgggaaatctggaaacgactgcatcacattccaacggaacatcctatagttatccattgcagtgcaggaatcggaaggactggtacttacatcacaatccatactacaattgagcgaattcttcttggagataaaagctcttacgatcttgccaaaactgtaaagaattttagatcccaacg

SEQ ID NO: 26794 - DNA, 254 bp, Zea mays
tattttcagcattcaaaaacacaccaagcgaacgcagctagcaacgacctaacaccaatggctaccaagatattagccctccttgcgcttcttgcccttttagtgagcgcaacaaatgcgttcattattccacagtgctcacttgctcctagtgccattattccacagttcctcccaccagttacttcaatgggcttcgaacatccagccgtgcaagcctacaggctacaactagcgcttgcggcgagcgcctt

SEQ ID NO: 26795 - DNA, 254 bp, Zea mays
cgaggcgcactccgtcgacgagacctccgagtggcgtaccttcgccaacgagtccaacgacaacgaccccgtccgcgtcggcggcccctccaacccgctcctcaccgacggcggcctctccaccgtcatcgccaagcccaacggcgcccagggcgacttcctctcctcctccctcggcaggtggcagaaccgcggctccaaccccgaccgatccctcatcctcgccttccgcaccatagccaacatggctgaca

SEQ ID NO: 26796 - DNA, 252 bp, Zea mays
cccgtcagcccctctcgtttttcatccgccttcgcctccaaccgcgtgcgctccacgcctcctccaggaaagcgagagcttctgcataagaacaacaaatcaaaagcgtgatcagctcggtgccaacaaaacctcaacaaccaagtttcatgtctgatctcgacgtccagcttccatctgcctttgatccgtttgctgaggcaaatgctgaggactctggtgctggtcctggaacgaaggattatgtgcatg

SEQ ID NO: 26797 - DNA, 249 bp, Zea mays
gcgaccacccgattcgaagcgtgcggagagaccgaagaagcgggagagatggctcgtaccaagcagactgctcgcaagtccacgggagggaaggctcccaggaagcagcttgccaccaaggctgcccgtaagtctgcccccaccactggtggagtgaagaagcctcaccgctaccgccctggaactgttgccctccgtgagatccgcaagtatcagaagagcactgagctgctgatcaggaagctgccc

SEQ ID NO: 26798 - DNA, 249 bp, Zea mays
ccgagcgccatgttccagccgctccggcaacagtgctggaacatggcgctcggctgcccacacccggcgtagtagggcgccgccgccagcgggctgcactgcggctgcctcaacaactcagcgtaggggcagccgagcgccatgttccagccgctccggcaacagtgctgccagcagcagctgatgatgatgcacctgcagcccgtcgcgcacagctgcagatgatgatgcagcttgaacgtgccgctg

SEQ ID NO: 26799 - DNA, 250 bp, Zea mays
gtccagaggcttaagacatacaaggccaagctggttatcttcccaaggcgtgcgcgcaaggtgaaggctggtgactctactccagaggagcttgccaccgctacccaggtccagggtgactacatgccatttactcgtggtgagaaacgttcagttgaggttgtgaaggtcacagatgagatgaagtcatttgctgcctatggcaagctccgccttgagcggatgaacaagaaacatcttggtgcccgcc

SEQ ID NO: 26800 - DNA, 248 bp, Zea mays
gtgaaccctgccgcctacgtacaacaacaacaactgctttcatctagcccgctcgctgtgggcaatgcacctacatacctgcaacaacaattgttgcaacagattgtaccagctctgactcaactagctgtggcaaaccctgttgcctacttgcaacagctgcttccattcaaccaactgactctgtcgaactctgctgcgtacctacaacagcgacaacagttacttactccattggtagtggctaa

SEQ ID NO: 26801 - DNA, 253 bp, Zea mays
gaccaacaagcaacatagaaagtggaatccagtagcaacaatagagcaacaatggcgaccaagatactttccctccttatgctccttgctctttctgcatgtgttgctaacgcgacaattttccctcaatgctcacaagctcctatagcttcccttcttcccccataccttccatcaatgatagcttcagtatgtgaaaacccagctcttcaaccctataggctccaacaagcaatcgcagcaagcaacatac

SEQ ID NO: 26802 - DNA, 250 bp, Zea mays
caacgacctaacaccaatggctaccaagatattagccctccttgcgcttcttgcccttttagtgagcgcaacaaatgcgttcattattccacagtgctcacttgctcctagtgccagtattccacagttcctcccaccagttacttcaatgggcttcgaacatccagccgtgcaagcctacaggctacaactagcgcttgcggcgagcgccttacaacaaccaattgcccaattgcaacaacaatccttg

SEQ ID NO: 26803 - DNA, 251 bp, Zea mays
gcttgagcgtgccgctgccgccagcagcagcctgtacgagccagctctgatgcagcagcagcagcagctgctggcagcccagggtctcaaccccatggccatgatgatggcgcagaacatgccggccatgggtggactctaccagtaccagtaccagctgcccagctaccgcaccaacccctgtggcgtctccgctgccattccgccctactactgattcatgatatttgggaaatctcctctatccatcc

SEQ ID NO: 26804 - DNA, 254 bp, Zea mays
caacaacaacagtttctgccatcactgagccacctagccgtggtgaaccctgtcacctacttgcaacagcagctgcttgcatccaacccacttgctctggcgaacgtagctgcataccagcaacaacaacagctgcaacagtttatgccagtgctcagtcaactagccatggtgaaccctgccgtctacctacaactactttcatctagcccgctcgcggtgggcaatgcacctacgtacctacaacaacagtt

SEQ ID NO: 26805 - DNA, 253 bp, Zea mays
aacaacttcttccatttaaccaattggccgcactgaaccccgctgcttacttgcagcagcaaatactactaccatttagccagctagctgcagcaaaccgtgcttccttcttgacacagcaacagttgctgcctttctaccagcagtttgcggctaaccccgcaaccctctcacaactacaacaattgttgccctttgtccaacttgctttgacagacccagcggcctcctaccagcaacacatcattggtgg

SEQ ID NO: 26806 - DNA, 255 bp, Zea mays
ccgccctccacacaacgaaaacacaaacgcacacaagcacacgacgcaagggtgacgactgacgagagggggagagagagaggcgaggaaggagggagagagcacgggggcttgatcgaagatggatgccggagcaaaggtggtgaagaaggccgcggcggggcgtcgcggcgggggcggccccaagaagaagccggtctctcgctccgtgaaggccggcctccagttccccgtaagccgtatcggccgctacct

SEQ ID NO: 26807 - DNA, 122 bp, Zea mays
ctccaacgatgggttggaggtgccatcttttagattacatatgagatgtactcgacaatggtgccctcataccgacatatgtttcctagaaataatcaatatattgattgagatttatctat

SEQ ID NO: 26808 - DNA, 244 bp, Zea mays
caagaacccgacctatgaggctgtgaggagtactacaagaaaaatatttggcagatccaatactaaaggttggtaaaagtaatcaacacacttttgacatattagcatggtggaaagcacacaaagaagaatatcctctcttgggccagcttgctcatgatgtcttagctatgaaagtgtcaacagtagcttcagaatctgcttttagtgctggtggtcgtgtacttgatccattttgtactcg

SEQ ID NO: 26809 - DNA, 144 bp, Zea mays
cggctcgagtggacaagtatgtgtagctgcttgcatgtgctagtgtaatgtagtgtagtggtggacagtggcacaacctaataagcgcatgaactaattgcttgcgtgtgtagttaagtaccgatcggtaattttatattgcga

SEQ ID NO: 26810 - DNA, 226 bp, Zea mays
ccggcgggctgtacccctacgcggagtacctgaggcagccgcagtgcagcccgctggcggcggcgccctactacgccgggtgtgggcagacgagcgccatgtaccagccgctccggcaacagtgctgccagcagcagatgaggatgatggacgtgcagtccgtcgcgcacagctgcagatgatgatgcagcttgagcgtgccgctgccgccagcagaagcatgtac

SEQ ID NO: 26811 - DNA, 247 bp, Zea mays
atagaacaaccaattgcccaattacaacaacaatccttggcacatctaaccatacaaaccatcgcaacgcagcagcaacaagcactgagccacctagccgtggtgaaccctatcgcctacttgcaacaacagctggttgcatcccacccacttgctttggcaaacgtagctgcataccaacaacaacaacagttgcaacagtttctaccagcgctcagtcaactagccatggtgaaccctatcgcct

SEQ ID NO: 26812 - DNA, 248 bp, Zea mays
cttcaatgggcttcgaacacctagctgtgcaagccaacatgcaacaacaagcgcttgcagcgagcgtcttacaacaaccaattgcccaattgcaacaacaatccttgccacatctaacaatacaagccatcacaacgcaacagcaacaacagttcctaccagcactgagccacctagccatggtgaaccctgccgcctacttgcaagagcagctgcttgcatccaacccacttgctctggcgaacgta

SEQ ID NO: 26813 - DNA, 249 bp, Zea mays
caacagttacctttggtgcatttattggcacaaaacatcagggcacaacaactacaacaacttgtgctagcaaaccttgctgcctactctcagcaacagcagtttcttccattcaaccaactaggttcattgaactctgcttcttatttgcaacaacaacaactaccattcagccagctacctgctgcctacgcccagcaatttcttccattcaaccaactagcagcattgaactctcctgcttattta

SEQ ID NO: 26814 - DNA, 88 bp, Zea mays
agatatttgggaaatctcctctatccatctctctctatctatatatgtaataatgcagtaagacgacacacattatcatgtgtggtat

SEQ ID NO: 26815 - DNA, 247 bp, Zea mays
gtccaaatgacgagtctgcagcaaacattgaggcagctaaggaatggagggataagagggaggatttcaagaaaagggtcaggcgcatcgtgcggaaatcacaggaaatgttatgaagaaaatggaatactggggaagtcaaccgtgccatgtcaggctacgagattttgctttcaacctcaaaatgctcatctgacatcttgtgtattttccatttagcgtctgttcattggtgcaccagaaatgc

SEQ ID NO: 26816 - DNA, 250 bp, Zea mays
aattcttcaaccctacaggatccaacaggcaatcacagctggcatcttacctttatcacccttgttcctccaacaatcatcagccctattacatcagttacctttggtgcatttattggcacaaaacatcagggcacaacaactacaacaacttgtgctagcaaaccttgctgcctactctcagcaacagcagtttcttccattcaaccaactagctgcattaaactctgcttcttatttgcaacaacaa

SEQ ID NO: 26817 - DNA, 216 bp, Zea mays
actcagcatccgcaaagcgccaggtcgcggggctgttggcggcgcagatagcgcacaactgacggcgatgtgcggcctgcagcagccgactccatgcccctacgctgctgccggcggtgtcccccactgaagaaactatgtgctgtagtatagccgctggctagctagctagttgagtcatttagcggcgatgattgagtaataatgtgtcacgca

SEQ ID NO: 26818 - DNA, 195 bp, Zea mays
gcttcagtatgtgaaaacccagctcttcaaccatataggcttcaacaagcaatcgcagcaagcaacatacctttatcgcccttgttgtgtcaacaatcgccagccctatctttggtgcagtcattggtacaaaccatcagggcacaacagctgcagcaactcgtgctacctgtgatcaaccaagtagctctggca

SEQ ID NO: 26819 - DNA, 243 bp, Zea mays
ctagctggtgtgagccctgctaccttcttgacacaaccacagttgttgccgttctaccagcacgctgcgcctaacgctggcaccctcttacaactgcaacaattgctgccattcaaccaacttgctttgacaaacctagcagtgttctaccaacaacccatcattggtggtgccctcttttagatttcttatgagttatagttcaataataaagttttttgtctgatgtttgtggcttcccag

SEQ ID NO: 26820 - DNA, 197 bp, Zea mays
aggctaaccccgcaaccctcttacaactacaacaattgttgccctttgtccaacttgctttgacaaacccagcagcctcctaccaacaacacatcattggtggtgccctcttttagattgcttattagttgtaattcaataataaagttttttggatgatgtatgtggccaaccagaaataagaagttacatttcca

SEQ ID NO: 26821 - DNA, 162 bp, Zea mays
ctaataatgtaatggagccgctgactagctacctagctcgctagtttactcatttagcggcgatgagtaacgtatgtcacccatcaccatgggtggcagtgtgagcaatgacctgaatgaaccattgaaatggaaaggactaatatataaggacaaaagatg

SEQ ID NO: 26822 - DNA, 244 bp, Zea mays
ccattcagccagctagctggtgtgagccctgctaccttcttgacacaaccacagttgttgccgttctaccagcacgctgcgcctaacgctggcaccctcttacaactgcaacaattgctgccattcaaccaacttgctttgacaaacctagcagtgttctaccaacaacccatcattggtggtgccctcttttagatttcttatgagttatagttcaataataaagttttttgtctgatgtttg

SEQ ID NO: 26823 - DNA, 219 bp, Zea mays
acagaatggcgaacatgctggagcctactggtttggaagtccaaactatggagtatttacctgggatgacaaacttccaggagctcaggttcttctcagcaggttgcgactcttcctaagtccagggtacccttacgaagaaatactgaggacattccacaaccaaaccgacaatgttatgtgctcatatctgcctctattcaattcattcaacttcac

SEQ ID NO: 26824 - DNA, 252 bp, Zea mays
cattttcccacaatgctcacaagctcctatagcttcctttcttcccccatacctctcaccagcggtgtcttcagtatgtgaaaacccaattcttcaaccctacaggatccaacaggcaatcgcagcaggcatcttacctttatcacccttgttcctccaacaaccgtcagccctattacagcagttacctttggtgcatttgttggcacaaaacatcaaggcacaacaactacaacaacttgtgctaggaaa

SEQ ID NO: 26825 - DNA, 256 bp, Zea mays
aggggcggaagaagagagagaagacgtctctctcctctcggcgtccccgttccccaacctctcgtctgctgcctgcctgcctgcctgcctgcaaaaaggagtttgtcatggcgtctaagcgcatcctcaaggagctgaaggacctgcagaaagacccccccacatcatgcagtgcaggtcctgctggtgaggacatgtttcattggcaagcaacaattatgggaccacctgacagtccctatgctggtggtgtttt

SEQ ID NO: 26826 - DNA, 255 bp, Zea mays
aacctttctccctactctccgcaacaacaatttcttccattcaaccaactgtctacactgaaccctgctgcttatttgcagcaacaactattaccatttagccagctagctactgcctactctcaacaacaacaacttcttccatttaaccagttggccgcactgaaccccgctgcttatttgcagcagcaaatactactaccatttagccagctagctacagcaagccgtgcttccttcttgacacaacaacag

SEQ ID NO: 26827 - DNA, 166 bp, Zea mays
atacaccaaagaaaagaaaaatgctgtggaagcttatgtctatgacatgcgtaacaagctgtacgacaagtataacgattttgtcacacccgatgagaaggacgggttgattgcacagcttcaggaggttgaagattggctgtatgaagatggtgaggatgagaca

SEQ ID NO: 26828 - DNA, 198 bp, Zea mays
tagaaagtggaatccagtagcaacaacagagcaacaatggcgaccaagatattttccctccttatgctccttgctctttctgcatgtgttgctaacgcgacaattttccctcaatgctcacaagctcctatagcttcccttcttcccccataccttccatcaatgatagcttcagtatgtgaaaacccagctcttcag

SEQ ID NO: 26829 - DNA, 245 bp, Zea mays
caagtttctccttagcaagctgaaggacctccaattttttgttggtgagtccatgaaggatgatgcgtctgtggtattcgcctattacaaggatggtgccactaatccgacattcctctatttctctcatggtcttaaggagatcaagtgctaggcgtgcggcgaaattagttacccatgttgggtactatctatgtactattattatatccagaactatagttgtcctggctgaattgaactca

SEQ ID NO: 26830 - DNA, 245 bp, Zea mays
agcgccatgtacggcatcaggggcagtgcaagggtccaggtcgccagcgacaacgggaccacggtgttcgacgacgtgctccgtgcggggcagctgctcatcgtaccccagggctacctcgtcgccaccaaggcgcagggagaaggcttccagtacatcgccttcgagacgaaccctgacaccatggtcagccacgtcgccgggaagaactccgtcctgagcgacttgccggccgccgtcatcgc

SEQ ID NO: 26831 - DNA, 211 bp, Zea mays
caacaatccttggcacatctaaccctacaaaccattgcaacgcaacaacaacaacaacaacagtttctgccatcactgagccacctagccgtggtgaaccctgtcacctacttgcaacagcagctgcttgcatccaacccacttgctctggcgaacgtagctgcataccagcaacaacaacagctgcaacagtttatgccagtgctcagtc

SEQ ID NO: 26832 - DNA, 245 bp, Zea mays
catatctactatactatactctaggaagcaaggacaccaccgccatggcagccaagatgcttgcattgttcgctctcctagctctttgtgcaagcgccactagtgcgacccatattccagggcacttgccaccagtcatgccattgggtaccatgaacccatgcatgcagtactgcatgatgcaacaggggcttgccagcttgatggcgtgtccgtcgctgatgctgcagcaactgttggcctta

SEQ ID NO: 26833 - DNA, 180 bp, Zea mays
caatgggcttcgaacacccagctgtgcaagcctataggctacaacaagcgcttgcagcgagcgtcttagaacaaccaattgcccaattacaacaacaatccttagcacatctaaccatacaaaccatcgcaacgcagcagcaacaagcactgagccacctagccgtggtgaaccctatcg

SEQ ID NO: 26834 - DNA, 161 bp, Zea mays
gagcgcagaagaacccgatcgacaccatgagggtgttgctcgttgccctcgctctcctggctctcgctgcgagcgccacctccacgcatacaagcagcggctgcggctgccagccaccgccgccggttcatctaccgccgccgccaccatgccactaccct

SEQ ID NO: 26835 - DNA, 247 bp, Zea mays
cctgagcagtaccttgacgagaagaccatcttccaccttaacccatctggccgctttgtcattggtggacctcacggcgatgctggcctcactggccgcaagatcatcattgacacctactgtggctggggagcccatggtggtggcgctttctccggcaaggacccaaccaaggttgaccgcagcggagcctatgtcgcaaggcaggctgccaagagcatcgtcgccagcggccttgctcgccgcg

SEQ ID NO: 26836 - DNA, 251 bp, Zea mays
ctggcatcttacctttatcacccttgttcctccaacaatcatcagccctattacatcagttacctttggtgcatttattggcacaaaacatcagggcacaacaactacaacaacttgtgctagcaaaccttgctgcctactctcagcaacagcagtttcttccattcaaccaactagctgcattgaactctgcttcttatttgcaacaacaacaactaccattcagccagctacctgctgcctacccccag

SEQ ID NO: 26837 - DNA, 234 bp, Zea mays
gggaagcctatctaccactttgttgggacttccaccttcagcgagtacaccgtcatgcatgtgggttgtgttgcaaagatcaaccctcaggctccccttgataaagtttgcgtccttagctgtggtatttctaccggtcttggtgcatcaattaatgttgcaaaacctccgaagggttcgacagtggctgttttcggtttaggagccgttggtcttgccgctgcagaaggtgca

SEQ ID NO: 26838 - DNA, 198 bp, Zea mays
gggcagctgacctttttgacagtgagggacagtcgtctcaatcaaacaccatcaaacagaaagttgcagaaattgctgctcagttggaacagtacccaaaagcaactgagatatttgaagcgatcgctcgtcagtcaatcaacaacaatcttcttaagtatagtgtcagaggaattcttcttaatgctggcatctgtc

SEQ ID NO: 26839 - DNA, 239 bp, Zea mays
agccaatcgatgagccggcgcaagacaagtgttctcctatcaacgcttttcagttgatcgggatgacctcttcccttgacctttctggtttcttcgaggaagaggatgcagcgcaaagaaagattcggttcacttcgacgcacccacccaaggatctatttgacaagatcgagagcgttgtcatggagatgggattcaaagtccataggggggcaggcaagctcaaggtcttgaagaat

SEQ ID NO: 26840 - DNA, 240 bp, Zea mays
cgtacctacaacagcgacaacagttacttaatccattggcagtggctaacccattggtcgctgccttcctacagcagcaacaattgctgccatacaaccggttctctttgatgaatcctgtcttgtcgaggcagcaacccatcgttggaggtgccatcttttagattacatatgagatgtactcgataatggtgccctcataccggcatgtgtttcctagaaataatcaatatattggtt

SEQ ID NO: 26841 - DNA, 242 bp, Zea mays
catttaaccaattggccgcactgaacctcgctgcttatttgcagcagcaaatattactaccatttagccagctagctgcagcaagccgtgcttccttcttgacacagcaacagttgctgcctttctaccagcagtttgcagctaaccccgcaaccctcttacaactacaacaattgttgccctttgtccaacttgctttgacaaacccagcagcctcctaccaacaacacatcattggtggt

SEQ ID NO: 26842 - DNA, 239 bp, Zea mays
ggaatctcttggttatgtgctcatgtatttcttaagaggaagtctcccttggcaaggcctgaaagctggcacaaagaagcagaagtatgataggatcagtgaaaagaaaatgctgacgccagttgaggtcctctgtaaatcatatccatcagagtttactgcatactttcattactgtagatcactacgattcgaagataaaccagattactcctatttgaagagactcttccgtgact

SEQ ID NO: 26843 - DNA, 187 bp, Zea mays
acatcttatccctctttgcgcttcttgccctttttgtgagcgcaacaaatgcgatcattattccacaatgctcacttgctcctagtgccattattccacagttcctccctccagttacttcaatgggcttcgaacacccagctgtgcaagcctacaggctacaacaagcgcttgcggcgagcgtctt

SEQ ID NO: 26844 - DNA, 243 bp, Zea mays
gtcgggggccaggacaagatcaggccactgtggaggcattacttccagaacacccagggtctcatctttgttgtggacagcaatgatagggaccgtgttgttgaagcaagggatgagcttcaccgaatgctgaatgaggatgagttacgtgatgctgtgttgcttgtgtttgctaacaagcaagatcttccaaatgctatgaatgccgctgagatcactgataagcttggactgcattcactt

SEQ ID NO: 26845 - DNA, 88 bp, Zea mays
ccggcgatgattgagtaataatgtgtcacgcatcaccatgggtggcagtgtcagtgtgagcaatgacctgaatgaacaattgacatga

SEQ ID NO: 26846 - DNA, 243 bp, Zea mays
tagcaacatagaaagcacaatagtgtaccaacaatcgcagccaaaatattttgcctccttatgctccttggtctttctgcaagtgctgctacggcgaccattttcccgcaatgctcgcaagctcctatagcttcccttcttcgcccgtacctctcaccagcggtgtcttcggtatgtgaaaacccaattcttcaaccctacaggatccaacaggcaatcacagctggcatcttacctttatca

SEQ ID NO: 26847 - DNA, 243 bp, Zea mays
cactagttccattattccacagttcctcccaccagttacttcaatggccttcgaacacccagctgtgcaagcctataggctacaacaagcgattgccgcgagcgtcttacaacaaccaattgcccaattgcaacaacaatccttggcacatctaacaatacaaaccatcgcaacgcaacagcaacaacagttcctaccagcactgagccacctagccatggtgaaccctgtcgcctacttgca

SEQ ID NO: 26848 - DNA, 263 bp, Zea mays
acaacttcttccatttaaccaattggccgcactgaaccccgctgcttatttgcagcagcaaatactactaccatttagccagctagctgcagcaaaccgtgcttccttcttgacacagcaacagttgctgcctttctaccagcactttgcggctaaccccgcaaccctcttacaactacaacaattgttgccctttgtccagcttgctttgacagacccagcggcctcctaccaacaacacatcattggtggtgccctctttt

SEQ ID NO: 26849 - DNA, 256 bp, Zea mays
ctttgatcagtcagttgggaaaggtcggaaaggttgaagaagcaggctgcttgtttgagcagatcatcagaagtggcatgaagccagatgttgttacttttaatacgttaatcagtattaatgcgaaagcaggtaggctaaaggaagctggcaaatatttgatgaggatgatcagagaaggcattgcaccaaaccatgccacagaaacaatattgattttccttgataaggagattgaaaagaccaggtagcagca

SEQ ID NO: 26850 - DNA, 261 bp, Zea mays
ccaagcccgtgccagctgcagggaacctgcggcgttggcagcaccccgatcctgggccagtgcgtcgagttcctgaggcatcagtgcagcccgacggcgacgccctactgctcgcctcagtgccagtcgttgcggcagcagtgttgccagcagctcaggcaggtggagccgcagcaccggtaccaggcgatcttcggcttggtcctccagtccatcctgcagcagcagccgcaaagcggccaggtcgcggggctgttggcg

SEQ ID NO: 26851 - DNA, 263 bp, Zea mays
gcacgtcatctcaatggaggagatcctcgggcccttctgggagctgctgccagcgccagcgccagagccagagccggagcagcctccggtaaccggcatcgtcgtcggcagtgtcatagacgttgctgctgctggtcacggtgacggggagggtggcggcgacatgatggatcagcagcacgccacagagtggacctttgagaggttactggaagaggaggctctgacgacaagcacaccgccgccggtggtggtggtgccga

SEQ ID NO: 26852 - DNA, 262 bp, Zea mays
ccaattggcaacaagtactatcttggccctgctcctttgcaggatatggcaaggcaaattgctacagccaatggccctactggctataatagggattacctgttctcaatggagaaggcattagccagcattagccacgaagatgattcgatcatagagcttgcaaacgaggtgaggaaggtgctcaacagaacaaaggagaccaagatcactggtgccaatgcttccctgaaatcacatgcccctcttgtgcacctgtccg

SEQ ID NO: 26853 - DNA, 262 bp, Zea mays
agctgctgcctacccccagcaatttcttccattcaaccaactggcagcattgaactctgctgcttatttacaacagcaacagctaccaccattcagccagctagctgatgtgagccctgttgccttcttgacacaacaacagttgttgccgttctacctgcacgctgcgcctaacgctggcaccctcttacaactgcaacaattgctgccattcaaccaacttgctttgacaaacccaacagcgttctaccaacaacccatc

SEQ ID NO: 26854 - DNA, 257 bp, Zea mays
atcgtgaaccactacgagatgcgcgggaacatcctgagctacaacctgggcggcatgggctgcagcgcgggggtcatcgccgtcgacctgccccgcgacatgctgcaggccagcagcgcgggcctagccgtggtggtcagcacggaggccgtctccttcacgtggtaccccggaaggcgccgctccatgctcatcctcaacgccttcttccaggccgggtgcgactgcacggcggtgctgctgtccaacagccgccg

SEQ ID NO: 26855 - DNA, 264 bp, Zea mays
acgcaatcacagctggcatcttacctttatcacccttgttcctccaacaatcatcagccctattacatcagttacctttggtgcatttattggcacaaaacatcagggcacaacaactacaacaacttgtgctagcaaaccttgctgcctactctcagcaacagcagtttcttccattcaaccaactagctgcattgaactctgcttcttatttgcaacaacaacaactaccattcagccagctacctgctgcctacccccagc

SEQ ID NO: 26856 - DNA, 261 bp, Zea mays
ctgtctacactgaaccctgctgcttatttgcagcaacaactactaccattcagccagctatctgctgcctacccccagcaatttcttccattcaaccaactgacagctttgaactctcctgcttatttacagcagcaacaactactaccattcagccagctagctggtgtgagccctgctaccttcttgacacaaccacaattgttgccgttctaccagcacgctgcgcctaacgctggcaccctcttacaactgcaacaa

SEQ ID NO: 26857 - DNA, 255 bp, Zea mays
tagcaacatagaaagcacaatagtgtaccaacaatggcagccataatattttgcactcttatgctccttggtctttctgcaagtgctgctacggcgaccattttcccgcaatgctcgcaagctcctatagcttcccttcttcccccgtacctctcaccagcggtgtcttcggtatgtgaaaacccaattcttcaaccctacaggatccaacaggcaatcacagctggcatcttacctttatcgaccttgttcctc

SEQ ID NO: 26858 - DNA, 260 bp, Zea mays
caactaccaacatacatagtgaagtacactagcaacatcttagcaccaatggcagccaagatttttgcgctccttgccctccttgctctttcagcaagtgttgctaccgcgactattattccacaatgctcacaacaatacctctctccagtgatagccgcgagatttgaatacccatctatacaatcctacaggctacaagaggccatcacagcaagcatcttacggtcgttagcattgaccgtccaacaaccatatgc

SEQ ID NO: 26859 - DNA, 262 bp, Zea mays
ccgcacccttgcggattacaacatccagaaggagagcaccctccacctggtgctccgtctcaggggtggcatgcagatctttgtgaagaccctgactggaaaaaccataaccctggaggttgagagctcggacaccatcgacaatgtgaaggcgaagatccaggacaaggagggcatccccccggaccagcagcgtctgatcttcgccggcaaacagctggaggatggccgcaccctagcagactacaacatccaaaaggag

SEQ ID NO: 26860 - DNA, 178 bp, Zea mays
cgcaccaacccctgtcgcgtctccgctgccattccgccctactactgattcatgatatttgggaaatctcctctatcaatccctctctatctatatatgtaataatgcagtaagacgacacacattatcatgtgtggtatgaccaataatatatgcatcataataaagttttggtttt

SEQ ID NO: 26861 - DNA, 258 bp, Zea mays
aacgcgacaattttccctcaatgctcacaagctcctatagcttcccttcttcccccataccttccatcaattatagcttcaatatgtgaaaacccagctcttcaaccatataggcttcaacaagcaatcgcagcaagcaacatacctttatcgcccttgttgtttcaacaatcgccagccctatctttggtgcagtcattggtacaaaccatcagggcacaacagctgcagcaactcgtgctacctctgatcaaccaa

SEQ ID NO: 26862 - DNA, 255 bp, Zea mays
atcaggaccatggaagacgtgccccaagcgtgttctgtacacgagggatattctaacattgatagagtaatcacttgaacataacatccaaaggatatagagtgtttatttacagtggagaccattccttgcttgttccttttacttcaactttggagtggctaaagaaactaaactacaaggaaatcgagaaatggcacccttggtacttggagaatcagattgctgggtactcaattaggtacgagaacaata

SEQ ID NO: 26863 - DNA, 128 bp, Zea mays
aatgatagcatcagtatgtgcaaacccagctcttcagccctataggctccaacaagtagtcgcagcaagcaacatacctttatcagccttgttgtttcaacaatcgcgagccctatctttggtgcagt

SEQ ID NO: 26864 - DNA, 257 bp, Zea mays
cacagagaaggatcagtttgtcatccttgcatcagatggggtgtgggatgtcctcagcaaccaggaggctgttgacatcgtgtcgtcgtccccaagccgatcaaaggccgcaagatccctcgtcgaggccgcgacccgtgaatggaaaaccaagtacccgacatcgaagatcgatgactgcgcagtggtctgcctgtatctggacggcaaaatggaccacgaacgtgactcgacggcctccatggacaacatgagcc

SEQ ID NO: 26865 - DNA, 258 bp, Zea mays
caggttccgtgtcccctgcctccgccggtccaactgcgccaacgtctgcaggaccgcctggttccccggcggcaggtgccgcggcttccgccgccgctgcttctgcaccacgcactgccactgattcgctcgctcgcccagcggccggctggcgtacccgtcgatcgcgtcgcgaccagtccatggctccatgcatgagtaacaagggtgtgcgcggtttgtgatgccaaattgtatcctcgtcgtgtgttgaagcgt

SEQ ID NO: 26866 - DNA, 254 bp, Zea mays
aaagcattcctaagcaccaagacttcgattccacacatttgtttcttcgtgatagcatcaagagctcttgttgagttgtgaactcgtcgggttgtgttgcgagctcttgttgtgacttgtgtgcgtgttgacattctgatttcgtgtcttgtgtgcgttgctcatccctcccttactccgtgcttctttgtgaacttcaagtgtaagggcgagaagctccaagttgtggagatccttgcaaacgggattaagaa

SEQ ID NO: 26867 - DNA, 257 bp, Zea mays
caaaacatcagggcacaacaactacaacaacttgtgctagcaaaccttgctgcctactctcagcaacagcagtttcttccattcaaccaactaggttcattgaactctgcttcttatttgcaacaacaacaactaccattcagccagctacctgctgcctacccccagcaatttcttccattcaaccaactagcagcattgaactctcctgcttatttacagcagcaacaactactaccattcagccagctagctgg

SEQ ID NO: 26868 - DNA, 257 bp, Zea mays
caacaactacaacaacttgtgctagcaaaccttgctgcctactctcagcaacagcaatttcttccattcaaccaactggcagcattgaactctcctgcttatttacagcagcaacaactactaccattcagccagctagctggtgtgagccctgctaccttcttgatacaaccacagttgttgccgttctaccagcacgctgcgcctaacgctggcaccctcttacaactgcaacaattgctgccattcaaccaact

SEQ ID NO: 26869 - DNA, 255 bp, Zea mays
gttctctgcatgatatcttgcatggaagaaagggtgttccaggtgcacagcctggcccagcacttgattggatgcagcgggttaagattgctattgatgctgctaaagggctagagtatcttcatgaaaaggtgcagccttcaatagtccaccgggacatacggtctagcaatattcttctgtttgaggactacagagcgaaaattgcagatttcaatctttcgaatcagtctccagatatggctgctcgtttgc

SEQ ID NO: 26870 - DNA, 258 bp, Zea mays
caacaatggcagccaaaatattttgcttccttatgctccttggtctttctgcaagtgctgctaccgcaaccattttcccacaatgctcacaagctcctatagcttcctttcttcccccatacctctcaccagcggtgtcttcagtatgtgaaaacccaattcttcaaccctacaggatccaacaggcaatcgcagcaggcatcttacctttatcacccttgttcctccaacaaccgtcagccctattacagcagttac

SEQ ID NO: 26871 - DNA, 246 bp, Zea mays
agcacttttagaccttctcaagtcaaaatatattcaattacatgactttggatctgaaatcctcccaagagctgtactagatcatagtgtgcaggcatgcatttttacgggctattgggaggatgttggaacaatcaaatcattctttgatgcaaacttggccctcactgagcagccttccaagtttgatttttatgatccaaaaacacctttcttcactgcaccccgatgcttgcctccgacgca

SEQ ID NO: 26872 - DNA, 251 bp, Zea mays
cagcagcagccgcagccatggcaataccccactcaaccaccgcagctaagcccgtgccagcagttcggatcctgcggcgtcggcagcgtcggcagcccgttcctgggccagtgcgtcgagttcctgaggcaccagtgcagcccggcggcgacgccctacggctcgccacagtgccaggcgctgcagcagcagtgctgccaccagatcaggcaggtggagccgctgcaccggtaccaggcgacatacggtgt

SEQ ID NO: 26873 - DNA, 251 bp, Zea mays
accgcgtcactgtaaagaaaagcaagaatatactctttgtcatctccaaaccagatgtgttcaagagcccgaattccgacacgtatgtcatattcggcgaggctaagatcgaggacctcagctcccaactgcagacccaggcagcagagcagttcaaggctcctgacttgagccagatgatctcgaatccagagacgtctggcccgggacaggaggacaatgatgaggaggtcgacgaaactggtgttgag

SEQ ID NO: 26874 - DNA, 249 bp, Zea mays
  unsure (1)..(249): unsure at all n locations
attttcagcattcaaaaacacaccaagcgaaccnatctagcaacgacctaacaccaatggctaccaagatattagccctccttgcgcttcttgcccttttagtgagcgcaacaaatgcgttcattattccacagtgctcacttgctcctagtgccagtattccacagttcctcccaccagttacttcaatgggcttcgaacatccagccgtgcaagcctacaggctacaactagcgcttgcggcgagcg

SEQ ID NO: 26875 - DNA, 251 bp, Zea mays
gtcgcacatatctactatactatactctaggaagcaaggacaccaccgccatggcagccaagatgcttgcattgttcgctctcctagctctttgtgcaagcgccactagtgcgacccatattccagggcacttgccaccagtcatgccattgggtaccatgaacccatgcatgcagtactgcatgatgcaacaggggcttgccagcttgatggcgtgtccgtccctgatgctgcagcaactgttggcctta

SEQ ID NO: 26876 - DNA, 251 bp, Zea mays
aaggaattaaagccattgtctttgtctcagggggaaattgttttcaacattgggaaaagtgtagttgagaataaatctgattctcttgcattcagacgtcctggactacaaaaagaaggatcaaaggtcgtctatggtgttccaaaacatggaaagaagaagaagtttatggaagtaagcaaacattatgatgcaggccaatctgacaagatttctgagggcaattcatctaacagattcgtgaaacatct

SEQ ID NO: 26877 - DNA, 250 bp, Zea mays
aacgcgacaattttccctcaatgctcacaagctcctatagcttcccttcttcccccataccttccatcaatgatagcttcagtatgtgaaaacccagctcttcagccctataggctccaacaagcaatcgcagcaagcaacatacctttatcacccttgttgtttcaacaatcgccagccctatctttggtgcagtcattggtacaaaccatcagggcacagcagctgcagcaactcgtgctacctgtga

SEQ ID NO: 26878 - DNA, 251 bp, Zea mays
ccaccagcaacaacaacagctacaacagtttctgccaacgctcagtcaactagccatggtgaaccctgccgcctacgtacaacaacaacaactgctttcatctagcccgctcgctgtgggcaatgcacctacatacctgcaacaacaattgttgcaacagattgtaccagctctgactcaactagctgtggcaaaccctgttgcctacttgcaacagctgcttccattcaaccaactgactctgtcgaact

SEQ ID NO: 26879 - DNA, 248 bp, Zea mays
gcttggaggacccccgctgccgtgcggccgactcccggcgcccgtgtcccatcgctcgtgcgggcatcccgtgcctgctgcgttgagaagtgcttgcgtgctgctacccgtcccacgggaagccgagctcgatacacgttgccttcgtcgagctcaccccccggggtgcggctcgtcggctcgagaacgcccgcagcgtttgcctcgtgccgccgtcagcctatggccggcggcaccgaggacacctc

SEQ ID NO: 26880 - DNA, 251 bp, Zea mays
gtagcaacaatagagcaacaatggcgaccaagatactttccctccttatgctccttgctctttctgcatgtgttgctaacgcgacaattttccctcaatgctcacaagctcctatagcttcccttcttcccccataccttccatcaatgatagcttcagtatgtgaaaacccagctcttcaaccctataggctccaacaagcaatcgcagcaagcaacatacctttatcacccttgtttcaacaatcgcca

SEQ ID NO: 26881 - DNA, 252 bp, Zea mays
cccatgcccgtaccaacagccgcatccaagcccgtgccagctgcagggaacctgcggcgttggcagcaccccgatcctgggccagtgcgtcgagtttctgaggcatcagtgcagcccgacggcgacgccctactgctcgcctcagtgccagtcgttgcggcagcagtgttgccagcagctcaggcaggtggagccgcagcaccggtaccaggcgatcttcggcttggtcctccagtccatcctgcagcagca

SEQ ID NO: 26882 - DNA, 249 bp, Zea mays
caagaagtaccatgctttcttggcatcagaggccatcatcaagcagattccccgtctccttggtcctggtctcaacaaggcaggcaagttcccgaccctggttactcaccaggaatccctcgagtccaaggtgcacgagactaaggcaaccgtcaagttccagctcaagaaggctctttgcatgggcgttgccgttggcaacttggcgatggaggagatgcagatccagcagaacatccagatgagcgt

SEQ ID NO: 26883 - DNA, 262 bp, Zea mays
cgaagagcctgagaacaacgaagatgcccctgatgacgtcataggtggtgagggtgaagataaggaacaggaaaagaccaagcgtgaacgcaaaacaacaaaatacatgacgaagtacgaacgtgcgcgcatcctgggtacacgagccttgcagataagcatgaatgctccagtcatggttgagcttgagggtgaaactgaccctcttgagattgcaatgaaggagctgagagcgcgcaagatacccttcacgatcagacgg

SEQ ID NO: 26884 - DNA, 262 bp, Zea mays
cattgagaccaactagcaacatagaaagcacaatagtgtaccaacaatggcagccaaaatattttgcttccttatgctccttggtctttctgcaagtgttgctaccgcaaccattttcccacaatgctcacaagctcctatagcttcccttcttcccccatacctctcaccagcggtgtcttcaatgtgtgaaaccccaattgttcaaccctacaggatccaacaggcaatcgcaacaggcatcttaccattatcacccttg

SEQ ID NO: 26885 - DNA, 261 bp, Zea mays
caacagctgcagcaactcgtgctaccagtgatcagccaagtagctctggcaaacctttctccctactctcagcaacaacaatttcttccattcaaccaactgtctacactgaaccctgctgcttatttgcagcaacaacaactactaccattcagccagctagctactgcctactctcagcagcaacaatttcttccatttaaccaattcgccgcactgaacccctctgcttatttccagcagcaaatactactaccattt

SEQ ID NO: 26886 - DNA, 260 bp, Zea mays
ctgcttcttatttgcaacaacaacaactaccattcagcaagctatctgctgcctacccccagcaatttcttccattcaaccaactgacagctttgaactctcctgcttatttacagcagcaacaactactaccattcagccagctagctggtgtgagccctgctaccttcttgacacaaccacaattgttgccgttctaccagcacgctgcgcctaacgctggcaccctcttacaactgcaacaattgctgccattcaac

SEQ ID NO: 26887 - DNA, 178 bp, Zea mays
caactagcaacatagaaagcacaatagtgtaccaacaatggcagccaaaatattttgcctccttatgctccttggtctttctgcaagtgctgctacggcgaccattttcccacaatgctcacaagctcctatagcttcccttcttcccccgtacctctcaccagcggtgtcttcggta

SEQ ID NO: 26888 - DNA, 72 bp, Zea mays
cgttgtatcgaataatgagttgacatgccatcgcgtgtgactcattattaacaataaaacaagtttcctctt

SEQ ID NO: 26889 - DNA, 260 bp, Zea mays
agctcattcgatgattttttctctgaaatgccatggcttgctgtaccctgggaagatgaaaggaaagcatcgctgaagaaaaccttcaagatccgtggaatcccttcacttgtcgccatcggacctactgggcagacagtcagcagggacgcaaagtcccagctgatgatccacggtgctgatgctttcccattcaccgaggagagacttgaggagctacagaagaagctggatgagatggccgaagggtggcctcagaa

SEQ ID NO: 26890 - DNA, 261 bp, Zea mays
atgaaaacccagctcttcagccctataggctccaacaagcaatcgcagcaagcaacatacctttatcacccttgttgtttcaacaatcgccagccctatctttggtgcagtcattggtacaaaccatcagggcacagcagctgcagcaactcgtgctacctgtgatcaaccaagtagctctggcaaacctttctccctactctcagcaacaattgctgccattcaaccaacttgctttgacaaacccaacaacgttctacc

SEQ ID NO: 26891 - DNA, 257 bp, Zea mays
cagcaaagcggcagtgcgtagagaggatcgtcgaacagaacagcatgaagatggtcatcgttctcgtcgtgtgcctggctctgtcagctgccagcgcctctgcaatgcagatgccctgcccctgcgcggggctgcagggcttgtacggcgctggcgccggcctgacgacgatgatgggcgccggcgggctgtacccctacgcggagtacctgaggcagccgcagtgcagcccgctggcggcggcgccctactacgcc

SEQ ID NO: 26892 - DNA, 145 bp, Zea mays
acccactgaagaaactatgtgctgtagtatagccgctggctagctagctagttgagtcatttagcggcgatgattgagtaataatgtgtcacgcatcaccatgggtggcagtgtcagtgtgagcaatgacctgaatgaacaattg

SEQ ID NO: 26893 - DNA, 257 bp, Zea mays
cgacacttactctagaagtgacatcacagccctagctaaagacaaggtctacacacatgttcgcctggatgagatgaccattcatcaggctttacagcttggacaagatgccaatacgccttttggattttttaacggtcagagatgccagatgtgcctccggtctgatcctttgctgaaggtgatggagcgactggctaatccgggggtgcggcgggtgttcatagtagaagctgggagcaaacgtgtggagggta

SEQ ID NO: 26894 - DNA, 156 bp, Zea mays
attgagaccaacaagcaacatagaaagtggaatccagtagcaacaatagagcaacaatggcgaccaagatattttccctccttatgctccttgctctttctacatgtgttgctaacgcgacaattttccctcaatgctcacaagctcctatagctt

SEQ ID NO: 26895 - DNA, 254 bp, Zea mays
gtttgtgcctgacccaagatttgaggaggttaaggaatttgtccgcagtggtgtctttgggacttacagctatgatgaattgatgggttctttggaaggaaatgaaggttacggacgtgcagattatttccttgttggcaaggacttccccagctatattgaatgccaagaaaaagttgatgaggcgtaccgagatcagaagttatggacaaggatgtctatcctcaacacggctggctcatccaagttcagca

SEQ ID NO: 26896 - DNA, 245 bp, Zea mays
tccagagcgcagaagaacccgatcgacaccatgagggtgttgctcgttgccctcgctctcctggctctcgctgcgagcgccacctccacgcatacaagcagcggctgcggctgccagccaccgccgccggttcatctaccgccgccggtgcatctgccacctccggttcacctgccacctccggtgcatctcccaccgccggtccacctgccgccgccggtccacctgccaccgccggtccatgt

SEQ ID NO: 26897 - DNA, 256 bp, Zea mays
tgcagtcattggtacaaaccatcagggcacagcagctgcagcaactcgtgctacctgtgatcaaccaagtagctctggcaaacctttctccctactctcagcaacaacaatttcttccattcaaccaactgtctacactgaaccctgctgcttatttgcagcaacaactattaccattcagccagctagctactgcctactctcagcaacaacaacttcttccatttaaccaattggccgcactgaaccccgctgc

SEQ ID NO: 26898 - DNA, 206 bp, Zea mays
caatagtgtaccaacaatggcagccaaaatattttgcctccttatgctccttggtctttctgcaagtgctgctacggcgaccattttcccgcaatgctcgcaagctcctatagcttcccttcttcccccgtacctctcaccagcggtgtcttcggtatgtgaaaacccaattcttcaaccctacaggatccaacaggcaatcgcag

SEQ ID NO: 26899 - DNA, 251 bp, Zea mays
actaccattcagccagctagctggtgtgagccctgctaccttcttgacacaaccacagttgttgccgttctaccagcacgttgcgcctaacgcgggcaccctcttacaactgcaacaattgctgccattcaaccaacttgctttgacaaacccagcagcgttctaccaacaacccatcattggtggtgccctcttttagatttcttatgagttatagttcaataataaagttttttgtctgatgtttgtgg

SEQ ID NO: 26900 - DNA, 254 bp, Zea mays
gagcaacaatggcgaccaagatattttccctccttatgctccttgctctttctgcatgtgttgctaacgcgacaattttccctcaatgctcacaagctcctatagcttcccttcttcccccataccttccatcaatgatagcttcagtatgtgaaaacccagctcttcagccctataggctccaacaagcaatcgcagcaagcaacatacctttatcacccttgttgtttcaacaatcgccagccctatctttg

SEQ ID NO: 26901 - DNA, 253 bp, Zea mays
gtgcgacccatattccagggcacttgccaccagtcatgccattgggtaccatgaacccatgcatgcagtactgcatgatgcaacaggggcttgccagcttgatggcgtgtccgtccctgatgctgcagcaactgttggccttaccgcttcagacgatgccagtgatgatgccacagatgatgacgcctaacatgatgtcaccattgatgatgccgagcatgatgtcaccaatggtcttgccgagcatgatgtc

SEQ ID NO: 26902 - DNA, 251 bp, Zea mays
ccgccatggctgtatacaaggtgaagcttgtcgggcctgaaggtgaagagcacgagtttgatgctccagacgacgcctacatccttgacgcagccgagactgccggtgtggagttgccatactcgtgccgtgctggggcttgctccacctgtgccggcaaaatcgagtctggttcggttgaccagtcggatgggtccttccttgatgacgggcagcaggaggaaggttatgtgctgacatgcgtctcctac

SEQ ID NO: 26903 - DNA, 190 bp, Zea mays
attgagaccagcaagcaacatagaaagtagaatccattagcaacaatagagcaacaatggcgaccaagatattttccctccttatgctccttgctctttctacatgtgttgctaacgcgacaattttccctcaatgctcacaagctcctatagcttcccttcttcccccataccttccatcaattatagc

SEQ ID NO: 26904 - DNA, 251 bp, Zea mays
actagttctagcccgctcgctgtggccaatgcacctacatacctgcaacaacaattgttgcaacagattgtaccagctctgactcagctagttgtggcaaaccctgctgcctacttgcaacagctgcttccattcaaccaactgactatgtcgaactctgctgcgtacctacaacagcgacaacagttacttaatccactagcagtggctaacccattggtcgctgccttcctacagcagcaacaattgct

SEQ ID NO: 26905 - DNA, 250 bp, Zea mays
cttgctcctagtgccattataccacagttcctccgaccagttacttcaatgggcttcgaacacctagctgtgcaagcctacaggctacaacaagcgcttgcggcgagcgtcttacaacaaccaattaaccaattgcaacaacaatccttggcacatctaaccatacaaaccatcgcaacacaacagcaacaacagttcctaccagcactgagccaactagatgtggtgaaccctgtcgcctacttgcaac

SEQ ID NO: 26906 - DNA, 249 bp, Zea mays
ctagcaattagctcatcgactccagattggagaactcgacaccatgaaggtgctgatcgttgcccttgctctcctggcgctcgctgcgagcgccgcctccagtacaagcggcggctgtggctgccagacaccaccgtttcatctaccgcctccgttctatatgccgcctccgttctatctgccgccgcagcagcagccgcagccatggcactaccccactcaaccaccgcagctaagcccgtgccagca

SEQ ID NO: 26907 - DNA, 248 bp, Zea mays
gtcgagttcctgaggcatcagtgcagcccgacggcgacgccctactgctcgcctcagtgccagtcgttgcggcacagtgttgccagcagctcaggcaggtggagccgcagcaccggtaccaggcgatcttcggcttggtcctccagtccatcctgcagcagcagccgcaaagcggccaggtcgcggggctgttggcggcgcagatagcgcacaactgacggcgatgtgcggcctgcagcagccgactc

SEQ ID NO: 26908 - DNA, 250 bp, Zea mays
gaactcgacaccatgaaggtgctgatcgttgcccttgctctcctggcgctcgctgcgaggccgcctccagtacaagcagcggctgtggctgccagacaccaccgtttcatctaccgcctccgttctatatgccgcctccgttctatctgccagctgcagcagcagccgcagccatggcaataccccactcaaccaccgcagctaagcccgtgccagcagttcggatcctgcggcgtcggcagcgtcggca

SEQ ID NO: 26909 - DNA, 251 bp, Zea mays
ccaacaagcaacatagaaagtggaatccagtagcaacaatagagcaacaatggcgaccaagatattttccctccttatgctccttgctctttctacatgtgttgctaacgcgacaattttccctcaatgctcacaagctcctatagcttcccttcttcccccataccttccatcaattatagcttcaatatgtgaaaacccagctcttcaaccatataggcttcaacaagcaatcgcagcaagcaacatac

SEQ ID NO: 26910 - DNA, 249 bp, Zea mays
gcattgaactctgctgcttatttgcaacaacaactaccattcagtcagctagctgctgcctacccccagcaatttcttccattcaaccaactggcagcattgaactctgctgcttatttacaacagcaacagctaccaccattcagccagctagctgatgtgagccctgttgccttcttgacacaacaacagttgttgccgttctacctgcacgctgcgcctaacgctggcaccctcttacaactgcaa

SEQ ID NO: 26911 - DNA, 250 bp, Zea mays
actagctgcattgaactctgcttcttatttgcaacaacaacaactaccattcagccagctacctgctgcctacccccagcaatttcttccattcaaccaactggcagcattgaactctcctgcttatttacagcagcaacaactactaccattcagccagctagctggtgtgagccctgctaccttcttgatacaaccacagttgttgccgttctaccagcacgctgcgcctaacgctggcaccctctta

SEQ ID NO: 26912 - DNA, 246 bp, Zea mays
attgccttcttgacacaacaacagttcgttgccgttctacctgcacgctgcgcctaacgctggcaccctcttacaactgcaacaattgctgccattcaaccaacttgctttgacaaacccaacaacgttctaccaacaacccatcattggcggtgccctcttttagattgcttatgagttatagttcaataatgaagttttttggatgatgtttgtggcttcccagaaataagaaagtacatttct

SEQ ID NO: 26913 - DNA, 247 bp, Zea mays
atgaagatggtcatcgttctcgtcgtgtgcctggctctgtcagctgccagcgcctctgcaatgcagatgccctgcccctgcgcggggctgcagggcttgtacggcgctggcgccggcctgacgacgatgatgggcgccggcgggctgtacccctacgcggagtacctgatgcagccgcagtgcagcccgctggcggcggcgcactactacgccgggtgtgggcagacgagcgccatgtaccagccgc

SEQ ID NO: 26914 - DNA, 248 bp, Zea mays
gcccagggtctcaaccccatggccatgatgatggcgcagaacatgccggccatgggtggactctaccagtaccagtaccagctgcccagctaccgcaccaacccctgtggcgtctccgctgccaatccgccctactactgattcatgatatttgggaaatctcctctatccatccctctctatctatatatgtaataatgcagtaagacgacacacattatcatgtgtggtatgaccaataatatatg

SEQ ID NO: 26915 - DNA, 247 bp, Zea mays
gtcagcctagcaattagctcatcgactccagattggagaactcgacaccatgaaggtgctgatcgttgcccttgctctcctggcgctcgctgcgagcggcgcctccagtacaagcggcggctgtggctgccagacaccaccgtttcatctaccgcctccgttctatatgccgcctccgttctatctgccgccgcagcagcagccgcagccatggcaataacccactcaaccaccgcagctaagcccg

SEQ ID NO: 26916 - DNA, 247 bp, Zea mays
attgagaccaactagcaacatagaaagcacaatagtgtaccaacaatggcagccaaaatattttgcttccttatgctccttggtctttctgcaagtgctgctaccgcaaccattttcccacaatgctcacaagctcctatagcttcctttcttcccccatacctctcaccagcggtgtcttcagtatgtgaaaacccaattcttcaaccctacaggatccaacaggcaatcgcagcaggcatcttac

SEQ ID NO: 26917 - DNA, 243 bp, Zea mays
gctactgcctactctcagcagcaacaatttcttccatttaaccaattggccgcactgaacccctctgcttatttccagcagcaaatactactaccatttggccagctagctacaacaagccccacttcctttttgaaacaacaacaattgcttccgttctaccagcagtttgtggctaaccccgcaaccctcttacaactgcaacagttgctgccctttgtccaacttgctttgacaaaccca

SEQ ID NO: 26918 - DNA, 262 bp, Zea mays
attttcccacaatgctcacaagctcctatagcttcctttcttcccccatacctctcaccagcggtgtcttcagtatgtgaaaacccaattcttcaaccctacaggatccaacaggcaatcgcagcaggcatcttacctttatcacccttgttcctccaacaaccgtcagccctattacagcagttacctttggtgcatttgttggcacaaaacatcaaggcacaacaactacaacaacttgtgctaggaaaccttgctgcct

SEQ ID NO: 26919 - DNA, 258 bp, Zea mays
catgtggcaaacattgtcgccttcttacaacaacagcaattgctgccatttagccaactcgctttgacgaatcctaccaccttattgcatcagcccaccattggtggtgggaaacattaacgccttcttgcaacaacaacaattgctgccattctacccacaggatgtggcaaacattgtcgccttcttacaacaacagcaattgctgccatttagccaactcgctttgacgaatcctaccaccttattgcatcagcc

SEQ ID NO: 26920 - DNA, 253 bp, Zea mays
gggcacaacaactacaacaacttgtgctagcaaaccttgctgcctactctcagcaacagcagtttcttccattcaaccaactaggttcattgaactctgcttcttatttgcaacaacaacaactaccattcagccagctacctgctgcctacccccagcaatttcttccattcaaccaactagcagcattgaactctcctgcttatttacagcagcaacaactactaccattcagccagctagctggtgtgag

SEQ ID NO: 26921 - DNA, 256 bp, Zea mays
ctcgagccgagcaacatagaaagcacaatagtgtaccaacaatggcagccaaaatattttgcttccttatgctccttggtctttctgcaagtgctgctaccgcaaccattttcccacaatgctcacaagctcctatagcttcctttcttcccccatacctctcaccagcggtgtcttcagtatgtgaaaacccaattcttcaaccctacaggatccaacaggcaatcgcagcaggcatcttacctttatcaccctt

SEQ ID NO: 26922 - DNA, 253 bp, Zea mays
gtcagcctagcaattagctcatcgactccagattggagaactcgacaccatgaaggtgctgatcgttgcccttgctctcctggcgctcgctgcgagcgccgcctccagtacaagcggcggctgtggctgccagacaccaccgtttcatctaccgcctccgttctatatgccgcctccgttctatctgccgccgcagcagcagccgcagccatggcaataccccactcaaccaccgcagctaagcccgtgccag

SEQ ID NO: 26923 - DNA, 254 bp, Zea mays
gctagcacatcaaacaagtggcgacagacaaagatttgtgagggtgatccgcgctgagaagagatggctaagatcgccgcggcggcggcggcggcgctgtgcttcgcggccctggtggccgtggccgtctgccaaggcgaggtcgagcggcagaggctcagggacctgcagtgctggcaggaggtccaggacagcccgctcgacgcgtgccgccaggtcctcgaccggcagctaaccggcggcggcggcggcgg

SEQ ID NO: 26924 - DNA, 253 bp, Zea mays
caagatattttccctccttatgctccttgctctttctacatgtgttgctaacgcgacaattttccctcaatgctcacaagctcctatagcttcccttcttcccccataccttccatcaattatagcttcagtatgtgaaaacccagctcttcaaccatataggcttcaacaagcaatcgcagcaagcaacatacctttatcgcccttgttgtttcaacaatcaccagccctatctttggtgcagtcattggta

SEQ ID NO: 26925 - DNA, 253 bp, Zea mays
cattattacacagttcctcccaccagttacttcaatgggcttcgaacacccagctgtgcaagcctataggctacaacaagcaattgcggcgagcgtcttacaacaaccaatttcccagttgcaacaacaatccttggcacatctaacaatacaaaccatcgcaacgcaacagcaacaacaattcctaccagcactgagccacctagccatggtgaaccctgccgcctacttgcaacagcagttgcttgcatca

SEQ ID NO: 26926 - DNA, 252 bp, Zea mays
aagcaacatagaaagtggaatccagtagcaacaatagagcaacaatggcgaccaagatattttccctccttatgctccttgctctttctacatgtgttgctaacgcgacaattttccctcaatgctcacaagctcctatagcttcccttcttcccccataccttccatcaatgatagcttcagtatgtgaaaacccagctcttcagccctataggctccaacaagcaatcgcagcaagcaacatacctttat

SEQ ID NO: 26927 - DNA, 254 bp, Zea mays
gcgagaacgccacacgagaaaagaaacccaagcattcgccatcaaaaaaaaaaaagagcagaaaaagtagagtagactacgacagcgtccggcgaggaggcggaggcgaagatgaggaagaagctcggcacccgattccccgcggctcgaatcaaaaagataatgcaagcagatgaggatgttggaaagattgcactagcagttcctgttttagtttcgaggtctcttgaattgtttttacaagatttaattga

SEQ ID NO: 26928 - DNA, 181 bp, Zea mays
tacaactgcaacaattgctgccattcaaccaacttgctttgacaaacccagcagtgttctaccaacaacccatcattggtggtgccctcttttagatttcttatgagttatagttcaataataaagttttttatctgatgtttgtggcttcccagaaataagaaagtacatttctagattc

SEQ ID NO: 26929 - DNA, 253 bp, Zea mays
cgaacacccagctgtgcaagcctataggctacaacaagcaattgcggcgagcgtcttacaacaaccaatttcccagttgcaacaacaatccttggcacatctaacaatacaaaccatcgcaacgcaacagcaacaacaattcctaccagcactgagccacctagccatggtgaaccctgccgcctacttgcaacagcagttgcttgcatcaaacccacttgctctggcaaacgtagttgcaaaccagccacaa

SEQ ID NO: 26930 - DNA, 257 bp, Zea mays
ggacgcagcaacaaggacaacggaagcaacccacatggatacctcccaactcattacgagaaggtccagatgcttctgagcgatcgcttccttggtttctacatgattccggataacaccccttggaacttcaacttcatgggagtgaagcacgacccacagatgaagtacaacatgaagctgggcatgccccgggacttctatcacgaggaccacaggccgacacacttccttgagttcagcaacatcgaggaggg

SEQ ID NO: 26931 - DNA, 250 bp, Zea mays
ttttgagcattcagaaacacaccaagcgaacagcattagcaacaacctaacaacaatggctaccaagatattatccctccttgcgcttcttgcgctttttgcgagcgcaacaaatgcgttcattattccacaatgctcacttgctccaagttccattattacacagttcctcccaccagttacttcaatgggcttcgaacacccagctgtgcaagcctataggctacaacaagcaattgcggcgagcgtc

SEQ ID NO: 26932 - DNA, 248 bp, Zea mays
aaatattttgcctccttatgctccttggtctttctgcaagtgctgctacggcgaccattttcccgcaatgctcgcaagctcctatagcttcccttcttcccccgtacctctcaccagcggtgtcttcggtatgtgaaaacccaattcttcaaccctacaggatccaacaggcaatcacagctggcatcttacctttatcacccttgttcctccaacaatcatcagccctattacatcagttacctttg

SEQ ID NO: 26933 - DNA, 243 bp, Zea mays
agtgcgtcgagtttctgaggcatcagtgcagcccgacggcgacgccctactgctcgcctcagtgccagtcgttgcggcacagtgttgccagcagctcaggcaggtggagccgcagcaccggtaccaggcgatcttcggcttggtcctccagtccatcctgcagcagcagccgcaaagcggccaggtcgcggggctgttggcggcgcagatagcgcacaactgacggcgatgtgcggcctgcag

SEQ ID NO: 26934 - DNA, 247 bp, Zea mays
cttgctccgagtgccattattccacagttcctccctccagttacttcaatgggcttcgaacacccagctgtgcaagcctataggctacaacaagcgcttgcggcgagcgtcttagaacaaccaattgcccaattacaacaacaatccttagcacatctaaccatacaaaccatcgcaacgcagcagcaacaagcactgagccacctagccgtggtgaaccctatcgcctacttgcaacaacagctgc

SEQ ID NO: 26935 - DNA, 247 bp, Zea mays
gtccttgtctgatgccgagaaggctccctacgtatctaaggccgagaagctgaaggttgagtacacaaagaagatggacgcctataacaacaagcagtctggaggacccacagagtctggtgattctgacaagtccaagtccgaggtcaacgacggggacgaggagggtgatgagtgatggatgacgggtgaaactctgggctgcccaagtgcttgcagtcagcagggaaatctcatcgtcgttggg

SEQ ID NO: 26936 - DNA, 248 bp, Zea mays
ccaagatattatccctccttgcgcttcttgcgctttttgcgagcgcaacaaatgcgttcattattccacaatgctcacttgctccaagttccattattacacagttcctcccaccagttacttcaatgggcttcgaacacccagctgtgcaagcctataggctacaacaagcaattgcggcgagcgtcttacaacaaccaatttcccagttgcaacaacaatccttggcacatctaacaatacaaacc

SEQ ID NO: 26937 - DNA, 250 bp, Zea mays
tctaaccatacaaaccatcgcaacgcaacagcaacaacaatttctaccagcactgagccaactagctgtggtgaaccctgtcgcctacttgcaacagcagttgcttgcatccaacccacttgctctggcaaacatagttgcataccaacaacaacaacaattgcaacagtttctaccagcgctcagtcaactagccatggtgaaccctgccgcctacctacaacagcaacaactgatttcatctagccct

SEQ ID NO: 26938 - DNA, 249 bp, Zea mays
caggcatccggcaaggtaccggatgttggttggcatggttgatgttatcttctctgatgttgcacagccagaccaggctaggatcttagcacttaatgcttcatacttcttgaagaacggtggccactttgtcatttcaatcaaggctaactgcatcgactccaccctgcctgctgaggccgtgtttgcagcggaagtggagaagctcaaggcggatcagttcaagcccgcggagcaggtgacgttgga

SEQ ID NO: 26939 - DNA, 243 bp, Zea mays
caaaattaggagaactcattctaggaagtctcactctggccctaaccatgcttttatgtataagggtgagacatctagctctaggcaatcaacccgtgctaaggtgcctagaaagaaaactcctattgcatcaaatgatcatagcatttcatttaaaacttttgatgcatcttatgttttgactaacaaatccggcaaggtagttgccaagtttgttgggggcaaacacaagggctctaagac

SEQ ID NO: 26940 - DNA, 242 bp, Zea mays
cttcactgctggagtgtatgttgcactaatgatggctcagattgaggtccttaggaagaagggccactcttactcagagataattaatgagagcctgatcgagtccgtggactcgttgaacccgttcatgcatgctcgcggtgtggccttcatggtcgataactgctccacaactgctcgtttgggatctaggaagtgggcaccacgcttcgattacatcttgacccaacaggcgtttgtga

SEQ ID NO: 26941 - DNA, 243 bp, Zea mays
tgccgcctccgttctatctgccgccgcagcagcagccgcagccatggcaataccccactcaaccaccgcagctaagcccgtgccagcagttcggatcctgcggcgtcggcagcgtcggcagcccgttcctgggccagtgcgtcgagttcctgaggcaccagtgcagcccggcggcgacgccctacggctcgccacagtgccaggcgctgcagcagcagtgctgccaccagatcaggcaggtgg

SEQ ID NO: 26942 - DNA, 242 bp, Zea mays
attgagaccaacaagcaacatagaaagtggaatccagtagcaacaacagagcaacaatggcgaccaagatattttccctccttatgctccttgctctttctgcatgtgttgctaacgcgacaattttccctcaatgctcacaagctcctatagcttcccttcttcccccataccttccatcaatgatagcttcagtatgtgaaaacccagctcttcagccctataggctccaacaagcaatc

SEQ ID NO: 26943 - DNA, 237 bp, Zea mays
cgcaggacaagacacaggatgagggctgtggtgcagcgcgtcctctcggccagtgtcgaggtcgaggggcgaatagtgtctgcgatcggccctggactcctcgttctcgtcggcgtccacgaggcggacacggactccgacgccgactacatttgtcggaaggtcctgaacatgaggctgttttcaaatgacaagactggaaaagcatgggatcaaagtgttatgcagcgtaacttt

SEQ ID NO: 26944 - DNA, 237 bp, Zea mays
tgcagcccgacggcgacgccctactgctcgcctcagtgccagtcgttgcggcacagtgttgccagcagctcaggcaggtggagccgcagcaccggtaccaggcgatcttcggcttggtcctccagtccatcctgcagcagcagccgcaaagcggccaggtcgcggggctgttggcggcgcagatagcgcacaactgacggcgatgtgcggcctgcagcagccgactccatgccccta

SEQ ID NO: 26945 - DNA, 238 bp, Zea mays
tagcaacatagaaagcacaatagtgtaccaacaatggcagccaaaatattttgcttccttatgctccttggtctttctgcaagtgctgctaccgcaaccattttcccacaatgctcacaagctcctatagcttcctttcttcccccatacctctcaccagcggtgtcttcagtatgtgaaaacccaattcttcaaccctacaggatccaacaggcaatcgcagcaggcatcttacctt

SEQ ID NO: 26946 - DNA, 236 bp, Zea mays
ggcttgtacggcgctggcgcggcctgacgacgatgatgggcgccggcgggctgtacccctacgcggagtacctgaggcagccgcagtgcagcccgctggcggcggcgccctactacgccgggagtgggcagacgagcgccatgtaccagccgctccggcaacagtgctgccagcagcagatgaggatgatggacgagcagtccgtcgcgcacagctgcagatgatgatgcagcttg

SEQ ID NO: 26947 - DNA, 238 bp, Zea mays
caaagaatcgcggcacaacaactacaacaacagttgctaccaacaatcaatcaagtagttgcagcgaaccttgctgcttacctccagcaacaacagtttcttccattcaatcaactagctggggtgaaccctgctatctacttgcaggcacaacagctactaccatttaaccaacttgtcgggagcccttatgccttcttactgcaacaacagcttctgccattccatctgcaagctg

SEQ ID NO: 26948 - DNA, 239 bp, Zea mays
ctcagcaacaacaatttcttccattcaaccaactgtctacattgaaccgtgctgcttatttgcagcaacaactattaccattcagccagctagctactgcctactctcagcaacaacaacttcttccatttaaccaattggccgcactgaaccccgctgcttatttgcagcagcaaatactactaccatttagccagctagctgcagcaagccgtgcttccttcttgacacagcaacag

SEQ ID NO: 26949 - DNA, 241 bp, Zea mays
agtacctgaagcagccgcagtgcagcccgctggcggcggcgccctactacgccgggtgtgggcagacgagcgccatgtaccagccgctccggcaacagtgctgccagcagcagatgaggatgatggacgtgcagtccgtcgcgcacagctgcagatgatgatgcagcttgagcgtgccgctgccgccagcagcagcctgtacgagccagctctgatgcagcagcagcagcagctgctggca

SEQ ID NO: 26950 - DNA, 239 bp, Zea mays
aaccattttcccacaatgctcacaagctcctatagcttcccttcttcccccatacctctcaccagcggtgtcttcaatgtgtgaaaccccaattgttcaaccctacaggatccaacaggcaatcgcaacaggcatcttaccattatcacccttgttcctccaacaaccgtcagccctattacagcagttacctttggtccatttggtggcacaaaacatcagggcacaacaactacaac

SEQ ID NO: 26951 - DNA, 179 bp, Zea mays
gacaagacctaccctgctgggttcatggatgtcatttccatccctaagacaaacgagaactacaagctgcttccgtcttcacccaatcagttcaagctctgcaaggtgaggtctgttcagtttggccagaaaggcatcccctacctaaacacctatgacgaccgcaccatccgctaccc

SEQ ID NO: 26952 - DNA, 257 bp, Zea mays
cctacaactactttcatctagcccgctcgcggtgggcaatgcacctacgtacctacaacaacagttgctgcaacaaattgtaccagctctgactcagctagctgtggcaaaccctgctgcctacttacaacagttgcttccattcaaccaactggctgtgtcaaactctgctgcgtacctacaacagcgacaacagttacttaatccattggcagtggctaacccattggtcgctaccttcctgcagcagcaacaac

SEQ ID NO: 26953 - DNA, 256 bp, Zea mays
cgatgaccaaccagggcgttcaagtctttccagagataatggttcctcttgttggaacaccgcaggaattgggacatcaggtggcccttatccgtcaagtcgctaacaaagttttcaccagtatgggtaaaactattgggtacaagatcgggacgatgattgagattcccagggcagctctagtggctgacgagatcgcggagcaggctgaattcttctcctttggaacgaacgacctcacgcagatgacctttgg

SEQ ID NO: 26954 - DNA, 256 bp, Zea mays
gtgctttgctcatcgaccgaccgatcgatctcggcatggcggactgggggccagtgctgatcgggctggtgctcttcatcctgctctccccgggcctgctcttccagatccccggcaagggccggatcatcgagttcggcaacttccagaccagcggcctctccatcctcatccacgccgtcatctacttcgccctcctcgccatcttcctcctcgccgtcggcgtccacatttacctcggctagctcgtcgccgg

SEQ ID NO: 26955 - DNA, 220 bp, Zea mays
aatgtgctccctgcagcagccgactccatgcccctacgctgctgccggcggtgtcccccactgaagaaactatgtgctgtagtatagccgctggctagctagctagttgagtcatttagcggcgatgattgagtaataatgtgtcacgcatcaccatgggtggcagtgtcagtgtgagcaatgacctgaatgaacaattgaaatgaaaagaaaaaagtaa

SEQ ID NO: 26956 - DNA, 256 bp, Zea mays
ggtgaaccctgccgtctacctacaactactttcatctagcccgctcgcggtgggcaatgcacctacgtacctacaacaacagttgctgcaacaaattgtaccagctctgactcagctagctgtggcaaaccctgctgcctacttacaacagttgcttccattcaaccaactggctgtgtcaaactctgctgcgtacctacaacagcgacaacagttacttaatccattggcagtggctaacccattggtcgctacc

SEQ ID NO: 26957 - DNA, 254 bp, Zea mays
caaagcggcagtgcgtagagaggatcgtcgaacagaacagcatgaagatggtcatcgttctcgtcgtgtgcctggctctgtcagctgccagcgcctctgcaatgcagatgccctgcccctgcgcggggctgcagggcttgtacggcgctggcgccggcctgacgacgatgatgggcgccggcgggctgtacccctacgcggagtacctgaggcagccgcagtgcagcccgctggcggcggcgccctactacgcc

SEQ ID NO: 26958 - DNA, 256 bp, Zea mays
caacaagcaacatagaaagtggaatccagtagcaacaacagagcaacaatggcgaccaagatattttccctccttatgctccttgctctttctgcatgtgttgctaacgcgacaattttccctcaatgctcacaagctcctatagcttcccttcttcccccataccttccatcaatgatagcttcagtatgtgaaaacccagctcttcagccctataggctccaacaagcaatcgcagcaagcaacatacctttat

SEQ ID NO: 26959 - DNA, 254 bp, Zea mays
aaaggctgggattttcaagaaaggagttccggcctatactgctccacaaccagaagaggcaatgactgctctcaaacaaagagcttcggaattgggtatctctctccaagtcgttgatcctctggagccccatcacctaaagtatcagcatcttggtctgcatggagaacatcaatatataaatgctggccttgcagttgctttggctagtacgtggcttgagaagcagggacataaagatacgttaccactca

SEQ ID NO: 26960 - DNA, 253 bp, Zea mays
aacccaggaacagagcgaggcgacgccgcggcacctcttctccggcgaagggaaatggcaaccgttccaggggatctgatctggcaggttgtgaggaagaacaactccttccttgtgaagcagttcggcaacggcaatgccaaggtgcagttcaccaaggagccgaacaacctctacaacatccactccttcaaacactcgggtttggcgaacaagaagactgtgacgatccagccagctgcaaaggactcgg

SEQ ID NO: 26961 - DNA, 253 bp, Zea mays
gcaagcaatcgcaacaagcaacttacctttatcacacctgttctttcaacaatcgccagccctatctttggtgcagtcattggtacaaaccatcagggcagaacagttgcagcaactcgtgctaccagtgatcagccaagtagctctggcaaacctttccccctactctcagcaacaacaatttcttccattcaaccaactgtctatactgaaccctgctgcttatttgcagcaacaacaactactaccattc

SEQ ID NO: 26962 - DNA, 254 bp, Zea mays
gtcagcctagcaattagctcatcgactccagattggagaactcgacaccatgaaggtgctgatcgttgcccttgctctcctggcgctcgctgcgagcgcgcctccagtacaagcggcggctgtggctgccagacaccaccgtttcatctaccgcctccgttctatatgccgcctccgttctatctgccgccgcagcagcagccgcagccatggcaataatccactcaaccaccgcagctaagcccgtgccagca

SEQ ID NO: 26963 - DNA, 254 bp, Zea mays
ggacgtcagcctagcaattagctcatcgactccagattggagaactcgacaccatgaaggtgctgatcgttgcccttgctctcctggcgctcgctgcgagcgccgcctccagtacaagcggcggctgtggctgccagacaccaccgtttcatctaccgcctccgttctatatgccgcctccgttctatctgccgccgcagcagcagccgcagccatggcaataccccactcatccaccgcagctaagcccgtgc

SEQ ID NO: 26964 - DNA, 140 bp, Zea mays
gctacctagctcgctagtttactcatttagcggcgatgagtaacgtagtgtcacccatcaccatgggtggcagtgtgagcaatgacctgaatgaaccattgaaatggaaaggaataatatataaggaaaaaagatgattg

SEQ ID NO: 26965 - DNA, 248 bp, Zea mays
gatcagcaaagcggcagtgcgtagagaggatcgtcgaacagaacagcatgaagatggtcatcgttctcgtcgtgtgcctggctctgtcagctgccagcgcctctgcaatgcagatgccctgcccctgcgcggggctgcagggcttgtacggcgctggcgccggcctgacgacgatgatgggcgccggcgggctgtacccctacgcggagtacctgaggcagccgcagtgcagcccgctggcggcggcg

SEQ ID NO: 26966 - DNA, 253 bp, Zea mays
gtcagctagctgctgcctacccccagcaatttcttccattcaaccaactggcagcattgaactctgctgcttatttacaacagcaacagctaccaccattcagccagctagctgatgtgagccctgttgccttcttgacacaacaacagttgttgccgttctacctgcacgctgcgcctaacgctggcaccctcttacaactgcaacaattgctgccattcaaccaacttgctttgacaaacccaacaacgtt

SEQ ID NO: 26967 - DNA, 253 bp, Zea mays
tagcaacatagaaagcacaatagtgtaccaacaatggcagccaaaatattttgcctccttatgctccttggtatttctgcaagtgctgctacggcgaccattttcccgcaatgctcacaagctcctatagcttcccttcttcccccgtacctctcaccagcggtgtcttcggtatgtgaaaacccaattcttcaaccctacaggatccaacaggcaatcgcagctggcatcttacctttatcacccttgttcc

SEQ ID NO: 26968 - DNA, 250 bp, Zea mays
gcaaagcggcagtgcgtagagaggatcgtcgaacagaacagcatgaagatggtcatcgttctcgtcgtgtgcctggctctgtcagctgccagcgcctctgcaatgcagatgccctgcccctgcgcggggctgcagggcttgtacggcgctggcgccggcctgacgacgatgatgggcgccggcgggctgtacccctacgcggagtacctgaggcagccgcagtgcagcccgctggcggcggcgccctact

SEQ ID NO: 26969 - DNA, 250 bp, Zea mays
tgatgactggatgggtcttgatgttggccctgatgccaccaaaacattcaacgaagcattggacaccaccaagactgttatttggaacggccccatgggagtgtttgagttcgagaagtttgcagctggcactgaggcgattgccaagaagctagctgagcttacaaccacgaagggtgtcactaccatcatcggcggcggcgactctgttgctgctgtcgagaaggctgggctggccgacaagatgagc

SEQ ID NO: 26970 - DNA, 250 bp, Zea mays
gtcttgcatggcatccaaacaatatatatcttgcaacatcgtctacggatggtaaatgcagagtgttctctacttttatcaagggtgtagacacaagaggatcaaaatcgagcacttcaaccgattcaaaattcggagagcaaatcgctcagcttgatctatcatctacctgggtatttggtgtaaggtggtcaccaagtgggaagacattggcctatgcagggcacaactccatgatttatttcatcga

SEQ ID NO: 26971 - DNA, 148 bp, Zea mays
caaactcaacagtgtcctaccaacaacacatcattggtggtgccctcttttagattgcttattagttgtaattcaataataaagttttttggatgatgtatgtggccaaccagaaataagaagttacatttccagattctaatgtgaa

SEQ ID NO: 26972 - DNA, 252 bp, Zea mays
gagaccaactagcaacatagaaagcacaatagtgtaccaacaatggcagctaaaatattttgcctccttatgctccttggtctttctgcaagtgctgctacggcgaccattttcccacaatgctcacaagctcctatagcttcccttcttcccccgtacctctcaccaacggtgtcttcggtatgtgaaaacccaattcttcaaccctacaggatccaacaggcaatcgcagctggcatcttacctttatca

SEQ ID NO: 26973 - DNA, 245 bp, Zea mays
cttccaccttcagcgagtacaccgtcatgcatgtgggttgtgttgcaaagatcaaccctcaggctccccttgataaagtttgcgtccttagctgtggtatttctaccggtcttggtgcatcaattaatgttgcaaaacctccgaagggttcgacagtggctgttttcggtttaggagccgttggtcttgccgctgcagaaggtgcaaggattgctggagcgtcaaggatcattggtgtcgacctg

SEQ ID NO: 26974 - DNA, 246 bp, Zea mays
agaccgcattctcgcgtcggcttgcttttaactgaatccagcccaccgcttctcgcacgtcgccatggacgcggtcgattctgtggtggatcccctccgcgacttcgccaaggacagcgtccgcctcgtcaagcgctgccacaagcctgaccgcaaggagttcaccaaggtggcagcgcggacggcgatagggttcgtcgtcatgggcttcgtcggcttcttcgtcaagctcatcttcattcccat

SEQ ID NO: 26975 - DNA, 245 bp, Zea mays
aagagagtttgttagggacaacaagtcccttggaagcttccggttggacggaatccctcctgcacctcgtggtgtcccacaaattgaagtgaagtttgatattgatgcaaatggtatcctctcagttgctgccattgataagggcactggaaagaaacaggacatcaccatcactggtgctagtacgctacctaaggatgaggttgagagaatggtagaagaagccgataagtttgccaaggagg

SEQ ID NO: 26976 - DNA, 240 bp, Zea mays
ctttcgccgagctcctcgaaaccctaggagcgtgcttgaccggcggcggcgaggtgatggcgatggaccctgacgcggtacgaaggccttcgtggagcattactaccgaacgttcgacaccaaccgcgcggcgctggttgggctgtaccaggagacctccatgctcaccttcgagggccagaagttccagggcccctccgccattgccggcaagctcggatctctccctttccaggcctg

SEQ ID NO: 26977 - DNA, 245 bp, Zea mays
acctgctgaagagattagggaggcgcccaagcgcgactcgagtgaggggcagtaaagccggctttatgtgcctagaaactagtagctagtgtttgctgctgtcgaatgacactatgcaatgtgatctggaacctggtttcttgggtgcgacgcttgtagccgtgttatgactgtcgtccgtaaaatttgggggctccccgtaaggcatgctgcctggcaaggcctcggtgtcccacctcgtctgt

SEQ ID NO: 26978 - DNA, 243 bp, Zea mays
agctcctatagcttccctttttcccccataccttccatcaattatagcttcagtatgtgaaaacccagctcttcaaccatataggcttcaacaagcaatcgcagcaagcaacatacctttatcgcccttgttgtgtcaacaatcgccagccctatctttggtgcagtcattggtacaaaccatcagggcacaacagctgcagcaactcgtgctacctgtgatcaaccaagtagctctggcaaa

SEQ ID NO: 26979 - DNA, 243 bp, Zea mays
atttataccaactaccaacatacatagtgaagtacactagcaacatcttagcaccaatggcagccaagatttttgcgctccttgccctccttgctctttcagcaagtgttgctaccgcgactattattccacaatgctcacaacaatacctctctccagtgatagccgcgagatttgaatacccatctatacaatcctacaggctacaagaggccatcacagcaagcatcttacggtcgttag

SEQ ID NO: 26980 - DNA, 243 bp, Zea mays
gaagaacccgatcgacaccatgagggtgttgctcgttgccctcgctctcctggctctcgctgcgagcgccacctccacgcatacaagcagcggctgcggctgccagccaccgccgccggttcatctaccgccgccggtgcatctgccacctccggttcacctgccacctccggtgcatctcccaccgccggtccacctgccgccgccggtccacctgccaccgccggtccatgtgccgccgcc

SEQ ID NO: 26981 - DNA, 242 bp, Zea mays
tgaaccctatcgcctacttgcaacaacagctgcttgcatccaacccacttgctttggcaaacgtagctgcataccaacaacaacaacagttgcaacagtttctgccagcgctcagtcaactagccatggtgaaccctatcgcctacctacaacagcaacaacttctttcatctagcccgctcgctatgggcaatgcacctacatacctgcaacaacagttgttgcaacaacagttgctgcaa

SEQ ID NO: 26982 - DNA, 241 bp, Zea mays
atttattggcacaaaacatcagggcacaacaactacaacaacttgtgctagcaaaccttgctgcctactctcagcaacagcagtttcttccattcaaccaactagctgcattgaactctgcttcttatttgcaacaacaacaactaccattcagccagctatctgctgcctacccccagcaatttcttccattcaaccaactgacagcattgaactctcctgcttatttacagcagcaaca

SEQ ID NO: 26983 - DNA, 240 bp, Zea mays
acagattgtaccagctctgactcaactagctgtggcaaaccctgttgcctacttgcaacagctgcttccattcaaccaactgactctgtcgaactctgctgcgtacctacaacagcgacaacagttacttaatccattggtagtggctaacccattggtcgccgccttcctacagcagcaacaattgctgccatacaaccagttctctttgatgaatcctgtcttgtcgaggcagcaacc

SEQ ID NO: 26984 - DNA, 247 bp, Zea mays
atcgtcgaacagaacagcatgaagatggtcatcgttctcgtcgtgtgcctggctctgtcagctgccagcgcctctgcaatgcagatgccctgcccctgcgcggggctgcagggcttgtacggcgctggcgccggcctgacgacgatgatgggcgccggcgggctgtacccctacgcggagtacctgagcgcagccgcagtgcagcccgctggcggcggcgccctactacgccgggtgtgggcagacg

SEQ ID NO: 26985 - DNA, 250 bp, Zea mays
  unsure (1)..(250): unsure at all n locations
cagtgctgccagcagcagatgaggatgatggacgtgcagtccgtcgcgcacagctgcagatgatgatgcagcttgagcgtgccgctgccgccagcagcagcctgtacgagccagctctgatgcagcagcagcagcagctgctggcagcccagggtctcaaccccatggccatgatgatggcgcagaacatgnccggccatgggtggactctaccagtaccagctgcccagctaccgcaccaacccctgtg

SEQ ID NO: 26986 - DNA, 250 bp, Zea mays
gtaccaacaatggcagccaaaatattttgcttccttatgctccttggtctttctgcaagtgctgctaccgcaaccattttcccacaatgctcacaagctcctatagcttcctttcttcccccatacctctcaccagcggtgtcttcagtatgtgaaaacccaattcttcaaccctacaggatccaacagtgcaatcgcagcaggcatcttacctttatcacccttgttcctccaacaaccgtcagcccta

SEQ ID NO: 26987 - DNA, 249 bp, Zea mays
gtcagcctagcaattagctcatcgactccagattggagaactcgacaccatgaaggtgctgatcgttgcccttgctctcctggcgctcgctgcgagcgccgcctccagtacaagcggcggctgtggctgccagacaccaccgtttcatctaccgcctccgttctatatgccgcctccgttctatctagccgccgcagcagcagccgcagccatggcaataccccacatctccaccgcagctaagcccgt

SEQ ID NO: 26988 - DNA, 249 bp, Zea mays
gtgcgtagagaggatcgtcgaacagaacagcatgaagatggtcatcgttctcgtcgtgtgcctggctctgtcagctgccagcgcctctgcaatgcagatgccctgcccctgcgcggggctgcagggcttgtacggcgctggcgccggcctgacgacgatgatgggcgccggcgggctgtacccctacgcggagtacctgaggcagccgcagtgcagcccgctggcggcggcgccctactacgccgggtg

SEQ ID NO: 26989 - DNA, 253 bp, Zea mays
tagaagaaccaagggcggctgccttcagggaattgagagaagagactggtgtcacatccgcagagatcgtggctgaggctcccgtctggttaacatatgatttcccgccagatgtcagaaccaaactgaatgccaggtggggaaccgattggaaaggccaagctcaaaaatggtttttatttagacttactcggaaatgacgatgagattaaccttaatggtgatggatctgagaagccagagtttggtgaat

SEQ ID NO: 26990 - DNA, 254 bp, Zea mays
agcatcttacctttatcacccttgttcctccaacaatcatcagccctattacagcagttacctttggtgcatttattggcacaaaacatcagggcacaacaactacaacaacttgtgctagcaaaccttgctgcctactctcagcaacaacagtttcttccattcaaccaactagctgcattgaactctggcttcttatttgcaacaacaacaactaccattcagccagctatctgctgcctacccccagcaat

SEQ ID NO: 26991 - DNA, 252 bp, Zea mays
agtgtttgcaattctctgggctgtgtatcgccatgcttcatttgcttggataggccaagacgttctgggtatctgtttgatgataactgtgcttcagatggcacgtttaccaaatatcaaggttgcatcggcacttcttagtgctgcatttgtgtatgacatcttttgggtgttcatttcacctcttgatattccatgaacagcgtcatgattgcagttgctcgtggtgataacactggggaatcaattcct

SEQ ID NO: 26992 - DNA, 161 bp, Zea mays
cgttctcgtcgtgtgcctggctctgtcagctgccagcgcctctgcaatgcagatgccctgcccctgcgcggggctgcagggcttgtacggcgctggcgccggcctgacgacgatgatgggcgccggcgggctgtacccctacgcggagtacctgaggcagc

SEQ ID NO: 26993 - DNA, 247 bp, Zea mays
agtacctccgatcaaggttgatggccgcatcgccgtttgtgaaggggctgctgaaggtgttgggcttggccacccaatcgagtatatctgccttgatctggaggcacccaacgtgtgcaaatactgtggcctccgttatgttcaaattcaccatcactaaatagggaagatactggcgtttgaccgctagcagaagtttaggagctgaggagcttatgcatgcacacttgtttcacttagttctggt

SEQ ID NO: 26994 - DNA, 244 bp, Zea mays
caaaatattttgcctccttatgctccttggtctttctgcaagtgctgctacggcgaccattttcccgcaatgctcgcaagctcctatagcttcccttcttcccccgtacctctcaccagcggtgtcttcggtatgtgaaaacccaattcttcaaccctacaggatccaacaggcaatcacagctaggcatcttacctttatcacccttgttcctccaacaatcatcagccctattacatcagtt

SEQ ID NO: 26995 - DNA, 243 bp, Zea mays
atcctcgggcccttctgggagctgctgccagcgccacgccagagccagagccggagcagcctccggtaaccggcatcgtcgtcggcagtgtcatagacgttgctgctgctggtcacggtgacggggagggtggcggcgacatgatggatcagcagcacgccacagagtggacctttgagtaggttactcggaagaggaggctctgacgacaagcacaccgccgccggtggtggtggtgccgaa

SEQ ID NO: 26996 - DNA, 243 bp, Zea mays
caagcaacatagaaagtggaatacagtagcaacaatagagcaacaatggcggccaagatattttccatccttatgctccttgctctttctgcatgtgttgctaacgcgaccatttttcctcaatactcacaagctcctatagctgcccttcttcccccataccttccatcaatgaccgcttcagtttgtgaaaacccagcccttcaaccctacaggctccaacaagcaatcgcaacaagcaac

SEQ ID NO: 26997 - DNA, 247 bp, Zea mays
  unsure (1)..(247): unsure at all n locations
ctaagcccgtgccagcagttcggatcctgcggcgtcggcagcgtcggcagcccgttcctgggccagtgcgtcgagttcctgaggcaccagtgcagcccggcggcgacgccctacggctcgccacagtgccaggcgctgcagcagcagtgctgccaccagatcaggcaggtggagccgctgcanccggtaccanggcgacatacggtgtggtcctgcagtccttcctgcagcagcagccgcagggcga

SEQ ID NO: 26998 - DNA, 247 bp, Zea mays
ctgaaccccgctgcttatttgcagcagcaaatactactaccatttagccagctagctacagcaagccgtgcttccttcttgacacaacaacagttgctgccgttctaccagcagtttgcggctaaccccgcaaccctcttacaactacaacaattgttgccctttgtccaacttgctttgacagaacccagcagcctcctaccaacaacacatcattggtggtgccctcttttagattgcttattag

SEQ ID NO: 26999 - DNA, 248 bp, Zea mays
gttcgctggcattgaggatgtcttcacctcgtcccgtggctccactaagacccttggcaacttcgtcaaggcaaccttcgactgcctcatgaagacctacggcttccttactcctgaattctggagtcagaccaagttctccatgactccgttccagcagtacacggacctgctggcgaagcccaccaaggggtcttgtgcttgaggccccaactgagacagtagaggcttaggatggtttgtgctgt

SEQ ID NO: 27000 - DNA, 209 bp, Zea mays
accagtaccagtaccagctgcccagctaccgcaccaacccctgtagcgtctccgctgccattccgccctactactgattcatgatatttgggaaatctcctctatccatccctctctatctatatatgtaataatgcagtaagacgacacacattatcatgtgtggtatgaccaataatatactgcatcaataataaagttttggtttt

SEQ ID NO: 27001 - DNA, 251 bp, Zea mays
gcaaagcggcagtgcgtagagaggatcgtcgaacagaacagcatgaagatggtcatcgttctcgtcgtgtgcctggctctgtcagctgccagcgcctctgcaatgcagatgccctgcccctgcgcggggctgcagggcttgtacggcgctggcgccggcctgacgacgatgatgggcgccggcggggctgtacccctacgcggagtacctgaggcagccgcagtgcagcccgctggcggcggcgccctact

SEQ ID NO: 27002 - DNA, 236 bp, Zea mays
catgtcgtaggctgattcttcatgagaacatatatcaaaccttccttgatcagcttgttgaggtatacaaacaagtccgaattggggatccgttggagaaaggcaccttactgggaccactgcacactcctgcttcaaaagagaactttttgaaaggcattcagactatcaaatgctcagggagggaaaatcctttttggaggatctgccattgaatcagaaggaaactttgtgca

SEQ ID NO: 27003 - DNA, 237 bp, Zea mays
cttgccgactacaacatccagaaggagagcaccctccacttggtgctgcgcctcaggggaggcatgcagatcttcgtgaagaccctgaccggcaagactatcacccttgaggtggagtcttcagacaccatcgacaacgtcaaggccaagatccaggacaaggagggcatcccacctggaccagcagcgtttgatcttcgctggcaagcagctggaggatggccgcacccttgcgga

SEQ ID NO: 27004 - DNA, 239 bp, Zea mays
atacaaaccatcgcaacgcaacagcaacaacagttcctaccagcactgagccacctagccatggtgaaccctgtcgcctacttgcaacagcagctgcttgcatccaacccacttgctctagcaaacgtagttgcaaaccagcaacaacaacaactgcaacagtttctgccagcgcttgagtcaactagccatggtgaaccctgccgcctacctacaacagcaacaactgctttcatcta

SEQ ID NO: 27005 - DNA, 238 bp, Zea mays
gataaaatgacacttattgaggttggccccaggttctgtttgaatccaatcaaaatatttggtggtagttttggtggtcctacatggtatgagaacccatactacatttcccccaatcagatccgtgcactagagaagaggcagaaggcaggcaaatatgccaagaaggtgaaggccaaggtgaggaggaagatgcacgagatggagaacacgctggagcctgatgagtttgctgagc

SEQ ID NO: 27006 - DNA, 240 bp, Zea mays
atcaggggtgcctttccttaatcttgcaaccttacaggggattttgaaatttctttgctcgaagctacaagaagaggctgagggctgttcccttctgcacaatcagcttctcagtattcctattggtacatggtctccacatacggggaggtcaagtagcaggcaactcagaactttggctagctgagttctcctctaaatacctgcctggatattctgcttcaagatagagtaagctcg

SEQ ID NO: 27007 - DNA, 237 bp, Zea mays
gaggagctcgtgtgcgacatcggcgacgccaaagatgttgttggcaggcctctgatgttcatgcaagtgacgaggttcaaatgcggcggatttgcaatcggcgtcagcgtatgccacaacatggctgacgccttcggtgtcatccagttcctcaagagtcgcacgagtcatcgccgggtccagcccatggccatggacaagatggtcggttgctacttcctcatcggcccgagagag

SEQ ID NO: 27008 - DNA, 241 bp, Zea mays
attgagaccagcaagcaacatagaaagtagaatccattagcaacaatagagcaacaatggcgaccaagatattttccctccttatgctccttgctctttctacatgtgttgctaacgcgacaattttccctcaatgctcacaagctcctatagcttcccttcttcccccataccttcgcatcaattgatagcttcagtatgtgaaaacccagctcttcaaccatataggcttcaacaagca

SEQ ID NO: 27009 - DNA, 243 bp, Zea mays
acaccaacaagcaacatagaaagtggaatccagtagcaacaacagagcaacaatggcgaccaagatattttccctccttatgctccttgctctttctgcatgtgttgctaacgcgacaattttccctcaatgctcacaagctcctatagcttcccttcttcccccataccttccatcagatgatagcttcagtatgtgaaaacccagctcttcagccctataggctccaacaagcaatcgcag

SEQ ID NO: 27010 - DNA, 245 bp, Zea mays
gatcagcaaagcggcagtgcgtagagaggatcgtcgaacagaacagcatgaagatggtcatcgttctcgtcgtgtgcctggctctgtcagctgccagcgcctctgcaatgcagatgccctgcccctgcgcggggctgcagggcttgtacggcgctggcgccggcctgacgacgatgatgggcgccggcgggctgtacccctacgcggagtacctgaggcagccgcagtgcagcccgctggcggcg

SEQ ID NO: 27011 - DNA, 258 bp, Zea mays
gaccaacaagcaacatagaaagtggaatccagtagcaacaatagagcaacaatggcgaccaagatattttccctccttatgctccttgctctttctacatgtgttgctaacgcgacaattttccctcaatgctcacaagctcctatagcttcccttcttcccccataccttccatcaattatagcttcaatatgtgaaaacccagctcttcaaccatataggcttcaacaagcaatcgcagcaagcaacataccttta

SEQ ID NO: 27012 - DNA, 254 bp, Zea mays
atcagcaaagcggcagtgcgtagagaggatcgtcgaacagaacagcatgaagatggtcatcgttctcgtcgtgtgcctggctctgtcagctgccagcgcctctgcaatgcagatgccctgcccctgcgcggggctgcagggcttgtacggcgctggcgccggcctgacgacgatgatgggcgccggcgggctgtacccctacgcggagtacctgaggcagccgcagtgcagcccgctggcggcggcgccctact

SEQ ID NO: 27013 - DNA, 253 bp, Zea mays
gttacttcaatgggcttcgaacacctagctgtgcaagccaacatgcaacaacaagcgcttgcggcgagcgtcttacaacaaccaattgcccaattgcaacaacaatccttgccacatctaacaatacaagccatcacaacgcaacagcaacaacagttcctaccagcactgagccacctagccatggtgaaccctgccgcctacttgcaagagcagctgcttgcatccaacccacttgctctggcgaacgtag

SEQ ID NO: 27014 - DNA, 253 bp, Zea mays
agctcttcagccctataggctccaacaagcaatcgcagcaagcaacatacctttatcacccttgttgtttcaacaatcgccagccctatctttggtgcagtcattggtacaaaccatcagggcacagcagctgcagcaactcgtgctacctgtgatcaaccaagtagctctggcaaacctttctccctactctcagcaacaacaatttcttccattcaaccaactgtctacactgaaccctgctgcttatttg

SEQ ID NO: 27015 - DNA, 251 bp, Zea mays
acgaccaaaatcattgcggatatatgaaacacatgtcggaatgagtagcccggaaccgaagataaacacatatgtaaactttagggatgaagtcctcccaagaataaaaaaacttggatacaatgcagtgcaaataatggcaatccaagagcactcatattatggaagctttggataccatgtaactaatttttttgcgccaagtagtcgttttggtaccccagaagaattgaagtctttgattgatagag

SEQ ID NO: 27016 - DNA, 249 bp, Zea mays
acttcttatttgcaacaacaacaactaccattcagccagctatctgctgcctacccccagcaatttcttccattcaaccaactgacagcattgaactctcctgcttatttacagcagcaacaactactaccattcagccagctagctggtgtgagccctgctaccttcttgacacaaccacagttgttgccgttctaccagcacgctgcgcctaacgctggcaccctcttacaactgcaacaattgctg

SEQ ID NO: 27017 - DNA, 248 bp, Zea mays
gccagcagctcaggcaggtggagccgcagcaccggtaccaggcgatcttcggcttggtcctccagtccatcctgcagcagcagccgcaaagcgtgccaggtcgcggggctgttggcggcgcagatagcgcacacactgacggcgatgtgcggcctgcagcagccgactccatgcccctacgctgctgccggcggtgtcccccactgaagaaactatgtgctgtagtatagccgctggctagctagcta

SEQ ID NO: 27018 - DNA, 250 bp, Zea mays
gtgcgaggagaccacccttcacgatgtcaacattgaagaggagatgaggcgcaggcagcagcagaagaagcaggaagcctacgatgaagacgaggaggaggatgctcaaccaagggtgcaatgtgcccagcagtaaaatccgtgttcgttggaactgttctccaaaagtttcagcaggattttttatccatctgatcatctcgattctttttggcaaaaatataatcgttttataaactttaaactgtta

SEQ ID NO: 27019 - DNA, 249 bp, Zea mays
gttcctgggccagtgcgtcgagttcctgaggcaccagtgcagcccggcggcgacgccctacggctcgccacagtgccaggcgctgcagcagcagtgctgccaccagatcaggcaggtggagccgctgcaccggtaccaggcgacatacggtgtggtcctgcagtccttcctgcagcagcagccgcagggcgagctcgcggcgctgatggcggcccaggtagcgcacagctgacggcgatgtgcggtctg

SEQ ID NO: 27020 - DNA, 250 bp, Zea mays
cggctggaggtgctgctgattgccaattttggcataggaacctaggaaccaagtgtcgtctccatgagctttcaaacaagcgaaggatctctattgctggtgcttccaaactgttggctaacatcctttattcatatcgtgggatgggactgtcgattggtacaatgatcgctggatgggatgagaagggtcctggcttgtactatgttgacagtgagggtgcgcggctcgtggggaacaggttctctgt

SEQ ID NO: 27021 - DNA, 252 bp, Zea mays
aggcacaacaactacaacaacttgtgctagcaaaccttgctgcctactctcagcaacagcagtttcttccattcaaccaactagctgcattgaactctgcttcttatttgcaacaacaacaactaccattcagccagctatctgctgcctacccccagcaatttcttccattcaaccaactgacagcattgaactctcctgcttatttacagcagcaacaactactaccattcagccagctagctggtgtga

SEQ ID NO: 27022 - DNA, 252 bp, Zea mays
caggcgtcttagtgttcgtttccactccagatccaattggcaacaagtactatcttggccctgctcctttgcaggatatggcaaggcaaattgctacagccaatggccctactggctataatagggattacctgttctcaatggagaaggcattagccagcattagccacgaagatgattcgatcatagagcttgcaaacgaggtgaggaaggtgctcaacagaacaaaggagaccaagatcactggtgcca

SEQ ID NO: 27023 - DNA, 92 bp, Zea mays
cctcttttagattgcttattagttgtaattcaataataaagttttttggatgatgtatgtggccaaccagaaataagaagttacatttccag

SEQ ID NO: 27024 - DNA, 249 bp, Zea mays
caactagcaacatagaaagcacaatagtgtaccaacaatggcagccaaaatattttgcctccttatgctccttggtctttctgcaagtgctgctacggcgaccattttcccgcaatgctcgcaagctcctatagcttcccttcttcccccgtacctctcaccagcggtgtcttcggtatgtgaaaacccaattcttcaaccctacaggatccaacaggcaatcacagctggcatcttacctttatcacc

SEQ ID NO: 27025 - DNA, 248 bp, Zea mays
tgaggctaccctcggcacctacaagggtgatgctgccgccgacaccgagagcctccacgtcaaggactacaagtactgagttgcttctctttgcgtgcccgttttggaactcctgcctacgagctaggttgcggagtgtggtttgctcgttagagcttattttcggacatccaaaaaacatgcttcctatgtgggatgatggttatctttatatttgtatgttaattagtctctttgctgttaaattt

SEQ ID NO: 27026 - DNA, 247 bp, Zea mays
atgcgattgagtaatcggaaaacctcatcggagaagaaactcctcgagcgaagatcttatctaaaagtagcgacggtgagcgccgaagctgctaccaagcggaggatgaaaagactatctagcccttagcgatttatgtcacattaatgagcaagtgttgaaggtcataaatgtaattttatctaggcttcgtcccgtgcctataaatagatgaacagtagcaccgtactgttcacgctgaattgta

SEQ ID NO: 27027 - DNA, 246 bp, Zea mays
caagcaatcgcagcaagcaacatacctttatcgcccttgttgtttcaacaatcgccagccctatctttggtgcagtcattggtacaaaccatcagggcacaacagctgcagcaactcgtgctacctctgatcaaccaagtagctctggcaaacctttctccctactctcagcaacaacaatttcttccattcaaccaactgtctacactgaaccctgctgcttatttgcagcaacaactattacca

SEQ ID NO: 27028 - DNA, 245 bp, Zea mays
aactagatgtggtgaaccctgtcgcctacttgcaacagcaggtgcttgcatccaacccacttgctctggcaaacgtagctgcataccaacaacaacaacaattgcaacagtttctgccagcgctcagtcaactagccatggtgaaccctgccgcctacctacaacagcaacaactgctttcatctagccctctcgttgtgggtaatgcacctacatacctgcaacaacaattgctgcaacagatt

SEQ ID NO: 27029 - DNA, 244 bp, Zea mays
aacgtattgcaaaccagccacaacaacagctgcaacagtttctgccagcgctcagtcaactagccatggtgaaccctgccgcctacctacaacagcaacaactgctttcatctagcccgctcgctgtggccaatgcacctacatacctgcaacaacaattgttgcaacagattgtaccagctctgactcagctagttgtggcaaaccctgctgcctacttgcaacagctgcttccattcaacca

SEQ ID NO: 27030 - DNA, 242 bp, Zea mays
gaagaacccgatcgacaccatgagggtgttgctcgttgccctcgctctcctggctctcgctgcgagcgccacctccacgcatacaagcagcggctgcggctgccagccaccgccgccggttcatctaccgccgccggtgcatctgccacctccggttcacctgccacctccggtgcatctcccaccgccggtccacctgccgccgccggtccacctgccaccgccggtccatgtgccgccgc

SEQ ID NO: 27031 - DNA, 244 bp, Zea mays
gcaattagctcatcgactccagattggagaactcgacaccatgaaggtgctgatcgttgcccttgctctcctggcgctcgctgcgaggccgcctccagtacaagcggcggctgtggctgccagacaccaccgtttcatctaccgcctccgttctatatgccgcctccgttctatctgccgccgcagcagcagccgcagccatggcattaccccactcaaccaccgcagctaagcccgtgccagc

SEQ ID NO: 27032 - DNA, 245 bp, Zea mays
aagatgcttgcattgttcgctctcctagctctttgtgcaagcgccactagtgcgacccatattccagggcacttgccaccagtcatgccattgggtaccatgaacccatgcatgcagtactgcatgatgcaacaggggcttgccagcttgatggcgtgtccgtccctgatgctgcagcaactgttggccttaccgcttcagacgatgccagtgatgatgccacagatgatgacgcctaacatgat

SEQ ID NO: 27033 - DNA, 247 bp, Zea mays
acggcaaggagtccaaggacagggaggagcaggcggagttcaagaagatgtacagcctcatcgacgagtacaagttgaagggccatatccggtggatctcggcgcagatgaaccgcgtccgcaacggggagctgtaccgctacatttgcgataccaagggcgcattcgtgcagcctgcgttctacgaagcgttcggcctgactgtgatcgagtccatgacgtgcggtctgccaacgatcgcgacctg

SEQ ID NO: 27034 - DNA, 244 bp, Zea mays
ccacctcgaggtcttccaggaagctgagcttcttgtcaacattaaggaccatgtcctagtgccagagcatgtgctcctgacaccggaagacaagaagactcttctagagcggtacaccgtgaaggaaacccagctgccccggattcagattacagacccgatagcaagatactatgggatgaagcgtgggcaggtcgtgaagatcacaagagccagtgagactgctggaagatacatcacctac

SEQ ID NO: 27035 - DNA, 182 bp, Zea mays
caggaaactatgtactgtagtaataatgtaatggagccgctgactagctacctagctcgctagtttactcatttagcggcgatgagtaacgtagtgtcacgcatcaccatgggtggcagtgtcagtgtgagcaatgacctgaatgaacaattgaaatgaaaagaaaaaaaagtactccatct

SEQ ID NO: 27036 - DNA, 236 bp, Zea mays
ccaagcgcgactgcctccccgcccgtgccaccgcaaggggaaatcaacgaagagggtgtctatggtcaggggcctgatcagagaggttgctgggtttgctccttatgagaagcgtatcactgagcttctgaaggttggcaaggacaagcgtgccctgaagcttgctaagagaaagcttggaactcacaagagggcaaagaagaagaagaggagatggcgggcgtcctcaggaagat

SEQ ID NO: 27037 - DNA, 237 bp, Zea mays
cagcctagcaattagctcatcgactccagattggagaactcgacaccatgaaggtgctgatcgttgcccttgctctcctggcgctcgctgcgagcgccgcctccagtacaagcggcggctgtggctgccagacaccaccgtttcatctaccgcctccgttctatatgccgcctccgttctatctgccgccgcagcagcagccgcagccatggcaataccccaatcaaccaccgcagc

SEQ ID NO: 27038 - DNA, 237 bp, Zea mays
tggaattgaagggtccattccctaagaagatgcttcgaaagggtgcctttactatgcaacacttcgatcaagatctcaattttcatgctaccgaggaggatcctgtgacaaaaacggctgtgagaaggttaattttgaacattaaaccaaaggatgttggttctttgtttccgaactttcctggcgaggatccaaaaatgctatccagttttaaggatcttcttgataaaatattta

SEQ ID NO: 27039 - DNA, 237 bp, Zea mays
caagaaggccatggaggatgctggccttgagaagagccagatccacgagatcgtcctggttggtggaagcaccaggattcccaaggtccagcagctcctgcgggactacttcgacggcaaggagcccaacaagggtgtcaaccctgatgaggctgttgcctttggtgccgctgtgcagggaagcatcttgagcggcgagggtggtgacgagaccaaagatatcctcctccttgatgt

SEQ ID NO: 27040 - DNA, 239 bp, Zea mays
cttaacaaggatgatgatgtacgcaagtacgtgaacacataccgcaggacattcactaccaagaacggcaagaaggtcagcaaggcacctaagatccaacggcttgtgacacccttgaccctccagaggaagcgtgctagaatcgctgacaagaagaagaggataactaagaagaagtctgaggctgctgagtaccagaagcttcttgcccagaggctgaaggaacagatggaccgccg

SEQ ID NO: 27041 - DNA, 240 bp, Zea mays
cacagatggacggcaaaacaataaaggctcagatctgggacacagctgggcaggaaaggtaccgtgcaattacaagtgcttactaccgtggagccgtgggagcactgcttgtgtacgacatcacaaagaggcagagcttcgacaatgttcacaggtggcttcgtgaactccgcgaccatgctgactccagtattgtgatcatgatggtcggtaacaaatctgacctaatccacctgagag

SEQ ID NO: 27042 - DNA, 138 bp, Zea mays
caagatattatccctccttgcgcttcttgcgctttttgcgagcgcaacaaatgcgttcattattccacaatgctcacttgctccaagttccattattacacagttcctcccaccagttacttcaatgggcttcgaaca

SEQ ID NO: 27043 - DNA, 260 bp, Zea mays
agcgaacacattagcaacaacctaacaacaatggctaccaagatattatccctccttgcgcttcttgcgctttttgcgagcgcaacaaatgcgttcattattccacaatgctcacttgctccaagttccattattacacagttcctcccaccagttacttcaatgggcttcgaacacccagctgtgcaagcctataggctacaacaagcaattgcggcgagcgtcttacaacaaccaatttcccagttgcaacaacaatc

SEQ ID NO: 27044 - DNA, 247 bp, Zea mays
ctggagggctggaccaaggaatagcttttttgacacgctcttcaaagctgttggtagaatagatataatagcagaagatctgggggtaattactgaagatgtcgttcagctaaggaaatccattggggcccctgggatggcagttctccagtttgctttcggaggtggttctgacaaccctcatttgccacacaaccatgaaatggatcaagttgtgtacactggaacacatgataacgatacagtt

SEQ ID NO: 27045 - DNA, 255 bp, Zea mays
gatcagcaaagcggcagtgcgtagagaggatcgtcgaacagaacagcatgaagatggtcatcgttctcgtcgtgtgcctggctctgtcagctgccagcgcctctgcaatgcagatgccctgcccctgcgcggggctgcagggcttgtacggcgctggcgccggcctgacgacgatgatgggcgccggcgggctgtacccctacgcggagtacctgaagcagccgcagtgcagcccgctggcggcggcgccctact

SEQ ID NO: 27046 - DNA, 129 bp, Zea mays
caaactcaacagtgttctaccaacaacccatcattggtggtgccctcttttagattgcttatgagttatagttcaataatgaagttttttggatgatgtttgtggcgtcccagaaataagaaagtacat

SEQ ID NO: 27047 - DNA, 251 bp, Zea mays
gcaattagctcatcgactccagattggagaactcgacaccatgaaggtgctgatcgttgcccttgctctcctggcgctcgctgcgagcgccgcctccagtacaagcggcggctgtggctgccagacaccaccgtttcatctaccgcctccgttctatatgccgcctccgttctatctgccgccgcagcagcagccgcagccatggcaataacgtactcaaccaccgcagctaagcccgtgccagcagttcg

SEQ ID NO: 27048 - DNA, 254 bp, Zea mays
attattgagaccaactagcaacatagaaagcacaatagtgtaccaacaatggcagccaaaatattttgcctccttatgctccttggtctttctgcaagtgctgctacggcgaccattttcccgcaatgctcgcaagctcctatagcttcccttcttcccccgtacctctcaccagcggtgtcttcggtatgtgaaaacccaattcttcaaccctacaggatccaacaggcaatcacagctggcatcttaccttt

SEQ ID NO: 27049 - DNA, 249 bp, Zea mays
atccagccgtgcaagcctacaggctacaactagcgcttgcggcgagcgccttacaacaaccaattgcccaattgcaacaacaatccttggcacatctaaccctacaaaccattgcaacgcaacaacaacaacaacagtttctgccatcactgagccacctagccgtggtgaaccctgtcacctacttgcaacagcagctgcttgcatccaacccacttgctctggcgaacgtagctgcataccagcaac

SEQ ID NO: 27050 - DNA, 232 bp, Zea mays
tggacgtcagcctagcaattagctcatcgactccagattggagaactcgacaccatgaaggtgctgatcgttgcccttgctctcctggcgctcgctgcgagcgccgcctccagtacaagcggcggctgtggctgccagacaccaccgtttcatctaccgcctccgttctatatgccgcttcggttctatctgcggcggcagcagcagccgcagccatggcaatacccaactc

SEQ ID NO: 27051 - DNA, 254 bp, Zea mays
ggctgagcggaattactgcagagggccaaggtgtgaaggttgaatcctcagcagttccttcagccccaactccagatgttgctgaagcacaggccccagttgctgaggaggacgacgacgatgatgttgacctttttggtgaggagaccgaagatgagaagaaggctgctgaagagcgtgctgcagctgccaaggcttctggcaagaagaaagaatctgggaagtcatcagttttacttgatgtgaagccatgg

SEQ ID NO: 27052 - DNA, 252 bp, Zea mays
gcgtagagaggatcgtcgaacagaacagcatgaagatggtcatcgttctcgtcgtgtgcctggctctgtcagctgccagcgcctctgcaatgcagatgccctgcccctgcgcggggctgcagggcttgtacggcgctggcgccggcctgacgacgatgatgggcgccggcgggctgtacccctacgcggagtacctgatgcagccgcagtgcagcccgctggcggcggcgccctactacgccgggtgttggc

SEQ ID NO: 27053 - DNA, 209 bp, Zea mays
ggcgagcgccacctccacgcatacaagcagcggctgcggctgccagccaccgccgccggttcatctaccgccgccggtgcatctgccacctccggttcacctgccacctccggtgcatctcccaccgccggtccacctgccgccgccggtccacctgccaccgccggtccatgtgccgccgccggttcatctgccgccgccaccatgcc

SEQ ID NO: 27054 - DNA, 258 bp, Zea mays
gccgcctccgttctatctgccgccgcagcagcagccgcagccatggcaataccccactcaaccaccgcagctaagcccgtgccagcagttcggatcctgcggcgtcggcagcgtcggcagcccgttcctgggccagtgcgtcgagttcctgaggcaccagtgcagcccggcggcgacgccctacggctcgccacagtgccaggcgctgcagcagcagtgctgccaccagatcaggcaggtggagccgctgcaccggta

SEQ ID NO: 27055 - DNA, 254 bp, Zea mays
  unsure (1)..(254): unsure at all n locations
caaaaacacaccaagcgaagcnactagcaacgacctaacaccaatggctaccaagatattagccctccttgcgcttcttgcccttttagtgagcgcaacaaatgcgttcattattccacagtgctcacttgctcctagtgccagtattccacagttcctcccaccagttacttcaatgggcttcgaacatccagccgtgcaagcctacaggctacaactagcgcttgcggcgagcgccttacaacaaccaattg

SEQ ID NO: 27056 - DNA, 253 bp, Zea mays
cagcaaagcggcagtgcgtagagaggatcgtcgaacagaacagcatgaagatggtcatcgttctcgtcgtgtgcctggctctgtcagctgccagcgcctctgcaatgcagatgccctgcccctgcgcggggctgcagggcttgtacggcgctggcgccggcctgacgacgatgatgggcgccggcgggctgtacccctacgcggagtacctgaggcagccgcagtgcagcccgctggcggcggcgccctacta

SEQ ID NO: 27057 - DNA, 203 bp, Zea mays
attagatttatccgtgctgattctcaggtcttcctttttgccaactcgaaatgcaagcgctacttccacaaccgcctgaagcctgcaaagcttacctggacagcaatgtacaggaagcagcacaagaaggatatccatgctgaagcggtaaagaagaggcgccgcgccaccaagaagccatactccaggtcaattgtgggtgc

SEQ ID NO: 27058 - DNA, 248 bp, Zea mays
ggttacatggttgattcagtcctaattgttggaaacagtgtcacagatcaagccttatcaagtcttatcaagtgtttgaagagcgaccatagggttctcaagaaggaggcatcatgggccatgtcaaatatagcagcgggcagttttgagcacaaaaaactgatatttgctagtgaggcgactcctttgctgatgcacctcctcaggactgcacagtttgacatccgccaggaagcagcatacacgct

SEQ ID NO: 27059 - DNA, 248 bp, Zea mays
gcaaagcggcagtgcgtagagaggatcgtcgaacagaacagcatgaagatggtcatcgttctcgtcgtgtgcctggctctgtcagctgccagcgcctctgcaatgcagatgccctgcccctgcgcggggctgcagggcttgtacggcgctggcgccggcctgacgacgatgatgggcgccggcgggctgtacccctacgcggagtacctgaggcagccgcagtgcagcccgctggcggcggcgcccta

SEQ ID NO: 27060 - DNA, 249 bp, Zea mays
ccgtggacggcatcgtcgtgaacagcttcgaggagctggagcacggctcggtttcgcgcctcgcggcggccacgggcaaggccgtgctctccgtcggccccgtctcgctgtgcggcgccgccgcacctcctagcctcctcgactcgcgggccaactcggacgatgccaggctgtgcatggcgtggctggacgccaagagagccgactccgttctctacgtcagcttcggcagcgccgggcgcatgcctc

SEQ ID NO: 27061 - DNA, 230 bp, Zea mays
aagaaacaagaacttgctaaaagatactcaaaaagagatgatgcaaccaaagatctgactgaggcagtagaggtaggagataaagatgcgattgaaaaattgagcaagaggactgtaaaggtcacaaggcaacacaacgaagattgtaaacgactattaagacctatgggggttcctgttgtagaagcaccttctgaagcagaagccgaatgtgcagccctttgcataaa

SEQ ID NO: 27062 - DNA, 248 bp, Zea mays
ctattacagcagttacctttggtgcatttattggcacaaaacatcagggcacaacaactacaacaacttgtgctagcaaaccttgctgcctactctcagcaacagcagtttcttccattcaaccaactagctgcattgaactctgcttcttatttgcaacaacaacaactaccattcagccagctatctgctgcctacccccagcaatttcttccattcaaccaactgacagcattgaactctcctgc

SEQ ID NO: 27063 - DNA, 245 bp, Zea mays
caactagcaacatagaaagcacaatagtgtaccaacaatggcagccaaaatattttgcctccttatgctccttggtctttctgcaagtgctgctacggcgaccattttcccgcaatgctcgcaagctcctatagcttcccttcttcccccgtacctctcaccagcggtgtcttcggtatgtgaaaacccaattcttcaaccctacaggatccaacaggcaatcacagctggcatcttacctttat

SEQ ID NO: 27064 - DNA, 247 bp, Zea mays
gtcagcctagcaattagctcatcgactccagattggagaactcgacaccatgaaggtgctgatcgttgcccttgctctcctggcgctcgctgcgagcgccgcctccagtacaagcggcggctgtggctgccagacaccaccgtttcatctaccgcctccgttctatatgccgcctccgttctatctgccgccgcagcagcagccgcagccatggcaataccccactcaaccatcgcagctaagcccg

SEQ ID NO: 27065 - DNA, 245 bp, Zea mays
acagaacagcatgaagatggtcatcgttctcgtcgtgtgcctggctctgtcagctgccagcgcctctgcaatgcagatgccctgcccctgcgcggggctgcagggcttgtacggcgctggcgccggcctgacgacgatgatgggcgccggcgggctgtacccctacgcggagtacctgaggcagccgcagtgcagcccgctggcggcggcgccctactacgccgggtgtgggcagccgagcgcca

SEQ ID NO: 27066 - DNA, 252 bp, Zea mays
cacggcagttggttcaacagaagaagagagacagagctttgattgcactgaagaagaagaaagctcaggaagagctgttgaaacaagttgacacatggcaaatgaatgttgaacaacagctctcagatattgaactagcaagtaaacaaaaggctgtatttgaaagcctgaaggctggaaacgctgcccttaagtctatacagaatgagataaacattgatgatgtccaaaagctgatggatgacacagccg

SEQ ID NO: 27067 - DNA, 252 bp, Zea mays
gaaggagccaaagttcctgaagaacggtgatgctggtatggtgaagatgataccgaccaagcccatggtggtggagacattctcagcgtatcctccccttggtaggtttgctgtccgtgacatgagacagacggttgctgttggagttatcaagagtgtggagaagaaggacccgaccggcgccaaggtgaccaaggcggctgccaagaagaaatgatgcgatcctgcgcctgctttagcaatacctagttt

SEQ ID NO: 27068 - DNA, 250 bp, Zea mays
tacaacaggaacctcgcggcgcggatggctaagaacccgggcacgccggtgaggccgggcgcgaagatgccggtgttcgtgttctctctatacaacgaggacctcaagccagggccgggcaccgagcgacactggggactgtactacgccaacggcacggcagtctacgagatcgacctcaccggacggcggccactggggtcgtacccgcccctgccggcgccggagaacaacataccgtacaaaggac

SEQ ID NO: 27069 - DNA, 249 bp, Zea mays
agcaaaccttgctgcctactctcagcaacagcagtttcttccattcaaccaactagctgcattgaactctgcttcttatttgcaacaacaacaactaccattcagccagctatctgctgcctacccccagcaatttcttccattcaaccaactgacagcattgaactctcctgcttatttacagcagcaacaactactaccattcagccagctagctggtgtgagccctgctaccttcttgacacaacc

SEQ ID NO: 27070 - DNA, 163 bp, Zea mays
cttacctttatcacccttgttcctccaacaatcatcagccctattacagcagttacctttggtgcatttattggcacaaaacatcagggcacaacaactacaacaacttgtgctagcaaaccttgctgcctattctcagcaacagcagtttcttccattcaac

SEQ ID NO: 27071 - DNA, 183 bp, Zea mays
gttgaagaccttgacgagctctccacgctcctccaagttcctcttgtcgcaggaactgtgaacagaggaagcgaggtcattgctgcaggcatgacagtgaacgactggactgccttttgtggctcggacacgacagccaccgagctctcagtcatcgaaagcgtcttcaagctgagagaaagg

SEQ ID NO: 27072 - DNA, 241 bp, Zea mays
gtttcacaagcaagctaaagccctcgaggcctggtgtgtccatgaagctccgagtccgtgatccgaggccaacgcagacagtccaagatggactcagtttcgtggcgagcttgaagcgcgtgttcgcctgcgagcctgacaagtacgacgagatcatcgccaccatgcgccagttcaagtccgggagcattcgtagtgcggttgtggttgagcgtgtgaaggtgcttctggaaggtcaccc

SEQ ID NO: 27073 - DNA, 240 bp, Zea mays
ctgttaacatattccttctacaatttcgaccttggttattgccaaggaatgagtgactttttggctcccatactttatgtcatggaggatgagtctgaatcattttggtgctttgcttccctgatggaacgtctaggtgccaattttaatcgtgaccagaatggcatgcatgctcagctacttgcattatccaagcttgtggagcttcttgatccttcattgcacaactattttaggcaa

SEQ ID NO: 27074 - DNA, 240 bp, Zea mays
gtcaatcgcgaatattttgcagaagagcatgataggagggccagagctggcatagactatgattcatcctatgggaaggctcgcccaaatgataccattctgaagcttcaaaggacagcaccatattacaagaggaacagagctcatgtttgcagtttctttgtgcgaggtgaatgtacaagaggagctgagtgcccttatcgtcatgagatgcctgaaactggggagttatctcagcag

SEQ ID NO: 27075 - DNA, 239 bp, Zea mays
tgcggatcctgatggtgggactcgacgccgccggaaagaccaccatcctctacaagctgaagctaggcgagatcgtcaccaccatccccaccatcggattcaatgttgaaactgtggagtacaagaacatcagcttcactgtctgggatgtcgggggccaggacaagatcaggccactgtggaggcattacttccagaacacccagggtctcatctttgttgtggacagcaatgatagg

SEQ ID NO: 27076 - DNA, 234 bp, Zea mays
ataaagcacaatagtgtaccaacaatggcagccaaaatattttgcctccttatgctccttggtctttctgcaagtgctgctacggcgaccattttcccgcaatgctcgcaagctcctatagcttcccttcttcccccgtacctctcaccagcggtgtcttcggtatgtgaaaacccaattcttcaaccctacaggatccaacaggcaatcacagctggcatcttacctttatca

SEQ ID NO: 27077 - DNA, 244 bp, Zea mays
agagcattcagaaacacaccaagcgaacgcactagcaacaacctaacaacaatggctaccaagatattatccctccttgcgcttcttgcgctttttgcgagcgcaacaaatgcgtccattattccacaatgctcacttgctcctagttccattattccacagttcctcccaccagttacttcaatggccttcgaacacccagctgtgcaagcctataggctacaacaagcgattgcggcgagcg

SEQ ID NO: 27078 - DNA, 254 bp, Zea mays
agtcgttgcggcacagtgttgccagcagctcaggcaggtggagccgcagcaccggtaccaggcgatcttcggcttggtcctccagtccatcctgcagcagcagccgcaaagcggccaggtcgcggggctgttggcggcgcagatagcgcacaactgacggcgatgtgcggcctgcagcagccgactccatgcccctacgctgctgccggcggtgtcccccactgaagaaactatgtgctgtagtatagccgctg

SEQ ID NO: 27079 - DNA, 152 bp, Zea mays
ctcaactccgaggcagggcttaaaaagcttgatgagtaccttctcactcgcagctacatcactggctaccaagcttccaaggatgacttggctgtctacacttcgttttcggctgctccctcgtccaagtatatcaacgtagcaaggtggtt

SEQ ID NO: 27080 - DNA, 199 bp, Zea mays
  unsure (1)..(199): unsure at all n locations
cagaaacacaccaagcgaagcnnagtagcaacaacctaacaacaatggctaccaagatattatccctccttgcgcttcttgcgctttttgcgagcgcaacaaatgcgtccattattccacaatgctcacttgctcctagttccattattccacagttcctcccaccagttacttcaatggccttcgaacacccagctgt

SEQ ID NO: 27081 - DNA, 256 bp, Zea mays
ggcagggctcgtgtggtgggctggccgccggtgaggtcgtaccgcaagaacgcgctcgccgacgccgcgggctccagcaaggccgccaagttcgtcaaggtggccgtcgacggcgcgccctacctgcggaaggtggacctccaggcgtacgccggctacgaccagctgctccgcgcgctccaggacaagttcttctcccacttcaccatcaggaagttcgccgacgacgagaggaagctggtggacgcggtgaacg

SEQ ID NO: 27082 - DNA, 220 bp, Zea mays
gaccattttcccacaatgctcacaagctcctatagcttcccttcttcccccgtacctctcaccaacggtgtcttcggtatgtgaaaacccaattcttcaaccctacaggatccaacaggcaatcgcagctggcatcttacctttatcacccttgttcctccaacaatcatcagccctattacagcagttacctttggtgcatttattggcacaaaacatc

SEQ ID NO: 27083 - DNA, 209 bp, Zea mays
ggcggtgtcccccactgaagaaactatgtgctgtagtatagccgctggctagctagctagttgagtcatttagcggcgatgattgagtaataatgtgtcacgcatcaccatgggtggcagtgtcagtgtgagcaatgacctgaatgaacaattgaaatgaaaagaaaaaaagtactccatctgttccaaaaaaaaaaaaaaagggcggc

SEQ ID NO: 27084 - DNA, 215 bp, Zea mays
aaaccatcaaggcacagcagctgcagcaactcgtgctacctgtgatcaaccaagtagctctggcaaacctttctccctactatcagcaacaacaatttcttccattcaaccaactatctacactgaaccctgctgcttatttgcagcaacaactattaccattcagccagctagctactgcctactctcatcaacaacaacttcttccatttaac

SEQ ID NO: 27085 - DNA, 220 bp, Zea mays
tggcttcgaacacccagctgtgcaagcctataggctacaacaagcgcttgcggcgagcgtcttagaacaaccaattgcccaattacaacaacaatccttggcacatctaaccatacaaaccatcgcaacgcagcagcaacaagcactgagccacctagccgtggtgaaccctatcgcctacttgcaacaacagctgcttgcatccaacccacttgctttg

SEQ ID NO: 27086 - DNA, 175 bp, Zea mays
gttcctcacagcagcagccatggcggccgagccggagaagcaggcggcccccgcggcacaggagacggccgtgcacatcgtgtacgttgaccgccccgaggacgccgaccctgaggagttccacatccgcaccctcacccccgtcctcggcagcgaacagaaggccagggacgca

SEQ ID NO: 27087 - DNA, 173 bp, Zea mays
acaactactaccattcagccagctagctggtgtgagccctgctaccttcttgacacaaccacagttgttgccgttctaccagcacgctgcgcctaacgctggcaccctcttacaactgcaacaattgctgccattcaaccaacttgctttgacaaacccagcagcattctacc

SEQ ID NO: 27088 - DNA, 184 bp, Zea mays
attgagaccaactagcaacatagaaagcacaatagtgtaccaacaatggcagccaaaatattttgcctccttatgctccttggtctttctgcaagtgctgctacggcgaccattttcccacaatgctcacaagctcctatagcttcccttcttcccccgtacctctcaccagcggtgtcttcgg

SEQ ID NO: 27089 - DNA, 127 bp, Zea mays
catgagggtgttgctcgttgccctcgctctcctggctctcgctgcgagcgccacctccacgcatacaagcagcggctgcggctgccagccaccgccgccggttcatctaccgccgccggtgcatctg

SEQ ID NO: 27090 - DNA, 195 bp, Zea mays
caaatgcgttcattattccacaatgctcacttgctcctagtgccattattccacagttcctcccaccagttacttcaatgggcttcgaacacctagctgtgcaagccaacatgcaacaacaagcgcttgcggcgagcgtcttacaacaaccaattgcccaattgcaacaacaatccttgccacatctaacaatac

SEQ ID NO: 27091 - DNA, 247 bp, Zea mays
gcggcgacgcctacggctcgccacagtgccaggcgctgcagcagcagtgctgccaccagatcaggcaggtggagccgctgcaccggtaccaggcgacatacggtgtggtcctgcagtccttcctgcagcagcagccgcatggcgagctcgcggcgctgatggcggcccaggtagcgcacagctgacggcgatgtgcggcctgcagctgcagcagccaggtccctgcccttgcaacgcagctgccggc

SEQ ID NO: 27092 - DNA, 217 bp, Zea mays
cagcaaagcggcagtgcgtagagaggatcgtcgaacagaacagcatgaagatggtcatcgttctcgtcgtgtgcctggctctgtcagctgccagcgcctctgcaatgcagatgccctgcccctgcgcggggctgcagggcttgtacggcgctggcgccggcctgacgacgatgatgggcgccggcgggctgtacccctacgcggagtacctgaggca

SEQ ID NO: 27093 - DNA, 208 bp, Zea mays
caaggtcttcagcgcctcgcctgatgaagctaggaacgagatgcgccaggcctgttttgattacttgagcctcggaggcgtcttctcgaatgggcctattgccttactctcgggtcttaatcctcggccactgagtttagttgcacacttctttgctgtcgctatctacggtgttggtcgcttgatgctccctcttccttcacctaaa

SEQ ID NO: 27094 - DNA, 252 bp, Zea mays
cgcgacaattttccctcaatgctcacaagctcctatagcttcccttcttcccccataccttccatcaattatagcttcaatatgtgaaaacccagctcttcaaccatataggcttcaacaagcaatcgcagcaagcaacatacctttatcgcccttgttgtttcaacaatcgccagccctatctttggtgcagtcattggtacaaaccatcagggcacaacagctgcagcaactcgtgctacctctgatcaa

SEQ ID NO: 27095 - DNA, 141 bp, Zea mays
caatgctcacttgctccaagttccattattacacagttcctcccaccagttacttcaatgggcttcgaacacccagctgtgcaagcctataggctacaacaagcaattgcggcgagcgtcttacaacaaccaatttcccag

SEQ ID NO: 27096 - DNA, 141 bp, Zea mays
ggctcgctatgccatcatctgccaggagaatggtctggtgccaattgttgagcctgagatccttgttgatggccctcatgacattgatcgctgcgcttacgtcactgagaccgtccttgctgcctgctacaaggcgctcaa

SEQ ID NO: 27097 - DNA, 174 bp, Zea mays
gcaattagctcatcgactccagattggagaactcgacaccatgaaggtgctgatcgttgcccttgctctcctggcgctcgctgcgagcgccgcctccagtacaagcggcggctgtggctgccagacaccaccgtttcatctaccgcctccgttctatatgccgcctccgttcta

SEQ ID NO: 27098 - DNA, 179 bp, Zea mays
gtcagcctagcaattagctcatcgactccagattggagaactcgacaccatgaaggtgctgatcgttgcccttgctctcctggcgctcgctgcgagcgccgcctccagtacaagcggcggctgtggctgccagacaccaccgtttcatctaccgcctccgttctatatgccgcctccgt

SEQ ID NO: 27099 - DNA, 190 bp, Zea mays
gtcgcacatatctactatactatactctaggaagcaaggacaccaccgccatggcagccaagatgcttgcattgttcgctctcctagctctttgtgcaagcgccactagtgcgacccatattccagggcacttgccaccagtcatgccattgggtaccatgaacccatgcatgcagtactgcatgatgca

SEQ ID NO: 27100 - DNA, 243 bp, Zea mays
tccattagcaacaatagagcaacaatggcgaccaagatattttccctccttatgctccttgctctttctacatgtgttgctaacgcgacaattttccctcaatgctcacaagctcctatagcttcccttcttcccccataccttccatcaattatagcttcagtatgtgaaaacccagctcttcaaccatataggcttcaacaagcaatcgcagcaagcaacatacctttatcgcccttgttg

SEQ ID NO: 27101 - DNA, 212 bp, Zea mays
attttgagcattcagaaacacaccaagcgaacgcactagcaacaacctaacaacaatggctaccaagatattatccctccttgcgcttcttgcgctttttgcgagcgcaacaaatgcgtccattattccacaatgctcacttgctcctagttccattattccacagttcctcccaccagttacttcaatggccttcgaacacccagctgtgc

SEQ ID NO: 27102 - DNA, 244 bp, Zea mays
  unsure (1)..(244): unsure at all n locations
ggcaggtggagccgcagcaccggtaccaggcgatcttcggcttggtcctccagtccatcctgcagcagcagccgcaaagcggccaggtcgcggggctgttggcggcgcagatagcgcagatactgacggcgatgtgcggcctgcagcagccgactccatgcccctacgctgctgccggcggtgtcncccactgaagaaactatgtgctgtagtatagccgctggctagctagctagttgagtca

SEQ ID NO: 27103 - DNA, 146 bp, Zea mays
tttggtgcatttgttggcacaaaacatcaaggcacaacaactacaacaacttgtgctaggaaaccttgctgcctactctcagcaacagcagtttcttccattcaaccaactggctgcattgaactctgctgcttatttgcaacaac

SEQ ID NO: 27104 - DNA, 118 bp, Zea mays
agaccattagctttatctactccagagcgcagaagaacccgatcgacaccatgagggtgttgctcgttgccctcgctctcctggctctcgctgcgagcgccacctccacgcatacaag

SEQ ID NO: 27105 - DNA, 194 bp, Zea mays
tgaaaacccaattcttcaaccctacaggatccaacaggcaatcgcagcaggcatcttacctttatcacccttgttcctccaacaaccgtcagccctattacagcagttacctttggtgcatttgttggcacaaaacatcaaggcacaacaactacaacaacttgtgctaggaaaccttgctgcctactctcagc

SEQ ID NO: 27106 - DNA, 250 bp, Zea mays
gtagcaacaacagagcaacaatggcgaccaagatattttccctccttatgctccttgctctttctgcatgtgttgctaacgcgacaattttccctcaatgctcacaagctcctatagcttcccttcttcccccataccttccatcaatgatagcttcagtatgtgaaaacccagctcttcagccctataggctccaacaagcaatcgcagcaagcaacatacctttatcacccttgttgtttcaacaatc

SEQ ID NO: 27107 - DNA, 191 bp, Zea mays
cagcgttctaccaacaacccatcattggtggtgccattcaaccaacttgctttgacaaacccagcagcgttctaccaacaacccatcattggtggtgccctcttttagatttcttatgagttatagttcaataataaagttttttgtctgatgtttgtggcttcccagaaataagaaagtacatttctaag

SEQ ID NO: 27108 - DNA, 226 bp, Zea mays
cttacaacaaccaattgcccaattgcaacaacaatccttggcacatctaaccctacaaaccattgcaacgcaacaacaacaacaacaacagtttctgccatcactgagccacctagccgtggtgaaccctgtcacctacttgcaacagcagctgcttgcatccaacccacttgctctggcgaacgtagctgcataccagcaacaacaacagctgcaacagtttatg

SEQ ID NO: 27109 - DNA, 259 bp, Zea mays
catagttatctatttccaaggtttccgtgttgtacttccagtgaggtcaaagaatgcccgtggtcaacaaggctcatacccaatcaagctgttttatacatccaacatgcctatcattctgcactctgcactaattaccaacctctatttcatatcccagcttctctacaggaaatacagtggaaatttccttgttaatcttcttgggaaatggaaggaatctgagtactctggccattctgttccggttggtggtctt

SEQ ID NO: 27110 - DNA, 257 bp, Zea mays
ctacaaaccattgcaacgcaacaacaacaacaacaacagtttcagccatcactgagccacctagccgtggtgaaccctgtcacctacttgcaacagcagctgcttgcatccaacccacttgctctggcgaacgtagctgcataccagcaacaacaacagctgcaacagtttatgccagtgctcagtcaactagccatggtgaaccctgccgtctacctacaactactttcatctagcccgctcgcggtgggcaatgc

SEQ ID NO: 27111 - DNA, 255 bp, Zea mays
gacggcgacgccctactgctcgcctcagtgccagtcgttgcggcacagtgttgccagcagctcaggcaggtggagccgcagcaccggtaccaggcgatcttcggcttggtcctccagtccatcctgcagcagcagccgcaaagcggccaggtcgcggggctgttggcggcgcagatagcgcacaactgacggcgatgtgcggcctgcagcagccgactccatgcccctacgctgctgccggcggtgtcccccact

SEQ ID NO: 27112 - DNA, 252 bp, Zea mays
gccgcatccaagcccgtgccagctgcagggaacctgcggcgttggcagcaccccgatcctgggccagtgcgtcgagttcctgaggcatcagtgcagcccgacggcgacgccctactgctcgcctcagtgccagtcgttgcggcacagtgttgccagcagctcaggcaggtggagccgcagcaccggtaccaggcgatcttcggcttggtcctccagtccatcctgcagcagcagccgcaaagcggcaggtcg

SEQ ID NO: 27113 - DNA, 255 bp, Zea mays
ccgtaccctcgccgactacaacatccagaaggagagcaccctccacctggtgctccgcttgcgaggtggtatgcagatctttgtgaagaccttgactggcaagaccataaccctggaggttgagagctccgacaccatcgacaacgtgaaggcaaagatccaggacaaagagggcatccccccagaccagcagcgtctgatattcgctggcaagcagctggaggatggccgcaccctagcagactacaacatcca

SEQ ID NO: 27114 - DNA, 254 bp, Zea mays
gccagtgcgtcgagttcctgaggcatcagtgcagcccgacggcgacgccctactgctcgcctcagtgccagtcgttgcggcagcagtgttgccagcagctcaggcaggtggagccgcagcaccggtaccaggcgatcttcggcttggtcctccagtccatcctgcagcagcagccgcaaagcggccaggtcgcggggctgttggcggcgcagatagcgcacaactgacggcgatgtgcggcctgcagcagccga

SEQ ID NO: 27115 - DNA, 254 bp, Zea mays
caccagcggtgtcttcagtatgtgaaaacccaattcttcaaccctacaggatccaacaggcaatcgcagcaggcatcttacctttatcacccttgttcctccaacaaccgtcagccctattacagcagttacctttggtgcatttgttggcacaaaacatcaaggcacaacaactacaacaacttgtgctaggaaaccttgctgcctactctcagcaacagcagtttcttccattcaaccaactggctgcattg

SEQ ID NO: 27116 - DNA, 257 bp, Zea mays
  unsure (1)..(257): unsure at all n locations
ctcgagccgacaaagcggcagtgcgtagagaggatcgtcgaacagaacagcatgaagatggtcatcgttctcgtcgtgtgcctggctctgtcagctgccagcgcctctgcaatgcagatgccctgcccctgcgcggggctgcagggcttgtacggcgctggcgccggcctgacgacgatgatgggcgccggcgggctgtacccctacgcggagtnactgaggcagccgcagtgcagcccgctggccgcggcgcccta

SEQ ID NO: 27117 - DNA, 229 bp, Zea mays
ctggacgtcagcctagcaattagctcatcgactccagattggagaactcgacaccatgaaggtgctgatcgttgcccttgctctcctggcgctcgctgcgagcgccgcctccagtacaagcagcggctgtggctgccagacaccaccgtttcatctaccgcctccgttctatatgccgcctccgttctatctgccgccgcagcagcagccgcagccatggcaatacccc

SEQ ID NO: 27118 - DNA, 211 bp, Zea mays
attttgagcattcagaaacacaccaagcgaacatcattagcaacaacctaacaacaatggctaccaagatattatccctccttgcgcttcttgcgctttttgcgagcgcaacaaatgcgttcattattccacaatgctcacttgctccaagttccattattacacagttcctcccaccagttacttcaatgggcttcgaacacccagctgt

SEQ ID NO: 27119 - DNA, 252 bp, Zea mays
caacgacctaacaacaatggcttccaagacattatccctccttgcgcttcttgccctttttgtgagtgcaacaaatgcgttcattattccacaatgctcacttgctccgagtgccattattccacagttcctccctccagttacttcaatgggcttcgaacacccagctgtgcaagcctataggctacaacaagcgcttgcggcgagcgtcttagaacaaccaattgcccaattacaacaacaatccttggc

SEQ ID NO: 27120 - DNA, 251 bp, Zea mays
  unsure (1)..(251): unsure at all n locations
aacacaccaagcgaagcnactagcaacgacctaacaacaatggctaccaagatattagccctccttgcgcttcttgccctttttgtgagcgcaacaaatgcgttcattattccacaatgctcacttgctcctagtgccattattccacagttcctcccaccagttacttcaatgggcttcgaacacctagctgtgcaagccaacatgcaacaacaagcgcttgcggcgagcgtcttacaacaaccaattgc

SEQ ID NO: 27121 - DNA, 251 bp, Zea mays
gtcaaagggccggtggagtacgtccctgaactgtttgatgagcagaaggaccaggtcgcggtcgagcaaatattgcgggtagtattcttggatgctgagcgcccaagcccacaaatggacaaactcaagcgccactagctgaagcagaagcagcccttgaggcacgcaagaaacctccagaggacaatggtccccgtattgttggtgaaggccttgtgattgacgaatggaaggaacgaagagagaggtac

SEQ ID NO: 27122 - DNA, 249 bp, Zea mays
atagctgcaaacatagctgtgaccacatgatgatgacgatttactacagcaggcacttgcaatgtcaatggagggtggtgcttcaggatctgcagctgtgactgactctgctatggcagaagctagtgcagttgaccctgacttagcgttggcaagagaagaaggaagacaagtaagacaaaacagaagacgagaagaactgcttcaagctggagtgatgtcgctgtggtgcttttgtgactgatcatc

SEQ ID NO: 27123 - DNA, 248 bp, Zea mays
ccaacaatcatcagccctattacatcagttacctttggtgcatttattggcacaaaacatcagggcacaacaactacaacaacttgtgctagcaaaccttgctgcctactctcagcaacagcagtttcttccattcaaccaactagctgcattgaactctgcttcttatttgcaacaacaacaactaccattcagccagctacctgctgcctacccccagcaatttcttccattcaaccaactggcag

SEQ ID NO: 27124 - DNA, 180 bp, Zea mays
cccgatcgacaccatgagggtgttgctcgttgccctcgctctcctggctctcgctgcgagcgccacctccacgcatacaagcagcggctgcggctgccagccaccgccgccggttcatctaccgccgccggtgcatctgccacctccggttcacctgccacctccggtgcatctcccacc

SEQ ID NO: 27125 - DNA, 249 bp, Zea mays
gagcattcagaaacacacctagcgaacgcactagcaacgacctaacaacaatggcttccaagacattatccctccttgcgcttcttgccctttttgtgagtgcaacaaatgcgttcattattccacaatgctcacttgctccgagtgccattattccacagttcctccctccagttacttcaatgggcttcgaacacccagctgtgcaagcctataggctacaacaagcgcttgcggcgagcgtcttag

SEQ ID NO: 27126 - DNA, 255 bp, Zea mays
aagcaacatagaaagtggaatccagtagcaacaatagagcaacaatggcgaccaagatattttccctccttatgctccttgctctttctgcatgtgttgctaacgcgacaattttccctcaatgctcacaagctcctatagcttcccttcttcccccataccttccatcaatgatagcttcagtatgtgaaaacccagctcttcaaccctataggctccaacaagcaatcgcagcaagcaacatacctttatcac

SEQ ID NO: 27127 - DNA, 259 bp, Zea mays
accattatcacccttgttcctccaacaaccgtcagccctattacagcagttacctttggtccatttggtggcacaaaacatcagggcacaacaactacaacaacttgtgctagcaaaccttgctgcatactctcagcaacatcagtttcttccattcaaccaactggctgcattgaactctgctgcttatttgcaacaacaattaccattcagccagctagttgctgcctacccccagcaatttcttccattcaaccaa

SEQ ID NO: 27128 - DNA, 253 bp, Zea mays
gctgatgatcctgaatatcgtcactacaacgacatcagtgagctgtctcctcatcgcctgcaagagatcaagcggttctttgaagattataagaagaatgagaataaagaggttgctgtcgatgcattcttgcctgcgaccacagctcgagaggccattcagtactccatggatctgtatgcgcagtatattttgcaaagcttgaggcagtagattggaagcaactatttatctgggcgtcttggaatgagtg

SEQ ID NO: 27129 - DNA, 250 bp, Zea mays
cggcacgtcggcagcccgttcctgggccagtgcgtcgagttcctgaggcaccagtgcagcccggcggcgacgccctacggctcgccacagtgccaggcgctgcagcagcagtgctgccaccagatcaggcaggtggagccgctgcaccggtaccaggcgacatacggtgtggtcctgcagtccttcctgcagcagcagccgcagagcgagctcgcggcgctgatggcggcccaggtagcgcacagctgac

SEQ ID NO: 27130 - DNA, 248 bp, Zea mays; identical to SEQ ID NO: 27059

SEQ ID NO: 27131 - DNA, 248 bp, Zea mays
gagaccaacaagcaacatagaaagtggaatccagtagcaacaatagagcaacaatggcgaccaagatattttccctccttatgctccttgctctttctgcatgtgttgctaacgcgacaattttccctcaatgctcacaagctcctatagcttcccttcttcccccataccttccatcaatgatagcttcagtatgtgaaaacccagctcttcaaccctataggctccaacaagcaatcgcagcaagc

SEQ ID NO: 27132 - DNA, 243 bp, Zea mays
acagctgtggtcaacaacaaagccatgagcagcaacatcatccacaacaacatcatccacaaaaacaacaacatcaaccaccaccacaacatcaccagcagcagcaacaccaacaacaacaagttcacatgcaaccaccaacaacaacaacaacagcaccaacaacaacatcaatgtgaaggccaacaacaacatcaccaacaatcacaaggccatgtgcaacaacacgtacagagccatgag

SEQ ID NO: 27133 - DNA, 247 bp, Zea mays
aagcagggggacgtcagcaaggactcgaccgctccaacagctgtcacctccgccaagctccgttgctcctccgatagccacgacatcacaccagcagggcgccaagatctctccggctgccacattggcatgtacttagggcactagctctccctccgctagacacgtagcactccgctacgcccccgttgtacacctggatccactccttacgcctataaaaggaaggaccagggccttcttagag

SEQ ID NO: 27134 - DNA, 245 bp, Zea mays
cagaaacacaccaagcgaacgtcactagcaacgacctaacaacaatggctaccaagatattagccctccttgcgcttcttgccctttttgtgagcgcaacaaatgcgttcattattccacaatgctcacttgctcctagtgccattattccacagttcctcccaccagttacttcaatgggcttcgaacacctagctgtgcaagccaacatgcaacaacaagcgcttgcggcgagcgtcttacaa

SEQ ID NO: 27135 - DNA, 244 bp, Zea mays
caacaatcgccagccctatctttggtgcagtcattggtacaaaccatcagggcacagcagctgcagcaactcgtgctacctgtgatcaaccaagtagctctggcaaacctttctccctactctcagcaacaacaatttcttccattcaaccaactgtctacactgaaccctgctgcttatttgcagcaacaactattaccattcagccagctagctactgcctactctcagcaacaacaacttc

SEQ ID NO: 27136 - DNA, 244 bp, Zea mays
aagttgtcaagcaataagacggtgaggagggtccgtgttcggggaggtaatgtgaaatggagggctcttcgccttgatactggtaactactcatggggaagtgaagctgttacccgcaagacccgtatcctcgacgtggtctacaatgcatcaaacaatgagcttgtgaggacacaaacccttgtgaagagtgccattgtgcaagttgatgctgccccattcaagcagtggtacctcactcact

SEQ ID NO: 27137 - DNA, 245 bp, Zea mays
tgagaccagcaagcaacatagaaagtagaatccattagcaacaatagagcaacaatggcgaccaagatattttccctccttatgctccttgctctttctacatgtgttgctaacgcgacaattttccctcaatgctcacaagctcctatagcttcccttcttcccccataccttccatcaattatagcttcagtatgtgaaaacccagctcttcaaccatataggcttcaacaagcaatcgcagc

SEQ ID NO: 27138 - DNA, 241 bp, Zea mays
atcaaaccttgctgcctactctcagcaacagcagtttcttccattcaaccaactagctgcattgaactctgcttcttatttgcaacaacaacaactaccattcagccagctatctgctgcctacccccagcaatttcttccattcaaccaactgacagcattgaactctcctgcttatttacagcagcaacaactactaccattcagccagctagctggtgtgagccctgctaccttcttg

SEQ ID NO: 27139 - DNA, 243 bp, Zea mays
atagatttgcatggcgagaactgcagattgcgactgataatttcaatgaaagaaatgttcttggacatggaggttttggtaaagtgtacaagggagttcttccagatggcactaagattgctgtaaaacgactgactgactatgagagtcctggtggggaggctgccttcttgcgtgaggttgagcttatcagtgttgcagttcaccgcaatctcttaagattaattggcttctgcacaacac

SEQ ID NO: 27140 - DNA, 206 bp, Zea mays
gcaattagctcatcgactccagattggagaactcgacaccatgaaggtgctgatcgttgcccttgctctcctggcgctcgctgcgagcgccgcctccagtacaagcagcggctgtggctgccagacaccaccgtttcatctaccgcctccgttctatatgccgcctccgttctatctgccggcgcagcagcagccgcagccatggc

SEQ ID NO: 27141 - DNA, 224 bp, Zea mays
attagtaactttgatgttcaaggaacacttgctcttcaggttcttaatgatactgatgggttcatccatttgcagattgaaagccaagatatgcctgggcttagcttcaaaacacacccaaatatcaataaggatttgtttaacagtcagcaaattttgggagcaaaagatccaaacaggccctttccgagtggtcaaaatgaaactcctctggtgaaatggag

SEQ ID NO: 27142 - DNA, 260 bp, Zea mays
gcaaaggttgagccatcaaaaaggaaagttaagagaacttctgttccggtccatgcgttggtctatggtgccttggctgcagctgacctgcagaaggctgtagagaaagagtatgagatggctcttcaggacagagtaatggaagaaaccaaagagaagaaaaatgctgtggaagcttatgtctatgacatgcgtaacaagctctacgacaggtacaacgattttgtgacacctgatgagaaggaagggttgattggaaa

SEQ ID NO: 27143 - DNA, 217 bp, Zea mays
gcggtggctaacccattggtcgttgccttcctacagcagcaacaattgctgccatacaaccagttctctttgatgaaccctgccttgttgtggcagcaacccatcgttggaggtgccatcttttagattacatatgagatgtactcgataatggtgccctcatagcggcatgtgtttcctagaaataatcaatatattgattgagatttatctcgat

SEQ ID NO: 27144 - DNA, 258 bp, Zea mays
atcgccaggtccgggaccaaggagttcatggaagcccttgctgctggcgctgatgtgtctatgattgggcagttcggtgtcggtttctactctgcctacctcgtcgccgagagggtcgtcgtgaccaccaagcataacgatgacgagcagtacgtgtgggaatcccaggcgggcgggtcgttcactgttactcgtgacacgtctggggagcagcttggcaggggtactaagattacacttttcctcaaggaagatcag

SEQ ID NO: 27145 - DNA, 261 bp, Zea mays
agaccatcaccttggaggtggagtcgtctgacacaatcgataatgtcaaagccaagatccaggacaaggagggcattccaccggaccagcagcgcctgatctttgctggcaagcagctggaggatggccgtaccctcgccgactacaacatccagaaggagagcaccctccacctggtgctccgcttgcgaggtggtatgcagatctttgtgaagaccttgactggcaagaccataaccctggaggttgagagctccgaca

SEQ ID NO: 27146 - DNA, 260 bp, Zea mays
aaacacaccaagcgaagcgactagcaacgacctaacaccaatggctaccaagatattagccctccttgcgcttcttgcccttttagtgagcgcaacaaatgcgttcattattccacagtgctcacttgctcctagtgccagtattccacagttcctcccaccagttacttcaatgggcttcgaacatccagccgtgcaagcctacaggctacaactagcgcttgcggcgagcgccttacaacaaccaattgcccaattgc

SEQ ID NO: 27147 - DNA, 258 bp, Zea mays
cgaacacccagctgtgcaagcctataggctacaacaagcaattgcggcgagcgtcttacaacaaccaatttcccagttgcaacaacaatccttggcacatctaacaatacaaaccatcgcaacgcaacagcaacaacaattcctaccagcactgagccacctagccatggtgaaccctgccgcctacttgcaacagcagttgcttgcatcaaacccacttgctctggcaaacgtagttgcaaaccagccacaacaaca

SEQ ID NO: 27148 - DNA, 259 bp, Zea mays
gcaattagctcatcgactccagattggagaactcgacaccatgaaggtgctgatcgttgcccttgctctcctggcgctcgctgcgagcgccgcctccagtacaagcggcggctgtggctgccagacaccaccgtttcatctaccgcctccgttctatatgccgcctccgttctatctgccgccgcagcagcagccgcagccatgactataccccactcaaccaccgcagctaagcccgtgccagcagttcggatcctgc

SEQ ID NO: 27149 - DNA, 262 bp, Zea mays
agttacttcaatgggcttcgaacacccagctgtgcaagcctataggctacaacaagcaattgcggcgagcgtcttacaacaaccaatttcccagttgcaacaacaatccttggcacatctaacaatacaaaccatcgcaacgcaacagcaacaacaattcctaccagcactgagccacctagccatggtgaaccctgccgcctacttgcaacagcagttgcttgcatcaaacccacttgctctggcaaacgtagttgcaaac

SEQ ID NO: 27150 - DNA, 262 bp, Zea mays
gcaacaacaatttctaccagcactgagccaactagctgtggtgaaccctgtcgcctacttgcaacagcagttgcttgcatccaacccacttgctctggcaaacatagttgcataccaacaacaacaacaattgcaacagtttctaccagcgctcagtcaactagccatggtgaaccctgccgcctacctacaacagcaacaactgatttcatctagccctctcgctgtggttaatgcacctacatacctgcaacaacagttg

SEQ ID NO: 27151 - DNA, 254 bp, Zea mays
cgaaagcccaattggatggatcagccacgaagctgaagcttttgaatagccgtggagacatatgtgccttctcgggtgccagggggattgccgctgttttggagaagaaaggttgcgatcacgtgaaatccctggcacagaccgaagccgttttatcctctgaagacataaaagacccttcggccgaggcgagtttggttggtgggaaatttttcaccgacatctgggaaaacggtggccgggagatggctcaa

SEQ ID NO: 27152 - DNA, 256 bp, Zea mays
accaccgcagctaagcccgtgccagcagttcggatcctgcggcgtcggcagcgtcggcagcccgttcctgggccagtgcgtcgagttcctgaggcaccagtgcagcccggcggcgacgccctacggctcgccacagtgccaggcgctgcagcagcagtgctgccaccagatcaggcaggtggagccgctgcaccggtaccaggcgacatacggtgtggtcctgcagtccttcctgcagcagcagccgcagggcgag

SEQ ID NO: 27153 - DNA, 251 bp, Zea mays
tgggccagtgcgtcgagtttctgaggcatcagtgcagcccgacggcgacgccctactgctcgcctcagtgccagtcgttgcggcacagtgttgccagcagctcaggcaggtggagccgcagcaccggtaccaggcgatcttcggcttggtcctccagtccatcctgcagcagcagccgcaaagcggccaggtcgcggggctgttggcggcgcagatagcgcacaactgacggcgatgtgcggcctgcagca

SEQ ID NO: 27154 - DNA, 255 bp, Zea mays
cgcctgatgacggtcgtggccaaccctaggcaattcaaggtgccggactggttcctcaacaggaagaaggattacaaggacggcaggttctcgcaggtcgtctccaacgcccttgatatgaagctcagggacgaccttgagaggctcaagaagatcaggaaccaccgtggtctgcgtcactactggggcctccgcgtccgtggccagcacaccaagactactggcaggcgtggaaagaccgttggtgtctccaag

SEQ ID NO: 27155 - DNA, 256 bp, Zea mays
tcagcattcaaaaacacaccaagcgaacgcgagctagcaacgacctaacaccaatggctaccaagatattagccctccttgcgcttcttgcccttttagtgagcgcaacaaatgcgttcattattccacagtgctcacttgctcctagtgccagtattccacagttcctcccaccagttacttcaatgggcttcgaacatccagccgtgcaagcctacaggctacaactagcgcttgcggcgagcgccttacaaca

SEQ ID NO: 27156 - DNA, 226 bp, Zea mays
ctccaaacataacaaaaagccatgacattatactattatggcatcacatcagtttttctttttattaattagctagtatattcccacggactccgaacataaactagcagaacatagaagatagcaaccacacaagtttgatgccaaacagttcgcacaacggggtagggcgcagatggaggagctttgcttgacaacacaccactcgagagcattttttgtccct

SEQ ID NO: 27157 - DNA, 255 bp, Zea mays
gatggaaagggcagaggaagacaggttatcagcacagctaggacatgcaatgttattttgattgttcttgatgccataaaaccaataactcacaagcgtcttattgagaaggagcttgaaggatttggcattaggttgaacaaaacaccacccaatttgactttcagaagaaaggacaagggtggaatcaacttcacatcaacagtgacgaacacacatttggaccttgatacagtaaaagcaatctgtagcgag

SEQ ID NO: 27158 - DNA, 256 bp, Zea mays
attgcaacaacaatccttgccacatctaacaatacaagccatcacaacgcaacagcaacaacagttcctaccagcactgagccacctagccatggtgaaccctgccgcctacttgcaagagcagctgcttgcatccaacccacttgctctggcgaacgtagttgcaaaccagcaacaacaacagctacaacagtttctgccaacgctcagtcaactagccatggtgaaccctgccgcctacgtacaacaacaacaa

SEQ ID NO: 27159 - DNA, 255 bp, Zea mays
ggatcgtcgaacagaacagcatgaagatggtcatcgttctcgtcgtgtgcctggctctgtcagctgccagcgcctctgcaatgcagatgccctgcccctgcgcggggctgcagggcttgtacggcgctggcgccggcctgacgacgatgatgggcgccggcgggctgtacccctacgcggagtacctgaggcagccgcagtgcagcccgctggcggcggcgccctactacgccgggtgtgggcagacgagcgcca

SEQ ID NO: 27160 - DNA, 258 bp, Zea mays
ctcctcaattccacgctgccaccaactcgccgtcctccgcgccaagcatcaaagctccgatggcccgcacgaagcagacggctcgcaagtcgacgggcggcaaggcgccccgcaagcagctggcgaccaaggcggcgcgcaagtctgcgccggccaccggcggcgtgaagaagccccaccgcttccgccccggcaccgtcgcgctccgggagatccgcaagtaccagaagagcacggagctgctcatccgcaagttgc

SEQ ID NO: 27161 - DNA, 259 bp, Zea mays
agctcatcgactccagattggagaactcgacaccatgaaggtgctgatcgttgcccttgctctcctggcgctcgctgcgagcgccgcctccagtacaagcggcggctgtggctgccagacaccaccgtttcatctaccgcctccgttctatatgccgcctccgttctatctgccgccgcagcagcagccgcagccatactcaataccccactcaaccaccgcagctaagcccgtgccagcagttcggatcctgcggcgt

SEQ ID NO: 27162 - DNA, 250 bp, Zea mays
cgaggaagaagagatcaatggcgtccgagcagggagtcgtgatcgcgtgccacagcaaggctgagttcgacgcccacatgaccaaggcccaggaagccggcaagctggtggtcatcgacttcactgccgcctggtgcggtccatgccgcgccatcgccccactgttcgtcgaacacgccaagaagttcactcaggtcgtcttcctgaaggtggacgtggacgaagtgaaggaagtcaccgcggcctacga

SEQ ID NO: 27163 - DNA, 248 bp, Zea mays
attcaaccaactaactatgtcgaactctgttgcgtacctacaacagcgacaacagttacttaatccattggcagtggctaacccattggtcgctgccttcctacagcagcaacaattgctgccatacaaccggttctctttgatgaatcctgtcttgtcgaggcagcaacccatcgttggaggtgccatcttttagattacatatgagatgtactcgataatggtgccctcataccggcatgtgtttc

SEQ ID NO: 27164 - DNA, 251 bp, Zea mays
tcaccacctgatggaatcgagtataatgatttctttacaagaaggtcagaggcacttttgcgatacatccactcgggagcaggaatcaagaaacgagaatatggggatttccctttgccaatagcattggtagagaacagtggaaggtgcaagactaacgagcatggggagaagatacttccggatggaactccgtgggttccaaaactgatgaaagaaattactgttgttatctcaaacgggagcaagcc

SEQ ID NO: 27165 - DNA, 250 bp, Zea mays
gagaccaacaagcaacatagaaagtggaatccagtagcaacaacagagcaacaatggcgaccaagatattttccctccttatgctccttgctctttctgcatgtgttgctaacgcgacaattttccctcaatgctcacaagctcctatagcttcccttcttcccccataccttccatcaatgatagcttcagtatgtgaaaacccagctcttcagccctataggctccaacaagcaatcgcagcaagcaa

SEQ ID NO: 27166 - DNA, 251 bp, Zea mays
agcagctgcagcaactcgtgctacctgtgatcaaccaagtagctctggcaaacctttctccctactctcagcaacaacaatttcttccattcaaccaactgtctacattgaaccgtgctgcttatttgcagcaacaactattaccattcagccagctagctactgcctactctcagcaacaacaacttcttccatttaaccaattggccgcactgaaccccgctgcttatttgcagcagcaaatactacta

SEQ ID NO: 27167 - DNA, 251 bp, Zea mays
gcaacatagaaagcacaatagtgtaccaacaatggcagccaaaatattttgcctccttatgctccttggtctttctgcaagtgctgctacggcgaccattttcccgcaatgctcgcaagctcctatagcttcccttcttcccccgtacctctcaccagcggtgtcttcggtatgtgaaaacccaattcttcaaccctacaggatccaacaggcaatcgcagctggcatcttacctttatcacccttgttcc

SEQ ID NO: 27168 - DNA, 250 bp, Zea mays
attgagaccaactagcaacatagaaagcacaatagtgtaccaacaatggcagccaaaatattttgcctccttatgctccttggtctttctgcaagtgctgctacggcgaccattttcccgcaatgctcgcaagctcctatagcttcccttcttcccccgtacctctcaccagcggtgtcttcggtatgtgaaaacccaattcttcaaccctacaggatccaacaggcaatcacagctggcatcttacctt

SEQ ID NO: 27169 - DNA, 249 bp, Zea mays
cagcaacaactgctttcatctagcccgctcgctgtggccaatgcacctacatacctgcaacaacaattgttgcaacagattgtaccagctctgactcagctagttgtggcaaaccctgctgcctacttgcaacagctgcttccattcaaccaactgactatgtcgaactctgctgcgtacctacaacagcgacaacagttacttaatccactagcagtggctaacccattggtcgctgccttcctacag

SEQ ID NO: 27170 - DNA, 250 bp, Zea mays
agccggactaggcccatcaccaagacccactgaaccctcgccgtttcgtcgcacccaccaacacgagagatgagctccggcggcgcggacaagcccggcagtggcggcggcgcggtgaagacgccgtcggacttcctcaagtccatcaggggccgccccgtagtcgtaaagctcaactccggcgtcgactacagaggtatattggcttgtctggatggttatatgaacatcgcaatggagcagaccgagg

SEQ ID NO: 27171 - DNA, 251 bp, Zea mays
gattggagaactcgacaccatgaaggtgctgatcgttgcccttgctctcctggcgctcgctgcgagcgccgcctccagtacaagcggcggctgtggctgccagacaccaccgtttcatctaccgcctccgttctatatgccgcctccgttctatctgccgccgcagcagcagactcagccatggcaataccccactcaaccaccgcagctaagcccgtgccagcagttcggatcctgcggcgtcggcagcg

SEQ ID NO: 27172 - DNA, 252 bp, Zea mays
ctacaacaacttgtgctagcaaaccttgctgcctactctcagcaacagcagtttcttccattcaaccaactagctgcattgaactctgcttcttatttgcaacaacaacaactaccattcagccagctacctgctgcctacccccagcaatttcttccattcaaccaactggcagcattgaactctcctgcttatttacagcagcaacaactactaccattcagccagctagctggtgtgagccctgctacc

SEQ ID NO: 27173 - DNA, 257 bp, Zea mays
aatcaatcaagtagttgcagcgaaccttgctgcttacctccagcaacaacaatttcttccattcaatcaactagctggggtgaaccctgctgcttacttgcaggcacaacagctactaccattcaaccaacttgtcaggagccctgctgccttcttactgcagcaacagttgcttccattccatctacaagttgtggcaaacattgctgctttcttgcaacaacaacaacaattgctgccattttacccacaggttg

SEQ ID NO: 27174 - DNA, 258 bp, Zea mays
caagatattagccctccttgcgcttcttgccctttttgtgagcgcaacaaatgcgttcattattccacaatgctcacttgctcctagtgccattattccacagttcctcccaccagttacttcaatgggcttcgaacacctagctgtgcaagccaacatgcaacaacaagcgcttgcggcgagcgtcttacaacaaccaattgcccaattgcaacaacaatccttgccacatctaacaatacaagccatcacaacgca

SEQ ID NO: 27175 - DNA, 257 bp, Zea mays
cggcagcgtacggcagcccgttcctgggccagtgcgtcgagttcctgaggcaccagtgcagcccggcggcgacgccctacggctcgccacagtgccaggcgctgcagcagcagtgctgccaccagatcaggcaggtggagccgctgcaccggtaccaggcgacatacggtgtggtcctgcagtccttcctgcagcagcagccgcagggcgagctcgcggcgctgatggcggcccaggtagcgcacagctgacggcga

SEQ ID NO: 27176 - DNA, 224 bp, Zea mays
ccctgaccggcgtgtacgggttctggaagtacgtgagcaacctggagaggcgcgagacccgccgctacatcgagatgttctacgccctgaagtaccgtagcctggcaagccaggttccgctgtccttcgattagtacggggaaagaagaagaagaagaagcccaggccggagaaccatcgcctgcatttcgatctgtttcaccgcaattcgcattgttagtcgt

SEQ ID NO: 27177 - DNA, 232 bp, Zea mays
  unsure (1)..(232): unsure at all n locations
gtcgctaccggcggcaacgcgnctgcggactgatcgtgccgccagcacacgagatccaggagttcttcgccgccgccgaggcgcccaggccaagcgctttgcttccaagtacaacttcgacttcgtccgcggcgtgcccctcgacgccggcggccggttcgagtgggcgccggtggtcagcatctgaagcgagcgtgcgtccggtgcaaggtgaagctagaaagagaaaaga

SEQ ID NO: 27178 - DNA, 258 bp, Zea mays
ctgagccacctagccatggtgaaccctgccgcctacttgcaacagcagttgcttgcatcaaacccacttgctctggcaaacgtagttgcaaaccagccacaacaacagctgcaacagtttctgccagcgctcagtcaactagccatggtgaaccctgccgcctacctacaacagcaacaactgctttcatctagcccgctcgctgtggccaatgcacctacatacctgcaacaacaattgttgcaacagattgtacca

SEQ ID NO: 27179 - DNA, 258 bp, Zea mays
cctttatcgcccttgttgtttcaacaatcgccagccctatctttggtgcagtcattggtacaaaccatcagggcacaacagctgcagcaactcgtgctacctctgatcaaccaagtagctctggcaaacctttctccctactctcagcaacaacaatttcttccattcaaccaactgtctacactgaaccctgctgcttatttgcagcaacaactattaccatttagccagctagctactgcctactctcagcaacaa

SEQ ID NO: 27180 - DNA, 225 bp, Zea mays
gcaacatacctttatcacccttgtttcaacaatcgccagccctatctttggtgcagtcattggtacaaaccatcagggcacagcagctgcagcaactcgtgctacctgtgatcaaccaagtagctctggcaaacctttctccctactctcagcaacaacaatttcttccattcaaccaactgtctacattgaaccgtgctgcttatttgcagcaacaactattac

SEQ ID NO: 27181 - DNA, 179 bp, Zea mays
ctcatcgactccagattggagaactcgacaccatgaaggtgctgatcgttgcccttgctctcctggcgctcgctgcgagcgccgcctccagtacaagctgcggctgtggctgccagacaccaccgtttcatctaccgcctccgttctatatgccgcctccgttctatctgccgccgcag

SEQ ID NO: 27182 - DNA, 258 bp, Zea mays
aacacacctagcgaacgcactagcaacgacctaacaacaatggcttccaagacattatccctccttgcgcttcttgccctttttgtgagtgcaacaaatgcgttcattattccacaatgctcacttgctccgagtgccattattccacagttcctccctccagttacttcaatgggcttcgaacacccagctgtgcaagcctataggctacaacaagcgcttgcggcgagcgtcttagaacaaccaattgcccaatta

SEQ ID NO: 27183 - DNA, 252 bp, Zea mays
aacatagaaagcacaatagtgtaccaacaatggcagctaaaatattttgcctccttatgctccttggtctttctgcaagtgctgctacggcgaccattttcccacaatgctcacaagctcctatagcttcccttcttcccccgtacctctcaccaacggtgtcttcggtatgtgaaaacccaattcttcaaccctacaggatccaacaggcaatcgcagctggcatcttacctttatcacccttgttcctcc

SEQ ID NO: 27184 - DNA, 240 bp, Zea mays
gtggaatccagtagcaacaacagagcaacaatggcgaccaagatattttccctccttatgctccttgctctttctgcatgtgttgctaacgcgacaattttccctcaatgctcacaagctcctatagcttcccttcttcccccataccttccatcaatgatagcttcagtatgtgaaaacccagctcttcagccctataggctccaacaagcaatcgcagcaagcaacatacctttatca

SEQ ID NO: 27185 - DNA, 107 bp, Zea mays
catagaaagcacaatagtgtaccaacaatggcagccaaaatattttgcttccttatgctccttggtctttctgcaagtgttgctaccgcaaccattttcccacaatg

SEQ ID NO: 27186 - DNA, 170 bp, Zea mays
tagaaagtggaatccagtagcaacaatagagcaacaatggcgaccaagatattttccctccttatgctccttgctctttctacatgtgttgctaacgcgacaattttccctcaatgctcacaagctcctatagcttcccttcttcccccataccttccatcaattatagc

SEQ ID NO: 27187 - DNA, 112 bp, Zea mays
cgctggctagctagctagttgagtcatttagcggcgatgattgagtaataatgtgtcacgcatcaccatgggtggcagtgtcagtgtgagcaatgacctgaatgaacaattg

SEQ ID NO: 27188 - DNA, 250 bp, Zea mays
caactggcagcattgaactctcctgcttatttacagcagcaacaactactaccattcagccagctagctggtgtgagccctgctaccttcttgatacaaccacagttgttgccgttctaccagcacgctgcgcctaacgctggcaccctcttacaactgcaacaattgctgccattcaaccaacttgctttgacaaacccagcagcgttctaccaacaacccatcattggtggtgccctcttttagattt

SEQ ID NO: 27189 - DNA, 255 bp, Zea mays
caggagaagagccatatgcagatttacattatggtgttataataggtggcattgtgagcaacactctacggccgccagtgcccgactcctgcgaccccgagtggaggtcactgatggagcaatgctggtcaacagaaccatctgagcggccaaacttcacggaggttgcgaataggctgcgctccatggcagcatcccagaaggtacaacaacactaagggaccaccaccggcacgcagaagttgtcccagggca

SEQ ID NO: 27190 - DNA, 251 bp, Zea mays
ctcttgtgaaggagtttctcaatgctgttgatgacaagcggaaggaagtcctctctaaaatagaagaggatgttgctaagctcagcggttctgcagccaagcatggaaagatatatgtgacagctgcaaagaagatcatggataagggctctgactacactaagaaggagactgagaggcttcactgcatgctggagaagtggtgtagctagttcagtaaagatgaaaagcgtcaaactagttgtggaatg

SEQ ID NO: 27191 - DNA, 248 bp, Zea mays
caaagcggcagtgcgtagagaggatcgtcgaacagaacagcatgaagatggtcatcgttctcgtcgtgtgcctggctctgtcagctgccagcgcctctgcaatgcagatgccctgcccctgcgcggggctgcagggcttgtacggcgctggcgcggcctgacgacgatgatgggcgccggcgggctgtacccctacgcggagtacctgaggcagccgcagtgcagcccgctggcggcggcgccctact

SEQ ID NO: 27192 - DNA, 228 bp, Zea mays
gaagtttgcagctggcactgaggcgattgccaagaagctagctgagcttacaaccacgaagggtgtcactaccatcatcggcggcggcgactctgttgctgctgtcgagaaggctgggctggccgacaagatgagccacatttcgaccggcggcggtgcgagcttggaactcttggaaggcaagactctacctggtgtccttgccctcgatgacgcctagatccgctg

SEQ ID NO: 27193 - DNA, 248 bp, Zea mays
cagccgcatccaagcccgtgccagctgcagggaacctgcggcgttggcagcaccccgatcctgggccagtgcgtcgagttcctgaggcatcagtgcagcccgacggcgacgccctactgctcgcctcagtgccagtcgttgcggcacagtgttgccagcagctcaggcaggtggagccgcagcaccggtaccaggcgatcttcggcttggtcctccagtccatcctgcagcagcagccgcaaagcggc

SEQ ID NO: 27194 - DNA, 253 bp, Zea mays
atacaacagcgacaacagttacttaatccactagcagtggctaacccattggtcgctgccttcctacagcagcaacaattgctgccatacaaccagttctctttgataaaccctgtcttgtcgaggcagcaacccatcgttggaggtgccatcttttagattacatatgagatgtactcgataatggtgccctcattccggcatgtgtttcctagaaataatcaatatattgattgagatttatctcaatata

SEQ ID NO: 27195 - DNA, 255 bp, Zea mays
agctccaacaagcaatcgcagcaagcaacatacctttatcacccttgttgtttcaacaatcgccagccctatctttggtgcagtcattggtacaaaccatcagggcacagcagctgcagcaactcgtgctacctgtgatcaaccaagtagctctggcaaacctttctccctactctcagcaacaacaatttcttccattcaaccaactgtctacactgaaccctgctgcttatttgcagcaacaactattaccat

SEQ ID NO: 27196 - DNA, 245 bp, Zea mays
ctaaacatcaaggcacaacaactacaacaacttgtgctaggaaaccttgctgcctactctcagcaacagcagtttcttccattcaaccaactggctgcattgaactctgctgcttatttgcaacaacaactaccattcagtcagctagctgctgcctacccccagcaatttcttccattcaaccaactggcagcattgaactctgctgcttatttacaacagcaacagctaccaccattcagcca

SEQ ID NO: 27197 - DNA, 246 bp, Zea mays
gtcgcacatatctactatactatactctaggaagcaaggacaccaccgccatggcagccaagatgcttgcattgttcgctctcctagctctttgtgcaagcgccactagtgcgacccatattccagggcacttgccaccagtcatgccattgggtaccatgaacccatgcatgcagtactgcatgatgcaacaggggcttgccagcttgatggcgtgtccgtccctgatgctgcagcaactgttgg

SEQ ID NO: 27198 - DNA, 247 bp, Zea mays
agcaaagcggcagtgcgtagagaggatcgtcgaacagaacagcatgaagatggtcatcgttctcgtcgtgtgcctggctctgtcagctgccagcgcctctgcaatgcagatgccctgcccctgcgcggggctgcagggcttgtacggcgctggcgccggcctgacgacgatgatgggcgccggcgggctgtacccctacgcggagtacctgaggcagccgcagtgcagcccgctggcggcggcgccc

SEQ ID NO: 27199 - DNA, 245 bp, Zea mays
cttgagagatagagagagagagatccgtttgttatttgtcgctcttgttgcttggttttcgcaatcgtgctttcttcttattctcaagtgacatgtaatcaaagcaagagacactaagtttgtagtggtccttgcagggtctaagtgacccgtttgattaaggtcggtctaggtgaccgtttaagagagggaaagggttgaaagagacccggtctttgtgaccacctcaacggggactaggttct

SEQ ID NO: 27200 - DNA, 247 bp, Zea mays
agctgctctcgtccctagaaataaagcagctcctccgcggggcggcgaactactacccatcgccaaaaccctagccccgatccggtcgaggagcactacttcttggcatggcgggcacccctagccaggcaagcctcctgctccagaagcagctcaaggtgatggaggctacttcaatgcaataatgaccttcccccagaactatcccaacagcccgccatcagtaagatttacttctgggatgtgg

SEQ ID NO: 27201 - DNA, 246 bp, Zea mays
tgaaaacccaattcttcaaccctacaggatccaacaggcaatcgcagctggcatcttacctttatcacccttgttcctccaacaatcatcagccctattacaacagttacctttggtgcatttattggcacaaaacatcagggcacaacaactacaacaacttgtgctagcaaaccttgctgcctactctcagcaacagcagtttcttccattcaaccaactaggttcattgaactctgcttctta

SEQ ID NO: 27202 - DNA, 246 bp, Zea mays
gtttctgccatcactgagccacctagccgtggtgaaccctgtcacctacttgcaacagcagctgcttgcatccaacccacttgctctggcgaacgtagctgcataccagcaacaacaacagctgcaacagtttatgccagtgctcagtcaactagccatggtgaaccctgccgtctacctacaactactttcatctagcccgctcgcggtgggcaatgcacctacgtacctacaacaacagttgct

SEQ ID NO: 27203 - DNA, 113 bp, Zea mays
tagcaccggagcaggtagaacgctgcacaatccccttcgccgccgccaagatggtgaacgttcctaagaccaagaagacgtactgcaagaacaaagagtgcaagaagcacaca

SEQ ID NO: 27204 - DNA, 247 bp, Zea mays
aggcacaacagctgcagcaactcgtgctacctctgatcaaccaagtagctctggcaaacctttctccctactctcagcaacaacaatttcttccattcaaccaactgtctacactgaaccctgctgcttatttgcagcaacaactattaccatttagccagctagctactgcctactctcagcaacaacaacttcttccatttaaccaattggccgcactgaaccccgctgcttatttgcagcagca

SEQ ID NO: 27205 - DNA, 248 bp, Zea mays
agaaagcacaatagtgtaccaacaatggcagccaaaatattttgcctccttatgctccttggtctttctgcaagtgctgctacggcgaccattttcccgcaatgctcgcaagctcctatagcttcccttcttcccccgtacctctcaccagcggtgtcttcggtatgtgaaaacccaattcttcaaccctacaggatccaacaggcaatcacagctggcatcttacctttatcacccttgttcctcca

SEQ ID NO: 27206 - DNA, 247 bp, Zea mays
ggattgcagatagatgcagctattaattcaggaaattcaggtggcccagcttttaatgataggggaaaatgtgtcggtatagcttttcagtctcttaaacatgaagatgcggagaacataggttatgtgataccgactccagttattacacatttcattgaggactacaaaaatctagagaatacacaggctgcaattgagtacattcattctttatcaagggcacagcctgctcattctctcaatg

SEQ ID NO: 27207 - DNA, 203 bp, Zea mays
gcgcactagcaacgacctaacaacaatggctaccaagatattatccctctttgcgcttcttgccctttttgtgagcgcaacaaatgcgttcattattccacaatgctcacttgctcctagtgccattattccacagttcctccctccagttacttcaatgggcttcgaacacccagctgtgcaagcctacaggctacaacaag

SEQ ID NO: 27208 - DNA, 150 bp, Zea mays
gaaacacacctagcgaacgctactagcaacgacctaacaacaatggcttccaagacattatccctccttgcgcttcttgccctttttgtgagtgcaacaaatgcgttcattattccacaatgctcacttgctccgagtgccattattcca

SEQ ID NO: 27209 - DNA, 255 bp, Zea mays
ctgttagggttgaaagtcaactcaaacttgtcatcaggcctatgtattcaaaccctcctcttcatggtgcctctatcgttgctaccatactcagggacagcgagatgttcaacgaatggactctggaactgaaggccatggctgataggatcattaacatgaggcaacaactatttaatgcgctgaaatccagaggaacccctggtgattggagccatatcattaagcaaattgggatgtttactttcactgggc

SEQ ID NO: 27210 - DNA, 255 bp, Zea mays
actggagagtttgagaagaaatatgaaccaaccattggtgtggaagttcatccgttggatttcaccactaactgtggtaagatcaggttctactgctgggataccgcagggcaagagaagtttggtggcctcagggatggatactatatccatggccagtgtgcgatcatcatgtttgatgtaacctcaaggcttacttacaagaatgttcctacgtggcatagggatctgtgcagggtctgtgaaaacatcccc

SEQ ID NO: 27211 - DNA, 252 bp, Zea mays
gaccattttcccacaatgctcacaagctcctatagcttcccttcttcccccgtacctctcaccaacggtgtcttcggtatgtgaaaacccaattcttcaaccctacaggatccaacaggcaatcgcagctggcatcttacctttatcacccttgttcctccaacaatcatcagccctattacagcagttacctttggtgcatttattggcacaaaacatcagggcacaacaactacaacaacttgtgctagc

SEQ ID NO: 27212 - DNA, 176 bp, Zea mays
atatgtactgtagtaataatgtaatggagccgctgactagctacctagctcgctagtttactcatttagcggcgatgagtaacgtagtgtcacccatcaccatgggtggcagtgtgagcaatgacctgaatgaaccattgaaatggaaaggactaatatataaggaaaaaagatga

SEQ ID NO: 27213 - DNA, 252 bp, Zea mays
aactgtctacactgaaccctgctgcttatttgcagcaacaactattaccattcagccagctagctactgcctactctcagcaacaacaacttcttccatttaaccaattggccgcactgaaccccgctgcttatttgcagcagcaaatactactaccatttagccagctagctgcagcaaaccgtgcttccttcttgacacagcaacagttgctgcctttctaccagcagtttgcggctaaccccgcaaccc

SEQ ID NO: 27214 - DNA, 254 bp, Zea mays
aatgcagatgccctgcccctgcgcggggctgcagggcttgtacggcgctggcgccggcctgacgacgatgatgggcgccggcgggctgtacccctacgcggagtacctgaggcagccgcagtgcagcccgctggcggcggcgccctactacgccgggtgtgggcagacgagcgccatgtaccagccgctccggcaacagtgctgccagcagcagatgaggatgatggacgtgcagtccgtcgcgcacagctgca

SEQ ID NO: 27215 - DNA, 242 bp, Zea mays
cagaccattagctttatctactccagagcgcagaagaacccgatcgacaccatgagggtgttgctcgttgccctcgctctcctggctctcgctgcgagcgccacctccacgcatacaagcggcggctgcggctgccagccaccgccgccggttcatctaccgccgccggtgcatctgccacctccggttcacctgccacctccggtgcatctcccaccgccggtccacctgccgccgccggt

SEQ ID NO: 27216 - DNA, 251 bp, Zea mays
tgatgtcataggtggagagggtgatgataaggaacaggaaaagaccaagcgtgagcgcaaaacaacaaaatatatgacgaagtatgaacgtgcacgcattcttggtacacgagccttgcagataagcatgaatgctccagtcatggttgagcttgagggagaaactgaccctcttgagattgcgatgaaggagcttagagcgcgcaagatacccttcacgatcagacggtacctacctgatggaagttatg

SEQ ID NO: 27217 - DNA, 252 bp, Zea mays
gaccaacaagcaacatagaaagtggaatccagtagcaacaatagagcaacaatggcgaccaagatattttccctccttatgctccttgctctttctgcatgtgttgctaacgcgacaattttccctcaatgctcacaagctcctatagcttcccttcttcccccataccttccatcaatgatagcttcagtatgtgaaaacccagctcttcaaccctataggctccaacaagcaatcgcagcaagcaacata

SEQ ID NO: 27218 - DNA, 250 bp, Zea mays
gaccattttcccacaatgctcacaagctcctatagcttcccttcttcccccgtacctctcaccaacggtgtcttcggtatgtgaaaacccaattcttcaaccctacaggatccaacaggcaatcgcagctggcatcttacctttatcacccttgttcctccaacaatcatcagccctattacagcagttacctttggtgcatttattggcacaaaacatcagggcacaacaactacaacaacttgtgcta

SEQ ID NO: 27219 - DNA, 150 bp, Zea mays
catgtactgtagtaataatgtaatggagccgctgactagctacctagctcgctagtttactcatttagcggcgatgagtaacgtagtgtcacccatcaccatgggtggcagtgtgagcaatgacctgaatgaaccattgaaatggaaagg

SEQ ID NO: 27220 - DNA, 250 bp, Zea mays
aactgtctacactgaaccctgctgcttatttgcagcaacaactattaccattcagccagctagctactgcctactctcagcaacaacaacttcttccatttaaccaattggccgcactgaaccccgctgcttatttgcagcagcaaatactactaccatttagccagctagctgcagcaaaccgtgcttccttcttgacacagcaacagttgctgcctttctaccagcagtttgcggctaaccccgcaac

SEQ ID NO: 27221 - DNA, 247 bp, Zea mays
gactagttctagatcgcgagctgccgccctttttttttttttttagtttccaatcatcttttttccttatatattattcctttccatttcaatggttcattcaggtcattgctcacactgccacccatggtgatgggtgacactacgttactcatcgccgctaaatgagtaaactagcgagctaggtagctagtcagcggctccattacattattactacagtacatagtttcctcagtagtagaca

SEQ ID NO: 27222 - DNA, 167 bp, Zea mays
gaactctgctgcttatttgcaacaacaattaccattcagccagctagttgctgcctacccccagcaatttcttccattcaaccaactagcagcattgaactctgctgcttatttacagcagcaacaactactaccattcagccagctagctgatgtgagccctgctg

SEQ ID NO: 27223 - DNA, 248 bp, Zea mays
gggtctaggagatgtttgtggttcattgccagttgctcttgctgctcgtggtcaccgtgtgatggttgtaatgcccagatatttaaatggtacctccgataagaattatgcaaatgcattttacacagaaaaacacattcggattccatgctttggcggtgaacatgaagttaccttcttccatgagtatagagattcagttgactgggtgtttgttgatcatccctcatatcacagacctggaaatt

SEQ ID NO: 27224 - DNA, 245 bp, Zea mays
gagaacatctatgtggacaacaagaaatttaactctttcaagaagattgtaagatccatggggtatggcgaggatgatctccctctagtatcgttacagtctgtttccaaaggatactatggagagtgtggtaaaagaggagggtacatggagattactggcttcagtactccagtaagagagcagatctacaagatagcttcagtgaacctgtgctccaatatcactggtcaaatccttgcgag

SEQ ID NO: 27225 - DNA, 247 bp, Zea mays
catatctactatactatactctaggaagcaaggacaccaccgccatggcagccaagatgcttgcattgttcgctctcctagctctttgtgcaagcgccactagtgcgacccatattccagggcacttgccaccagtcatgccattgggtaccatgaacccatgcatgcagtactgcatgatgcaacaggggcttgccagcttgatggcgtgtccgtccctgatgctgcagcaactgttggccttacc

SEQ ID NO: 27226 - DNA, 247 bp, Zea mays
cactgagccacctagccatggtgaaccctgtcgcctacttgcaacagcagctgcttgcatccaacccacttgctctagcaaacgtagttgcaaaccagcaacaacaacaactgcaacagtttctgccagcgcttagtcaactagccatggtgaaccctgccgcctacctacaacagcaacaactgctttcatctagcccgctcgctgtggccaatgcacctacatacctgcaacaagaattgttgcc

SEQ ID NO: 27227 - DNA, 243 bp, Zea mays
gcccgtgccagcagttcggatcctgcggcgtcggcagcgtcggcagcccgttcctgggccagtgcgtcgagttcctgaggcaccagtgcagcccggcggcgacgccctacggctcgccacagtgccaggcgctgcagcagcagtgctgccaccagatcaggcaggtggagccgctgcaccggtaccaggcgacatacggtgtggtcctgcagtccttcctgcagcagcagccgcagggcgagc

SEQ ID NO: 27228 - DNA, 245 bp, Zea mays
ttggcacaaaacatcagggcacaacaactacaacaacttgtgctagcaaaccttgctgcctactctcagcaacagcagtttcttccattcaaccaactaggttcattgaactctgcttcttatttgcaacaacaacaactaccattcagccagctacctgctgcctacccccagcaatttcttccattcaaccaactagcagcattgaactctcctgcttatttacagcagcaacaactactacc

SEQ ID NO: 27229 - DNA, 243 bp, Zea mays
aaattttcaagaaaagtggccttggtccaagaatcggagagcaatatggggctccatttaatgaagacgaatgggataatgcagaagtcgaaacttctctgtttcctttgacttgttcagaagtgaatccaacagagggacaacgtgctcagcctactgtcctggctggtgctcttctggaacccgaaccacctctacataattcatcttctacatgtgctggagaggaatcatcatttggtc

SEQ ID NO: 27230 - DNA, 248 bp, Zea mays
caggatccaacaggcaatcgcaacaggcatcttaccattatcacccttgttcctccaacaaccgtcagccctattacagcagttacctttggtccatttggtggcacaaaacatcagggcacaacaactacaacaacttgtgctagcaaaccttgctgcatactctcagcaacatcagtttcttccattcaaccaactggctgcattgaactctgctgcttatttgcaacaacaattaccattcagcc

SEQ ID NO: 27231 - DNA, 248 bp, Zea mays
caacagagcaacaatggcgaccaagatattttccctccttatgctccttgctctttctgcatgtgttgctaacgcgacaattttccctcaatgctcacaagctcctatagcttcccttcttcccccataccttccatcaatgatagcttcagtatgtgaaaacccagctcttcagccctataggctccaacaagcaatcgcagcaagcaacatacctttatcacccttgttgtttcaacaatcgccag

SEQ ID NO: 27232 - DNA, 110 bp, Zea mays
ctccagtacaagcggcggctgtggctgccagacaccaccgtttcatctaccgcctccgttctatatgccgcctccgttctatctgccgccgcagcagcagccgcagccat

SEQ ID NO: 27233 - DNA, 268 bp, Zea mays
cttgatgcgtactttagtgttgtcatttttcacggaatgacaattgctcagtggagaaacatgggttatcagaaccaacctgagcatgagcaatttgcacaactattacaagcaccacatgaggaggcacaaatgataataaagggtcgatttccagttccaagactagttgtctgcgaccaacatggctcgcaggcaaggtttttgttggctaagctgaatccatcggccacatataactcagctcatgatgttgctcctggttctg

SEQ ID NO: 27234 - DNA, 266 bp, Zea mays
gtagcaagaagactaaatggtgtccagctcctgactgcacatgtgctgtggagttccttggtgatgaaaactatgatgtttcatgcaattgcatgttcagcttttgttggaattgcactgaggaagctcatcgaccagtgaactgtgagactgtttctaagtggatattaaaaaacagtgcagaatctgaaaacatgaactggatactggctaattctaagccctgtccaaagtgcaaactgccaatagagaaaaaccagggatgc

SEQ ID NO: 27235 - DNA, 268 bp, Zea mays
aaatcactgattcgtagaattcttgacccaaatccagagacacgaatcaggatagaagagatcagaagcgatgaatggtttcagaaaaattatgaacctatcaaagaaatagaaaatgaggaagtcaatctcgatgatgtcaatgcagcttttgatgatcctgaggacgataatgaggatgctttcgaagatgaaacaggtcctctaacacttaatgcattcgacctaatcattctttcgcaaggattgaatcttgcagcgctctttg

SEQ ID NO: 27236 - DNA, 267 bp, Zea mays
caacaacagctgcaacagtttatgccagtgctcagtcaactagccatggtgaaccctgccgtctacctacaactactttcatctagcccgctcgcggtgggcaatgcacctacgtacctacaacaacagttgctgcaacaaattgtaccagctctgactcagctagctgtggcaaaccctgctgcctacttacaacagttgcttccattcaaccaactggctgtgtcaaactctgctgcgtacctacaacagcgacaacagttactt

SEQ ID NO: 27237 - DNA, 265 bp, Zea mays
ctgatggccagatcttatcttcctagcaaagtccctgagattgtagcgttgtggaaaaaggatctccagaaggtaaacccaaaagcagcggagtccctggctgatcctaatgagtacccaaacttatttgaagactggcagattgctctgaatgtagaagctgctgttgctccgaaaagggttatctatccaccggctgaggagtacatgattcatgctgaaaggtcaaatgagaatttagtggaagcttttaaaaacatgcatg

SEQ ID NO: 27238 - DNA, 267 bp, Zea mays
gcaacatagaaagcacaatagtgtaccaacaatggcagccaaaatattttgcttccttatgctccttggtctttctgcaagtgttgctaccgcaaccattttcccacaatgctcacaagctcctatagcttcccttcttcccccatacctctcaccagcggtgtcttcaatgtgtgaaaccccaattgttcaaccctacaggatccaacaggcaatcgcaacaggcatcttaccattatcacccttgttcctccaacaaccgtcagc

SEQ ID NO: 27239 - DNA, 247 bp, Zea mays
ctacaacagcgacaacagttacttaatccattggcagtggctaacccattggtcgctaccttcctgcagcagcaacaacaattgctgccatacaaccagttctctttgatgaaccctgccttgcagcaacccatcgttggaggtgccatcttttagattacatatgagatgtactcgacaatggtgccctcataccgacatgtgtttcctagaaataatcaatatattgattgagctttatctcgat

SEQ ID NO: 27240 - DNA, 269 bp, Zea mays
gcaagagaaccagagccggacccggagcccgagcctatggaggtgacagaggaggataaggagcagaaggagaggaaagcgtcggcgcagaaggagaaggaagcaggcaacgccgcttacaaaaggaaggattttgataccgcgatccagcactacacagaagccatggagctcgatgacgaggatatctcctacatcaccaatcgtgctgctgtttaccttgagatgggaaagtatgatgaatgcactaaggactgtgataaggctgt

SEQ ID NO: 27241 - DNA, 268 bp, Zea mays
aacaatcgccagccctatctttggtgcagtcattggtacaaaccatcagggcacaacagctgcagcaactcgtgctaccagtgatcagccaagtagctctggcaaacctttctccctactctcagcaacaacaatttcttccattcaaccaactgtctacactgaaccctgctgcttatttgcagcaacaacaactactaccattcagccagctagctactgcctactctcagcagcaacaatttcttccatttaaccaattcgccgc

SEQ ID NO: 27242 - DNA, 264 bp, Zea mays
ccctgaagaaggctagggaccccaagtacccaagaatcagcactaccggaaggaacaagcttgatcagtaccaaattctcaagtatcccctcaccacagaatcggcgatgaagaagattgaagataacaacactcttgtcttcattgtcgacctcaaggcagacaagaagaagatcaaggctgctgtcaagaagatgtatgacattcaggccaagaaggtcaacaccctgatcaggcctgatggaaagaagaaggcttacgtga

SEQ ID NO: 27243 - DNA, 260 bp, Zea mays
caacagttgctgcaacaaattgtaccagctctgactcagctagctgtggcaaaccctgctgcctacttacaacagttgcttccattcaaccaactggctgtgtcaaactctgctgcgtacctacaacagcgacaacagttacttaatccattggcagtggctaacccattggtcgctaccttcctgcagcagcaacaacaattgctgccatacaaccagttctctttgatgaaccctgccttgcagcaacccatcgttgg

SEQ ID NO: 27244 - DNA, 261 bp, Zea mays
attttgagcattcagaaacacaccaagcgaacgctactagcaacgacctaacaacaatggctaccaagatattagccctccttgcgcttcttgccctttttgtgagcgcaacaaatgcgttcattattccacaatgctcacttgctcctagtgccattattccacagttcctcccaccagttacttcaatgggcttcgaacacctagctgtgcaagccaacatgcaacaacaagcgcttgcggcgagcgtcttacaacaac

SEQ ID NO: 27245 - DNA, 262 bp, Zea mays
catttgttggcacaaaacatcaaggcacaacaactacaacaacttgtgctaggaaaccttgctgcctactctcagcaacagcagtttcttccattcaaccaactggctgcattgaactctgctgcttatttgcaacaacaactaccattcagtcagctagctgctgcctacccccagcaatttcttccattcaaccaactggcagcattgaactctgctgcttatttacaacagcaacagctaccaccattcagccagctag

SEQ ID NO: 27246 - DNA, 260 bp, Zea mays
  unsure (1)..(260): unsure at all n locations
attttcagcattcaaaaacacaccaagcgaacgcnactagcaacgacctaacaccaatggctaccaagatattagccctccttgcgcttcttgcccttttagtgagcgcaacaaatgcgttcattattccacagtgctcacttgctcctagtgccagtattccacagttcctcccaccagttacttcaatgggcttcgaacatccagccgtgcaagcctacaggctacaactagcgcttgcggcgagcgccttacaacaa

SEQ ID NO: 27247 - DNA, 259 bp, Zea mays
caagcgagttacttacaaccaaacagaagggtagaaaccacctgaagccatgtgcattgctgcatggatttggcaggctcaccctgtgcaccaactcctcctgcttctcaacagagatgagttccacagcaggcctacaaaagcagtaggatggtggggtgaaggctcaaagaagatccttggtggcagggatgtgcttggtggaggaacatggatggggtgcaccaaggatggaaggcttgccttcctgaccaatgtg

SEQ ID NO: 27248 - DNA, 260 bp, Zea mays
tggaaaacgaagaaaccctcctccaccaacccaatccagctacatccgtctgggtgaactccagggccaggagcagttcgccgccttcgttcgcatcacctacgcggttcgatccaactggcaggaaggaacgtgatggccaagacgagctcgttcaagctggagcacccccttgagaagaggcagtctgaggctaatcggatcagagagaagtaccctgacagaattccagtgattgttgagaaggctgagaggagtga

SEQ ID NO: 27249 - DNA, 229 bp, Zea mays
gtcagcctagcaattagctcatcgactccagattggagaactcgacaccatgaaggtgctgatcgttgcccttgctctcctggcgctcgctgcgagcgccgcctccagtacaagcggcggctgtggctgccagacaccaccgtttcatctaccgcctccgttctatatgccgcctccgttctatctgccgccgcagcagcagccgcagccatggcaataccccactcaa

SEQ ID NO: 27250 - DNA, 257 bp, Zea mays
acaaattgtaccagctctgactcagctagctgtggcaaaccctgctgcctacttgcaacaactacttccattcaaccaactgactgtgtcgaactctgctgcgtacctacaacagcgacaacagttacttaatccactagcggtggctaacccattggtcgctgccttcctacagcagcaacaattgctgccatacaaccagttctctttgatgaaccctgccttgtcgtggcagcaacccatcgttggtggtgcca

SEQ ID NO: 27251 - DNA, 261 bp, Zea mays
gacataatggatgtacacgacgacctggatgtgttgcttcgtaccgagacccagggaaacaaatatttggctgtgagcattacaaaagaaactgcaagcttgttgctgcatgctgcgataagttattcacttgcagattctgtcacgataaagttagtgaccatacaatggacaggaaatcagtgatggagatgatgtgcatgcaatgtctgaatgttcaacctgttggtccaaattgtcaatccccttcttgcaatggac

SEQ ID NO: 27252 - DNA, 257 bp, Zea mays
ctcatcgactccagattggagaactcgacaccatgaaggtgctgatcgttgcccttgctctcctggcgctcgctgcgagcgccgcctccagtacaagcggcggctgtggctgccagacaccaccgtttcatctaccgcctccgttctatatgccgcctccgttctatctgccgccgcagcagcagccgcagccatggcaatacactactcaaccaccgcagctaagcccgtgccagcagttcggatcctgcggcgtc

SEQ ID NO: 27253 - DNA, 253 bp, Zea mays
gaagcgcactagcaacgacctaacaacaatggctaccaagatattatccctctttgcgcttcttgccctttttgtgagcgcaacaaatgcgttcattattccacaatgctcacttgctcctagtgccattattccacagttcctccctccagttacttcaatgggcttcgaacacccagctgtgcaagcctacaggctacaacaagcgcttgcggcgagcgtcttacaacaaccaattgcccaattacaacaa

SEQ ID NO: 27254 - DNA, 222 bp, Zea mays
cgtcacctagcaattagctcatcgactccagattggagaactcgacaccatgaaggtgctgatcgttgcccttgctctcctggcgctcgctgcgagcgccgcctccagtacaagcggcggctgtggctgccagacaccaccgtttcatctaccgcctccgttctatatgccgcctccgttctatctgccgccgcagcagcagccgcagccatggcaataccc

SEQ ID NO: 27255 - DNA, 88 bp, Zea mays
ctaatgcagtcagacgacacacattatcatgtgtggtatgaccaataatatatgcgtcataataaagttttggttttaaagagcaggg

SEQ ID NO: 27256 - DNA, 253 bp, Zea mays
gcaacatagaaagtggaatccagtagcaacaatagagcaacaatggcgaccaagatattttccctccttatgctccttgctctttctgcatgtgttgctaacgcgacaattttccctcaatgctcacaagctcctatagcttcccttcttcccccataccttccatcaatgatagcttcagtatgtgaaaacccagctcttcaaccctataggctccaacaagcaatcgcagcaagcaacatacctttatcac

SEQ ID NO: 27257 - DNA, 254 bp, Zea mays
gttctagatcgcgagcggccgcccttttacaacagttacctttggtgcatttattggcacaaaacatcagggcccaacaactacaacaacttgtgctagcaaaccttgctgcctactctcagcaacagcagtttcttccattcaaccaactaggttcattgaactctgcttcttatttgcaacaacaacaactaccattcagccagctacctgctgcctacccccagcaatttcttccattcaaccaactagca

SEQ ID NO: 27258 - DNA, 207 bp, Zea mays
ggacgattccacccatgttcttacagcaaccctttgttggtgctgcattctagatagaaatatttgtgttgtatcgaataatgagttgacatgccatcgcgtgtgactcattattaacaataaaacaagtgtcctcttattatcttttaaaaaaaaaaaaaaaaaaaaaaaaaaaaaaaaaaaaaaaaaaaaaaaaaaaaagaaggg

SEQ ID NO: 27259 - DNA, 254 bp, Zea mays
cgctgcttatttgcagcaacaactattaccatttacccagctagctactgcctactctcaacaacaacaacttcttccatttaaccaattggccgcactgaaccccgctgcttatttgcagcagcaaatactactaccatttagccagctagctacagcaagccgtgcttccttcttgacacaacaacagttgctgccgttctaccagcagtttgcggctaaccccgcaaccctcttacaactacaacaattgt

SEQ ID NO: 27260 - DNA, 256 bp, Zea mays
cggcgagcgtcttacaacaaccaatttcccagttgcaacaacaatccttggcacatctaacaatacaaaccatcgcaacgcaacagcaacaacaattcctaccagcactgagccacctagccatggtgaaccctgccgcctacttgcaacagcagttgcttgcatcaaacccacttgctctggcaaacgtagttgcaaaccagccacaacaacagctgcaacagtttctgccagcgctcagtcaactagccatggt

SEQ ID NO: 27261 - DNA, 256 bp, Zea mays
aacagactacaaggtgcagctataactactatagcagtagctcaaatctaaaaaattgtcatgaattcctaaggcagcagtgcagccctttggtaatgccttttctccaatcacgtttgatacaaccaagtagctgccaggtattgcagcaacaatgttgtcatgatcttaggcagattgagccacaatacattcaccaagcaatctacaacatggttcaatccataatccaggaggagcaacaacaacaaccatg

SEQ ID NO: 27262 - DNA, 256 bp, Zea mays
agcaaagcggcagtgcgtagagaggatcgtcgaacagaacagcatgaagatggtcatcgttctcgtcgtgtgcctggctctgtcagctgccagcgcctctgcaatgcagatgccctgcccctgcgcggggctgcagggcttgtacggcgctggcgccggcctgacgacgatgatgggcgccggcgggctgtacccctacgcggagtacctgaggcagccgcagtgcagcccgctggcggcggcgccctactacgcc

SEQ ID NO: 27263 - DNA, 244 bp, Zea mays
cttgctgcttacctccagcaacaacagtttcttccattcaatcaactagctggggtgaaccctgctatctacttgcaggcacaacagctactaccatttaaccaacttgtcgggagcccttatgccttcttactgcaacaacagcttctgccattccatctgcaagctgtggcaaacattgttgctttcttgagacaacaacatttgttgccattttacccacaagttgtgggaaacattaatg

SEQ ID NO: 27264 - DNA, 250 bp, Zea mays
ctgcaatgttggagaagttcaagaactacgactttggtagatgccccagggtgtactgctgtggccagccctgccttccagcagggcaatcagatgttcctagatcgagcactgtgaagatatattgtccgaaatgcgaagaacttaactatccaagatccaagtaccaaggcaacatcgatggatcatactttgggacgacattccctcatcttttcctgatgacttactcgcacttgaagccgcagaa

SEQ ID NO: 27265 - DNA, 249 bp, Zea mays
aggcagcagctcacagagaaatccgatgtctactcgtttggtgttgtgctgtttgaggtcctctgcgcacggcctgccttgaaccctactcttgcaaaagaagaagtcagcttggcggagtgggcgttgcactgccagaagaagggcattcttgaccagattgtcgacccctacctgaagggaaagatagccccacagtgcttcaagaagttcgccgagacagccgagaagtgtgtttctgatcagggc

SEQ ID NO: 27266 - DNA, 251 bp, Zea mays
cattttgagcattcagaaacacaccaagcgaagctactagcaacgacctaacaacaatggctaccaagatattagccctccttgcgcttcttgccctttttgtgagcgcaacaaatgcgttcattattccacaatgctcacttgctcctagtgccattattccacagttcctcccaccagttacttcaatgggcttcgaacacctagctgtgcaagccaacatgcaacaacaagcgcttgcggcgagcgtc

SEQ ID NO: 27267 - DNA, 250 bp, Zea mays
cttttcagcattcaaaaacacaccaagcgaacgcactagcaacgacctaacaccaatggctaccaagatattagccctccttgcgcttcttgcccttttagtgagcgcaacaaatgcgttcattattccacagtgctcacttgctcctagtgccagtattccacagttcctcccaccagttacttcaatgggcttcgaacatccagccgtgcaagcctacaggctacaactagcgcttgcggcgagcgcc

SEQ ID NO: 27268 - DNA, 249 bp, Zea mays
aacaacaacaacagtttctgccatcactgagccacctagccgtggtgaaccctgtcacctacttgcaacagcagctgcttgcatccaacccacttgctctggcgaacgtagctgcataccagcaacaacaacagctgcaacagtttatgccagtgctcagtcaactagccatggtgaaccctgccgtctacctacaactactttcatctagcccgctcgcggtgggcaatgcacctacgtacctacaac

SEQ ID NO: 27269 - DNA, 248 bp, Zea mays
tggacaacaggcagcttctcatcaaatcagaccctggtgaagttgttaaacctgaccaattcaaggcgattaatgatgaggggatgccaatttaccagaggcctttcatgaaggggaagctgtacatccatttcacggtggagttccctgactcgttggcaccagagcagtgcaaggctctcgagacagtacttccaccaaggccttcatccaagctgacagacatggagatagatgaatgcgaggag

SEQ ID NO: 27270 - DNA, 250 bp, Zea mays
aatcactagagctgctgacaacccatggccccagtggccaagaattttccgtgttgactatgggcatcaagaagctgctaccaagtttgggaaggatccaagaacttacggagtcttgacaaagcgttttattggcgatggaaatggcaaggtgaaggcccttgaggtagtgcgtgtgaagtgggagaaagtagatggaagatttcaactcaaggagatggaaggatcagaagagattattgaggctgat

SEQ ID NO: 27271 - DNA, 248 bp, Zea mays
cattttgagcattcagaaacacaccaagcgaagctacctagcaacgacttaacaacaatggctaccaagatattagccctccttgcgcttcttgccctttttgtgagcgcaacaaatgcgttcattattccacaatgctcacttgctcctagtgccattataccacagttcctccgaccagttacttcaatgggcttcgaacacctagctgtgcaagcctacaggctacaacaagcgcttgcggcgag

SEQ ID NO: 27272 - DNA, 247 bp, Zea mays
cttgcaagagcagctgcttgcatccaacccacttgctctggcgaacgtattgcaaaccagcaacaacaacagctacaacagtttctgccaacgctcagtcaactagccatggtgaaccctgccgcctacgtacaacaacaacaactgctttcatctagcccgctcgctgtgggcaatgcacctacatacctgcaacaacaattgttgcaacagattgtaccagctctgactcaactagctgtggcaa

SEQ ID NO: 27273 - DNA, 247 bp, Zea mays
aaccaacgaagatctgttcccaggttggtctgtgcacttttgatggcactcatggtgtcagcgctggaattcggagcgtagtggatgatgaagctgggaaatcaaatggtggtctcaagagtgatccaatgtgcaatgcctgtgagatggctgtggtatggatgcagaaccaacttgcccagaacaagacacaggagctcatcctgaactacattaatcagctttgcgagcgtcttccgagtccgat

SEQ ID NO: 27274 - DNA, 248 bp, Zea mays
cagcaacatagaaagtggaatccagtagcaacaatagagcaacaatggcgaccaagatattttccctccttatgctccttgctctttctgcatgtgttgctaacgcgacaattttccctcaatgctcacaagctcctatagcttcccttcttcccccataccttccatcaatgatagcttcagtatgtgaaaacccagctcttcaaccctataggctccaacaagcaatcgcagcaagcaacatacct

SEQ ID NO: 27275 - DNA, 246 bp, Zea mays
actaacgtggctgtctgcgttgtgtgctggcgatgcagatctgaaattcctaagctaagcagtttttggatgtgtcggcatagactgtcttttgttttggaactagaattcctttttgcctcgttaggcctggacccactgtataatgctatgttgctttggatggctgacgatggttaccgctgtgttgctagccatgtggtacttgatctgtatcacggttgcaaataagtgctgtttctaaaa

SEQ ID NO: 27276 - DNA, 249 bp, Zea mays
gctacgccatggacccggcgtccggcaagatcgagggctacggcaccaagctgcagagggacctcgagggcaagaagacgtggaacgacttcttcttccacgtcgtcgcgccgccggagaaggtggaccacgccgtctggccccggagcctcgccgggtacagggaggccaacgaggagtactgccgccacatgcagcgcctgacgcgcgagctgttcgagcacctctcgctggggctggggctccacg

SEQ ID NO: 27277 - DNA, 250 bp, Zea mays
caagctcctatagcttcccttcttcccccgtacctctcaccagcggtgtcttcggtatgtgaaaacccaattcttcaaccctacaggatccaacaggcaatcacagctggcatcttacctttatcacccttgttcctccaacaatcatcagccctattacatcagttacctttggtgcatttattggcacaaaacatcagggcacaacaactacaacaacttgtgctagcaaaccttgctgcctactctc

SEQ ID NO: 27278 - DNA, 246 bp, Zea mays
attttgagcattcagaaacacaccaagcgaacgcactagcaacgacctaacaacaatggctaccaagatattagccctccttgcgcttcttgccctttttgtgagcgcaacaaatgcgttcattattccacaatgctcacttgctcctagtgccattattccacagttcctcccaccagttacttcaatgggcttcgaacacctagctgtgcaagccaacatgcaacaacaagcgcttgcggcgag

SEQ ID NO: 27279 - DNA, 245 bp, Zea mays
cgggaaccaggagctcaagagcgacctcaaggacctgtacatcaacaatgctatccagatggatgttaccgggagtaggaaggctgttgtcattcacgtcccataccgcctgcgcaaggccttcaggaagatccatgtcagactcgtcagggagctggagaagaaattcagcggcaaggatgtggtaattgttgctacacggaggattgtgaggccacccaagaagggttcagctgttctgcgcc

SEQ ID NO: 27280 - DNA, 245 bp, Zea mays
atagcctgtctgcccagggaaagcgccgttatgaccgcaagcagtcaggatatggtggccagaccaagcctgtcttccacaagaaggccaagaccaccaagaaaatcgtattgaagctgcagtgccagagctgcaagcactactcacagcacgcaattaagaggtgcaagcattttgagattggtggagacaagaagggcaagggaacatctctcttctaagtttctcatcgcccatctcgatgt

SEQ ID NO: 27281 - DNA, 244 bp, Zea mays
ccgtgtgcaaatgtgaaggccctgcaagcgctttccaggccgcaccaatcctgcttgcttcttgaagatacacatggtgccacctaaataaaagccgtttctggttatgtctgtccttgacatgtcaacagattagtgttgggttgcaatcatgtggtgtttaagtcttggagaaggcgagaagtcattgctgccagcattgtgatcgtcaggcacagaagtactcaaaagtgagagcctactt

SEQ ID NO: 27282 - DNA, 244 bp, Zea mays
accgcaccaggacccttgttcgccgccgccgcctctgatctccgcgaggttgtcaggattcaatatgtcgaccagcacattcgctacttcctgcacgctgttgggcaatgttagaacaacgcaggcctcccagacagcggtgaagagcccttcgtctctaagcttcttcagccaagttacgaaggttccaagcctgaagacctccaagaaactggatgtctccgccatggctgtatacaaggtg

SEQ ID NO: 27283 - DNA, 243 bp, Zea mays; identical to SEQ ID NO: 26013

SEQ ID NO: 27284 - DNA, 242 bp, Zea mays
attttgagcattcagaaacacaccaagcgaacgcactagcaacgacctaacaacaatggctaccaagatattagccctccttgcgcttcttgccctttttgtgagcgcaacaaatgcgttcattattccacaatgctcacttgctcctagtgccattattccacagttcctcccaccagttacttcaatgggcttcgaacacctagctgtgcaagccaacatgcaacaacaagcgcttgcgg

SEQ ID NO: 27285 - DNA, 244 bp, Zea mays
gcaacatagaaagtggaatccagtagcaacaacagagcaacaatggcgaccaagatattttccctccttatgctccttgctctttctgcatgtgttgctaacgcgacaattttccctcaatgctcacaagctcctatagcttcccttcttcccccataccttccatcaatgatagcttcagtatgtgaaaacccagctcttcagccctataggctccaacaagcaatcgcagcaagcaacatac

SEQ ID NO: 27286 - DNA, 241 bp, Zea mays
caaaacccaattcttcaaccctacaggatccaacaggcaatcgcagctggcatcttacctttatcacccttgttcctccaacaatcatcagccctattacagcagttacctttggtgcatttattggcacaaaacatcagggcacaacaactacaacaacttgtgctagcaaaccttgctgcctactctcagcaacagcagtttcttccattcaaccaactagctgcattgaactctgctt

SEQ ID NO: 27287 - DNA, 117 bp, Zea mays
caacacatcattggtggtgccctcttttagattgattattagttgtaattcaataataaagttttttggatgatgtatgtggccaaccagaaataagaagttacatttccagattct

SEQ ID NO: 27288 - DNA, 238 bp, Zea mays
aggtacagcagactctatcagaaaatttatctgggtactcgaggattattacagtcacaaatccattgacaacattgtaatcttgagtggcgatcagctttatcggatgaattacatggaacttgtgcagaaacatgtcgaggacgatgctgatatcactatatcatgtgctcctgttgatgagagccgagcttctaaaaatgggctagtgaagattgatcatactggacgtgtactt

SEQ ID NO: 27289 - DNA, 240 bp, Zea mays
caaagcggcagtgcgtagagaggatcgtcgaacagaacagcatgaagatggtcatcgttctcgtcgtgtgcctggctctgtcagctgccagcgcctctgcaatgcagatgccctgcccctgcgcggggctgcagggcttgtacggcgctggcgccggcctgacgacgatgatgggcgccggcgggctgtacccctacgcggagtacctgaggcagccgcagtgcagcccgctggcggcgg

SEQ ID NO: 27290 - DNA, 237 bp, Zea mays
ctatggcagccaaaatattttgccaccttatgctccttggtatttctgcaagtgctgctacggcgaccattttcccgcaatgctcacaagctcctataacttcccttcttcccccgtacctctcaacagcggtgtcttcggtatgtgaaaaccctattcttcaagcctacaggatccaacagggaatcgcagctggcatcttacctttatcacccttgttcctccatgaatcatcag

SEQ ID NO: 27291 - DNA, 146 bp, Zea mays
ctgaggcatcagtgcagcccgacggcgacgccctactgctcgcctcagtgccagtcgttgcggcagcagtgttgccagcagctcaggcaggtggagccgcagcaccggtaccaggcgatcttcggcttggtcctccagtccatcct

SEQ ID NO: 27292 - DNA, 239 bp, Zea mays
atgcaatcgcagctggcatcttacctttatcacccttgttcctccaacaatcatcagccctattacagcagttacctttggtgcatttattggcacaaaacatcagggcacaacaactacaacaacttgtgctagcaaaccttgctgcctactctcagcaacaacagtttcttccattcaaccaactagctgcattgaactctgcttcttatttgcaacaacaacaactaccattcagc

SEQ ID NO: 27293 - DNA, 235 bp, Zea mays
ataccaactagcaacatagaaagcacaatagtgtaccaacaatggcagccaaaatattttgcctccttatgctccttggtctttctgcaagtgctgctacggcgaccattttcccgtaatgctcgcaagctcctatagcttcccttcttcccccgtacctctcaccatcggtgtcttcggtatgtgaaaacccaattcttctaccctacaggatccaacaggcaatcacagctgg

SEQ ID NO: 27294 - DNA, 239 bp, Zea mays
agtcatgccattgggtaccatgaacccatgcatgcagtactgcatgatgcaacaggggcttgccagcttgatggcgtgtccgtccctgatgctgcagcaactgttggccttaccgcttcagacgatgccagtgatgatgccacagatgatgacgcctaacatgatgtcaccattgatgatgccgagcatgatgtcaccaatggtcttgccgagcatgatgtcgcaaatgatgatgccac

SEQ ID NO: 27295 - DNA, 241 bp, Zea mays
aagcggcagtgcgtagagaggatcgtcgaacagaacagcatgaagatggtcatcgttctcgtcgtgtgcctggctctgtcagctgccagcgcctctgcaatgcagatgccctgcccctgcgcggggctgcagggcttgtacggcgctggcgccggcctgacgacgatgatgggcgccggcgggctgtacccctacgcggagtacctgaggcagccgcagtgcagcccgctggcggcggcgc

SEQ ID NO: 27296 - DNA, 202 bp, Zea mays
cgaccacggtccacggcgtacgtgagctgagagcatgcatcgtgctgggacatgcgtgccgttggtggtgctgcaggtacgcgtcggtgtgcgcgatggagagcccgtccaaggcggacgacgagcagtggctgtcctactggatcatacactccttcgtcaccctcctggagatgctcgccgagccgctcctccactgggt

SEQ ID NO: 27297 - DNA, 257 bp, Zea mays
gtttgaacacatagacatgtcagaaaagcaaaaggtcattagcgagtgttcggaagcagagacttggctaatggagaaaaggcagcagcaggatgctctgccaaagcatgctaatccggtcctccttgttgctgaccttaagaagaaagctgaaacacttgacaggttctgcaagccgatcatgacgaaaccgaagccagttcctaagccacagactccgcctccggcagaaacccaagctcctgagcctcagacac

SEQ ID NO: 27298 - DNA, 256 bp, Zea mays
caacaatccttggcacatctaacaatacaaaccatcgcaacgcaacagcaacaacaattcctaccagcactgagccacctagccatggtgaaccctgccgcctacttgcaacagcagttgcttgcatcaaacccacttgctctggcaaacgtagttgcaaaccagccacaacaacagctgcaacagtttctgccagcgctcagtcaactagccatggtgaaccctgccgcctacctacaacagcaacaactgcttt

SEQ ID NO: 27299 - DNA, 253 bp, Zea mays
aagcgaagtatctagcaacgacctaacaccaatggctaccaagatattagccctccttgcgcttcttgcccttttagtgagcgcaacaaatgcgttcattattccacagtgctcacttgctcctagtgccattattccacagttcctcccaccagttacttcaatgggcttcgaacatccagccgtgcaagcctacaggctacaactagcgcttgcggcgagcgccttacaacaaccaattgcccaattgcaa

SEQ ID NO: 27300 - DNA, 252 bp, Zea mays
attttgagcattcagaaacacaccaagcgaacgcactagcaacgacctaacaacaatggctaccaagatattagccctccttgcgcttcttgccctttttgtgagcgcaacaaatgcgttcattattccacaatgctcacttgctcctagtgccattattccacagttcctcccaccagttacttcaatgggcttcgaacacctagctgtgcaagccaacatgcaacaacaagcgcttgcggcgagcgtctt

SEQ ID NO: 27301 - DNA, 244 bp, Zea mays
tagcaacatagaaagcacaatagtgtaccaacaatggcagccaaaatattttgcctccttatgctccttggtctttctgcaagtgctgctacggcgaccattttcccgcaatgctcgcaagctcctatagcttcccttcttcccccgtacctctcaccagcggtgtcttcggtatgtgaaaacccaattcttcaaccctacaggatccaacaggcaatcacagctggcatcttacctttatcac

SEQ ID NO: 27302 - DNA, 250 bp, Zea mays
cgactccagattggagaactcgacaccatgaaggtgctgatcgttgcccttgctctcctggcgctcgctgcgagaccgcctccagtacaagctgcggctgtggctgccagacaccaccgtttcatctaccgcctccgttctatatgccgcctccgttctatctgccgccgcagcagcagccggttccatggcaataccccactcaaccaccgcagctaagcccgtgccagcagttcggatcctgcggcgt

SEQ ID NO: 27303 - DNA, 247 bp, Zea mays
atttcttccattcaaccaactgtctacactgaaccctgctgcttatttgcagcaacaactattaccattcagccagctagctactgcctactctcagcaacaacaacttcttccatttaaccaattggccgcactgaaccccgctgcttatttgcagcagcaaatactactaccatttagccagctagctgcagcaaaccgtgcttccttcttgacacagcaacagttgctgcctttctaccagcag

SEQ ID NO: 27304 - DNA, 248 bp, Zea mays
caacaatccttggcacatctaacaatacaaaccatcgcaacgcaacagcaacaacaattcctaccagcactgagccacctagccatggtgaaccctgccgcctacttgcaacagcagttgcttgcatcaaacccacttgctctggcaaacgtagttgcaaaccagccacaacaacagctgcaacagtttctgccagcgctcagtcaactagccatggtgaaccctgccgcctacctacaacagcaaca

SEQ ID NO: 27305 - DNA, 245 bp, Zea mays
cgaacagaacagcatgaagatggtcatcgttctcgtcgtgtgcctggctctgtcagctgccagcgcctctgcaatgcagatgccctgcccctgcgcggggctgcagggcttgtacggcgctggcgccggcctgacgacgatgatgggcgccggcgggctgtacccctacgcggagtacctgaggcagccgcagtgcagcccgctggcggcggcgccctactacgccgggtgtgggcagacgagcg

SEQ ID NO: 27306 - DNA, 250 bp, Zea mays
gtgtcttcagtatgtgaaaacccaattcttcaaccctacaggatccaacaggcaatcgcagcaggcatcttacctttatcacccttgttcctccaacaaccgtcagccctattacagcagttacctttggtgcatttgttggcacaaaacatcaaggcacaacaactacaacaacttgtgctaggaaaccttgctgcctactctcagcaacagcagtttcttccattcaaccaactggctgcattgaact

SEQ ID NO: 27307 - DNA, 250 bp, Zea mays
caacaatttcttccattcaaccaactgtctacactgaaccctgctgcttatttgcagcaacaacaactactaccattcagccagctagctactgcctactctcagcagcaacaatttcttccatttaaccaattcgccgcactgaacccctctgcttatttccagcagcaaatactactaccatttggccagctagctacaacaagccccgcttccttcttgacacaacaacaattgcttccgttctacc

SEQ ID NO: 27308 - DNA, 248 bp, Zea mays
cggctcgagaaggagaagaaccctaagaacaagtctgtcgctgcggtggggaaagctgctggcgacaggtggaaatccctgagcgagtcggacaaggctccctatgtagccaaggctaacaagctcaagctcgagtacaacaaggccatcgctgcctacaacaagggcgagagcactgcagctaagaaggctcctgccaaggaggaagaggaggaagatgaagaggagtctgacaagtccaagtcgga

SEQ ID NO: 27309 - DNA, 251 bp, Zea mays
accgcttcagtttgtgaaaacccagcccttcaaccctacaggctccaacaagcaatcgcaacaagcaacttacctttatcacccctgttctttcaacaatcgccagccctatctttggtgcagtcattggtacaaaccatcagggcacaacagctgcaacaactcgtgctaccagtgatcagccaagtagctctggcaaacctttctccctactctcagcaacaacaatttcttccattcaaccaactgtc

SEQ ID NO: 27310 - DNA, 248 bp, Zea mays
ctagattcattttacatccttggtggcattagcttagaaggacgagaaattgcatggacctggttgaaggaaaactgggatcacgtgttgaagacatggaaatcgagttcactcatatcagacttcattgagtccattgtcccacggtttacctccgaggagaaagctgtcgaggttaccgagttctttgctggccaagttaagccatcattcgagagagcactgaagcagagcctggagagggtgcg

SEQ ID NO: 27311 - DNA, 245 bp, Zea mays
agcaccgcctccagtacaagctgcggctgtggctgccagacaccaccgtttcatctaccgcctccgttctatatgccgcctccgttctatctgccgccgcagcagcagccgcagccatggcaataccccactcaaccaccgcagctaagcccgtgccagcagttcggatcctgcggcgtcggcagcgtcggcagcccgttcctgggccagtgcgtcgagttcctgaggcaccagtgcagcccggc

SEQ ID NO: 27312 - DNA, 240 bp, Zea mays
ggtgctcatgacgtctcgtgcagaccagaacgacaggtgggcttcctacgccggacctggcgggtggaacgatcctgacatgcttgaggtgggcaacggcggcatgtccgaagcggagtaccgctctcacttcagcatctgggcactcgccaaggctccgcttctgatcgggtgcgacgtgcgggcgatgagccagcagacgatgggcatactcagcaactcggaagtcatcgccgtgaa

SEQ ID NO: 27313 - DNA, 246 bp, Zea mays
atttggtggcacaaaacatcagggcacaacaactacaacaacttgtgctagcaaaccttgctgcatactctcagcaacatcagtttcttccattcaaccaactggctgcattgaactctgctgcttatttgcaacaacaattaccattcagccagctagttgctgcctacccccagcaatttcttccattcaaccaactagcagcattgaactctgctgcttatttacagcagcaacaactactac

SEQ ID NO: 27314 - DNA, 247 bp, Zea mays
gctagctactgcctactctcagcaacaacaacttcttccatttaaccaattggccgcactgaaccccgctgcttatttgcagcagcaaatactactaccatttagccagctagctgcagcaaaccgtgcttccttcttgacacagcaacagttgctgcctttctaccagcagtttgcggctaaccccgcaaccctcttacaactacaacaattgttgccctttgtccaacttgctttgacagaccca

SEQ ID NO: 27315 - DNA, 245 bp, Zea mays
ctttggtgcatttgttggcacaaaacatcaaggcacaacaactacaacaacttgtgctaggaaaccttgctgcctactctcagcaacagcagtttcttccattcaaccaactggctgcattgaactctgctgcttatttgcaacaacaactaccattcagtcagctagctgctgcctacccccagcaatttcttccattcaaccaactggcagcattgaactctgctgcttatttacaacagcaa

SEQ ID NO: 27316 - DNA, 244 bp, Zea mays
cagttgcttgcatcaaacccacttgctctggcaaacgtagttgcaaaccagccacaacaacagctgcaacagtttctgccagcgctcagtcaactagccatggtgaaccctgccgcctacctacaacagcaacaactgctttcatctagcccgctcgctgtggccaatgcacctacatacctgcaacaacaattgttgcaacagattgtaccagctctgactcagctagttgtggcaaaccctg

SEQ ID NO: 27317 - DNA, 243 bp, Zea mays
gggtcttcagaccattagcttatctactccagagcgcagaagaacccgatcgacaccatgagggtgttgctcgttgccctcgctctcctggctctcgctgcgagcgccacctccacgcatacaagcagcggctgcggctgccagccaccgccgccggttcatctaccgccgccggtgcatctgccacctccggttcacctgccacctccggtgcatctcccaccgccggtccacctgccgccg

SEQ ID NO: 27318 - DNA, 242 bp, Zea mays
gccgagcatgatgtcaccaatggtcttgccgagcatgatgtcgcaaatgatgatgccacaatgtcactgcgacgccgtctcgcagattatgctgcaacagcagttaccattcatgttcaacccaatggccatgacgattccacccatgttcttacagcaaccctttgttggtgctgcattctagatagaaatatttgtgttgtatcgaataatgagttgacatgccatcgcgtgtgactcat

SEQ ID NO: 27319 - DNA, 241 bp, Zea mays
gcagcaacaactactaccattcagccagctagctggtgtgagccctgctaccttcttgacacaaccacaattgttgccgttctaccagcacgctgcgcctaacgctggcaccctcttacaactgcaacaattgctgccattcaaccaacttgctttgacaaacccaacagcattctaccaacaacccatcattggtggtgccctcttttagatttcttatgagttatagttcaataataaa

SEQ ID NO: 27320 - DNA, 243 bp, Zea mays
tatcaattatagcttcaatatgtgaaaacccagctcttcaaccatataggcttcaacaagcaatcgcagcaagcaacatacctttatcgcccttgttgtttcaacaatcgccagccctatctttggtgcagtcattggtacaaaccatcagggcacaacagctgcagcaactcgtgctacctctgatcaaccaagtagctctggcaaacctttctccctactctcagcaacaacaatttcttc

SEQ ID NO: 27321 - DNA, 236 bp, Zea mays
ggacgtcagcctagcaattagctcatcgactccagattggagaactcgacaccatgaaggtgctgatcgttgcccttgctctcctggcgctcgctgcgagcgccgcctccagtacaagctgcggctgtggctgccagacaccaccgtttcatctaccgcctccgttctatatgccgcctccgttctatctgccgccgcagcagcagccgcagccatggcaataccccactcaacca

SEQ ID NO: 27322 - DNA, 237 bp, Zea mays
gctcggcattccacctacaatccgatggtcaatcagaagttgttaacagaataatcaccatgtatcttcgctgtctagccggaggcatcctaaatcatggctgaaatggttaccatgggcagaattttgctataattcatcatatcaatcggcactgaaatgttctccattcaaggttgtctacggacgggacgctcctccgatggtctcctatcaagcaggggactagtcaaaggt

SEQ ID NO: 27323 - DNA, 235 bp, Zea mays
ctcagcaacagcagtttcttccattcaaccaactagctgcattgaactctgcttcttatttgcaacaacaacaactaccattcagccagctatctgctgcctacccccagcaatttcttccattcaaccaactgacagcattgaactctcctgcttatttacagcagcaacaactactaccattcagccagctagctggtgtgagccctgctaccttcttgacacaaccacagtt

SEQ ID NO: 27324 - DNA, 242 bp, Zea mays
gaaaacccaattcttcaaccctacaggatccaacaggcaatcacagctggcatcttacctttatcacccttgttcctccaacaatcatcagccctattacatcagttacctttggtgcatttattggcacaaaacatcagggcacaacaactacaacaacttgtgctagcaaaccttgctgcctactctcagcaacagcagtttcttccattcaaccaactagctgcattgaactctgcttc

SEQ ID NO: 27325 - DNA, 244 bp, Zea mays
ctgagccaactagatgtggtgaaccctgtcgcctacttgcaacagcaggtgcttgcatccaacccacttgctctggcaaacgtagctgcataccaacaacaacaacaattgcaacagtttctgccagcgctcagtcaactagccatggtgaaccctgccgcctacctacaacagcaacaactgctttcatctagccctctcgttgtgggtaatgcacctacatacctgcaacaacaattgctgc

SEQ ID NO: 27326 - DNA, 269 bp, Zea mays
atctactatactatactctaggaagcaaggacaccaccgccatggcagccaagatgcttgcattgttcgctctcctagctctttgtgcaagcgccactagtgcgacccatattccagggcacttgccaccagtcatgccattgggtaccatgaacccatgcatgcagtactgcatgatgcaacaggggcttgccagcttgatggcgtgtccgtccctgatgctgcagcaactgttggccttaccgcttcagacgatgccagtgatgatg

SEQ ID NO: 27327 - DNA, 264 bp, Zea mays
acagacatgagcacagaagaaagagcaaagagctttgttccaagggtatgcatattcggtgggaaagcatttgccacatatatacaggcaaaaaggatcgttaaatttattacagatgtggcagctaccgtgaaccatgattcagacattggagatttgttgaaggtcgtatttgttccagactataatgttagtgttgccgaggcgctaattcctgccagtgaattatcacagcatatcagtactgctggaatggaagctagt

SEQ ID NO: 27328 - DNA, 263 bp, Zea mays
caacaacaactgctttcatctagcccgctcgctgtgggcaatgcacctacatacctgcaacaacaattgttgcaacagattgtaccagctctgactcaactagctgtggcaaaccctgttgcctacttgcaacagctgcttccattcaaccaactgactctgtcgaactctgctgcgtacctacaacagcgacaacagttacttaatccattggtagtggctaacccattggtcgccgccttcctacagcagcaacaattgct

SEQ ID NO: 27329 - DNA, 261 bp, Zea mays
cagctctgatgcagcagcagcagcagctgctggcagcccagggtctcaaccccatggccatgatgatggcgcagaacatgccggccatgggtggactctaccagtaccagctgcccagctaccgcaccaacccctgtggcgtctccgctgccattccgccctactactgattcatgatatttgggaaatctcctctatccatctctctctatctatatatgtaataatgcagtaagacgacacacattatcatgtgtggta

SEQ ID NO: 27330 - DNA, 260 bp, Zea mays
acaatttcttccattcaaccaactgtctacactgaaccctgctgcttatttgcagcaacaactattaccatttagccagctagctactgcctactctcagcaacaacaacttcttccatttaaccaattggccgcactgaaccccgctgcttatttgcagcagcaaatactactaccatttagccagctagctgcagcaaaccgtgcttccttcttgacacagcaacagttgctgcctttctaccagcagtttgcggcta

SEQ ID NO: 27331 - DNA, 257 bp, Zea mays
aattgagggagatgaaatggatcttgattctgaggatgaagaggaggagctaaacattccagtaatcaaggaaaatggcaaaggtgatgggaaggaggagcagaaaaatcaagagaaggcagtagctgctacagcttcaaaatcaagtcttggccttgaaaagaaaagcaaggatgactctgatgattctgatgaggatgagtctgatgattctgatgaggatgattctgatgattctgatgagggcgagggattat

SEQ ID NO: 27332 - DNA, 260 bp, Zea mays
cgaagattacataaacacgtcacacccaaattttattggtggcagcaaggctgttgagcaagcacagcagcaagttaggtctgccaaaatgtcagcagcggtggtaagaaaggacggagtggatgcacaggcttctgagaaaactcaaaaatcacgcgcgatcttgggtagaagtggtgtaaatggagtagttactgaccacatccagggggtacggcctactgctgaggcagagagaccaggatcttctggtagtggaa

SEQ ID NO: 27333 - DNA, 259 bp, Zea mays
caaaatattttgcctccttatgctccttggtctttctgcaagtgctgctacggcgaccattttcccgcaatgctcgcaagctcctatagcttcccttcttcccccgtacctctcaccagcggtgtcttcggtatgtgaaaacccaattcttcaaccctacaggatccaacaggcaatcacagctggcatcttacctttatcacccttgttcctccaacaatcatcagccctattacatcagttacctttggtgcattta

SEQ ID NO: 27334 - DNA, 260 bp, Zea mays
tgcagcagcagccgcagggcgagctcgcggcgctgatggcggcccaggtagcgcacagctgacggcgatgtgcggcctgcagctgcagcagccaggtccctgcccttgcaacgcagctgccggcggtgtctactactgaggaaactatgtactgtagtaataatgtaatggagccgctgactagctacctagctagctagttgagtcatttagcggcgatgattgagtaataatgtgtcacgcatcaccatgggtggcag

SEQ ID NO: 27335 - DNA, 259 bp, Zea mays
cagctcgttgagaacgcagacgagtgcatggtgctcgacaacgaggctctctatgacatctgcttccgcacgctcaagcttgccacaccaacctttggtgatctcaaccaccttatctctgcaaccatgagtggtgttacgtgctgccttcgcttccctggtcagctgaattctgacctccggaagcttgcagtgaacctgatccccttcccacgtctgcacttcttcatggttggatttgctccactgacctcgcggg

SEQ ID NO: 27336 - DNA, 262 bp, Zea mays
tgaaccctgccgcctacttgcaacagcagttgcttgcatcaaacccacttgctctggcaaacgtagttgcaaaccagccacaacaacagctgcaacagtttctgccagcgctcagtcaactagccatggtgaaccctgccgcctacctacaacagcaacaactgctttcatctagcccgctcgctgtggccaatgcacctacatacctgcaacaacaattgttgcaacagattgtaccagctctgactcagctagttgtggc

SEQ ID NO: 27337 - DNA, 263 bp, Zea mays
gggtcttcagaccattagctttatctactccagagcgcagaagaacccgatcgacaccatgagggtgttgctcgttgccctcgctctcctggctctcgctgcgagcgccacctccacgcatacaagccgcggctgcggctgccagccaccgccgccggttcatctaccgccgccggtgcatctgccacctccggttcacctgccacctccggtgcatctcccaccgccggtccacctgccgccgccggtccacctgccaccgc

SEQ ID NO: 27338 - DNA, 265 bp, Zea mays
cgcaacgcaacagcaacaacaattcctaccagcactgagccacctagccatggtgaaccctgccgcctacttgcaacagcaattgcttgcatcaaacccacttgctctggcaaacgtagttgcaaaccagccacaacaacagctgcaacagtttctgccagcgctcagtcaactagccatggtgaaccctgccgcctacctacaacagcaacaactgctttcatctagcccgctcgctgtggccaatgcacctacatacctgcaa

SEQ ID NO: 27339 - DNA, 180 bp, Zea mays
atatctactatactatactctaggaagcaatgacaccaccgccatgggcagccaagatgctttgcactgttcgctctcctagctctttgtgcaagcgccactagtgcgacccatattccagggcacttgccaccggtcatgccattgggtaccatgaacccatgcatgcagtactgcatg

SEQ ID NO: 27340 - DNA, 258 bp, Zea mays
cggcacagcagctgcagcaactcgtgctacctgtgatcaaccaagtagctctggcaaacctttctccctactctcagcaacaacaatttcttccattcaaccaactgtctacactgaaccctgctgcttatttgcagcaacaactattaccattcagccagctagctactgcctactctcagcaacaacaacttcttccatttaaccaattggccgcactgaaccccgctgcttatttgcagcagcaaatactactac

SEQ ID NO: 27341 - DNA, 252 bp, Zea mays
caacaacagttgcaacagtttctaccagcgctcagtcaactagccatggtgaaccctatcgcctacctacaacagcaacaacttctttcatctagcccgctcgctatgggcaatgcacctacatacctgcaacaacagttgttgcaacaacagttgctgcaacaaattgtaccagctcttactcagctagctgtggcaaaccctgctgcctacttgcaacaactacttccattcaaccaactgactgtgtcg

SEQ ID NO: 27342 - DNA, 254 bp, Zea mays
aacaattgttgcaacagattgtaccagctctgactcagctagttgtggcaaaccctgctgcctacttgcaacagctgcttccattcaaccaactgactatgtcgaactctgctgcgtacctacaacagcgacaacagttacttaatccactagcagtggctaacccattggtcgctgccttcctacagcagcaacaattgctgccatacaaccagttctctttgataaaccctgtcttgtcgaggcagcaaccc

SEQ ID NO: 27343 - DNA, 255 bp, Zea mays; identical to SEQ ID NO: 27159

SEQ ID NO: 27344 - DNA, 256 bp, Zea mays
cattcagccagctatctgctgcctacccccagcaatttcttccattcaaccaactgacagcattgaactctcctgcttatttacagcagcaacaactactaccattcagccagctagctggtgtgagccctgctaccttcttgacacaaccacagttgttgccgttctaccagcacgctgcgcctaacgctggcaccctcttacaactgcaacaattgctgccattcaaccaacttgctttgacaaacccaacagc

SEQ ID NO: 27345 - DNA, 257 bp, Zea mays
cagcagttacctttggtgcatttattggcacaaaacatcagggcacaacaactacaacaacttgtgctagcaaaccttgctgcctactctcagcaacagcagtttcttccattcaaccaactagctgcattgaactctgcttcttatttgcaacaacaacaactaccattcagccagctacctgttgcctacccccagcaatttcttccattcaaccaactggcagcattgaactctcctgcttatttacagcagca

SEQ ID NO: 27346 - DNA, 257 bp, Zea mays
caagcatcttacggtcgttagcattgaccgtccaacaaccatatgccctattgcaacaaccatccttagtgaatctgtatctccaaagaatcacagcacaacaactacaacaacggttgcttccaacaattaatcaagtagttgcagcgaaccttgctgcttaccttcagcaacaacaatttcttccattcaatcaactagctggggtgaaccctgctgcttacttgcaggcacaacagctactaccattcaaccaa

SEQ ID NO: 27347 - DNA, 256 bp, Zea mays
gcactgagccacctagccatggtgaaccctgccgcctacttgcaacagcagttgcttgcatcaaacccacttgctctggcaaacgtagttgcaaaccagccacaacaacagctgcaacagtttctgccagcgctcagtcaactagccatggtgaaccctgccgcctacctacaacagcaaaactgctttcatctagcccggtcgctgtggccaatgcacctacatacctggaacaaccattgttgcaacagattgt

SEQ ID NO: 27348 - DNA, 258 bp, Zea mays
gccatggtgaaccctgtcgcctacttgcaacagcagctgcttgcatccaacccacttgctctagcaaacgtagttgcaaaccagcaacaacaacaactgcaacagtttctgccagcgcttagtcaactagccatggtgaaccctgccgcctacctacaacagcaacaactgctttcatctagcccgctcgctgtggccaatgcacctacatacctgcaacaagaattgttgcaacagattgtaccagctctaactcag

SEQ ID NO: 27349 - DNA, 260 bp, Zea mays
gaaggagcaggtcttctccacttactccgacaaccagcccggcgtgctcatccaggtgtacgaaggtgagagggccaggaccaaagacaacaatctgctcggcaagttcgagctctctggcatccctccggcgcccaggggcgtcccccagatcaccgtgtgtttcgacatggacgcgaacggcatcctcaacgtgtcagcggaggacaagaccaccggacagaagaataagatcacgatcaccaacgataagggacggc

SEQ ID NO: 27350 - DNA, 140 bp, Zea mays
ctagttctagatcgcgagccgccgccctttttttttttttttaaaatatagatctctaatcttttattactgagacgttgcacatatcagtatgagaaatttattattacagtatacgtgaaccatgattcagacattgg

SEQ ID NO: 27351 - DNA, 249 bp, Zea mays
ctactccagagcgcagaagaacccgatcgacaccatgagggtgttgctcgttgccctcgctctcctggctctcgctgcgagcgccacctccacgcatacaagccgcggctgcggctgccagccaccgccgccggttcatctaccgccgccggtgcatctgccacctccggttcacctgccacctccggtgcatctcccaccgccggtccacctgccgccgccggtccacctgccaccgccggtccatgt

SEQ ID NO: 27352 - DNA, 248 bp, Zea mays
tcggtcttcagaccattagctttatctactccagagcgcagaagaacccgatcgacaccatgagggtgttgctcgttgccctcgctctcctggctctcgctgcgagcgccacctccacgcatacaagccgcggctgcggctgccagccaccgccgccggttcatctaccgccgccggtgcatctgccacctccggttcacctgccacctccggtgcatctcccaccgccggtccacctgccgccgccg

SEQ ID NO: 27353 - DNA, 247 bp, Zea mays
gcaattagctcatcgactccagattggagaactcgacaccatgaaggtgctgatcgttgcccttgctctcctggcgctcgctgcgagcgccgcctccagtacaagcggcggctgtggctgccagacaccaccgtttcatctaccgcctccgttctatatgccgcctccgttctatctgccgccgcagcagcagccgcagccatggcaataccccactcacccaccgcagctaagcccgtgccagcag

SEQ ID NO: 27354 - DNA, 246 bp, Zea mays
cgatggagatggtagctttctcatgaacgttcaggagctagctatgatccgaattgagaacctcccagtgaaggtctttgtgctaaacaaccagcacctggggatggtggtgcagtgggaggacaggttctataaggccaacagagcgcacacatacttgggaaacccagagaatgaaagtgagatatatccagatttcgtgtcgatcgccaaagggttcaacattccagcggtccgtgtgacaaa

SEQ ID NO: 27355 - DNA, 248 bp, Zea mays
gaagggcacatgacgccaagcaaaagggacgccactcaggatatggtaagcgtaggggtaccagggaggctaggctacccaccaaggttctgtggatgaggaggatgcgtgtgctgaggcgccttctccgcaagtatcgtgaggccaagaagattgacaagcacatgtatcatgacatgtacatgaaggtcaaaggtaacgccttcaagaacaagagggtgcttatggagagtatccacaagtccaag

SEQ ID NO: 27356 - DNA, 247 bp, Zea mays
cgcattgaactctgctgcttatttgcaacaacaactaccattcagtcagctagctgctgcctacccccagcaatttcttccattcaaccaactggcagcattgaactctgctgcttatttacaacagcaacagctaccaccattcagccagctagctgatgtgagccctgttgccttcttgacacaacaacagttgttgccgttctacctgcacgctgcgcctaacgctggcaccctcttacaactg

SEQ ID NO: 27357 - DNA, 249 bp, Zea mays
cctacgtttacttcatcgaccttctcgccaaaacagttagagatgagatcgctgggtgcagcgaaaaggggtatgattctctatccgtgagtgatgcaaagcaaatgcttatgttcagttctgaccaagatctgcacgagtacatcactgaggagcacccggaatgggagattaagaacggtgctgtcttcttccagaaggcgaaggagtcacagccctgcaaggagatcccatccttgcagcttatca

SEQ ID NO: 27358 - DNA, 246 bp, Zea mays
agctcatcgactccagattggagaactcgacaccatgaaggtgctgatcgttgcccttgctctcctggcgctcgctgcgagcgccgcctccagtacaagccgcggctgtggctgccagacaccaccgtttcatctaccgcctccgttctatatgccgcctccgttctatctgccgccgcagcagcagccgcagccatggcaatacaccgctgaaccagcgtgtatcagctcttgctcagctatttg

SEQ ID NO: 27359 - DNA, 251 bp, Zea mays
gcggcggctgcggctgccagccaccgccgccggttcatctaccgccgccggtgcatctgccacctccggttcacctgccacctccggtgcatctcccaccgccggtccacctgccgccgccggtccacctgccaccgccggtccatgtgccgccgccggttcatctgccgccgccaccatgccactaccctactcaaccgccccggcctcagcctcatccccagccacacccatgcccgtgccaacagccg

SEQ ID NO: 27360 - DNA, 251 bp, Zea mays
acagcagccattcagtttcagcattggtcagggttcagtgatcaaaggatgggacgagggagttatgaccatgcaagtgggtgaagttgctcgtatccagtgcacgcctgattatgcttatggagccggcgggttcccagcctggggaattcaaccaaactcagtgcttgtgttcgagattgaagtcctcagtgcccagtaattcgcatctgtcagctatggaaacgttggccatgcttctcaagtaatga

SEQ ID NO: 27361 - DNA, 254 bp, Zea mays
attttgagcattcagaaacacaccaagcgaacgcatctagcaacaacctaacaacaatggctaccaagatattatccctccttgcgcttcttgcgctttttgcgagcgcaacaaatgcgtccattattccacaatgctcacttgctcctagttccattattccacagttcctcccaccagttacttcaatggccttcgaacacccagctgtgcaagcctataggctacaacaagcgattgcggcgagcgtctta

SEQ ID NO: 27362 - DNA, 200 bp, Zea mays
caattatagcttcagtatgtgaaaacccagctcttcaaccatataggcgtcaacaagcaatcgcagcaagcaacatacctttatcgcccttgttgtgtcaacaatcgccagccctatctttggtgcagtcattggtacaaaccatcagggcacaacagctgcagcaactcgtgctacctgtgatcaaccaagtagctctg

SEQ ID NO: 27363 - DNA, 251 bp, Zea mays
cagaaacacaccaagcgaacgcactagcaacaacctaacaacaatggctaccaagatattatccctccttgcgcttcttgcgctttttgcgagcgcaacaaatgcgtccattattccacaatgctcacttgctcctagttccattattccacagttcctcccaccagttacttcaatggccttcgaacacccagctgtgcaagcctataggctacaacaagcgcttgcggcgagcgtcttacaacaaacca

SEQ ID NO: 27364 - DNA, 204 bp, Zea mays
actttcttcactgcaccccgatgcttgcctccgacgcaattggacaagtgcaagatgaaagatgcatttatctcagatggttgcttactgagagaatgcaacatcgagcattctgtgattggagtctgctcacgtgtcagctctggatgtgaactcaaggactccgtgatgatgggagcggacacctatgaaactgaagaagaa

SEQ ID NO: 27365 - DNA, 243 bp, Zea mays
  unsure (1)..(243): unsure at all n locations
aagaatgaagggtttgttgaagtcttagctgcacagcagagcccagataatccaaactggtttcagggtactgcagatgctgtaaggcagtacttgtggttgtttgaggagcataatgtgatggaatttctaattcttgctggcgatcacctgtaccggatggactatgaacagttcattcaggcacacagagaaacaaatgctgatattaccgntgcttgcctaacggtggatgagaaacgt

SEQ ID NO: 27366 - DNA, 246 bp, Zea mays
acacgctgttggtgttatgagactggagtagctcttggccaagagcctgaagacaagatgcctgttaatgagtactatgaatacttcggtccagattacactcttcatgttgcaccaagtaacatggagaacaaaaatacacgacaacaactggatgatatacgatctaaacttctggataatctttcaaaacttcgacatgctcctagtgtccattttcaagagagagttcctgacacagaaata

SEQ ID NO: 27367 - DNA, 255 bp, Zea mays
actccacaatgctcacttgctccaagttccattattacacagttcctcccaccagttacttcaatgggcttcgaacacccagctgtgcaagcctataggctacaacaagcaattgcggcgagcgtcttacaacaaccaatttcccagttgcaacaacaatccttggcacatctaacaatacaaaccatcgcaacgcaacagcaacaacaattcctaccagcactgagccacctagcatggtgaacctgccgccta

SEQ ID NO: 27368 - DNA, 207 bp, Zea mays
attgagaccaacaagcaacatagaaagtggaatccagtagcaacaatagagcaacaatggcgaccaagatactttccctccttatgctccttgctctttctgcatgtgttgctaacgcgacaattttccctcaatgctcacaagctcctatagcttcccttcttcccccataccttccatcaatgatagcttcagtatgtgaaaacc

SEQ ID NO: 27369 - DNA, 275 bp, Zea mays
caaagcggcagtgcgtagagaggatcgtcgaacagaacagcatgaagatggtcatcgttctcgtcgtgtgcctggctctgtcagctgccagcgcctctgcaatgcagatgccctgcccctgcgcggggctgcagggcttgtacggcgctggcgccggcctgacgacgatgatgggcgccggcgggctgtacccctacgcggagtacctgaggcagccgcagtgcagcccgctggcggcggcgccctactacgccgggtgtgggcaccgagcgcca

SEQ ID NO: 27370 - DNA, 280 bp, Zea mays
gttcattattccacaatgctcacttgctccaagttccattattacacagttcctcccaccagttacttcaatgggcttcgaacacccagctgtgcaagcctataggctacaacaagcaattgcggcgagcgtcttacaacaaccaatttcccagttgcaacaacaatccttggcacatctaacaatacaaaccatcgcaacgcaacagcaacaacaattcctaccagcactgagccacctagccatggtgaaccctgccgcctacttgcaacagcagttg

SEQ ID NO: 27371 - DNA, 282 bp, Zea mays
actgctacggcgaccattttcccgcaatgctcgcaagctcctatagcttcccttcttcccccgtacctctcaccagcggtgtcttcggtatgtgaaaacccaattcttcaaccctacaggatccaacaggcaatcacagctggcatcttacctttatcacccttgttcctccaacaatcatcagccctattacatcagttacctttggtgcatttattggcacaaaacatcagggcacaacaactacaacaacttgtgctagcaaaccttgctgcctactct

SEQ ID NO: 27372 - DNA, 237 bp, Zea mays
acgtgtgtttgatatgctgcgcagacagtccctccgccctgataacatcaagatgtttgttctagatgaagctgatgaaatgctttctcgtggtttcaaggatcagatttacgacatcttccagcttctcccagccaagattcaggttggagtcttctctgctacaatgccccctgaggccttgagataaccggaagtttcatgacaagccagtgagaatcctcgtgaagagagatg

SEQ ID NO: 27373 - DNA, 203 bp, Zea mays
agcaacagcagtttcttccattcaaccaactagctgcattgaactctgcttcttatttgcaacaacaacaactaccattcagccagctacctgctgcctacccccagcaatttcttccattcaaccaactggcagcattgaactctcctgcttatttacagcagcaacaactactaccattcagccagctagctggtgtgagc

SEQ ID NO: 27374 - DNA, 274 bp, Zea mays
gtcgcacatatctactatactatactctaggaagcaaggacaccaccgccatggcagccaagatgcttgcattgttcgctctcctagctctttgtgcaagcgccactagtgcgacccatattccagggcacttgccaccagtcatgccattgggtaccatgaacccatgcatgcagtactgcatgatgcaacaggggcttgccagcttgatggcgtgtccgtccctgatgctgcagcaactgttggccttaccgcttcagacgatgccagtgat

SEQ ID NO: 27375 - DNA, 271 bp, Zea mays
gcgtagagaggatcgtcgaacagaacagcatgaagatggtcatcgttctcgtcgtgtgcctggctctgtcagctgccagcgcctctgcaatgcagatgccctgcccctgcgcggggctgcagggcttgtacggcgctggcgccggcctgacgacgatgatgggcgccggcgggctgtacccctacgcggagtacctgacgcagccgcagtgcagcccgctggcggcggcgccctactacgccgggtgtgggcagcgagcgccatgttccag

SEQ ID NO: 27376 - DNA, 197 bp, Zea mays
gccatcacaacgcaacagcaacaacagttcctaccagcactgagccacctagccatggtgaaccctgccgcctacttgcaagagcagctgcttgcatccaacccacttgctggcgaacgtagttgcaaaccagcaacaacaacagctacaacagtttctgccaacgctcagtcaactagccatggtgaaccctgccg

SEQ ID NO: 27377 - DNA, 250 bp, Zea mays
caagcaacatagaaagtggaatccagtagcaacaacagagcaacaatggcgaccaagatattttccctccttatgctccttgctctttctgcatgtgttgctaacgcgacaattttccctcaatgctcacaagctcctatagcttcccttcttcccccataccttccatcaatgatagcttcagtatgtgaaaacccagttcttcagccctataggctccaacaagcaatcgcggcaagcaacatacctt

SEQ ID NO: 27378 - DNA, 272 bp, Zea mays
cgcacagcagcagaagcagggcgccatgatgacggcgctcaaggccgcgacggccgcgaccttcggcgggtcgatgctggtgctgtccgggctgatcctggccggcaccgtgatcgcgctcacggtggccacccccgtgctggtgatcttcagcccggtgctggtgccggccgccatcgcgctggcgctcatggcggccgggttcgtcacctccggcggcctcggcgtcgctgcgctgtccgtgttctcctggatgtacaagtacctgacgg

SEQ ID NO: 27379 - DNA, 245 bp, Zea mays
agagatttgtggtgtgccccctcaaaagttcagaacagtttgctcgagtattgacaaactggacaagcaaacattcgaacaggtgaagaaggaactggttgatgagaaaggtatatcaaatgaaactgcggatgaaattggcaatttagtgaagactaggggccccccgttggaagttttgatggagttgagaaaggagggcagcaagtttatgaataatgtagggtctgttgctgcactgaatg

SEQ ID NO: 27380 - DNA, 275 bp, Zea mays
caactagctgcattgaactctgcttcttatttgcaacaacaacaactaccattcagccagctatctgctgcctacccccagcaatttcttccattcaaccaactgacagcattgaactctcctgcttatttacagcagcaacaactactaccattcagccagctagctggtgtgagccctgctaccttcttgacacaaccacagttgttgccgttctaccagcacgctgcgcctaacgctggcaccctcttacaactgcaacaattgctgccatt

SEQ ID NO: 27381 - DNA, 198 bp, Zea mays
agccttgctgcgtcttgatgatctgtatgtggattcctttgagatcaaggacgtgaagaccttgcaaggggagcatctgtcgcgcgctattggccgcttatcagggaaaggaggcaagaccaagtacgccattgagaactcaaccaggacccgcattgtcatagctgatacaaagatccacatacttggatccttcgt

SEQ ID NO: 27382 - DNA, 276 bp, Zea mays
gccatatgctggggaattgcatattgtgtcaagggtggtccagaaaaagagctaaaagcaatgcagtacttggagagaagagagtgtgagtacgaccagaagatatccattgatttctacaaggaaggagatcccttgaaaccagctgtgacaggcgtcttagtgttcgtttccactccagatccaattggcaacaagtactatcttggccctgctcctttgcaggatatggcaatgcaaattgctacagccaatggccctactggctataatagg

SEQ ID NO: 27383 - DNA, 276 bp, Zea mays
actcgtgctacctgtgatcaaccaagtagctctggcaaacctttctccctactctcagcaacaacaatttcttccattcaaccaactgtctacactgaaccctgctgcttatttgcagcaacaactattaccattcagccagctagctactgcctactctcagcaacaacaacttcttccatttaaccaattggccgcactgaaccccgctgcttatttgcagcagcaaatactactaccatttagccagctagctgcagcaaaccgtgcttcctt

SEQ ID NO: 27384 - DNA, 279 bp, Zea mays
gcaacatagaaagcacaatagtgtaccaacaatggcagccaaaatattttgcttccttatgctccttggtctttctgcaagtgctgctaccgcaaccattttcccacaatgctcacaagctcctatagcttcctttcttcccccatacctctcaccagcggtgtcttcagtatgtgaaaacccaattcttcaaccctacaggatccaacaggcaatcgcagcaggcatcttacctttatcacccttgttcctccaacaaccgtcagccctattacagca

SEQ ID NO: 27385 - DNA, 211 bp, Zea mays
agggtatctggcctgcacattgacccttaccacagcgacaaggccgcggatatcctggtcaacttctttgacaaatgcaaggcagatccgagctactgggacaagatctcacagggcggcctgcagagaatctatgagaagtacacctggaagctctactccgagaggctgatgaccctgaccggcgtgtacgggttctggaagtacgtga

SEQ ID NO: 27386 - DNA, 265 bp, Zea mays
gtcattggtacaaaccatcagggcagaacagttgcagcaactcgtgctaccagtgatcagccaagtagctctggcaaacctttccccctactctcagcaacaacaatttcttccattcaaccaactgtctatactgaaccctgctgcttatttgcagcaacaacaactactaccattcagccagctagctactgcctactctcagcagcaacaatttcttccatttaaccaattggccgcactgaacccctctgcttatttccag

SEQ ID NO: 27387 - DNA, 265 bp, Zea mays
attgacaccaactagcaacatagaaagcacaatagtgtaccaacaatggcagccaaaatattttgcttccttatgctccttggtctttctgcaagtgttgctaccgcaaccattttcccacaatgctcacaagctcctatagcttcccttcttcccccatacctctcaccagcggtgtcttcaatgtgtgaaaccccaattgttcaaccctacaggatccaacaggcaatcgcaacaggcatcttaccattatcacccttgttcc

SEQ ID NO: 27388 - DNA, 265 bp, Zea mays
cacgccggttcatctgccgccgccaccatgccactaccctactcaaccgccccggcctcagcctcatccccagccacacccatgcccgtgccaacagccgcatccaagcccgtgccagctgcagggaacctgcggcgttggcagcaccccgatcctgggccagtgcgtcgagtttctgaggcatcagtgcagcccgacggcgacgccctactgctcgcctcagtgccagtcgttgcggcacagtgttgccacagctcaggcaggt

SEQ ID NO: 27389 - DNA, 262 bp, Zea mays
agcatgaagatggtcatcgttctcgtcgtgtgcctggctctgtcagctgccagcgcctctgcaatgcagatgccctgcccctgcgcggggctgcagggcttgtacggcgctggcgccggcctgacgacgatgatgggcgccggcgggctgtacccctacgcggagtacctgaggcagccgcagtgcagcccgctggcggcggcgccctactacgccgggtgtgggcagccgagcgccatgttccagccgctccggcaacagt

SEQ ID NO: 27390 - DNA, 263 bp, Zea mays
agcgcactagcaacgacctaacaacaatggcttccaagacattatccctccttgcgcttcttgccctttttgtgagtgcaacaaatgcgttcattattccacaatgctcacttgctccgagtgccattattccacagttcctccctccagttacttcaatgggcttcgaacacccagctgtgcaagcctataggctacaacaagcgcttgcggcgagcgtcttagaacaaccaattgcccaattacaacaacaatccttagca

SEQ ID NO: 27391 - DNA, 269 bp, Zea mays
attggcacaaaacatcagggcacaacaactacaacaacttgtgctagcaaaccttgctgcctactctcagcaacagcagtttcttccattcaaccaactagctgcattgaactctgcttcttatttgcaacaacaacaactaccattcagccagctacctgttgcctacccccaacaatttcttccattcaaccaactggcagcattgaactctcctgcttatttacagcagcaacaactactaccattcagccagctagctggtgtgg

SEQ ID NO: 27392 - DNA, 264 bp, Zea mays
aattagctcatcgactccagattggagaactcgacaccatgaaggtgctgatcgttgcccttgctctcctggcgctcgctgcgagcgccgcctccagtacaagccgcggctgtggctgccagacaccaccgtttcatctaccgcctccgttctatatgccgcctccgttctatctgccgccgcagcagcagccgcagccatggcaatacccatctcaaccaccgcagctaagcccgtgccagcagttcggatcctgcggcgtcg

SEQ ID NO: 27393 - DNA, 266 bp, Zea mays
atgcgacccatattccagggcacttgccaccagtcatgccattgggtaccatgaacccatgcatgcagtactgcatgatgcaacaggggcttgccagcttgatggcgtgtccgtccctgatgctgcagcaactgttggccttaccgcttcagacgatgccagtgatgatgccacagatgatgacgcctaacatgatgtcaccattgatgatgccgagcatgatgtcaccaatggtcttgccgagcatgatgtcgcaaatgatgatg

SEQ ID NO: 27394 - DNA, 258 bp, Zea mays
gtaaacccagcccttcaaccctacaggctccaacaagcaatcgcaacaagcaacttacctttatcacccctgttctttcaacaatcgccagccctatctttggtgcagtcattggtacaaaccatcagggcacaacagctgcagcaactcgtgctaccagtgatcagccaagtagctctggcaaacctttctccctactctcagcaacaacaatttcttccattcaaccaactgtctacactgaaccctgctgcttat

SEQ ID NO: 27395 - DNA, 255 bp, Zea mays
cttccgggcgacaatgttggcttcaacgtgaagaacgttgctgtcaaggatctcaagcgtgggttcgtggcctccaactccaaggatgaccctgccaaggaggctgccagcttcacctcccaggtcatcatcatgaaccaccctgggcagattggcaacggctatgccccagtgctggactgccacacctcccacatcgccgtcaagtttgctgagctcattaccaagatcgacaggcgatctggcaaggagctc

SEQ ID NO: 27396 - DNA, 252 bp, Zea mays
gcagcttgagcgtgccgctgccgccagcagcagcctgtacgagccagctctgatgcagcagcagcagcagctgctggcagcccagggtctcaaccccatggccatgatgatggcgcagaacatgccggccatgggtggactctaccagtaccagtaccagctgcccagctaccgcaccaacccctgtggcgtctccgctgccattccgccctactactgattcatgatatttgggaaatctcctctatccat

SEQ ID NO: 27397 - DNA, 252 bp, Zea mays
attttccctccttatgctccttgctctttctacatgtgttgctaacgcgacaattttccctcaatgctcacaagctcctatagcttcccttcttcccccataccttccatcaattatagcttcaatatgtgaaaacccagctcttcaaccatataggcgtcaacaagcaatcgcagcaagcaacatacctttatcgcccttgttgtttcaacaatcgccagccctatctttggtgcagtcattggtacaaac

SEQ ID NO: 27398 - DNA, 250 bp, Zea mays
aggcgctcaacgagcaccatgtcctcctggagggtaccctcctgaagcccaacatggtgactccaggctccgactccaagaaggtgacccctgaggtgattgctgagtacaccgtccgtaccctccagaggaccgtccctgctgctgtgcctgctgttgtcttcctctctggtggacagagcgaggaggaggccacccgcaacctcaatgccatgaacaagctcagcaccaagaagccgtggtccctgtc

SEQ ID NO: 27399 - DNA, 252 bp, Zea mays
aacgcaacagcaacaacagttcctaccagcactgagccacctagccatggtgaaccctgtcgcctacttgcaacagcagctgcttgcatccaacccacttgctctagcaaacgtagttgcaaaccagcaacaacaacaactgcaacagtttctgccagcgcttagtcaactagccatggtgaaccctgccgcctacctacaacagcaacaactgctttcatctagcccgctcgctgtggccaatgcacctac

SEQ ID NO: 27400 - DNA, 250 bp, Zea mays
gattttagccgccgccgctgctcatctcacatccctcgagaagacgcctgctcctcgccgatcgatacgatggccgtcttctccgacctccacaccgccgacggcctcaagtccctcgaggctcacctcgccggcaaaacctatgtgtctggtgactccattactaaggatgacattaaggtcttcgccgcggtgccgtcgaagcctggcgctgagtttcctaatgccgcccgctggtacgagaccgtct

SEQ ID NO: 27401 - DNA, 250 bp, Zea mays
ggttctgatatgcttccacctagaataactgccaaaatattggagctggaaactgtaacacagtctgaggctataaggaagcgctatcggtttttgagtcacttctcattaacaactacatttcagttctgtgaaattgacttgagtgatgtagtgtctcctaactcactggctccattcttggatgaaatcaagaagcgtgagaaacaaagaaaacgagccgccaagaaggaagaaagtgagagagtga

SEQ ID NO: 27402 - DNA, 251 bp, Zea mays
gcggcagtgcgtagagaggatcgtcgaacagaacagcatgaagatggtcatcgttctcgtcgtgtgcctggctctgtcagctgccagcgcctctgcaatgcagatgccctgcccctgcgcggggctgcagggcttgtacggcgctggcgccgcctgacgacgatgatgggcgccggcgggctgtacccctacgcggagtacctgaggcagccgcagtgcagcccgctggcggcggcgccctactacgccgg

SEQ ID NO: 27403 - DNA, 246 bp, Zea mays
agtcgcacatatctactatactatactctaggaagcaaggacaccaccgccatggcagccaagatgcttgcattgttcgctctcctagctctttgtgcaagcgccactagtgcgacccatattccagggcacttgccaccagtcatgccattgggtaccatgaacccatgcatgcagtactgcatgatgcaacaggggcttgccagcttgatggcgtgtccgtccctgatgctgcagcaactgttg

SEQ ID NO: 27404 - DNA, 250 bp, Zea mays
caaaatgatatctggaaaaccattgtatgttgcatttgcacagcgcaaagaagatagaaaagcgatgttgcaggcacagttttctcagatgcgccctgctgtaccaatgacacccactctagccccacgccttccaatgtactctccgatggctcctcagcaactcttctatggacaagcgccaccagctatgatgccccctcagccaggatttgctttccagcaacagcttgttccaggcatgaggcct

SEQ ID NO: 27405 - DNA, 248 bp, Zea mays
caacatagaaagcacaatagtgtaccaacaatggcagccaaaatattttgcctccttatgctccttggtctttctgcaagtgctgctacggcgaccattttcccgcaatgctcgcaagctcctatagcttcccttcttcccccgtacctctcaccagcggtgtcttcggtatgtgaaaacccaattcttcaaccctacaggatccaacaggcaatcacagctggcatcttacctttatcacccctgtt

SEQ ID NO: 27406 - DNA, 248 bp, Zea mays
agccttttctccaatcacgtttgatacaaccaagtagctgccaggtattgcagcaacaatgttgtcatgatcttaggcagattgagccacaatacattcaccaagcaatctacaacatggttcaatccataatccaggaggagcaacaacaacaaccatgtgagttatgtggatctcaacaagctactcaaagtgcggtggcaatcttgacagcagcacaatacctaccatcaatgtgcggcttgtac

SEQ ID NO: 27407 - DNA, 246 bp, Zea mays
agcaattagctcatcgactccagattggagaactcgacaccatgaaggtgctgatcgttgcccttgctctcctggcgctcgctgcgagagcgcctccagtacaagcggcggctgtggctgccagacaccaccgtttcatctaccgcctccgttctatatgccgcctccgttctagcttccgccgcagcagcagccgcagccatggcaataccccactcaaccaccgcagctaagcccgtgccagca

SEQ ID NO: 27408 - DNA, 244 bp, Zea mays
aactgcaaagagctagcagcacagcctgatgtcgatggttttcctgtcggtggagcttctttgaagcctgagttcatcgacatcatcaacgcggccaccgtgaagtccgcttaagatgctacgctgaagacgaacatactttttttttgctcaactgtgctatgtaagctagtagcttttgcgcaggagcagagactgttttgcctgcccccaacttctagcttgagcttgctaataatgttta

SEQ ID NO: 27409 - DNA, 247 bp, Zea mays
aactacaacaacttgtgctaggaaaccttgctgcctactctcagcaacagcagtttcttccattcaaccaactggctgcattgaactctgctgcttatttgcaacaacaactaccattcagtcagctagctgctgcctacccccagcaatttcttccattcaaccaactggcagcattgaactctgctgcttatttacaacagcaacagctaccaccattcagccagctagctgatgtgagccctgt

SEQ ID NO: 27410 - DNA, 247 bp, Zea mays
aacagtttctgccaacgctcagtcaactagccatggtgaaccctgccgcctacgtacaacaacaacaactgctttcatctagcccgctcgctgtgggcaatgcacctacatacctgcaacaacaattgttgcaacagattgtaccagctctgactcaactagctgtggcaaaccctgttgcctacttgcaacagctgcttccattcaaccaactgactctgtcgaactctgctgcgtacctacaaca

SEQ ID NO: 27411 - DNA, 245 bp, Zea mays
ctgggctggacaagaagaaagcttctgtcttcatcaagaccactgctgatggttactcgctgtgcgccaaggagatgaccaagctctctggtatctcggacatcatcccagagatggagatctgtgacttcgacttcgagccctgtggctactccatgaatgctgttcatggccctgctttgtcgaccattcatgtgaccccagaggacggcttcagctatgcaagctacgaggtcatgggcttt

SEQ ID NO: 27412 - DNA, 248 bp, Zea mays
cagaccattagctttatctactccagagcgcagaagaacccgatcgacaccatgagggtgttgctcgttgccctcgctctcctggctctcgctgcgagcgccacctccacgcatacaagcggcggctgcggctgccagccaccgccgccggttcatctaccgccgccggtgcatctgccacctccggttcacctgccacctccggtgcatctcccaccgccggtccacctgccgccgccggtccacct

SEQ ID NO: 27413 - DNA, 249 bp, Zea mays
actactatactatactctaggaagcaaggacaccaccgccatggcagccaagatgcttgcattgttcgctctcctagctctttgtgcaagcgccactagtgcgacccatattccagggcacttgccaccagtcatgccattgggtaccatgaacccatgcatgcagtactgcatgatgcaacaggggcttgccagcttgatggcgtgtccgtccctgatgctgcagcaactgttggccttaccgcttca

SEQ ID NO: 27414 - DNA, 247 bp, Zea mays
agaaagtggaatccagtagcaacaacagagcaacaatggcgaccaagatattttccctccttatgctccttgctctttctgcatgtgttgctaacgcgacaattttccctcaatgctcacaagctcctatagcttcccttcttcccccataccttccatcaatgatagcttcagtatgtgaaaacccagctcttcagccctataggctccaacaagcaatcgcagcaagcaacatacctttatcacc

SEQ ID NO: 27415 - DNA, 243 bp, Zea mays
aacaacttgtgctagcaaaccttgctgcctactctcagcaacagcagtttcttccattcaaccaactagctgcattgaactctgcttcttatttgcaacaacaacaactaccattcagccagctatctgctgcctacccccagcaatttcttccattcaaccaactgacagcattgaactctcctgcttatttacagcagcaacaactactaccattcagccagctagctggtgtgagccctg

SEQ ID NO: 27416 - DNA, 242 bp, Zea mays
aagacttatgagctggcatgcttctgatgagcacaaaaacgatgggaagcttcgacatccagccgatgggaagcagtggcaagatttcaatgacaaccaccgagactttgccgatgaaccgagaaatgttaggttcgcactgagtactgatggaatgaacccatttgctgagaggagcagcaagcatagcacatggccggtgatcctcaccatatacaaccttcctccatggttgatgcaga

SEQ ID NO: 27417 - DNA, 244 bp, Zea mays
atgaaggccaacaacaacatcaccaacaatcacaaggccatgtgcaacaacacgaacagagccatgagcaacaccaaggacagagccatgagcaacaacatcaacaacaattccagggtcatgacaagcagcaacaaccacaacagcctcagcaatatcagcagggccaggaaaaatcacaacagcaacaatgtcattgccaggagcagcaacagactacaaggtgcagctataactactatag

SEQ ID NO: 27418 - DNA, 242 bp, Zea mays
tgtgaattgatccagcaggaacttgatcatgtcgttgaagagcttaaaaaatttgcagttgttcatctgctgcaacgtagatcgatcatctcactgatagggaatgtacagcgatcgtcattgattcttgaaaaggcattcaacgttctgcgaagaaatggtgttaatgtccagatgatctcacaaggggcgtccaaggtgaacatatccttggtagtcaatgacagtgaggcaaaacagtg

SEQ ID NO: 27419 - DNA, 242 bp, Zea mays
caaccaattgcccaattacaacaacaatccttggcacatctaaccatacaaaccatcgcaacgcagcagcaacaagcactgagccacctagccgtggtgaaccctatcgcctacttgcaacaacagctgcttgcatccaacccacttgctttggcaaacgtagctgcataccaacaacaacaacagttgcaacagtttctaccagcgctcagtcaactagccatggtgaaccctatcgccta

SEQ ID NO: 27420 - DNA, 214 bp, Zea mays
aatctaaccatacaaaccatcgcaacgcaacagcagcaacaattgctgccatacaaccagttctctttgatgaatcctgtcttgtcgaggcagcaacccatcgttggaggtgccatcttttagattacatatgagatgtactcgataatggtgccctcataccgacgtgtgtttcctagaaataatcaatatattgattgagatttatctcgat

SEQ ID NO: 27421 - DNA, 240 bp, Zea mays
atgaaagagaagctatttatggtgcattggacaagtggagtgctttcgaacctgaatttcctattatagcagcagcaaaagctttggggatgttgaaaaggcgacgacaatggttaagaataatccaggtaaccaagtggttgatgagcaaaggacaggtgctgacatggacaacatatgatacacttctgctcgcacttcttatggataaacgggtagacgaagctgagtcagtttgga

SEQ ID NO: 27422 - DNA, 237 bp, Zea mays
cggcttggtcctccagtccatcctgcagcagcagccgcaaagcgccaggtcgcggggctgttggcggcgcagatagcgcacaactgacggcgatgtgcggcctgcagcagccgactccatgcccctacgctgctgccggcggtgtcccccactgaagaaactatgtgctgtagtatagccgctggctagctagctagttgagtcatttagcggcgatgattgagtaataatgtgtca

SEQ ID NO: 27423 - DNA, 240 bp, Zea mays
gagcaacaatggcgaccaagatattttccctccttatgctccttgctctttctgcatgtgttgctaacgcgacaattttccctcaatgctcacaagctcctatagcttccctcttcccccataccttccatcaatgatagcttcagtatgtgaaaacccagctcttcagccctataggctccaacaagcaatcgcagcaagcaacatacctttatcacccttgttgtttcaacaatcgcc

SEQ ID NO: 27424 - DNA, 241 bp, Zea mays
ggagtatctactgagtgttcctcaagacactccctactcggagttcaaccataggttccaagagcttggcttggagaagggttggggtgacactgcgaacgtgtaactcgacacactccacttgcttctcgaccttctggaggcccctgatcctgccaacttggagaagttccttggaactataccaatgatgttcaacgttgttatcctgtctcctcatggctacttcgcccagtccaat

SEQ ID NO: 27425 - DNA, 240 bp, Zea mays
ggatgccacccgtattggttccgctggtgttgtgaggaggcaggccgtggatatctcacccctgaggagggtgaaccaggccatctacctcctcaccactggtgccagggagagtgctttccggaacatcaaaaccattgccgagtgccttgcagatgagctgatcaacgctgccaagggctcatccaacagttacgccatcaagaagaaggacgagattgagcgtgttgccaaggccaa

SEQ ID NO: 27426 - DNA, 256 bp, Zea mays
cagcaaagcggcagtgcgtagagaggatcgtcgaacagaacagcatgaagatggtcatcgttctcgtcgtgtgcctggctctgtcagctgccagcgcctctgcaatgcagatgccctgcccctgcgcggggctgcagggcttgtacggcgctggcgccggcctgacgacgatgatgggcgccggcgggctgtacccctacgcggagtacctgaggcagccgcagtgcagcccgctggcggcggcgccctactacgc

SEQ ID NO: 27427 - DNA, 255 bp, Zea mays
agaaattgtaagggacatcaaggagaagctggcatatatagctcttgactatgagcaagagttggaaactgccaagaacagctcctcagttgaaaagagctatgagctacctgatggccaagtaatcaccattggtgcagagagattcagatgccatgaggtcctcttccagccatccatgattggtatggaggctgccggaatccatgagacaacatacaattcaatcatgaagtgcgacgtggatatcaggaa

SEQ ID NO: 27428 - DNA, 261 bp, Zea mays
gtggccgtggccgtctgccaaggcgaggtcgagcggcagaggctcagggacctgcagtgctggcaggaggtccaggagagcccgctcgacgcgtgccgccaggtcctcgaccggcagctaaccggcggcggcgtcggcggcccgttccggtggggcaccgggctccggatacggtgctgccagcagctccaggacgtgagccgcgagtgccgctgcgccgccatccggagcatggtcaggggctacgaggaggccatgccg

SEQ ID NO: 27429 - DNA, 261 bp, Zea mays
gaagctcgtctcggccaccaaggagggcctgaagctcgacgagagtgaggatgagaagaagcggaaggaggagctcaaggagaagttcgagggcctgtgcaaggtgatcaaggaggtgctgggcgacaaggtggagaaggttgtggtctctgaccgcgtggtggactccccctgctgcctggtgacgggcgagtacggctggacggccaacatggagaggatcatgaaggcacaggcgctcagggactcgagcatgtctgg

SEQ ID NO: 27430 - DNA, 261 bp, Zea mays
cgagcaggaggcggacaaggtaagcagcaatcgcaggaaccctagcgccgccgcacccgcaggaatgggtatcgacctcgtcgccggtgggaggaataagaagaccaagcgcactgcgcccaagtctgacgatgtctacctcaagctcctcgtcaagctctaccgtttcttggtcaggaggaccaagagcaatttcaacgctgtcattctcaagaggcttttcatgagtaaaaccaaccgaccaccaatctccatgcgccg

SEQ ID NO: 27431 - DNA, 261 bp, Zea mays
aagcaacatagaaagtggaatccagtagcaacaacagagcaacaatggcgaccaagatattttccctccttatgctccttgctctttctgcatgtgttgctaacgcgacaattttccctcaatgctcacaagctcctatagcttcccttcttcccccataccttccatcaatgatagcttcagtatgtgaaaacccagctcttcagccctataggctccaacaagcaatcgcagcaagcaacatacctttatcacccttgt

SEQ ID NO: 27432 - DNA, 260 bp, Zea mays
ccaagatattatccctctttgcgcttcttgccctttttgtgagcgcaacaaatgcgttcattattccacaatgctcacttgctcctagtgccattattccacagttcctccctccagttacttcaatgggcttcgaacacccagctgtgcaagcctacaggctacaacaagcgcttgcggcgagcgtcttacaacaaccaattgcccaattacaacaacaatccttggcacatctaaccatacaaaccatcgcaacgcaa

SEQ ID NO: 27433 - DNA, 259 bp, Zea mays
gctgtggcaaaccctgttgcctacttgcaacagctgcttccattcaaccaactgactctgtcgaactctgctgcgtacctacaacagcgacaacagttacttaatccattggtagtggctaacccattggtcgccgccttcctacagcagcaacaattgctgccatacaaccagttctctttgatgaatcctgtcttgtcgaggcagcaacccatcgttggaggtgccatcttttagattacatatgagatgtactcga

SEQ ID NO: 27434 - DNA, 258 bp, Zea mays
caattagctcatcgactccagattggagaactcgacaccatgaaggtgctgatcgttgcccttgctctcctggcgctcgctgcgagcgccgcctccagtacaagcggcggctgtggctgccagacaccaccgtttcatctaccgcctccgttctatatgccgcctccgttctatctgccgccgcagcagcagccgcagccatggcaaaaccccactcaaccaccgcagctaagcccgtgccagcagttcggatcctgc

SEQ ID NO: 27435 - DNA, 258 bp, Zea mays
cttgtcgggagccctgatgccttcttactgcaacaacagcttctgccattccatctgcaagctgtggaaaacattgcttctttcttgcgacaacaacaattgttgccattttacccacaggttgtgggaaacattaatgccttcttgcaacagcaacaattgctgccattctacccacataatgtggcaaacattgttgccttcttacaacaacaacaattgctgccatttagccaacatgctttgacgaatcctacc

SEQ ID NO: 27436 - DNA, 242 bp, Zea mays
caaaaataaaaccaaaaaaaaaggaatgcaacacgaggacttcccaggaggtcacccatcctagtactactctcgcccaagcacgcttaacttcagagttctgatgggattcggtgctttagtgctggtatgatcgcatccgtcatatcctgcgtcctccttcctcttatgcccacacctccgtgctcggctcgcccacggcactggacatccttcctccgcacaaagtacatttctacaaa

SEQ ID NO: 27437 - DNA, 262 bp, Zea mays
gcaattagctcatcgactccagattggagaactcgacaccatgaaggtgctgatcgttgcccttgctctcctggcgctcgctgcgagcgccgcctccagtacaagcggcggctgtggctgccagacaccaccgtttcatctaccgcctccgttctatatgccgcctccgttctatctgccgccgcagcagcagccgcagccatggcaataccccactcaaccaccgcagctaagcccgtgccagcagttcggatcctgcggc

SEQ ID NO: 27438 - DNA, 255 bp, Zea mays
acacaccaagcgaacacattagcaacaacctaacaacaatggctaccaagatattatccctccttgcgcttcttgcgctttttgcgagcgcaacaaatgcgttcattattccacaatgctcacttgctccaagttccattattacacagttcctcccaccagttacttcaatgggcttcgaacacccagctgtgcaagcctataggctacaacaagcacttgcggcgagcgtcttacaacaaccaatttcccagt

SEQ ID NO: 27439 - DNA, 256 bp, Zea mays
agagagcacaatagtgtaccaacaatggcagccaaaatattttgcctccttatgctccttggtctttctgcaagtgctgctacggcgaccattttcccgcaatgctcgcaagctcctatagcttcccttcttcccccgtacctctcaccagcggtgtcttcggtatgtgaaaacccaattcttcaaccctacaggatccaacaggcaatcacagctggcatcttacctttatcacccttgttcctccaacaatcat

SEQ ID NO: 27440 - DNA, 257 bp, Zea mays
cacatctaacaatacaagccatcacaacgcaacagcaacaacagttcctaccagcactgagccacctagccatggtgaaccctgccgcctacttgcaagagcagctgcttgcatccaacccacttgctctggcgaacgtagttgcaaaccagcaacaacaacagctacaacagtttctgccaacgctcagtcaactagccatggtgaaccctgccgcctacgtacaacaacaacaactgctttcatctagcccgctc

SEQ ID NO: 27441 - DNA, 252 bp, Zea mays
atttgtccaacttgctttgacagcccgagcggcctcctaccaaacaacacatcattggtggtgccctcttttagattgcttattagttgtaattcaataataaagttttttggatgatgtatgtggccaaccagaaataagaagttacatttccagattttaatgtgaaaaaaaaaaaaaaaaaaaaaaaaaaaaaaaaaaaaaaaaaaaaaaaaaaaaaaaaaaaaaaacagtaaaattaaaaaaggaccg

SEQ ID NO: 27442 - DNA, 257 bp, Zea mays
cccgtacctctcaccagcggtgtcttcggtatgtgaaaacccaattcttcaaccctacaggatccaacaggcaatcgcagctggcatcttacctttatcacccttgttcctccaacaatcatcagccctattacagcagttacctttggtgcatttattggcacaaaacatcagggcacaacaactacaacaacttgtgctagcaaaccttgctgcctactctcagcaacagcagtttcttccattcaaccaactag

SEQ ID NO: 27443 - DNA, 251 bp, Zea mays
gcggtctgccaacgatcgcgacctgccatggtggccctgctgagatcatcgtggacggggtatctggcctgcacattgacccttaccacagcgacaaggccgcggatatcctggtcaacttctttgacaaatgcaaggcagatccgagctactgggacaagatctcacagggcggcctgcagagaatttatgagaagtacacctggaagctctactccgagaggctgatgaccctgaccggcgtgtacggg

SEQ ID NO: 27444 - DNA, 254 bp, Zea mays
acaagatattagccctccttgcgcttcttgccctttttgtgagcgcaacaaatgcgttcattattccacaatgctcacttgctcctagtgccattataccacagttcctccgaccagttacttcaatgggcttcgaacacctagctgtgcaagcctacaagctacaacaagcgcttgcggcgagcgtcttacaacaaccaattaaccaattgcaacaacaatccttggcacatctaaccatacaaaccatcgca

SEQ ID NO: 27445 - DNA, 254 bp, Zea mays
catatctactatactatactctaggaagcaaggacaccaccgccatggcagccaagatgcttgcattgttcgctctcctagctctttgtgcaagcgccactagtgcgacccatattccagggcacttgccaccagtcatgccattgggtaccatgaacccatgcatgcagtactgcatgatgcaacaggggcttgccagcttgatggcgtgtccgtccctgatgctgcagcaactgttggccttaccgcttcag

SEQ ID NO: 27446 - DNA, 253 bp, Zea mays
gcaattagctcatcgactccagattggagaactcgacaccatgaaggtgctgatcgttgcccttgctctcctggcgctcgctgcgagcgccgcctccagtacaagcggcggttgtggctgccagacaccaccgtttcatctaccgcctccgttctatatgccgcctccgttctatctgccgccgcagcagcagccgcagccatggcaataaaccactcaaccaccgcagctaagcccgtgccagcagttcgga

SEQ ID NO: 27447 - DNA, 253 bp, Zea mays
tgctgcttatttgcagcaacaactattaccattcagccagctagctactgcctactctcatcaacaacaacttcttccatttaaccaattggccgcactgaacctcgctgcttatttgcagcagcaaatattactaccatttagccagctagctgcagcaagccgtgcttccttcttgacacagcaacagttgctgcctttctaccagcagtttgcggctaaccccgcaaccctcttacaactacaacaattg

SEQ ID NO: 27448 - DNA, 255 bp, Zea mays
gttgctcgtagccctcgctctcctggctctcgctgcgagcaccacctccacgcatacaagcagcggctgcagatgccagcaaccgccgccggttcatctaccgccgccggtgcatctgccacctccggttcacctgccacctccggtgcatctcccaccgccggtccacctgcagccgccggtccacctgccacagccggaccatgtgccgccgccggttcatctgccgccgccaccatgccactaccctactca

SEQ ID NO: 27449 - DNA, 256 bp, Zea mays
agattaccaaaagttcattcaagctcatagagaaacagatgctgatataacagttgcagccctgccaatggatgaacaacgtgcaactgcatttggtcttatgaaaattgatgatgaagggaggatagttgagtttgcagaaaaaccaaaaggagagaagctgagatcaatgatggtagacaccactatattgagccttgatcctgaaagggccaaagaactgccttatattgctagtatgggaatctatgttttt

SEQ ID NO: 27450 - DNA, 141 bp, Zea mays
aaaacccagcagtgttctaccaacaacccatcattggcggtgccctcttttagatttcttatgagttatagttcaataataaagttttttatctgatgtttgtagcttcccagaaataagaaagtacatttctagattctt

SEQ ID NO: 27451 - DNA, 249 bp, Zea mays
agttgctaacgcgacaattttccctcaatgctcacaagctcctatagcttcccttcttcccccataccttccatcaatgatagcttcagtatgtgaaaacccagctcttcagccctataggctccaacaagcaatcgcagcaagcaacatacctttatcacccttgttgtttcaacaatcgccagccctatctttggtgcagtcattggtacaaaccatcagggcacagcagctgcagcaactcgtgct

SEQ ID NO: 27452 - DNA, 250 bp, Zea mays
aagggagagaagcagcccaacatcactattggcattctggtctccgttgtcgtcgtgttcgttaccgttctcttcaagatcctgtttggaggcaagaagccggtggcacctgtgaaacctgcagctgaggcgaagaagcccaaggccacagtgaccgacggtgctggaagcagtggcgacaaggatgagaaagaggacgaaaaggaggagacagcaggcccacgtcggaggacccgaagggagacataga

SEQ ID NO: 27453 - DNA, 242 bp, Zea mays
ggatcgtcgaacagaacagcatgaagatggtcatcgttctcgtcgtgtgcctggctctgtcagcagccagcgcctctgcaatgcagatgccctgcccctgcgcggggctgcagggcttgtacggcgctggcgccggcctgacgacgatgatgggcgccggcgggctgtacccctacgcggagtacctgaagcagccgcagtgcagcccgctggcggcggcgccctactacgccgggtgtggg

SEQ ID NO: 27454 - DNA, 247 bp, Zea mays
atcctaccagcactgagccacctagccatggtgaaccctgccgcctacttgcaacagcagttgcttgcatcaaacccacttgctctggcaaacgtagttgcaaaccagccacaacaacagctgcaacagtttctgccagcgctcagtcaactagccatggtgaaccctgccgcctacctacaacagcaacaactgctttcatctagcccgctcgctgtggccaatgcacctacatacctgcaacaac

SEQ ID NO: 27455 - DNA, 249 bp, Zea mays
gaccaactagcaacatagaaagcacaatagtgtaccaacaatggcagccaaaatattttgcctccttatgctccttggtctttctgcaagtgctgctacggcgaccattttcccgcaatgctcgcaagctcctatagcttcccttcttcccccgtacctctcaccagcggtgtcttcggtatgtgaaaacccaattcttcaaccctacaggatccaacaggcaatcacagctggcatcttacctttatc

SEQ ID NO: 27456 - DNA, 249 bp, Zea mays
aaagctctggataaccaaccaggtgaaggaatcttggtcggatgtgcctctacatggtaacaacattgagtggtttgtgaaccaaggggatatgattaaaaaggcggtcagcaattttccatctcaatatcaagataactacaggagaagtgtaggtgaaaataatctgattcgttgcagcagtgagatattttacgtacctcaacggtacacccgtgatttctcagatcttgtaaaagttattgggag

SEQ ID NO: 27457 - DNA, 174 bp, Zea mays
ataataatgtaatggagccgctgactagctacctatagggctatagctagttcactcgtttagcggcgatgagtaacggagtgtcacccatcaccatgggtggcagtgtgagcaatgacctgaatgaaccattgaaatggaaaggaataatatatagggaaaaaggatgtttgg

SEQ ID NO: 27458 - DNA, 250 bp, Zea mays
cttgctcctagttccattattccacagttcctcccaccagttacatcaatggccttcgaacacccagctgtgcaagcctataggctacaacaagcgattgcggcgagcgtcttacaacaaccaattgcccaattgcaacaacaatccttggcacatctaacaatacaaaccatcgcaacgcaacagcaacaacagttcctaccagcactgagccacctagccatggtgaaccctgtcgcctacttgcaac

SEQ ID NO: 27459 - DNA, 239 bp, Zea mays
attagctcatcgactccagattggagaactcgacaccatgaaggtgctgatcgttgcccttgctctcctggcgctcgctgcgagcggcgcctccagtacaagcggcggctgtggctgccagacaccaccgtttcatctaccgcctccgttctatatgccgcttccgttctatctgcagccgcagcagcagccgcagccatggcaatacacgattcaaccaccgcagctaagcccgtgcc

SEQ ID NO: 27460 - DNA, 245 bp, Zea mays
aacatagaaagcacaatagtgtaccaacaatggcagccaaaatattttgcctccttatgctccttggtctttctgcaagtgctgctacggcgaccattttcccgcaatgctcgcaagctcctatagcttcccttcttcccccgtacctctcaccagcggtgtcttcggtatgtgaaaacccaattcttcaaccctacaggatccaacaggcaatcacagctggcatcttacctttatcacccttg

SEQ ID NO: 27461 - DNA, 245 bp, Zea mays
accgcagctaagcccgtgccagcagttcggatcctgcggcgtcggcagcgtcggcagcccgttcctgggccagtgcgtcgagttcctgaggcaccagtgcagcccggcggcgacgccctacggctcgccacagtgccaggcgctgcagcagcagtgctgccaccagatcaggcaggtggagccgctgcaccggtaccaggcgacatacggtgtggtcctgcagtccttcctgcagcagcagccgc

SEQ ID NO: 27462 - DNA, 247 bp, Zea mays
aaccaactagcaacatagaaagcacaatagtgtaccaacaatagcagccaaaatattttgcttccttatgctccttggtctttctgcaagtgctgctaccgcaaccattttcccacaatgctcacaagctcctatagcttcctttcttcccccatacctctcaccagcggtgtcttcagtatgtgaaaacccaattcttcaaccctacaggatccaacaggcaatcgcagcaggcatcttaccttta

SEQ ID NO: 27463 - DNA, 243 bp, Zea mays
tagcaacatagaaagcacaatagtgtaccaacaatagcagccaaaatattttgcctccttatgctccttggtctttctgcaagtgctgctacggcgaccattttcccacaatgctcacaagctcctatagcttcccttcttcccccgtacctctcaccagcggtgtcttcggtatgtgaaaacccaattcttcaaccctataggatccaacaggcaatcgcagctggcatcttacctttatca

SEQ ID NO: 27464 - DNA, 249 bp, Zea mays
ctccagtccatcctgcagcagcagccgcaaagcggccaggtcgcagggctgttggcggcgcagatagcgcagcaactgacggcgatgtgcggccagcagcagccgactccatgcccctacgctgctgccggcggtgtcccccactgaagaaactatgtgctgtagtatagccgctggctagctagctagttgagtcatttagcggcgatgattgagtaataatgtgtcacgcatcaccatgggtggcag

SEQ ID NO: 27465 - DNA, 250 bp, Zea mays; identical to SEQ ID NO: 25478

SEQ ID NO: 27466 - DNA, 187 bp, Zea mays
cttacaactgcaacaattgctgccattcaaccaacttgctatgacaaacccaacagtgttctaccaacaacccatcattggtggtgccctcttttagattgcttatgagttatagttcaataatgaagttttttggatgatgtttgtggcgtcccagaaataagaaagtacatttctagattcttat

SEQ ID NO: 27467 - DNA, 231 bp, Zea mays
caattgcccaattgcaacaacaatccttggcacatctaaccctacaaaccattgcaacgcaacaacaacaacaacagtttctgccatcactgagccacctagccgtggtgaaccctgtcacctacttgcaacagcagctgcttgcatccaacccacttgctctggcgaacgtagctgcataccagcaacaacaacagttgcaacagtttatgccagtgctcagtcaactag

SEQ ID NO: 27468 - DNA, 261 bp, Zea mays
ggcaaaccctgctgcctacttacaacagttgcttccattcaaccaactggctgtgtcaaactctgctgcgtacctacaacagcgacaacagttacttaatccattggcagtggctaacccattggtcgctaccttcctgcagcagcaacaacaattgctgccatacaaccagttctctttgatgaaccctgccttgcagcaacccatcgttggaggtgccatcttttagattacatatgagatgtactcgacaatggtgcc

SEQ ID NO: 27469 - DNA, 190 bp, Zea mays
gcagcaactgttggccttaccgcttcagacgatgccagtgatgatgccacagatgatgacgcctaacatgatgtcaccattgatgatgccgagcatgatgtcaccaatggtcttgccgagcatgatgtcgcaaatgatgatgccacaatgtcactgcgacgccgtctcgcagattatgctgcaacagcag

SEQ ID NO: 27470 - DNA, 261 bp, Zea mays
gtttctgaggcatcagtgcagcccgacggcgacgccctactgctcgcctcagtgccagtcgttgcggcagagtgttgccagcagctcaggcaggtggagccgcagcaccggtaccaggcgatcttcggcttggtcctccagtccatcctgcagcagcagccgcaaagcggccaggtcgcggggctgttggcggcgcagatagcgcacaactgacggcgatgtgcggcctgcagcagccgactccatgcccctacgctgctg

SEQ ID NO: 27471 - DNA, 264 bp, Zea mays
  unsure (1)..(264): unsure at all n locations
cagaaacacaccaagcgaagcnactagcaacgacctaacaacaatggctaccaagatattagccctccttgcgcttcttgccctttttgtgagcgcaacaaatgcgttcattattccacaatgctcacttgctcctagtgccattattccacagttcctcccaccagttacttcaatgggcttcgaacacctagctgtgcaagccaacatgcaacaacaagcggcggctgtggctgccagacaccaccgtttcatctaccgcct

SEQ ID NO: 27472 - DNA, 190 bp, Zea mays
gatcgagtccatgacgtgcggtctgccaacgatcgcgacctgccatggtggccctgctgagatcatcgtggacggggtatctggcctgcacattgacccttaccacagcgacaaggccgcggatatcctggtcaacttctttgacaaatgcaaggcagatccgagctactgggacaagatctcagagggc

SEQ ID NO: 27473 - DNA, 256 bp, Zea mays
cagcctagcaattagctcatcgactccagattggagaactcgacaccatgaaggtgctgatcgttgcccttgctctcctggcgctcgctgcgagcgcgcctccagtacaagcggcggctgtggctgccagacaccaccgtttcatctaccgcctccgttctatatgccgcctccgttctatctgccgccgcagcagcagccgcagccatggcaataccgcgctcaaccaccgcagctaagcccgtgccagcagttc

SEQ ID NO: 27474 - DNA, 262 bp, Zea mays
aacaactacaacaacttgtgctagcaaaccttgctgcctactctcagcaacagcagtttcttccattcaaccaactagctgcattgaactctgcttcttatttgcaacaacaacaactaccattcagccagctatctgctgcctacccccagcaatttcttccattcaaccaactgacagcattgaactctcctgcttatttacagcagcaacaactactaccattcagccagctagctggtgtgagccctgctaccttctt

SEQ ID NO: 27475 - DNA, 185 bp, Zea mays
gcaacatagaaagcacaatagtgtaccaacaatggcagccaaaatattttgcctccttatgctccttggtctttctgcaagtgctgctacggcgaccattttcccgcaatgctcgcaagctcctatagcttcccttcttcccccgtacctctcaccagcggtgtcttcggtatgtgaaaacccaa

SEQ ID NO: 27476 - DNA, 188 bp, Zea mays
gagatactgactatcatagctatgattcaaacagggaatatattctacaggccacgagaaaaacaagctcaagctgatcaaaagagggctaaattttttcagccagagggagaccaccttactctacttgctgtatatgaggcctggaaggctaagaacttttcagggccctggtgttttgagaactt

SEQ ID NO: 27477 - DNA, 189 bp, Zea mays
cattagcaacaacctaacaacaatggctaccaagatattatccctccttgcgcttcttgcgctttttgcgagcgcaacaaatgcgttcattattccacaatgctcacttgctccaagttccattattacacagttcctcccaccagttacttcaatgggcttcgaacacccagctgtgcaagcactata

SEQ ID NO: 27478 - DNA, 258 bp, Zea mays
agcatattgtgtcaagggtggtccagaaaaagagctaaaagcaatgcagtacttggagagaagagagtgtgagtacgaccagaagatatccattgatttctacaaggaaggagatcccttgaaaccagctgtgacaggcgtcttagtgttcgtttccactccagatccaattggcaacaagtactatcttggccctgctcctttgcaggatatggcaaggcaaattgctacagccaatggccctactggctataatag

SEQ ID NO: 27479 - DNA, 188 bp, Zea mays
cagagcgcagaagaacccgatcgacaccatgagggtgttgctcgttgccctcgctctcctggctctcgctgcgagcgccacctccacgcatacaagctgcggctgcggctgccagccaccgccgccggttcatctaccgccgccggtgcatctgccacctccggttcacctgccacctccggtgcatc

SEQ ID NO: 27480 - DNA, 259 bp, Zea mays
ggcaatcgcagcaggcatcttacctttatcacccttgttcctccaacaaccgtcagccctattacagcagttacctttggtgcatttgttggcacaaaacatcaaggcacaacaactacaacaacttgtgctaggaaaccttgctgcctactctcagcaacagcagtttcttccattcaaccaactggctgcattgaactctgctgcttatttgcaacaacaactaccattcagtcagctagctgctgcctacccccag

SEQ ID NO: 27481 - DNA, 257 bp, Zea mays
ctcccaccgccggtccacctgccgccgccggtccacctgccaccgccggtccatgtgccgccgccggttcatctgccgccgccaccatgccactaccctactcaaccgccccggcctcagcctcatccccagccacacccatgcccgtgccaacagccgcatccaagcccgtgccagctgcagggaacctgcggcgttggcagcaccccgatcctgggccagtgcgtcgagttcctgaggcatcagtgcagcccgac

SEQ ID NO: 27482 - DNA, 233 bp, Zea mays
cagctgccagcgcctctgcaatgcagatgccctgcccctgcgcggggctgcagggcttgtacggcgctggcgccggcctgacgacgatgatgggcgccggcgggctgtacccctacgcggagtacctgaggcagccgcagtgcagcccgctggcggcggcgccctactacgccgggtgtgggcagacgagcgccatgtacaagcggctccggcaacagtgctgccagcagcag

SEQ ID NO: 27483 - DNA, 253 bp, Zea mays
cacttgtgctagcaaaccttgctgcctactctcagcaacagcagtttcttccattcaaccaactagctgcattgaactctgcttcttatttgcaacaacaacaactaccattcagccagctatctgctgcctacccccagcaatttcttccattcaaccaactgacagcattgaactctcctgcttatttacagcagcaacaactactaccattcagccagctagctggtgtgagccctgctaccttcttgaa

SEQ ID NO: 27484 - DNA, 221 bp, Zea mays
cagtgcagcccgacggcgacgccctactgctcgcctcagtgccagtcgttgcggcacagtgttgccagcagctcaggcaggtggagccgcagcaccggtaccaggcgatcttcggcttggtcctccagtccatcctgcagcagcagccgcaaagcggccaggtcgcggggctgttggcggcgcagatagcgcacaactgacggcgatgtgcggcctgcagc

SEQ ID NO: 27485 - DNA, 252 bp, Zea mays
cagaaacacacctagcgaacgcactagcaacgacctaacaacaatggctaccaagatattatccctctttgcgcttcttgccctttttgtgagcgcaacaaatgcgttcattattccacaatgctcacttgctcctagtgccattattccacagttcctccctccagttacttcaatgggcttcgaacacccagctgtgcaagcctacaggctacaacaagcgcttgcggcgagcgtcttacaacaaccaat

SEQ ID NO: 27486 - DNA, 172 bp, Zea mays
caacaactacaacaacttgtgctagcaaaccttgctgcctactctcagcaacagcagtttcttccattcaaccaactagctgcattgaactctgcttcttatttgcaacaacaacaactaccattcagccagctacctgctgcctacccccagcaatttcttccattcaacc

SEQ ID NO: 27487 - DNA, 176 bp, Zea mays
tcagaccattagctttatctactccagagcgcagaagaacccgatcgacaccatgagggtgttgctcgttgccctcgctctcctggctctcgctgcgagcgccacctccacgcatacaagcggcggctgcggctgccagcaaccgccgccggttcatctaccgccgccggtgcatc

SEQ ID NO: 27488 - DNA, 246 bp, Zea mays
ccagctatctgctgcctacccccagcaatttcttccattcaaccaactgacagctttgaactctcctgcttatttacagcagcaacaactactaccattcagccagctagctggtgtgagccctgctaccttcttgacacaaccacaattgttgccgttctaccagcacgctgcgcctaacgctggcaccctcttacaactgcaacaattgctgccattcaaccaacttgctttgacaaacccaac

SEQ ID NO: 27489 - DNA, 251 bp, Zea mays
aagcacaatagtgtaccaacaatggcagccaaaatattttgcttccttatgctccttggtctttctgcaagtgttgctaccgcaaccattttcccacaatgctcacaagctcctatagcttcccttcttcccccatacctctcaccagcggtgtcttcaatgtgtgaaaacccaattgttcaaccctacaggatccaacaggcaatcgcaacaggcatcttaccattatcacccttgttcctccaacaacc

SEQ ID NO: 27490 - DNA, 253 bp, Zea mays
ctcatcgactccagattggagaactcgacaccatgaaggtgctgatcgttgcccttgctctcctggcgctcgctgcgagcgccgcctccagtacaagcggcggctgtggctgccagacaccaccgtttcatctaccgcctccgttctatatgccgcctccgttctatctgccgccgcagcagcagccgcagccaacgcaataccccactcaaccaccgcagctaagcccgtgccagcagttcggatcctgcgg

SEQ ID NO: 27491 - DNA, 238 bp, Zea mays
gccaaaagagcaatatcgaagaatactggggctcgtggtttaaggtccatattagaaagtatattgacagaagctatgtatgagattccagagacacgaactggaaaagataaaatagatgctgtggttgttgacgaggagtctgttggatctgtaaatcagcatggaattggagctaagattctttgcggagaaaaagctttggatgtctatctggccaatcaccaccataaaggat

SEQ ID NO: 27492 - DNA, 256 bp, Zea mays
caccaagcgaacacattagcaacaacctaacaacaatggctaccaagatattatccctccttgcgcttcttgcgctttttgcgagcgcaacaaatgcgttcattattccacaatgctcacttgctccaagttccattattacacagttcctcccaccagttacttcaatgggcttcgaacacccagctgtgcaagcctataggctacaacaagcaattgcggcgagcgtcttacaacaaccaatttcccagttgca

SEQ ID NO: 27493 - DNA, 321 bp, Zea mays
agcaatcgcagcaagcaacatacctttatcacccttgtttcaacaatcgccagccctatctttggtgcagtcattggtacaaaccatcagggcacagcagctgcagcaactcgtgctacctgtgatcaaccaagtagctctggcaaacctttctccctactctcagcaacaacaatttcttccattcaaccaactgtctacattgaaccgtgctgcttatttgcagcaacaactattaccattcagccagctagctactgcctactctcagcaacaacaacttcttcgatttaaccaattggccgcactgaaccccgctgc

SEQ ID NO: 27494 - DNA, 308 bp, Zea mays
gtcgcacatatctactatactatactctaggaagcaaggacaccaccgccatggcagccaagatgcttgcattgttcgctctcctagctctttgtgcaagcgccactagtgcgacccatattccagggcacttgccaccagtcatgccattgggtaccatgaacccatgcatgcagtactgcatgatgcaacaggggcttgccagcttgatggcgtgtccgtccctgatgctgcagcaactgttggccttaccgcttcagacgatgccagtgatgatgccacagatgatgacgcctaacatgatgtca

SEQ ID NO: 27495 - DNA, 282 bp, Zea mays
atgctgctagtatgtactgttataagctgccctagaagttgcagcaaacctttttatgaacctttgtatttccattacctgctttggatcaactatatctgtcatcctatatattactaaatttttacgtgtttttctaaaaaaaaaaaaaaaaaaaaaaaaaaaaaaaaaaaaaaaaaaaaaaaaaagaaaaaaaaaaaaaaaaaaaaaagaaaaaagaaaagtatagggtgaaaagaacaaagtgtcagaacaaggttaagtaagaaaagggggggcccc

SEQ ID NO: 27496 - DNA, 310 bp, Zea mays
cttgctttggcaaacgtagctgcataccaacaacaacaacagatgcaacagtttctgccagcgctcagtcaactagccatggtgaaccctatcgcctacctacaacagcaacaacttctttcatctagcccgctcgctatgggcaatgcacctacatacctgcaacaacagttgttgcaacaacagttgctgcaacaaattgtaccagctcttactcagctagctgtggcaaaccctgctgcctacttgcaacaactacttccattcaaccaactgactgtgtcgaactctgctgcgtacctacaacagc

SEQ ID NO: 27497 - DNA, 311 bp, Zea mays
cagctggcatcttacctttatcacccttgttcctccaacaatcatcagccctattacaacagttacctttggtgcatttattggcacaaaacatcagggcacaacaactacaacaacttgtgctagcaaaccttgctgcctactctcagcaacagcagtttcttccattcaaccaactaggttcattgaactctgcttcttatttgcaacaacaacaactaccattcagccagctacctgctgcctacccccagcaatttcttccattcaaccaactagcagcattgaactctcctgcttatttacagcag

SEQ ID NO: 27498 - DNA, 308 bp, Zea mays
cgacccgaactgcgccgtggtggccgcgcactccaaggccacctacgacgagcagtgggcggcccacaagagcagcagcaagctgatggtgatcgacttctcggcgtcctggtgcgggccctgccgcttcatcgagccggccttcaaggagctggcctcccgcttcaccgatgccatcttcatcaaggtcgacgtcgacgagctcgcggaggtcgcaaggacatggaaggtagaggcgatgccaacgttcgtgctggtcaaggatgggaaggaggtaggccgtgtgattggggctaagaaggacgagc

SEQ ID NO: 27499 - DNA, 310 bp, Zea mays
ctttgatgcaactaaggaggagtatgtagaagtacctagtgacagtggtattacattcaatgttgcacccaatatgaaggcgcttgaaattgctgagaaagccagggatgctctcctaagtggaaagtttgaccaggtacgtgtcaacctgccaaatggtgacatggttggtcacactggtgatattgaggccaccgtagttgcttgcaaggcagctgatgaagctgttaagattattttggatgctgtcgagcaagttggtggtatttaccttgttaccgccgatcatggcaatgctgaggatatggtg

SEQ ID NO: 27500 - DNA, 311 bp, Zea mays
gtcagctagctgctgcctacccccagcaatttcttccattcaaccaactggcagcattgaactctgctgcttatttacaacagcaacagctaccaccattcagccagctagctgatgtgagccctgttgccttcttgacacaacaacagttgttgccgttctacctgcacgctgcgcctaacgctggcaccctcttacaactgcaacaattgctgccattcaaccaacttgctttgacaaacccaacagcgttctaccaacaacccatcattggtggtgccctcttttagattgcttatgagttatacttc

SEQ ID NO: 27501 - DNA, 312 bp, Zea mays
cacaaaccattgcaacgcaacaacaacaacaacagtttctgccatcactgagccacctagccgtggtgaaccctgtcacctacttgcaacagcagctgcttgcatccaacccacttgctctggcgaacgtagctgcataccagcaacaacaacagctgcaacagtttatgccagtgctcagtcaactagccatggtgaaccctgccgtctacctacaactactttcatctagcccgctcgcggtgggcaatgcacctacgtacctacaacaacagttgctgcaacaaattgtaccagctctgactcagctag

SEQ ID NO: 27502 - DNA, 312 bp, Zea mays
gatagcttcagtatgtgaaaacccagctcttcagccctataggctccaacaagcaatcgcagcaagcaacatacctttatcacccttgttgtttcaacaatcgccagccctatctttggtgcagtcattggtacaaaccatcagggcacagcagctgcagcaactcgtgctacctgtgatcaaccaagtagctctggcaaacctttctccctactctcagcaacaacaatttcttccattcaaccaactgtctacactgaaccctgctgcttatttgcagcaacaactattaccattcagccagctagctac

SEQ ID NO: 27503 - DNA, 287 bp, Zea mays
caactactaccattcagccagctagctggtgtgagccctgctaccttcttgacacaaccacagttgttgccgttctaccagcacgttgcgcctaacgctggcaccctcttacaactgcaacaattgctgccattcaaccaacttgctttgacaaacccagcagtgttctaccaacaacccatcattggtggtgccctcttttagatttcttatgagttatagttcaataataaagttttttatctgatgtttgtggcttcccagaaataagaaagtacatttctaga

SEQ ID NO: 27504 - DNA, 317 bp, Zea mays
ccgtttcatctaccgcctccgttctatatgccgcctccgttctatctgccgccgcagcagcagccgcagccatggcaataccccactcaaccaccgcagctaagcccgtgccagcagttcggatcctgcggcgtcggcagcgtcggcagcccgttcctgggccagtgcgtcgagttcctgaggcaccagtgcagcccggcggcgacgccctacggctcgccacagtgccaggcgctgcagcagcagtgctgccaccagatcaggcaggtggagccgctgcaccggtaccaggcgacatacggtgtggtcctgcagtc

SEQ ID NO: 27505 - DNA, 196 bp, Zea mays
caaagcggcagtgcgtagagaggatcgtcgaacagaacagcatgaagatggtcatcgttctcgtcgtgtgcctggctctgtcagctgccagcgcctctgcaatgcagatgccctgcccctgcgcggggctgcagggcttgtacggcgctggcgccggcctgacgacgatgatgggcgccggcgggctgtaccccta

SEQ ID NO: 27506 - DNA, 270 bp, Zea mays
gcaaagcggcagtgcgtagagaggatcgtcgaacagaacagcatgaagatggtcatcgttctcgtcgtgtgcctggctctgtcagctgccagcgcctctgcaatgcagatgccctgcccctgcgcggggctgcagggcttgtacggcgctggcgccggcctgacgacgatgatgggcgccggcgggctgtacccctacgcggagtacctgatgcagccgcagtgcagcccgctggcggcggcgccctactacgccgggtgtgggcagacg

SEQ ID NO: 27507 - DNA, 252 bp, Zea mays
aaaacacaccaagcgaagcatctagcaacgacctaacaccaatggctaccaagatattagccctccttgcgcttcttgcccttttagtgagcgcaacaaatgcgttcattattccacagtgctcacttgctcctagtgccagtattccacagttcctcccaccagttacttcaatgggcttcgaacatccagccgtgcaagcctacaggctacaactagcgcttgcggcgagcgccttacaacaaccaattg

SEQ ID NO: 27508 - DNA, 305 bp, Zea mays
gtggtgctgggctacgcggcgggcgcggaggcgatcatgctgctgctgctgacgctgccggggctcgacggcctgcgccggggcatgatctccgtggtgcggacgcgctgaagcccatgatgtcggtggtgcccttctgcctcttcctgctcatggacatctactggaagtacgagacgcgccccacctgcgacgacgagcacgcctgcaccccctccgagcacctccgccaccagaagtccatcatgaagtcgcagcggaacgcgctcctcatcgccgccgcgctgctcctctactggatcctc

SEQ ID NO: 27509 - DNA, 304 bp, Zea mays
gatcggcgtgccgcgtgcgtgaggcgatcggagcatcccgtcccgaggaggaagacaaccggcgacgcggggggaacatggggaagacgccggtgcggatgaaggcggtcgtgtacgcgctgtcgcccttccagcagaaggtaatgccggggctgtggaaggacatcaccaccaagatccaccacaaggtcaccgagaactggatctccgccacgctcctcctcacccccgtcgtcggcacctaccaatacgccatgtggtacaaggagcaggagaagctttcccacagatattaaatgcgctg

SEQ ID NO: 27510 - DNA, 306 bp, Zea mays
ttcacgcacctcatgcccacccgctacaccctcgacgtcgactttaaggacgtcgcatcgggcgggcccgacgcgctctccacccgggacaagaaggtcgaagcctgcaaggccgccaaggcgcgcctcgaggagaggttcaagaccggcaagaacaggtggttctttaccaaactccgcttctagacgtcgggcgtccctcatagtgtctgatctagttgtcaatttcttgtacctgaaaccctttaaggtatctctgttttgctatttccatgaaggcttcgtgcttggtatggatcttggaga

SEQ ID NO: 27511 - DNA, 303 bp, Zea mays
caacaagcaacatagaaagtggaatacagtagcaacaatagagcaacaatggcggccaagatattttccatccttatgctccttgctctttctgcatgtgttgctaacgcgaccatttttcctcaatactcacaagctcctatagctgcccttcttcccccataccttccatcaatgaccgcttcagtttgtgaaaacccagcccttcaaccctacaggctccaacaagcaatcgcaacaagcaacttacctttatcacccctgttctttcaacaatcgccagccctatctttggtgcagtca

SEQ ID NO: 27512 - DNA, 302 bp, Zea mays
acccgatcgacaccatgagggtgttgctcgttgccctcgctctcctggctctcgctgcgagcgccacctccacgcatacaagcggcggctgcggctgccagccaccgccgccggttcatctaccgccgccggttcatctgccgccgccaccatgccactaccctactcaaccgccccggcctcagcctcatccccagccacacccatgcccgtgccaacagccgcatccaagcccgtgccagctgcagggaactgcggcgttggcagcaccccgatcctggtgcagtgcgtcgagtttctga

SEQ ID NO: 27513 - DNA, 306 bp, Zea mays
ggtggttattgatgcattccgcctcattaatcctcagaccatgatgcttggccaggagccacgtcagacaacatcaaatgttgggcacctaaataagccatctattcaggctcttatccatgggctgaatagacactactactcaattgcaatcaattaccggaaaaatgagcttgaggagaaaatgctgttgaacttgcacaaaaagaaatggaccgatgggctaattttgaagaggtttgacactcactcgaaaaccaacgagcagactgtccaggaaatgctacacctagccatcaagtacaa

SEQ ID NO: 27514 - DNA, 305 bp, Zea mays
caacaatggcagccaaaatattttgcctccttatgctccttggtctttctgcaagtgctgctacggcgaccattttcccgcaatgctcgcaagctcctatagcttcccttcttcccccgtacctctcaccagcggtgtcttcggtatgtgaaaacccaattcttcaaccctacaggatccaacaggcaatcgcagctggcatcttacctttatcacccttgttcctccaacaatcatcagccctattacaacagttacctttggtgcatttattggcacaaaacatcagggcacaacaactacaa

SEQ ID NO: 27515 - DNA, 314 bp, Zea mays
ataccaacaacaacaacagttgcaacagtttctaccagcgctcagtcaactagccatggtgaaccctatcgcctacctacaacagcaacaacttctttcatctagcccgctcgctatgggcaatgcacctacatacctgcaacaacagttgttgcaacaacagttgctgcaacaaattgtaccagctcttactcagctagctgtggcaaaccctgctgcctacttgcaacaactacttccattcaaccaactgactgtgtcgaactctgctgcgtacctacaacagcgacaacagttacttaatccactagcgg

SEQ ID NO: 27516 - DNA, 201 bp, Zea mays
tagcaattagctcatcgactccagattggagaactcgacaccatgaaggtgctgatcgttgcccttgctctcctggcgctcgctgcgagcggcgcctccagtacaagcggcggctgtggctgccagacaccaccgtttcatctaccgcctccgttctatatgccgcctccgttctatctgccgccgcagcagcagccgcag

SEQ ID NO: 27517 - DNA, 301 bp, Zea mays
caattagctcatcgactccagattggagaactcgacaccatgaaggtgctgatcgttgcccttgctctcctggcgctcgctgcgagtgcgcctccagtacaagcggcggctgtggctgccagacaccaccgtttcatctaccgcctccgttctatatgccgcctccgttctatctgccgccgcagcagcagccgcagccatggcaataccccactcaaccaccgcagctaagcccgtgccagcagttcggatcctgcggcgtcggcagcgtcggcagcccgttcctgggccagtgcgtcga

SEQ ID NO: 27518 - DNA, 300 bp, Zea mays
caaatgcgttcattattccacaatgctcacttgctcctagtgccattattccacagttcctccctccagttacttcaatgggcttcgaacacccagctgtgcaagcctacaggctacaacaagcgcttgcggcgagcgtcttacaacaaccaattgcccaattacaacaacaatccttggcacatctaaccatacaaaccatcgcaacgcaacagcaacaacaatttctaccagcactgagccaactagctgtggtgaaccctgtcgcctacttgcaacagcagttgcttgcatccaacc

SEQ ID NO: 27519 - DNA, 311 bp, Zea mays
cataagctcgagctcgagccgaacaaagaggttgccatcatctgtaaccatcagcgtagtgtctcgaaatcacatgagtcccagatgactagaatgaacgaaaagattgatgagttgaagtcccagatggaggagctgaaagcagacttgaacaaagcaaagaaagggaagcctctaggctatgattcagaggggaagccaaagaggaacttggctcctgaagcgattcaaaagaaggttgcaacacttgaaggcaagatagagaagatggagatggataagaggataaaagaggatctgaagacagttgc

SEQ ID NO: 27520 - DNA, 298 bp, Zea mays
ctcacttgctccgagtgccattattccacagttcctccctccagatacttcaatgggcttcgaacacccagctgtgcaagcctataggctacaacaagcgcttgcggcgagcgtcttagaacaaccaattgcccaattacaacaacaatccttagcacatctaaccatacaaaccatcgcaacgcagcagcaacaagcactgagccacctagccgtggtgaaccctatcgcctacttgcaacaacagctgcttgcatccaacccacttgctttggcaaacgtagctgcataccaacaa

SEQ ID NO: 27521 - DNA, 296 bp, Zea mays
attttgagcattcagaaacacacctagcgaacgcactagcaacgacctaacaacaatggcttccaagacattatccctccttgcgcttcttgccctttttgtgagtgcaacaaatgcgttcattattccacaatgctcacttgctccgagtgccattattccacagttcctccctccagttacttcaatgggcttcgaacacccagctgtgcaagcctataggctacaacaagcgcttgcggcgagcgtcttagaacaaccaattgcccaattacaacaacaatccttagcacatc

SEQ ID NO: 27522 - DNA, 297 bp, Zea mays
ataatcaggctgactttgcggaaacatactcagacgctaaattcttcattattaaatcttacagtgaagatgatgttcacaagagcgttaagtacaatgtgtgggctagcactcccaatggtaataagaaacttgatgctgcctatcaagaggctaaagaaaaatcaagtgaaactcctgtttttcttcttttctctgtgaatgcaagtggccagtttgtcggccttgctgaaatggtgggtcgtgttgattttgaaaaaacagtagagcattggcaacaggacaaatggactggtt

SEQ ID NO: 27523 - DNA, 280 bp, Zea mays
gttccagccgctccggcaacagtgctgccagcagcagatgaggatgatggacgtgcagtccgtcgcgcacagctgcagatgatgatgcagcttgagcgtgccgctgccgccagcagcagcctgtacgagccagctctgatgcagcagcagcagcagctgctggcagcccagggtctcaaccccatggccatgatgatggcgcagaacatgccggccatgggtggactctaccagtaccagctgcccagctaccgcgaccaaccctgtggcgtctccgctg

SEQ ID NO: 27524 - DNA, 298 bp, Zea mays
atcgcagcacaacaactacaacaacagttgcttccaacaatcaatcaagtagttgcagcgaaccttgctgcttacctccagcaacaacaatttcttccattcaatcaactagctggggtgaaccctgctgcttacttgcaggcacaacagctactaccattcaaccaacttgtcaggagccctgctgccttcttactgcagcaacagttgcttccattccatctacaagttgtggcaaacattgctgctttcttgcaacaacaacaacaattgctgccattttacccacaggttgtgg

SEQ ID NO: 27525 - DNA, 297 bp, Zea mays
attttcagcattcaaaacacaccaagcgaagtcactagcaacgacctaacaccaatggctaccaagatattagccctccttgcgcttcttgcccttttagtgagcgcaacaaatgcgttcattattccacagtgctcacttgctcctagtgccagtattccacagttcctcccaccagttacttcaatgggcttcgaacatccagccgtgcaagcctacaggctacaactagcgcttgcggcgagcgccttacaacaaccaattgcccaattgcaacaacaatccttggcacatcta

SEQ ID NO: 27526 - DNA, 296 bp, Zea mays
gcaaagcggcagtgcgtagagaggatcgtcgaacagaacagcatgaagatggtcatcgttctcgtcgtgtgcctggctctgtcagctgccagcgcctctgcaatgcagatgccctgcccctgcgcggggctgcagggcttgtacggcgctggcgcggcctgacgacgatgatgggcgccggcgggctgtacccctacgcggagtacctgaggcagccgcagtgcagcccgctggcggcggcgccctactacgccgggtgtgggcagccgagcgccatgttccagacgctccggcaa

SEQ ID NO: 27527 - DNA, 298 bp, Zea mays
gaccaacaagcaacatagaaagtggaatacagtagcaacaatagagcaacaatggcggccaagatattttccatccttatgctccttgctctttctgcatgtgttgctaacgcgaccatttttcctcaatactcacaagctcctatagctgcccttcttcccccataccttccatcaatgaccgcttcagtttgtgaaaacccagcccttcaaccctacaggctccaacaagcaatcgcaacaagcaacttacctttatcacccctgttctttcaacaatcgccagccctatctttgg

SEQ ID NO: 27528 - DNA, 298 bp, Zea mays
atttaacatggttatagcgcctactctgaatttggatggcacccctgacactggctactatactcaggctggcagaaaaactctggcagacaattatgagtacgtcatgcaagggaagctttacaaaatctcagaagacacatcatccagccaaaacgctaaagtggagatgtatgcatcgttcggcgggcttcttatgctgctcaggggtgacccttccactgccgctagctttgagcttgatcagaggctctttctgctcatccgcacagtgtaaaactgtggttgctgaccactt

SEQ ID NO: 27529 - DNA, 299 bp, Zea mays
cgtgctcgccgtcaccagccgcttcgagccctgcggcctcatccagctgcaggggatgcgatacggaacgccctgcgcctgcgactccaccggtggactcgtcgacaccatcatcgaaggcaagaccgggttccaacatgggccgcctcagcgtcgactgtaacgtcgtggagccggcggacgtcaagaaggtggccaccacattgcagcgcgccatcaaggtggtcggcacgccggcgtacgaggagatggtgaggaactgcatgatccaggatctctcctggaagggccctgccaag

SEQ ID NO: 27530 - DNA, 304 bp, Zea mays
ctggacgtcagcctagcaattagctcatcgactccagattggagaactcgacaccatgaaggtgctgatcgttgcccttgctctcctggcgctcgctgcgagcaccgcctccagtacaagcggcggctgtggctgccagacaccaccgtttcatctaccgcctccgttctatatgccgcctccgttctatctgccgccgcagcagcagccgcagccatggcaataccccactcaaaggccgcagctaagcccgtgccagcagttcggatcctgcggcgtcggcagcgtcggcagcccgttcctg

SEQ ID NO: 27531 - DNA, 307 bp, Zea mays
gcgacaattttccctcaatgctcacaagctcctatagcttcccttcttcccccataccttccatcaattatagcttcaatatgtgaaaacccagctcttcaaccatataggcttcaacaagcaatcgcagcaagcaacatacctttatcgcccttgttgtttcaacaatcgccagccctatctttggtgcagtcattggtacaaaccatcagggcacaacagctgcagcaactcgtgctacctctgatcaaccaagtagctctggcaaacctttctccctactctcagcaacaacaatttcttccat

SEQ ID NO: 27532 - DNA, 262 bp, Zea mays
aacaatccttggcacatctaacaatacaaaccatcgcaacgcaacagcaacaacagttcctaccagcactgagccacctagccatggtgaaccctgtcgcctacttgcaacagcagctgcttgcatccaacccacttgctctagcaaacgtagttgcaaaccagcaacaacaacaactgcaacagtttctgccagcgcttagtcaactagccatggtgaaccctgccgcctacctacaacagcaacaactgctttcatctag

SEQ ID NO: 27533 - DNA, 84 bp, Zea mays
gcttattagatgtacttcaataataaagttttttggatgatgtatgtggccaaccagaaataaaaagttacatttccagattct

SEQ ID NO: 27534 - DNA, 255 bp, Zea mays
caatagtgtaccaacaatggcagccaaaatattttgcctccttatgctccttggtctttctgcaagtgctgctacggcgaccattttcccgcaatgctcgcaagctcctatagcttcccttcttcccccgtacctctcaccagcggtgtcttcggtatgtgaaaacccaattcttcaaccctacaggatccaacaggcaatcacagctggcatcttacctttatcacccttgttcctccaacaatcatcagccct

SEQ ID NO: 27535 - DNA, 252 bp, Zea mays
gctgacaggaagagtgcaaagttccagaagaacatcacaaagaggggttctgtgcctgagaccacggtgaaaaagagcaatgactaccctgttggacctatagttcttggattcttcatttttgtggtcattggatcatccttgttccagataatcaggacagcgacaagcggtgggctggcctgaattcactgagctaaaaccagaaatttatctgtccgtgagctgggaggcagtatctgtgttgtgtag

SEQ ID NO: 27536 - DNA, 256 bp, Zea mays
gaaacacacctagcgaagtcactagcaacgacctaacaacaatggctaccaagatattatccctctttgcgcttcttgccctttttgtgagcgcaacaaatgcgttcattattccacaatgctcacttgctcctagtgccattattccacagttcctccctccagttacttcaatgggcttcgaacacccagctgtgcaagcctacaggctacaacaagcgcttgcggcgagcgtcttacaacaaccaattgccca

SEQ ID NO: 27537 - DNA, 257 bp, Zea mays
aaggatgcaattttttaatgcattcgagtgtttcagggaacattgaatgaggcatatgcattgttttctgaagccttttcactgcttcaacagattactggtcccatgcacaaggatgctgcaaattgttgccggtaccttgctatggttttgtaccatgctggtgatacagccggtgcaattgtgcagcagcatagggaactcatcataaacgagagatgtcttggtcttgatcatccggacacagcccacagtta

SEQ ID NO: 27538 - DNA, 257 bp, Zea mays
gctgcagcaactcgtgctacctgtgatcaaccaagtagctctggcaaacctttctccctactctcagcaacaacaatttcttccattcaaccaactgtctacactgaaccctgctgcttatttgcagcaacaactattaccattcagccagctagctactgcctactctcagcaacaacaacttcttccatttaaccaattggccgcactgaaccccgctgcttatttgcagcagcaaatactactaccatttagcc

SEQ ID NO: 27539 - DNA, 256 bp, Zea mays
catatctactatactatactctaggaagcaaggacaccaccgccatggcagccaagatgcttgcattgttcgctctcctagctctttgtgcaagcgccactagtgcgacccatattccagggcacttgccaccagtcatgccattgggtaccatgaacccatgcatgcagtactgcatgatgcaacaggggcttgccagcttgatggcgtgtccgtccctgatgctgcagcaactgttggccttaccgcttcagac

SEQ ID NO: 27540 - DNA, 255 bp, Zea mays; identical to SEQ ID NO: 26712

SEQ ID NO: 27541 - DNA, 258 bp, Zea mays
gcacatctaaccatacaaaccatcgcaacgcagcagcaacaagcactgagccacctagccgtggtgaaccctatcgcctacttgcaacaacagctgcttgcatccaacccacttgctttggcaaacgtagctgcataccaacaacaacaacagttgcaacagtttctgccagcgctcagtcaactagccatggtgaaccctatcgcctacctacaacagcaacaacttctttcatctagcccgctcgctatgggcaat

SEQ ID NO: 27542 - DNA, 258 bp, Zea mays
gtaagacaaagaccgtcgatcccttctctaagaaggactggtatgacatcaaggccccatcggtcttcagtgtgcgcaacattgggaagactctcgtgtccaggacacagggtaccaggattgcctctgatggtctgaagcacagagtctttgaggtttgtctagctgatcttcagggtgacgaggatcaggcttacaggaaaatcaggctccgtgctgaagatgtgcaaggcaggaatgtgctcacaaacttctggg

SEQ ID NO: 27543 - DNA, 259 bp, Zea mays
cgccaggtccctgcccttgcaacgcagctgccggcgctgatggcggcccaggtagcgcacagctgacggcgatgtgcggcctgcagctgcagcagccaggtccctgcccttgcaacgcagctgccggcggtgtctactactgaggaaactatgtactgtagtaataatgtaatggagccgctgactagctacctagctcgctagtttactcatttagcggcgatgagtaacgtagtgtcacccatcaccatgggtggca

SEQ ID NO: 27544 - DNA, 259 bp, Zea mays
atagtgtaccaacaatggcagccaaaatattttgcctccttatgctccttggtctttctgcaagtgctgctacggcgaccattttcccgcaatgctcgcaagctcctatagcttcccttcttcccccgtacctctcaccagcggtgtcttcggtatgtgaaaacccaattcttcaaccctacaggatccaacaggcaatcacagctggcatcttacctttatcacccttgttcctccaacaatcatcagccctattaca

SEQ ID NO: 27545 - DNA, 256 bp, Zea mays
cgaccccgctgcttatttgcagcagcaaatactactaccatttagccagctagctgcagcaaaccgtgcttccttcttgacacagcaacagttgctgcctttctaccagcagtttgcggctaaccccgcaaccctcttacaactacaacaattgttgccctttgtccaacttgctttgacagaccgagcggcctcctaccaacaacacatcattggtggtgccctcttttagattgcttattagttgtaattcaat

SEQ ID NO: 27546 - DNA, 253 bp, Zea mays
atagtgtaccaacaatggcagccaaaatattttgcttccttatgctccttggtctttctgcaagtgctgctaccgcaaccattttcccacaatgctcacaagctcctatagcttcctttcttcccccatacctctcaccagcggtgtcttcagtatgtgaaaacccaattcttcaaccctacaggatccaacaggcaatcgcagcaggcatcttacctttatcacccttgttcctccaacaaccgtcagccct

SEQ ID NO: 27547 - DNA, 252 bp, Zea mays
acgcagccgagcacttcaccgccgactgttcgcatgataataggccatattcgttctcggtttatacaccaagcagaacatgtgtcgtctatgctccagtggagtgatagcggggtactcgttgctgcgcggcatgtgtggggctgtcgatgtgaggaaaaaccttcttcgaaaaccggcagatgcatgcatgcatgctacaataaggttctgatactttaatcgatgctggaaagcccatgcatctcgctg

SEQ ID NO: 27548 - DNA, 251 bp, Zea mays
gaaggaaatcagtccgccttgacatactgcctggttcggataatgaggacaccataaaggtggttcgatcaggtggagaagacccagatggccgtccaggtgatctttatgtgaccctcgaggttcgtgaggatcctgttttccgaagagagaaaggtgatattcatgttgatgctgtcctgaatgtgactcaggcaattttgggagggacagttcaagtcccaactctcagtggagacgttgttctaaag

SEQ ID NO: 27549 - DNA, 252 bp, Zea mays
caacaagcaacatagaaagtggaatccagtagcaacaatagagcaacaatggcgaccaagatattttccctccttatgctccttgctctttctacatgtgttgctaacgcgacaattttccctcaatgctcacaagctcctatagcttcccttcttcccccataccttccatcaattatagcttcaatatgtgaaaacccagctcttcaaccatataggcttcaacaagcaatcgcagcaagcaacatacct

SEQ ID NO: 27550 - DNA, 250 bp, Zea mays
aaggatgcaattttttaatgcattcgagtgtttcagggaacattgaatgaggcatatgcattgttttctgaagccttttcactgcttcaacagattactggtcccatgcacaaggatgctgcaaattgttgccggtaccttgctatggttttgtaccatgctggtgatacagccggtgcaattgtgcagcagcatagggaactcatcataaacgagagatgtcttggtcttgatcatccggacacagccc

SEQ ID NO: 27551 - DNA, 252 bp, Zea mays
ccaagatattagccctccttgcgcttcttgcccttttagtgagcgcaacaaatgcgttcattattccacagtgctcacttgctcctagtgccagtattccacagttcctcccaccagttacttcaatgggcttcgaacatccagccgtgcaagcctacaggctacaactagcgcttgcggcgagcgccttacaacaaccaattgcccaattgcaacaacaatccttggcacatctatacctacaaaccattg

SEQ ID NO: 27552 - DNA, 252 bp, Zea mays
gcacctacgtacctacaacaacagttgctgcaacaaattgtaccagctctgactcagctagctgtggcaaaccctgctgcctacttacaacagttgcttccattcaaccaactggctgtgtcaaactctgctgcgtacctacaacagcgacaacagttacttaatccattggcagtggctaacccattggtcgctaccttcctgcagcagcaacaacaattgctgccatacaaccagttctctttgatgaac

SEQ ID NO: 27553 - DNA, 255 bp, Zea mays
tagcaacatagaaagcacaatagtgtaccaacaatcgcagccaaaatattttgcctccttatgctccttggtctttctgcaagtgctgctacggcgaccattttcccgcaatgctcgcaagctcctatagcttcccttcttcccccgtacctctcaccagcggtgtcttcggtatgtgaaaacccaattcttcaaccctacaggatccaacaggcaatcacagctggcatcttacctttatcacccttgttcctc

SEQ ID NO: 27554 - DNA, 254 bp, Zea mays
caacaaccgtcagccctattacagcagttacctttggtccatttggtggcacaaaacatcagggcacaacaactacaacaacttgtgctagcaaaccttgctgcatactctcagcaacatcagtttcttccattcaaccaactggctgcattgaactctgctgcttatttgcaacaacaattaccattcagccagctagttgctgcctacccccagcaatttcttccattcaaccaactagcagcattgaactc

SEQ ID NO: 27555 - DNA, 252 bp, Zea mays
gcacctgcggcgttggcagcaccccgatcctgggccagtgcgtcgagttcctgaggcatcagtgcagcccgacggcgacgccctactgctcgcctcagtgccagtcgttgcggcagcagtgttgccagcagctcaggcaggtggagccgcagcaccggtaccaggcgatcttcggcttggtcctccagtccatcctgcagcagcagccgcaaagcggccaggtcgcggggctgttggcggcgcagatagcgc

SEQ ID NO: 27556 - DNA, 243 bp, Zea mays
gagcaacaatggagaccaagatattttccctccttatgctccttgctctttctacatgtgttgctaacgcgacaattttccctcaatgctcacaagctcctatagcttccctttttcccccataccttccatcaattatagcttcagtatgtgaaaacccagctcttcaaccatataggcttcaacaagcaatcgcagcaagcaacatacctttatcgcccttgttgtgtcaacaatcgccag

SEQ ID NO: 27557 - DNA, 247 bp, Zea mays
catagaaagtggaatacagtagcaaaaatagagcaacaatggcggccaagatattttccatccttatgctccttgctctttctgcatgtgttgctaacgcgaccatttttcctcaatactcacaagctcctatagctgcccttcttcccccataccttccatcaatgaccgctttagtatgtgaaaacccagcccttcaaccctacaggatccagcaagcaatcgcaacaagcaacttacctttatc

SEQ ID NO: 27558 - DNA, 244 bp, Zea mays
caaatgcgttcattattccacaatgctcacttgctcctagtgccattattccacagttcctccctccagttacttcaatgggcttcgaacacccagctgtgcaagcctacaggctacaacaagcgcttgcggcgagcgtcttacaacaaccaattgcccaattacaacaacaatccttggcacatctaaccatacaaaccatcgcaacgcaacagcaacaacaatttctaccagcactgagcca

SEQ ID NO: 27559 - DNA, 239 bp, Zea mays
ccctcttacaactacaacaattgttgccctttgtccaacttgctttgacagaccgagcggcctcctaccaacaacacatcattggtggtgccctcttttagattgcttattagttgtaattcaataataaagttttttggatgatgtatgtggccaaccagaaataagaagttacatttccagattttaatgtgaaaaacaaaaaaaaaaaaaaaaaaaaaaaaaaaaaaaaaagattt

SEQ ID NO: 27560 - DNA, 243 bp, Zea mays
ggccatcacagcaagcatcttacggtcgttagcattgaccgtccaacaaccatatgccctattgcaacaaccatccttagtgaatctgtatctccaaagaatcacagcacaacaactacaacaacggttgcttccaacaattaatcaagtagttgcagcgaaccttgctgcttaccttcagcaacaacaatttcttccattcaatcaactagctggggtgaaccctgctgcttacttgcaggc

SEQ ID NO: 27561 - DNA, 244 bp, Zea mays
caacagccgcatccaagcccgtgccagctgcagggaacctgcggcgttggcagcaccccgatcctgggccagtgcgtcgagttcctgaggcatcagtgcagcccgacggcgacgccctactgctcgcctcagtgccagtcgttgcggcagcagtgttgccagcagctcaggcaggtggagccgcagcaccggtaccaggcgatcttcggcttggtcctccagtccatcctgcagcagcagccgc

SEQ ID NO: 27562 - DNA, 245 bp, Zea mays
ctttatcacccttgttcctccaacaatcatcagccctattacagcagttacctttggtgcatttattggcacaaaacatcagggcacaacaactacaacaacttgtgctagcaaaccttgctgcctactctcagcaacagcagtttcttccattcaaccaactagctgcattgaactctgcttcttatttgcaacaacaacaactaccattcagccagctatctgctgcctacccccagcaattt

SEQ ID NO: 27563 - DNA, 104 bp, Zea mays
attggaggtgccatcttttagattacatatgagatgtactcgacaatggtgccctcataccgacatgtgtttcctagaaataatcaatatattgattgagattt

SEQ ID NO: 27564 - DNA, 252 bp, Zea mays
ctgatcgttgcccttgctctcctggcgctcgctgcgagaccgcctccagtacaagcggcggctgtggctgccagacaccaccgtttcatctaccgcctccgttctatatgccgagctccgttctatctgccgccgcagcagcagccgcagccatggcaataccccactcaaccaccgcagctaagcccgtgccagcagttcggatcctgcggcgtcggcagcgtcggcagcccgttcctgggccagtgcgtc

SEQ ID NO: 27565 - DNA, 275 bp, Zea mays
ccgagcctcagttcgcatccacgcgcgccgccgccgcctcgccggtcgacgctcaccgcgcagccatggcggaacagactgagaaggctttcctcaagcagccaaaggttttcctcagctcaaagaaatctggcaagggtaagaagcctggcaagggcggcaaccgattctggaagagcattggccttggcttcaagactcccagggaagcaatcgaagggacctacattgaccagaaatgcccattcactggaactgtttctatcagaggcaga

SEQ ID NO: 27566 - DNA, 272 bp, Zea mays
agcaaagcggcagtgcgtagagaggatcgtcgaacagaacagcatgaagatggtcatcgttctcgtcgtgtgcctggctctgtcagctgccagcgcctctgcaatgcagatgccctgcccctgcgcggggctgcagggcttgtacggcgctggcgccggcctgacgacgatgatgggcgccggcgggctgtacccctacgcggagtacctgaggcagccgcagtgcagcccgctggcggcggcgccctactacgccgggtgtgggcagacga

SEQ ID NO: 27567 - DNA, 270 bp, Zea mays
gaggaatgggtttcacaagcaagctaaagccctcgaggcctggtgtgtccatgaagctccgagtccgtgatccgaggccaacgcagacagtccaagatggactcagtttcgtggcgagcttgaagcgcgtgttcgcctgcgagcctgacaagtacgacgagatcatcgccaccatgcgccagttcaagtccgggagcattcgtagtgcggttgtggttgagcgtgtgaaggtgcttctggaaggtcaccctggtctcctccgccacttca

SEQ ID NO: 27568 - DNA, 267 bp, Zea mays
cagccgcatccaagcccgtgccagctgcagggaacctgcggcgttggcagcaccccgatcctgggccagtgcgtcgagtttctgaggcatcagtgcagcccgacggcgacgccctactgctcgcctcagtgccagtcgttgcggcagcagtgttgccagcagctcaggcaggtggagccgcagcaccggtaccaggcgatcttcggcttggtcctccagtccatcctgcagcagcagccgcaaagcggccaggtcgcggggctgttg

SEQ ID NO: 27569 - DNA, 266 bp, Zea mays
catactactaccatttagccagctagctgcagcaagccgtgcttccttcttgacacagcaacagttgctgcctttctaccagcagtttgcggctaaccccgcaaccctcttacaactacaacaattgttgccctttgtccaacttgctttgacaaacccagcagcctcctaccaacaacacatcattggtggtgccctcttttagattgcttattagttgtaattcaataataaagttttttggatgatgtatgtgtgcaaccaga

SEQ ID NO: 27570 - DNA, 264 bp, Zea mays
cagtatgtgaaaacccagctcttcagccctataggctccaacaagcaatcgcagcaagcaacatacctttatcacccttgttgtttcaacaatcgccagccctatctttggtgcagtcattggtacaaaccatcagggcacagcagctgcagcaactcgtgctacctgtgatcaaccaagtagctctggcaaacctttctccctactctcagcaacaacaatttcttccattcaaccaactgtctacactgaaccctgctgctt

SEQ ID NO: 27571 - DNA, 261 bp, Zea mays
gaccaacaagcaacatagaaagtggaatccagtagcaacaatagagcaacaatggcgaccaagatattttccctccttatgctccttgctctttctgcatgtgttgctaacgcgacaattttccctcaatgctcacaagctcctatagcttcccttcttcccccataccttccatcaatgatagcttcagtatgtgaaaacccagctcttcaaccctataggctccaacaagcaatcgcagcaagcaacatacctttatca

SEQ ID NO: 27572 - DNA, 266 bp, Zea mays
cccggacgcctctccttcccggtctcctccgcccgttgccttcgtcccctccatctccggctgcgtcgccggcgagcccgacaccgcgaatcggatccgccgacaaggcgagagggaaaagatggggcttacgttcaccaagctgttcagccggctgttcgccaagaaggagatgcggatcctgatggtgggactcgacgccgccggaaagaccaccatcctctacaagctgaagctaggcgagatcgtcaccaccatccccacca

SEQ ID NO: 27573 - DNA, 267 bp, Zea mays
agaagaacccgatcgacaccatgagggtgttgctcgttgccctcgctctcctggctctcgctgcgagcgccacctccacgcatacaagcggcggctgcggctgccagccaccgccgccggttcatctaccgccgccggtgcatctgccacctccggttcacctgccacctccggtgcatctcccaccgccggtccacctgccgccgccggtccacctgccaccgccggtccatgtgccgccgccggttcatctgcagccgccaccat

SEQ ID NO: 27574 - DNA, 263 bp, Zea mays
gtcagcctagcaattagctcatcgactccagattggagaactcgacaccatgaaggtgctgatcgttgcccttgctctcctggcgctcgctgcgagcggcgcctccagtacaagcggcggctgtggctgccagacaccaccgtttcatctaccgcctccgttctatatgccgcctccgttctatctgccgccgcagcagcagccgcagccatggcaataccccactcaaccaacgcagctaagcccgtgccagcagttcggat

SEQ ID NO: 27575 - DNA, 261 bp, Zea mays
gcgtgatcctgttcgacgaggtcgagaaggcccatgtcgccgtgttcaacaccctgctccaggtcctcgacgacggcaggctgacggatgggcaaggcaggacggtggacttcaggaacactgtgatcatcatgacatcgaacctcggcgccgagcacctcctcgctgggatggtgggcaagaactccatgaaggtcgctcgcgatctggtcatgcaggaggtgaggaggcacttccgccctgagctgctgaaccgtctcg

SEQ ID NO: 27576 - DNA, 259 bp, Zea mays
attttggattagcaaggctgcttggaaattcagaaacacatgcaaccactggtgtggcaggtacttttggatatgtagctccagagtatgcgatgacatgccgcgtttctgataaggcggatgtgtatagctatggagttgtacttcttgaactcatttcagacaaaaaggcactggatccttctttctctccttacgggaatggattcaacatagttgcctgggattgcatgcttctacaaaagggtcgagctcgtga

SEQ ID NO: 27577 - DNA, 261 bp, Zea mays
gaaaacccagctcttcaaccatataggcttcaacaagcaatcgcagcaagcaacatacctttatcgcccttgttgtttcaacaatcgccagccctatctttggtgcagtcattggtacaaaccatcagggcacaacagctgcagcaactcgtgctacctctgatcaaccaagtagctctggcaaacctttctccctactctcagcaacaacaatttcttccattcaaccaactgtctacactgaaccctgctgcttatttg

SEQ ID NO: 27578 - DNA, 263 bp, Zea mays
aagcaacatcatccacaacaacatcatccacaaaaacaacaacatcaaccaccaccacaacatcaccagcagcagcaacaccaacaacaacaagttcacatgcaaccacaaaaacatcagcaacaacaagaagttcatgttcaacaacaacaacaacaaccgcagcaccaccaccaacaacaacaacaacagcaccaacaacaacatcaatgtgaaggccaacaacaacatcaccaacaatcacaaggccatgtgcaacaaca

SEQ ID NO: 27579 - DNA, 258 bp, Zea mays
gtgacaggcgtcttagtgttcgtttccactccagatccaattggcaacaagtactatcttggccctgctcctttgcaggatatggcaatgcaaattgctacagccaatggccctactggctataatagggattacctgttctcaatggagaaggcattagccagcattagccacgaagatgattcgatcatagagcttgcaaacgaggtgaggacggtgctcaacagaacaaaggagaccaagatcactggtgccaat

SEQ ID NO: 27580 - DNA, 261 bp, Zea mays
  unsure (1)..(261): unsure at all n locations
aacaacatcaccaacaatcacaaggccatgtgcaacaacacgaacagagccatgagcaacaccaaggacagagccatgagcaacaacatcaacaacaattccagggtcatgacaagcagcaacaaccacaacagcctcagcaatatcagcagggccaggaaaaatcacaacagcaacaatgtcattgccaggagcagcaacagactacaaggtgcagctataactactatagcagtagctcanatctaaaaaattgtcatg

SEQ ID NO: 27581 - DNA, 260 bp, Zea mays
ctcaatgctcacaagctcctatagcttcccttcttcccccataccttccatcaatgatagcttcagtatgtgaaaacccagctcttcaaccctataggctccaacaagcaatcgcagcaagcaacatacctttatcacccttgtttcaacaatcgccagccctatctttggtgcagtcattggtacaaaccatcagggcacagcagctgcagcaactcgtgctacctgtgatcaaccaagtagctctggcaaacctttct

SEQ ID NO: 27582 - DNA, 259 bp, Zea mays
cgtagagaggatcgtcgaacagaacagcatgaagatggtcatcgttctcgtcgtgtgcctggctctgtcagctgccagcgcctctgcaatgcagatgccctgcccctgcgcggggctgcagggcttgtacggcgctggcgccggcctgacgacgatgatgggcgccggcgggctgtacccctacgcggagtacctgaggcagccgcagtgcagcccgctggcggcggcgccctactacgccgggtgtgggcagacgagc

SEQ ID NO: 27583 - DNA, 261 bp, Zea mays
tagaaagtggaatccagtagcaacaatagagcaacaatggcgaccaagatattttccctccttatgctccttgctctttctacatgtgttgctaacgcgacaattttccctcaatgctcacaagctcctatagcttcccttcttcccccataccttccatcaattatagcttcaatatgtgaaaacccagctcttcaaccatataggcttcaacaagcaatcgcagcaagcaacatacctttatcgcccttgttgtttcaa

SEQ ID NO: 27584 - DNA, 259 bp, Zea mays
cgttcgagaagcagaaaggcagctcacttgaatgaactggaggcacaggtagcacagttaagagttgagaactcttcgctgctaaggcgacttgctgacgttaatcagaagttcaatgaggctgctgttgacaatagggtgctaaaggcagatgtcgaaaccttaagagcaaaggtgaagatggcagaggactcagtgaagcgggtaactggcatgaacacattgttccctgccgtgtctgatatgtcgtccctcagca

SEQ ID NO: 27585 - DNA, 258 bp, Zea mays
ggatcgtcgaacagaacagcatgaagatggtcatcgttctcgtcgtgtgcctggctctgtcagctgccagcgcctctgcaatgcagatgccctgcccctgcgcggggctgcagggcttgtacggcgctggcgccggcctgacgacgatgatgggcgccggcgggctgtacccctacgcggagtacctgaggcagccgcagtgcagcccgctggcggcggcgccctactacgccgggtgtgggcagccgagcgccatgt

SEQ ID NO: 27586 - DNA, 259 bp, Zea mays
gccgccgcaccagcaatcacagcagcccggagaacgccctggtccaacaagatgcagatcttcgtgaagacgctgacagggaagaccatcaccctcgaggtcgagagcagcgacaccatcgacaatgtcaaggccaagatccaggacaaggaagggatcccgccggaccagcagcggctgatctttgccgggaagcagctggaggatggccgcacccttgcggactataacatccaaaaggagtctacgctccacctcg

SEQ ID NO: 27587 - DNA, 255 bp, Zea mays
ctatcacaggtatcttgcggaatttaagactggtcctgagaggaaggaatctgctgagagcacgatgatggcctacaaggctgctcaggacattgcgctggctgagctggcacctacccatccgataaggcttgggcttgctcttaacttctcagtgttctattatgagattctgaactccccagacaaagcttgcaaccttgcaaagcaggcgtttgatgaagctatctcccagttagacacccttggggagga

SEQ ID NO: 27588 - DNA, 253 bp, Zea mays
attttgagcattcagaaacacacctagcgaacgcactagcaacgacctaacaacaatggctaccaagatattatccctctttgcgcttcttgccctttttgtgagcgcaacaaatgcgttcattattccacaatgctcacttgctcctagtgccattattccacagttcctccctccagttacttcaatgggcttcgaacacccagctgtgcaagcctacaggctacaacaagcgcttgcggcgagcgtctta

SEQ ID NO: 27589 - DNA, 254 bp, Zea mays
attggtgcatttattggcacaaaacatcagggcacaacaactacaacaacttgtgctagcaaaccttgctgcctactctcagcaacagcagtttcttccattcaaccaactagctgcattgaactctgcttcttatttgcaacaacaacaactaccattcagccagctacctgctgcctacccccagcaatttcttccattcaaccaactggcagcattgaactctcctgcttatttacagcagcaacaactac

SEQ ID NO: 27590 - DNA, 254 bp, Zea mays
aatctccagagtgcaggcatctaatttcgaggatttttgttggcgatcctgctacgcgaataacaatccctgaaatccggaatcatagttggttcctgaagaaccttcctgctgatctgatggatgatgatagcatgagcaaccaatatgaggagcctgaccagccaatgcagaccatggatcagatcatgcagattttaacagaggccaccataccacctgcctgttctcgcagtataaatgtcctagctgat

SEQ ID NO: 27591 - DNA, 254 bp, Zea mays
attgagaccaacaagcaacatagaaagtggaatccagtagcaacaatagagcaacaatggcgaccaagatattttccctccttatgctccttgctctttctacatgtgttgctaacgcgacaattttccctcaatgctcacaagctcctatagcttcccttcttcccccataccttccatcaattatagcttcaatatgtgaaaacccagctcttcaaccatataggcttcaacaagcaatcgcagcaagcaac

SEQ ID NO: 27592 - DNA, 250 bp, Zea mays
gaccaactagcaacatagaaagcacaatagtgtaccaacaatggcagccaaaatattttgcctccttatgctccttggtctttctgcaagtgctgctacggcgaccattttcccacaatgctcacaagctcctatagcttcccttcttcccccgtacctctcaccagcggtgtcttcggtatgtgaaaacccaattcttcaaccctataggatccaacaggcaatcgcagctggcatcttacctttatca

SEQ ID NO: 27593 - DNA, 253 bp, Zea mays
caaccaattgcccaattacaacaacaatccttagcacatctaaccatacaaaccatcgcaacgcagcagcaacaagcactgagccacctagccgtggtgaaccctatcgcctacttgcaacaacagctgcttgcatccaacccacttgctttggcaaacgtagctgcataccaacaacaacaacagttgcaacagtttctgccagcgctcagtcaactagccatggtgaaccctatcgcctacctacaacagc

SEQ ID NO: 27594 - DNA, 269 bp, Zea mays
ctcggcttggtcctccagtccatcctgcagcagcacccgcaaagcggccacggtcgctggggcttgttggcggcgcagatagcgcagcatctgcacggcgatgtgcggcctgcagcagacgactccatgcccctacgctgctgccggcggtgtcccccactgaagaaactatgtgctgtagtatagccgctggctagctagctagttgagtcatttagcggcgatgattgagtaataatgtgtcacgcatcaccatgggtggcagtgtc

SEQ ID NO: 27595 - DNA, 130 bp, Zea mays
tgattcaataatgaagtgttttggctgatgtatgtggcctcctagaaataagaagttacatttccacattctaaaaaaaaaaaaaaaaaaaaaaaaaaaaaaaaaaaaaaaaaaaaaaaaaaaaagaaca

SEQ ID NO: 27596 - DNA, 264 bp, Zea mays
tgagtggccaggtcgcggggctgttggtggcgcagatagcgcagaactgacggcgatgtgcggcctgcagcagccgactccatgcccctacgctgctgccggcggtgtcccccactgaagaaactatgtgctgtagtatagccgctggctagctagctagttgagtcatttagcggcgatgattgagtaataatgtgtcacgcatcaccatgggtggcagtgtcagtgtgagcaatgacctgaatgaacaattgaactgaaaag

SEQ ID NO: 27597 - DNA, 246 bp, Zea mays
tgcgtgcaacatagtaagcactatagtgtaccaacaatggcagccacaatattttgcctccttatgctccttggtctttctgcaagtgctgctacggcgaccattttcccgcaatgctcgcaagctcctatagcttcccttcttcccccgtacctctcaccagtggtgtcttcggtatgtgcaaacccaattcttcaaccctacaggatccaacaggcaatcacagctggcatcttacctttatca

SEQ ID NO: 27598 - DNA, 91 bp, Zea mays
tcgtttagattacatatgagaggtactcgacaatggtgccctcataccgacatgtgtttcctagacataatcaatatattgattgtgcttt

SEQ ID NO: 27599 - DNA, 256 bp, Zea mays
caaagaatgctcgtggccagcaaggctcatatccaattaagctgttctacacttcaaacatgcccatacttcttcactctgtgctgattaccaacctctattttatatcccagcttctctacaggaagtacagtggaaacttccttgttaaccttcttgggaagtggaaggagtctgtatactctggccattctattcctgttggtggtcttgcttactatgtaactgccccatcaaggtgaaaatctagttcctt

SEQ ID NO: 27600 - DNA, 203 bp, Zea mays
aacagcagttgcttgcatcaaacccacttgctctggcaaacgtagttgcaaaccagccacaacaacagctgcaacagtttctgccagcgctcagtcaactagccatggtgaaccctgccgcctacctacaacagcaacaactgctttcatctagcccgctcgctgtggccaatgcacctacatacctgcaacaacaattgttg

SEQ ID NO: 27601 - DNA, 260 bp, Zea mays
tgcacaatagtgtaccaacaatggcagccaaaatattttgcctccttatgctccttggtatttctgcaagtgctgctacggcgaccattttcccgtaatgctcacaagctcctatagcttcccttcttcccccgtacctctcaccagtggtgtcttcggtatgtgaaaacccaattcttcaaccctacaggatccaacaggtaatcgtagctggcatcttacctttatcacccgtgttcctccaacaatcatcagcccta

SEQ ID NO: 27602 - DNA, 254 bp, Zea mays
tgggtacaacaactacaacaacttgtgctagcaaaccttgctgcatactctcagcaacatcagtttcttccattcaaccaactggctgcattgaactctgctgcttatttgcaacaacaattaccattcagccagctagttgctgcctacccccagcaatttcttccattcaaccaactagcagcattgaactctgctgcttatttacagcagcaacaacgtactaccatcagccagcgtgctgatgtgtgccc

SEQ ID NO: 27603 - DNA, 206 bp, Zea mays
tggctattagctcatcgactccagattggagaactcgacaccatgaaggtgctgatcgttgcccttgctctcctggcgttcgttgtgtgtgttgtctccagtacaagtggtggttgtggctgtcagacaccactgtttcatctaccgcctctgttctatatgtcgtctccgttctatctgtcgttgtagcagtagtcgcagtcatg

SEQ ID NO: 27604 - DNA, 203 bp, Zea mays
cagggcataatccacagggtacatgaactgttgaatctatacaaccaacatgatgtctcaactgaccgcctgttattcaaaattcctgctacatggcaaggcatagaggcctcaaggttgcttgaatctgaaggaattcaaacgcatctaacatttgtttacagtttcgcacaagcggcagggtcagcacaagctggtgcatc

SEQ ID NO: 27605 - DNA, 229 bp, Zea mays
gccagcagcagatgaggatgatggacgtgcagtccgtcgcgcacagctgcagatgatgatgcagctttgagcgtgccgctgtcgccagcagcagcctgtatgagccagctctgatgcagcagcagcagcagctgctggcagcccagggtctcaaccccatggacatgatgatggcgcagaacatgccggccatgggtggactctaccagtaccagtaccagcggcccag

SEQ ID NO: 27606 - DNA, 259 bp, Zea mays
tgagcagctgttctatggtcagccaccaccagccttcatcaaccctcaggctggatttgctttccagcaacctctgatgcctggtatgaggcctggtggtccaatgccgaactttatgatgcctatggttcagcaaggacagcaaccacagcgtcctgctggtagacgtgctggtggaatgcagcagcccatgccatggggtggtcagcaccaggtgttccctaaaggtggtgctgctatcggtatcctactggacgtg

SEQ ID NO: 27607 - DNA, 223 bp, Zea mays
tcatctacaaaggatgcagtaccttgcattctcatcattcttgggattgatagcgtgtctcttttggacatgtcatagcaactacaacagcatggattaaaggggaaggtgttatgatctggctgcttgccattatctacttcatatctggtgcgcctggggcttatgtgctatggtatcgacctctttataatgcaatgagaactgagagcgctttgaagtt

SEQ ID NO: 27608 - DNA, 167 bp, Zea mays
aaaggcaagaccattgtaaacaatgacaaatcggtcaagtctccaaaatctgcgccaaaatctggtggctcggtcccttgcaaatcgtgcagcaagtcattcatcagtgagacggcacttcaggctcactcgaaggtgaacatgggggcaagtgagtcgcaggtcca

SEQ ID NO: 27609 - DNA, 254 bp, Zea mays
tattattgtgaccaactagcaacatagaaagcacaatagtgtaccaacaatggcagccaaaatattttgcttccttatgctccttggtctttctgcaagtgttgctaccgcaaccattttcccacaatgctcacaagctcctatagcttcccttcttcccccatacctctcaccagtggtgtcttcaatgtgtgaaaacccaattgttcaaccctacaggatccaacaggtaatcgcaacaggcatcttaccat

SEQ ID NO: 27610 - DNA, 251 bp, Zea mays
tgccgccgcagcagcagccgcagccatggcaataccccactcaaccaccgcagctaagcccgtgccagcagttcggatcctgcggcgtcggcagcgtcggcagcccgttcctgggccagtgcgtcgagttcctgaggcaccagtgcagcccggtggcgacgctctatggctcgccacagtgccaggcgctgcagcagcagtgctgccaccagatcaggcaggtggagccgctgcaccggtaccaggcgaca

SEQ ID NO: 27611 - DNA, 250 bp, Zea mays
tccaaagccactccaaacccccgcttccagaaccttctcgaaactctccgcctcctcctctactcgctccgatggcgaaggaaccgatgcgcgtgctcgtcactggcgccgcagggcaaattggatatgctcttgttcccatgattgctaggggagttatgcttggtgcagaccagcctgttattctgcacatgcttgatattccgccagcagctgaagcccttaatggtgttaagatggagttggttga

SEQ ID NO: 27612 - DNA, 241 bp, Zea mays
agtccattagctttatctactccagagtgctgaagaatccgatcgtcaccatgtgggtgttgctcgtagccctcgctctcctggctctcgctgtgagtgtcacctccacgtatatatgtggtcggttgtggctgtcagtcattgttgttggttcatctatcgccgttggtgtatctgtcatctccggttcacctgtcatctccggtgtatctcccactgtcggtctatctgtcgtcgtcgg

SEQ ID NO: 27613 - DNA, 253 bp, Zea mays
attgcaacaacaatccttggcacatctaaccatacaaaccatcgcaacacaacagcaacaacagttcctaccagcactgagccaactagatgtggtgaaccctgtcgcctacttgcaacagcaggtgcttgcatccaacccacttgctctggcaaacgtagctgcataccaacaacaacaacaattgcaacagtttctgccagcgctcagtcaactagccatggtgaaccctgccgccgtacctcaacagcaa

SEQ ID NO: 27614 - DNA, 244 bp, Zea mays
ctgtgccgcaaatacgcctttggcaagatgcttgtggtaggctctgagccccctttcaaggtcaaggggctctggctcttcaggggctcagaaattcccaagtttgtcatggacgaagtctatgacatggagctttatgagtggaccaaggttgacctctctgatgaggcacagaaggagcgggtcaatgccatgattgaggaccaggagccattcgagggcgaggccttgctggatgcaaaat

SEQ ID NO: 27615 - DNA, 254 bp, Zea mays
agatctttgtgaaaaccctgaccggcaagactatcaccctcgaggtggagtcctctgacaccattgacaacgtcaaggccaagatccaggacaaggagggcatccctccagaccagcagcggctcatctttgctgggaagcagcttgaggacgggcgcacgcttgccgactacaacatccagaaggagagcaccctccacttggtgctgcgcctcaggggaggcatgcagatcttcgtgaagaccctgaccggc

SEQ ID NO: 27616 - DNA, 188 bp, Zea mays
tgagtcgctggctagctagctagttgagtcatttagcggtgatgattgagtaataatgtgtcacgcatcaccatgggtggcagtgtcagtgtgagcaatgacctgaatgaacaattgaaatgaaaagaaaaaagtattgttccaaaaaaaaaaaaaaaaaaaaaaaaaagaaaaaaaaaaaaagaaat

SEQ ID NO: 27617 - DNA, 121 bp, Zea mays
ggtggagtcccgtaagaacgtagagcatgtgaaccttatcaaggaataccgtgcgtagatcgaggctgaactgagcaatatctgtgatggcatcctgaagctgcttgactcccacctagtg

SEQ ID NO: 27618 - DNA, 162 bp, Zea mays
gagaccaacaagcaacatagaaagtggaatccagtagcaacaacagagcaacaatggcgaccaagatattttccctccttatgctccttgctctttctgcatgtgttgctaacgcgacaattttccctcaatgctcacaagctcctatagcttcccttcttc

SEQ ID NO: 27619 - DNA, 241 bp, Zea mays
gcagctgcagcaactcgtgctacctgtgatcaaccaagtagctctggcaaacctttctccctactctcagcaacaacaatttcttccattcaaccaactgtctacactgaaccctgctgcttatttgcagcaacaactattaccattcagccagctagctactgcctactctcagcaacaacaacttcttccatttaaccaattggctgcactgaaccccgctgcgtagttgcagcagcaa

SEQ ID NO: 27620 - DNA, 228 bp, Zea mays
cataattgaaataaactgttcaaaagatattaaagtccaaggtattattggaccatgcacatctttggagaagaaaggagtcatgtgctctgacacagttgtcggtcaaggaaatacatcagcatggaaaatgtgtggtctcgatagaaatacggctcttacagtattttttgatgtctcaccgagtgaacgatcgagccagccaggaaaccaaaatccccatttgta

SEQ ID NO: 27621 - DNA, 249 bp, Zea mays
caacccacttgctctggcgaacgtagctgcataccagcaacaacaacagctgcaacagtttatgccagtgctcagtcaactagccatggtgaaccctgccgtctacctacaactactttcatctagcccgctcgtggtgtggcaatgcacctacgtacctacaacaacagttgctgcaacaaattgtaccagctctgactcagctagctgtggcaaaccctgctgcctacttacaacagttgcttccat

SEQ ID NO: 27622 - DNA, 250 bp, Zea mays
cccgctgcttatttgcagcagcaaatactactaccatttagccagctagctgtagcaaaccgtgcttccttcttgacacagcaacagttgcttgcctttctaccagcagtttgtggctaaccccgcaaccctcttacaactacaacaattgttgccctttgtccaacttgctttgacagaccgagtggtctcctaccaacaacacatcattggtggtgccctcttttagattgcttattagttgtaattc

SEQ ID NO: 27623 - DNA, 311 bp, Zea mays
  unsure (1)..(311): unsure at all n locations
gtcagcctagcaattagctcatcgactccagattggagaactcgacaccatgaaggtgctgatcgttgcccttgctctcctggcgctcgctgcgagcgccgcctccagtacaagcggcggctgtggctgccagacaccaccgtttcatctaccgcctccgttctatatgccgcctccgttctatctgccgccgcagcagcagccgcagccatggcactacccnactcaaccaccgcagctaagcccgtgccagcagttcggatactgcggcgtcggcagcgtcggcagcccgttccctgggcagtgcgtcg

SEQ ID NO: 27624 - DNA, 326 bp, Zea mays
ctatgtttttacctacgataacatgaggaatcagaagcacaaggacctcagggagcagctcaagtcttcgagcaggatttttctcgctggaaagaaggttatgcagatagcgctggggcgttcgcctgctgatgaagctaaaacaggcctccacaaactttccaagttccttcaaggcaactctggtctgttattcaccaatcttccaagggatgatgttgagaggatgtttcgagaattcgaggagcatgattttgcaaggacaggaagtactgctatcgatacggttgagcttaaggaaggcctctggaacagttcacacatga

SEQ ID NO: 27625 - DNA, 341 bp, Zea mays
  unsure (1)..(341): unsure at all n locations
cgccttgntgtttcaacaatcgccagccctatctttggtgcagtcattggtacaaaccatcagggcacaacagctgcagcaactcgtgctacctctgatcaaccaagtagctctggcaaacctttctccctaatctcagcaacaacaatttcttccattcaaccaactgtctacactgaaccctgctgcttatttgcagcaacaactattaccatttagccagctagctactgcctactctcagcaacaacaacttcttccatttaaccaattggccgcactgaaccccgctgcttatttgcagcagcaaatactactaccatttagccagctagctgcag

SEQ ID NO: 27626 - DNA, 331 bp, Zea mays
  unsure (1)..(331): unsure at all n locations
aanatattttgcctccttatgctccttggtctttctgcaagtgctgctacggcgaccattttcccacaatgctcacaagctcctatagcttcccttcttcccccgtacctctcaccagcgaggtcttcggtatgtgaaaacccaattcttcaaccctataggatccaacaggcaatcgcagctggcatcttacctttatcacccttgttcctccaacaatcatcagccctattacagcagttacctttggtgcatttattggcacaaaacatcagggcacaacaactacaacaacttgtgctagcaaaccttgctgctactctcagcaaca

SEQ ID NO: 27627 - DNA, 333 bp, Zea mays
gaccaacaagcaacatagaaagtggaatccagtagcaacaatagagcaacaatggcgaccaagatattttccctccttatgctccttgctctttctgcatgtgttgctaacgcgacaattttccctcaatgctcacaagctcctatagcttcccttcttcccccataccttccatcaatgatagcttcagtatgtgaaaacccagctcttcaaccctataggctccaacaagcaatcgcagcaagcaacatacctttatcacccttgtttcaacaatcgccagccctatctttggtgcagtcattggtacaaacccatcaggcacagcagctg

SEQ ID NO: 27628 - DNA, 219 bp, Zea mays
tgctgcctttctaccagcagtttgcggctaaccccgcaaccctcttacaactacaacaattgttgccctttgtccaacttgctttgacaaacccagcagcctcctaccaacaacacatcattggtggtgccctcttttagattgcttattagttgtaattcaataataaagttttttggatgatgtatgtggccaaccagaaataagaagttacatttc

SEQ ID NO: 27629 - DNA, 334 bp, Zea mays
  unsure (1)..(334): unsure at all n locations
tgcacctacatacctgcaacaacagttgttgcaacaacagttgctgcaacaaattgtaccagctcttactcagctagctgtggcaaaccctgctgcctacttgcaacaactacgtccattcaaccaactgactgggtcgaacactgctgcgtacctacaacagcgacaacagntacttaatccactagcggcggctaacccattggtcgctgccttcctacagcagcaacaattgctgccatacaaccagttctctttgatgaaccctgccttgtcgtggcagcaacccatcngtggtggtgcatcttttagattcatatgagatgtactcgat

SEQ ID NO: 27630 - DNA, 340 bp, Zea mays
attgagaccaacaagcaacatagaaagtggaatacagtagcaacaatagagcaacaatggcggccaagatattttccatccttatgctccttgctctttctgcatgtgttgctaacgcgaccatttttctctcatacacacaaagcgcccatagaagcgcctctttctcccataacattccatcaaagatcgcctcagtatgtgcaaacccagcgcttcaaccctacaggctccaacaagcaatcgcaacaagcaacttacctttatcacccctgttctttcaacaatcgccagccctatctttggtgcagtcattggtacaaaccatcagggcacaaca

SEQ ID NO: 27631 - DNA, 312 bp, Zea mays
  unsure (1)..(312): unsure at all n locations
agcgccacatgngggaacatcgcgcacctcgccgccggtccacctgccaccgccggtccatgtgccgccgccggttcatctgccgccgccaccatgccactaccctactcaaccgncccggcctcagcctcatccccagccacacccaagcccgggccaacagccgcatccaagcccgngccagcatgcaggaacctcggcgtttgcagcacccgatccttggccagtgcgtcgagttcctgaggcatcagtgcagcccgacggcgacgccctactgctcgcctcagtgccagtcgttgcggcagcagtgtt

SEQ ID NO: 27632 - DNA, 318 bp, Zea mays
tatgccgcctccgttctatctgccgccgcagcagcagccgcagccatggcaataccccactcaaccaccgcagctaagcccgtgccagcagttcggatcctgcggcgtcggcagcgtcggcagcccgttcctgggccagtgcgtcgagttcctgaggcaccagtgtcacccggcggcgacgccgtacggctcgccacatgtgcaggcgctgcagcagcagtgctgccaccagatcaggcaggtggagccgctgcaccggtactaggcgacatacggtgtggtcctgcagtccttcctgcagcagcagccgcagggcga

SEQ ID NO: 27633 - DNA, 339 bp, Zea mays
caacaatttctaccagcactgagccaactagctgtggtgaaccctgtcgcctacttgcaacagcagttgcttgcatccaacccacttgctctggcaaacatagttgcataccaacaacaacaacaattgcaacagtttctaccagcgctcagtcaactagccatggtgaaccctgccgcctacctacaacagcaacaactgatttcatctagccctctcgctgtggttaatgcacctacatacctgcaacaacagttgctgcaacagattgtaccagctctgactcagctagctgtggcaaaccctgctgcctacttgcaacagctgcttccattcaac

SEQ ID NO: 27634 - DNA, 347 bp, Zea mays
ctggacgtcagcctagcaattagctcatcgactccagattggagaactcgacaccatgaaggtgctgatcgttagccttgctctcctggacgtcgctgcgagcgccgcctccagtacaagcggcggctgtggctgccagacaccaccgtttcatctaccgcctccgttctatatgccgcctccgttctatctgccgccgcagcagcagccgcagccatggcaataactcactcaaccaccgcagctaagcccgtgccagcagttcggatcctgcggcgtcggcagcgtcggcagcccgttcctgggccagtgcgtcgagttcctgaggcaccagtgcagcccggcgg

SEQ ID NO: 27635 - DNA, 346 bp, Zea mays
  unsure (1)..(346): unsure at all n locations
tgggaacacagcatgtgccaaggaaatgacaaagctctctggcatctctgaaatcatccccgagatggagatctgcgattttgactttgaaccctgtggctactccatgaatgcgatccatggctctgcattctccacaatccatgtgacgcccgaggacggtttcagctangccagttatgaggctatgggccgtgatgccactgctctgtcttatggtgaccttgtcaagagggtccttcggtgctttggcccctcggagttttccgttgccgtgaccatcttcggcgggcgtggccatgccgggacatggggaaaggcacttggtgcagaggtctatgactgc

SEQ ID NO: 27636 - DNA, 328 bp, Zea mays
gctctcctagctctttgtgcaagcgccactagtgcgacccatattccagggcacttgccaccagtcatgccattgggtaccatgaacccatgcatgcagtactgcatgatgcaacaggggcttgccagcttgatggcgtgtccgtccctgatgctgcagcaactgttggccttaccgcttcagacgatgccagtgatgatgccacagatgatgacgcctaacatgatgtcaccattgatgatgccgagcatgatgtcaccaatggtcttgccgagcatgatgtcgcaaatgatgatgccacaatgtcactgcgacgccgtctcgcaga

SEQ ID NO: 27637 - DNA, 327 bp, Zea mays
  unsure (1)..(327): unsure at all n locations
cgcaaattgcaccaagaaatccatcgagaggccgtcgacaggggaattaatggcgtcgtcgtctagcagcagccaccgccgcctcatcctcgcagccgccgtcctgctctccgngctcgctgctgccagcgccacgccgggacctcctgcgtgccggggtgggccatcccgcacaacccgctcccgatctgccgctggtacgtgaccagccggaccttcggcatcgggccgcgcctcccgtggccggagctgaatatgagatgctgccgggagctggcggacatcccggcgtactgccggtgcacggcgctgagcatcctcatggac

SEQ ID NO: 27638 - DNA, 331 bp, Zea mays
tattattgagaccaacaagcaacatagaaagtggaatacagtagcaacaatagagcaacaatggcggccaagatattttccatccttatgctccttgctctttctgcatgtgttgctaacgcgaccatttttcctcaatactcacaagctcctatagctgcccttcttcccccataccttccatcaatgaccgcttcagtatgtgaaaacccagcccttcaaccctacaggctccaacaagcaatcgcaacaagcaacttacctttatcacccctgttctttcaacaatcgccagccctatctttggtgcagtcattggtacaaaccatca

SEQ ID NO: 27639 - DNA, 313 bp, Zea mays
  unsure (1)..(313): unsure at all n locations
canaggaaaatgcggagaagaagcttactttgacatatgaagagatggaagcagaacgggaagaggaggaggtacaagttgacactgagagtgatgacgaagagcaacaaatctacaatcctctcaagttgccgatgggttgggatggcaaacctatcccctactggctgtacaagctacatggccttgggcaggaattcaagtgtgagatatgtggaaaccatagctattgggggcgaagggcttatgagcgtcatttcaaggaatggcgtcatcagcatgggatgcgatgccttggcattcccaatactaa

SEQ ID NO: 27640 - DNA, 326 bp, Zea mays
cgtttccgcacgattactactgcttactacaggggagcaatgggcatcttgcttgtgtacgatgtcacagacgagtcatctttcaataacataagaacttggatcagaaacattgagcaacaagcttcggataacgtgaacaaaatctggtggggaaaaaaactgatatggatgaaagcaaacgggctgtgcccacttcgaaggggcaagctctcgctgacgaatacgggataaagttttttgaaacgagtgcaaagacaaacctgaatgtcgagcaagttttcttttccatagcacaggacatcaaacagagactttcggagacc

SEQ ID NO: 27641 - DNA, 326 bp, Zea mays
aacatagaaagtggaatccagtagcaacaatagagcaacaatggcgaccaagatattttccctccttatgctccttgctctttctacatgtgttgctaacgcgacaagtttccctcaatgctcacaagcgcctaaagcgtcccttcttctcccagaacatccagcaaattatagctcaatatgggaaacccagctcgtctaccatataggcttcaacaagcaatcgcagcaagcaacatacctttatcgcccttgttagttcaacaatcgccagccctatctttggtgcagtcattggtacaaactatcagggcacaacagctgca

SEQ ID NO: 27642 - DNA, 288 bp, Zea mays
acacagataagatcttgtgagggtgatgggattgacaggctggaaaaattaagtattgggggcagaaagcaggaggaagctttgagcaataggtgctttggtggtagaagtgctgcaactacacaatgtaatcttacctcagacgcatgtcctgaaactcgtcattctcaaacacagtcctctaggaagaattatgctgatgcaaccgtgtatctgctatcatttttggcggaggcactggatctcagctctttcctctgacaagcacaagagctacgcctgctgtac

SEQ ID NO: 27643 - DNA, 304 bp, Zea mays
ggagaatgttgatagatcaagtattaagaagaagaagagaaaactagaactgaataaggccattttggatgatgatcggttcaaagaaatgtttgagaataaggattttgaaattgacgaagaatcaaaagaatacctcgcacttcatcctcaggcagccacaaaggagcctcgcctgattgaagaacattttgatagtgttagcgaggacgaccaacaatctgatggtaacgcatctgacactctagcggaatctgacagtgatgatgtcatgcataattcaaagcgtataaggttatacgag

SEQ ID NO: 27644 - DNA, 326 bp, Zea mays
ggatcgtcgaacagaacagcatgaagatggtcatcgttctcgtcgtgtgcctggctctgtcagctgccagcgcctctgcaatgcagatgccctgcccctgcgcggggctgcagggcttgtacggcgctggcgccggcctgacgacgatgatgggcgccggcgggctgtacccctacgcggagtacctgatgcagccgcagtgcagcccgctggcggctgcgccctactacgccgggtgtaggcagccgagcgccatgttccagccgctccggcaacagtgctgccagcagcagatgaggatgatggacgtgcagtccgtcgcgcac

SEQ ID NO: 27645 - DNA, 316 bp, Zea mays
ggcattgcaagaaaagatagatgaactggatggaatggagtcacttaaccaaactctggttatcaaagaaagcagaagcaacattgaactgcaagaagctcgcaaagagctagaaaatggcctgcttgatctttcaggtgggcagacacatataggaatcaagagaatgggagagcttgatctaaaagcattttcaaaggcatgccaaaaggagcgtacagaaaatgcagaagttactgctgcctttctttgttcaaagtgggaggctgaaataaaaaatcctgactggcacccttttaaggtcgtcacaattgat

SEQ ID NO: 27646 - DNA, 328 bp, Zea mays
caatgggcttcgaacacccagctgtgcaagcctataggctacaacaagcgcttgcagcgagcgtcttagaacaaccaattgcccaattacaacaacaatccttggcacatctaaccatacaaaccatcgcaacgcagtagcaacaaagaaccgaggcaccctaaccgcgggtgaaacctaacgcctacttgcaacaacagctgcttgcatccaacccacttgctttggcaaacgtagctgcataccaacaacaacaacagttgcaacagtttctaccagcgctcagtcaactagccatggtgaaccctatcgcctacctacaacagca

SEQ ID NO: 27647 - DNA, 322 bp, Zea mays
  unsure (1)..(322): unsure at all n locations
tgnggagatcacccanaagtcttcaccctatctggcttgaacgttaggagctaccgctattatgatcctgcaacatgcagccttcacttcgaaggactcctggaagacctcggttctgctccttcaggttcaattgtactgctgcatgcctgtgctcacaaccctactggagtagatcctaccatcgaacagtgggaacagattaggcagctgatgagatcanaatcactgcttccgttctttgacagtgcctatcaaggctttgcaagtcggagtcttgacnaagatgctcagtcagtgcgtatgttttgtgctgatggtg

SEQ ID NO: 27648 - DNA, 318 bp, Zea mays
  unsure (1)..(318): unsure at all n locations
atnttcncgcaatgctcgcaagctcctatagcttcacttcttcccccgtacctctcaccagcggagtcttcggtatgttgggacccaattcttcaaccctacacgatccaacaggcaatcacagctggcatcttacctttatcacccttgttcctccaacaatcatcagccctattacatcagttacctttggtgcatttattggcacaaaacatcagggcacaacaactacaacaacttgtgctagcaaaccttgctgcctactctcagcaacagcagtttccttccattcaaccaactagctgcattgaactctgc

SEQ ID NO: 27649 - DNA, 320 bp, Zea mays
  unsure (1)..(320): unsure at all n locations
tgcagtccttcctgcagcagcagccgcaggcgagctcgcggcgctgatggcggcccaggtagcgcagagctgacggcgatgtgcggcctgcagctgcagcagccaggtccctgcccttgcaacgcagctgccggcggtgtctactactgaggaaactatgtactgtagtaataatgtaatggagccgctgactagctacctagctcgctagtttactcatttagcggcgatgagtaacgtagtgtcacccatcaccatgggtggcagtgtgagcaatgacctgaatgaaccattgaaatgganaggaataatatataagg

SEQ ID NO: 27650 - DNA, 329 bp, Zea mays
  unsure (1)..(329): unsure at all n locations
agnaacagcagtttcttccattcaaccaactagctgcattgaactctgcttcttatttgcaacaacaacaactaccattcagccagctacctgctgcctacccccagcaatttcttccattcaaccaactggcagcattgaactctcctgcttatttacagcagcaacaactactaccattcagccagctagctggtgtgagccctgctaccttcttgatacaaccacagttgttgccgttctaccagcacgctgcgcctaacgctggcaccctcttacaactgcaacaattgctcgcattcaaccaacttgctttgacaaacccagca

SEQ ID NO: 27651 - DNA, 296 bp, Zea mays
  unsure (1)..(296): unsure at all n locations
acactagcaacatagagagcacaatagtgtaccaacaatggcagccanaatattttgcctccttatgctccttggtctttctgcaagtgctgctacggcgaccattttcacgcaatgctcgcaagctcctatagcttcacttcttcacccgtacctctcaccagcggtgtcttcggtatgtgaaaacccaattcttcaaccctacaggatccaacaggcaatcacagctggcatcttacctttatcacccttgttcgntcaacaatcatcagccctattacatcagttacctttgg

SEQ ID NO: 27652 - DNA, 329 bp, Zea mays
caacaaatgcgttcattattccacagtgctcacttgctcctagtgccattattccacagttcctcccaccagttacttcaatgggcttcgaacatccagccgtgcaagcctacaggctacaactagcgcttgcggcgagcgccttacaacaaccaattgcccaattgcaacaacaatccttggcacatctaaccctacaaaccattgcaacgcaacaacaacaacaacaacagtttctgccatcactgagccacctagccgtggtgaaccctgtcacctacttgcaacagcagctgcttgcatccaacccacttgctctggcgaacgta

SEQ ID NO: 27653 - DNA, 332 bp, Zea mays
gcaacgacctaacaacaatggcttccaagacattatccctccttgcgcttcttgccctttttgtgagtgcaacaaatgcgttcattattccacaatgctcacttgctccgagtgccattattccacagttcctccctccagttacttcaatgggcttcgaacacccagctgtgcaagcctataggctacaacaagcgcttgcggcgagcgtcttagaacaaccaattgcccaattacaacaacaatccttagcacatctaaccatacaaaccatcgcaacgcagcagcaacaagcactgagccacctagccgtggtgaaccctatcgcctac

SEQ ID NO: 27654 - DNA, 259 bp, Zea mays
gatgtactggacacatggttttcatctggtcttttccccttaacagtacttggttggccgtctgataccactgacctccgtgctttctaccctacatcggtactagaaactggacttgatattctcttcttttgggtagcaaggatggtgatgatgggaatgcaacttggtggtgacgtgccatttcagaaggtttatttacatcctatgattcgggatgcacatggccgaaagatgtcaaaatcacttggtaacgttg

SEQ ID NO: 27655 - DNA, 278 bp, Zea mays
ctactatactatactctaggaagcaaggacaccaccgccatggcagccaagatgcttgcattgttcgctctcctagctctttgtgcaagcgccactagtgcgacccatattccagggcacttgccaccagtcatgccattgggtaccatgaacccatgcatgcagtactgcatgatgcaacaggggcttgccagcttgatggcgtgtccgtccctgatgctgcagcaactgttggccttaccgcttcagacgatgccagtgatgatgccacagatgat

SEQ ID NO: 27656 - DNA, 274 bp, Zea mays
ccaagcgaacgcactagcaacgacctaacaccaatggctaccaagatattagccctccttgcgcttcttgcccttttagtgagcgcaacaaatgcgttcattattccacagtgctcacttgctcctagtgccattattccacagttcctcccaccagttacttcaatgggcttcgaacatccagccgtgcaagcctacaggctacaactagcgcttgcggcgagcgccttacaacaaccaattgcccaattgcaacaacaatccttggcacatc

SEQ ID NO: 27657 - DNA, 276 bp, Zea mays
ggcggaaaggtcccggtctcaggccgcggccagtcccctggagatcgagaaccttgctgagataatagaagatttcaaaatggtgttggttgtgaggaatgatctgaagatggggaaggggaagattgccgcacagtgcagtcatgcaactcttgggctattcaaaaaactccaacagagagctccaaaatcactaagaaggtgggagcggtgtgggcaagttaaagtggttgtgaaaatagaaagcgaggaagacatgctagttttacaagggag

SEQ ID NO: 27658 - DNA, 275 bp, Zea mays
ctaggaagcaaggacaccaccgccatggcagccaagatgcttgcattgttcgctctcctagctctttgtgcaagcgccactagtgcgacccatattccagggcacttgccaccagtcatgccattgggtaccatgaacccatgcatgcagtactgcatgatgcaacaggggcttgccagcttgatggcgtgtccgtccctgatgctgcagcaactgttggccttaccgcttcagacgatgccagtgatgatgccacagatgatgacgcctaacat

SEQ ID NO: 27659 - DNA, 268 bp, Zea mays
gcgccatgtacggcatcaggggcagtgcaagggtccaggtcgccagcgacaacgggaccacggtgttcgacgacgtgctccgtgcggggcagctgctcatcgtaccccagggctacctcgtcgccaccaaggcgcagggagaaggcttccagtacatcgccttcgagacgaaccctgacaccatggtcagccacgtcgccgggaagaactccgtcctgagcgacttgccggccgccgtcatcgccagctcgtatgccatctccatgga

SEQ ID NO: 27660 - DNA, 274 bp, Zea mays
cgacaagcaacatagaaagtggaatccagtagcaacaatagagcaacaatggcgaccaagatattttccctccttatgctccttgctctttctgcatgtgttgctaacgcgacaattttccctcaatgctcacaagctcctatagcttcccttcttcccccataccttccatcaatgatagcttcagtatgtgaaaacccagctcttcaaccctataggctccaacaagcaatcgcagcaagcaacatacctttatcacccttgtttcaacaat

SEQ ID NO: 27661 - DNA, 272 bp, Zea mays
gatacacaaagagcatatcttccttggctcatgcaaaaggtttacttgtggaagctgagttgggtaggctctcaggctctgaagatggcatgaccgttgaagaatatgaagcaagatttactgatgttgcccaggctgaggaatttattgatgagacaagcattgatgctctagcattttgcattggaaatgttcatggaaaatatccacctagtggaccaaaccttaaattcgacttgctaaaggaccttcgtgcattaacattaaagaaa

SEQ ID NO: 27662 - DNA, 267 bp, Zea mays
gaagaagagcacaagtcatatgtgttatgtgttcacagtgagaaacttgctatagtgtttggtattataagcacgcctgctggaacaaaaattcgtgtgatgaagaatctccgagtctgtattgattgccacacagtaactaaatttatttcaaagttagctgatagggagattgtggtgcatgatgcaaactgtttccaccactttaaggatggaaacggttcctacaaggacttttggtgatcgggcaaccacttgggattatca

SEQ ID NO: 27663 - DNA, 269 bp, Zea mays
tgctactggcaaaggaaacatagcgcgcctgattaatcactcgtgtatgccaagctgctatgctaggatcgtgaccgtcagtggtgacaggagccagatcattcttattgcgaagagagacgtctctgccggagaagagctgacgtagttcctcagccctgccagtataactacctgtttgaccctgacgagtccgaagactgcaaggttccatgcctgtgcaaagctcctaactgccgtggatacatgaactagggtgctgctagaag

SEQ ID NO: 27664 - DNA, 268 bp, Zea mays
cccagctcttcagccctataggctccaacaagcaatcgcagcaagcaacatacctttatcacccttgttgtttcaacaatcgccagccctatctttggtgcagtcattggtacaaaccatcagggcacagcagctgcagcaactcgtgctacctgtgatcaaccaagtagctctggcaaacctttctccctactctcagcaacaacaatttcttccattcaaccaactgtctacactgtaacctgctgctcatgtgcagcaacaacta

SEQ ID NO: 27665 - DNA, 260 bp, Zea mays
gaactcgacaccatgaaggtgctgatcgttgcccttgctctcctggcgctcgctgcgagctccgcctccagtacaagcggcggctgtggctgccagacaccaccgtttcatctaccgcctccgttctatatgccgcctccgttctatctgccgccgcaccagcagccgcagccatggcaataccccactcaaccaccgcagctaagcccgtgccagcagttcggatcctgcggcgtcggcagcgtcggcagcccgttcct

SEQ ID NO: 27666 - DNA, 270 bp, Zea mays
ctctactatactatactctaggaagcaaggacaccaccgccatggcagccaagatgcttgcattgttcgctctcctagctctttgtgcaagcgccactagtgcgacccatattccagggcacttgccaccagtcatgccattgggtaccatgaacccatgcatgcagtactgcatgatgcaacaggggcttgccagcttgatggcgtgtccgtccctgatgctgcagcaactgttggccttaccgcttcagacgatgccagtgatgatgc

SEQ ID NO: 27667 - DNA, 269 bp, Zea mays
attattgagaccaacaagcaacatagaaagtggaatccagtagcaacaacagagcaacaatggcgaccaagatattttccctccttatgctccttgctctttctgcatgtgttgctaacgcgacaattttccctcaatgctcacaagctcctatagcttcccttcttcccccataccttccatcaatgatagcttcagtatgtgaaaacccagctcttcagccctataggctccaacaagcaatcgcagcaagcaacatacctttatca

SEQ ID NO: 27668 - DNA, 273 bp, Zea mays
atagaaagcacaatagtgtaccaacaatggcagccaaaatattttgcttccttatgctccttggtctttctgcaagtgttgctaccgcaaccattttcccacaatgctcacaagctcctatagcttcccttcttcccccatacctctcaccagcggtgtcttcaatgtgtgaaaccccaattgttcaaccctacaggatccaacaggcaatcgcaacaggcatcttaccattatcacccttgttcctccaacaaccgtcagccctattacagc

SEQ ID NO: 27669 - DNA, 271 bp, Zea mays
caattggccgcactgaaccccgctgcttatttgcagcagcaaatactactaccatttagccagctagctgcagcaagccgtgcttccttcttgacacagcaacagttgctgcctttctaccagcagtttgcggctaaccccgcaaccctcttacaactacaacaattgttgccctttgtccaacttgctttgacaaacccagcagcctcctaccaacaacacatcattggtggtgccctcttttagattgcttattagttgtaattcaata

SEQ ID NO: 27670 - DNA, 270 bp, Zea mays
catagaaagcacaatagtgtaccaacaatggcagccaaaatattttgcttccttatgctccttggtctttctgcaagtgttgctaccgcaaccattttcccacaatgctcacaagctcctatagcttcccttcttcccccatacctctcaccagcggtgtcttcaatgtgtgaaaccccaattgttcaaccctacaggatccaacaggcaatcgcaacaggcatcttaccattatcacccttgttcctccaacaaccgtcagccctatta

SEQ ID NO: 27671 - DNA, 270 bp, Zea mays
ccaaggccacctcggcggtcaccctccgcactcgcaagttcatgaccaaccgcctgctggcccgcaaacaatttgtgcttgaggttatccaccccggccgcgccaacgtctccaaggcggagttgaaggagaggcttgccaagatgtacgaggtgaaggaccccaacaccatcttcgtcttcaagttccgcacccacttcggtggaggcaagtccactggcttcggcctcatctacgataacctcgagtctgccaagaagttcgagccca

SEQ ID NO: 27672 - DNA, 266 bp, Zea mays
agcaaagcggcagtgcgtagagaggatcgtcgaacagaacagcatgaagatggtcatcgttctcgtcgtgtgcctggctctgtcagctgccagcgcctctgcaatgcagatgccctgcccctgcgcggggctgcagggcttgtacggcgctggcgccggcctgacgacgatgatgggcgccggcgggctgtacccctacgcggagtacctgagtgcaccgcagtgcagcccgctggcggcggcgccctactacgccgggtgtgggc

SEQ ID NO: 27673 - DNA, 265 bp, Zea mays
gcaacatagaaagcacaatagtgtaccaacaatggcagccaaaatattttgcctccttatgctccttggtctttctgcaagtgctgctacggcgaccattttcccgcaatgctcgcaagctcctatagcttcccttcttcccccgtacctctcaccagcggtgtcttcggtatgtgaaaacccaattcttcaaccctacaggatccaacaggcaatcgcagctggcatcttacctttatcacccttgttcctccaacaatcatca

SEQ ID NO: 27674 - DNA, 265 bp, Zea mays
cagttacctttggtgcatttattggcacaaaacatcagggcacaacaactacaacaacttgtgctagcaaaccttgctgcctactctcagcaacagcagtttcttccattcaaccaactaggttcattgaactctgcttcttatttgcaacaacaacaactaccattcagccagctacctgctgcctacccccagcaatttcttccattcaaccaactagcagcattgaactctcctgcttatttacagcagcaacaactactac

SEQ ID NO: 27675 - DNA, 262 bp, Zea mays
gatcagcaaagcggcagtgcgtagagaggatcgtcgaacagaacagcatgaagatggtcatcgttctcgtcgtgtgcctggctctgtcagctgccagcgcctctgcaatgcagatgccctgcccctgcgcggggctgcagggcttgtacggcgctggcgccggcctgacgacgatgatgggcgccggcgggctgtacccctacgcggagtacctgaggcagccgcagtgcagcccgctggcggcggcgccctactacgccgg

SEQ ID NO: 27676 - DNA, 263 bp, Zea mays
gcgccactagtgcgacccatattccagggcacttgccaccagtcatgccattgggtaccatgaacccatgcatgcagtactgcatgatgcaacaggggcttgccagcttgatggcgtgtccgtccctgatgctgcagcaactgttggccttaccgcttcagacgatgccagtgatgatgccacagatgatgacgcctaacatgatgtcaccattgatgatgccgagcatgatgtcaccaatggtcttgccgagcatgatgtcg

SEQ ID NO: 27677 - DNA, 263 bp, Zea mays
catgaacccatgcatgcagtactgcatgatgcaacaggggcttgccagcttgatggcgtgtccgtccctgatgctgcagcaactgttggccttaccgcttcagacgatgccagtgatgatgccacagatgatgacgcctaacatgatgtcaccattgatgatgccgagcatgatgtcaccaatggtcttgccgagcatgatgtcgcaaatgatgatgccacaatgtcactgcgacgccgtctcgcagattatgctgcaacagc

SEQ ID NO: 27678 - DNA, 265 bp, Zea mays
gcaacatagaaagcacaatagtgtaccaacaatggcagccaaaatattttgcttccttatgctccttggtctttctgcaagtgttgctaccgcaaccattttcccacaatgctcacaagctcctatagcttcccttcttcccccatacctctcaccagcggtgtcttcaatgtgtgaaaccccaattgttcaaccctacaggatccaacaggcaatcgcaacaggcatcttaccattatcacccttgttcctccaacaaccgtca

SEQ ID NO: 27679 - DNA, 264 bp, Zea mays
gcgagccaacaagcaacatagaaagtggaatccagtagcaacaatagagcaacaatggcgaccaagatactttccctccttatgctccttgctctttctgcatgtgttgctaacgcgacaattttccctcaatgctcacaagctcctatagcttcccttcttcccccataccttccatcaatgatagcttcagtatgtgaaaacccagctcttcaaccctataggctccaacaagcaatcgcagcaagcaacatacctttatca

SEQ ID NO: 27680 - DNA, 268 bp, Zea mays
cccaccagttacttcaatggccttcgaacacccagctgtgcaagcctataggctacaacaagcgattgcggcgagcgtcttacaacaaccaattgcccaattgcaacaacaatccttggcacatctaacaatacaaaccatcgcaacgcaacagcaacaacagttcctaccagcactgagccacctagccatggtgaaccctgtcgcctacttgcaacagcagctgcttgcatccaacccacttgctctagcaaacgtagttgcaaac

SEQ ID NO: 27681 - DNA, 265 bp, Zea mays
gcaacaactaccattcagccagctatctgctgcctacccccagcaatttcttccattcaaccaactgacagcattgaactctcctgcttatttacagcagcaacaactactaccattcagccagctagctggtgtgagccctgctaccttcttgacacaaccacagttgttgccgttctaccagcacgctgcgcctaacgctggcaccctcttacaactgcaacaattgctgccattcaaccaacttgctttgacaaacccaaca

SEQ ID NO: 27682 - DNA, 265 bp, Zea mays
gcagcagccaccgccgcctcatcctcgcatccgccgtcctgctctccgtgctcgcggctgccagcgccactgccgggacctcctgcgtgccggggtgggccatcccgcacaacccgctcccgagctgccgctggtacgtgaccagccggacctgcggcatcgggccgcgcctcccgtggccggagctgaagaggagatgctgccgggagctggcggacatcccggcgtactgccggtgcacggcgctgagcatcctcatggacgg

SEQ ID NO: 27683 - DNA, 261 bp, Zea mays
agcaattagctcatcgactccagattggagaactcgacaccatgaaggtgctgatcgttgcccttgctctcctggcgctcgctgcgagcgccgcctccagtacaagcggcggctgtggctgccagacaccaccgtttcatctaccgcctccgttctatatgccgcctccgttctatctgccgccgcagcagcagccgcagccatggcaataccccactcaaccaccgcagctaagcccgtgccagcagttcggatcctgcg

SEQ ID NO: 27684 - DNA, 256 bp, Zea mays
cgcagaagaacccgatcgacaccatgagggtgttgctcgttgccctcgctctcctggctctcgctgcgagcgccacctccacgcatacaagcagcggctgcagctgccagccaccgccgccggttcatctaccgccgccggtgcatctgccacctccggttcacctgcaacctcgggtgaatttccaaccgccggtccacctgccgccgccggtccacctgccaccgccggtccatgtgccgccgccggttcatct

SEQ ID NO: 27685 - DNA, 257 bp, Zea mays
attttgagcattcagaaacacaccaagcgaacgcactagcaacaacctaacaacaatggctaccaagatattatccctccttgcgcttcttgcgctttttgcgagcgcaacaaatgcgtccattattccacaatgctcacttgctcctagttccattattccacagttcctcccaccagttacttcaatggccttcgaacacccagctgtgcaagcctataggctacaacaagcgattgcggcgagcgtcttacaac

SEQ ID NO: 27686 - DNA, 260 bp, Zea mays
cagtgctgctaccgcaaccattttcccacaatgctcacaagctcctatagcttcctttcttcccccatacctctcaccagcggtgtcttcagtatgtgaaaacccaattcttcaaccctacaggatccaacaggcaatcgcagcaggcatcttacctttatcacccttgttcctccaacaaccgtcagccctattacagcagttacctttggtgcatttgttggcacaaaacatcaaggcacaacaactacaacaacttg

SEQ ID NO: 27687 - DNA, 261 bp, Zea mays
gctccttggtctttctgcaagtgctgctacggcgaccattttcccgcaatgctcgcaagctcctatagcttcccttcttcccccgtacctctcaccagcggtgtcttcggtatgtgaaaacccaattcttcaaccctacaggatccaacaggcaatcgcagctggcatcttacctttatcacccttgttcctccaacaatcatcagccctattacaacagttacctttggtgcatttattggcacaaaacatcagggcaca

SEQ ID NO: 27688 - DNA, 249 bp, Zea mays
ctctgacaccattgacaatgtgaaggccaagatccaggacaaggagggcattcccccagaccagcagcgtctgatctttgcgggcaagcagctggaggatggccgcactctcgcggactacaacatccagaaggagagcacccttcaccttgttctccgcctcaggggtggtatgcagatctttgtgaagaccctgactggaaaaaccataaccctggaggttgagagctcggacaccatcgacaatgt

SEQ ID NO: 27689 - DNA, 261 bp, Zea mays
tgcgttctacgaagcgttcggcctgactgtgatcgagtccatgacgtgcggtctgccaacgatcgcgacctgccatggtggccctgctgagatcatcgtggacggggtatctggcctgcacattgacccttaccacagcgacaaggccgcggatatcctggtcaacttctttgacaaatgcaaggcagatccgagctactgggacaagatctcacagggcggcctgcagagaatttatgagaagtacacctggaagctcta

SEQ ID NO: 27690 - DNA, 259 bp, Zea mays
ctattgggtacaagatcggaacgatgattgagattcccagggcagctctagtggctgacgagatcgcggacaggctgaattcttctcctttggaacgaacgacctcacgcagatgacctttggctacagcagggatgatgtggggaagttcatccccatttatctggctcagggcatcctccagcatgaccccttcgaggtaactgctgcagctcctctgtcaccctctctcatctgaggccatactcgcatctccatc

SEQ ID NO: 27691 - DNA, 262 bp, Zea mays
cgctcctatagcttcccttcttcccccataccttccatcaatgatagcttcagtatgtgaaaacccagctcttcaaccctataggcgccaacaagcaatcgcagcaagcaacatacctttatcacccttgtttcaacaatcgccagccctatctttggtgcagtcattggtacaaaccatcaaggcacagcagctgcagcaactcgtgctacctgtgatcaaccaagtagctctggcaaacctttctccctactatcagcaa

SEQ ID NO: 27692 - DNA, 208 bp, Zea mays
gctatgtagtaataatgtaatggagccgctgactagctacctagctcgctagtttactcatttagcggcgatgagtaacgtagtgtcacccatcaccatgggtggcagtgtgagcaatgacctgaatgaaccattgaaatggaaaggaataatatataaggaaaaaagatgattggaaaaccaaaaaaaaaaaaaaaaaaaaaaagaa

SEQ ID NO: 27693 - DNA, 261 bp, Zea mays
ggacgtcagcctagcaattagctcatcgactccagattggagaactcgacaccatgaaggtgctgatcgttgcccttgctctcctggcgctcgctgcgagcgccgcctccagtacaagcggcggctgtggctgccagacaccaccgtttcatctaccgcctccgttctatatgccgcctccgttctatctgccgccgcagcagcagccgcagccatggcaataccccacgcaaccaccgcagctaagcccgtgccagcagt

SEQ ID NO: 27694 - DNA, 255 bp, Zea mays
cttgagaccaactagcaacatagaaagcacaatagtgtaccaacaatggcagccaaaatattttgcttccttatgctccttggtctttctgcaagtgctgctaccgcaaccattttcccacaatgctcacaagctcctatagcttcctttcttcccccatacctctcaccagcggtgtcttcagtatgtgaaaacccaattcttcaaccctacaggatccaacaggcaatcgcagcaggcatcttacctttatca

SEQ ID NO: 27695 - DNA, 260 bp, Zea mays
ggtgtcttcagtatgtgaaaacccaattcttcaaccctacaggatccaacaggcaatcgcagcaggcatcttacctttatcacccttgttcctccaacaaccgtcagccctattacagcagttacctttggtgcatttgttggcacaaaacatcaaggcacaacaactacaacaacttgtgctaggaaaccttgctgcctactctcagcaacagcagtttcttccattcaaccaactggctgcattgaactctgctgctt

SEQ ID NO: 27696 - DNA, 260 bp, Zea mays
ggaagtcgccaagcacaacgtcaccaaggactgctggatcatcatcgccggcaaggtgtatgacgtcactccgtttatggatgagcatcctggtggagacgaggttttgctagctgtaactgggaaagatgctacagctgatttcgaagatattggccacagtgattccgcaagggacatgatggagaagtaccacatcgggcagatagatgcttcaacaatcccagcaaagcgtgctcatgtgcagccccagcaagcac

SEQ ID NO: 27697 - DNA, 259 bp, Zea mays
cgaggcaattggtctcaagtccacgtcttcagtgacaacaagtcatctgtcaactccattgcttgggctccgtatgaggttggcctctgccttgcctgtgcatcttctggtggaagaatatccatcttgacgatgcaagctgacgggggttgggatactgcaaccattgagcgagcacatcctgtcggtgcgactgccatatcctgggcccctgcaacagcgtcactagctggtgcaggggagcttgtttacaagcttg

SEQ ID NO: 27698 - DNA, 260 bp, Zea mays
ccaggtgcagagtctttcgtcatctcttctccggcgaagaacccccagtcgcccaccagatcacttgttaaactttgttgaggggtgatggcggtttctttcgcaaacctcaactccgaggcagggcttaaaaagcttgatgagtaccttctcactcgcagctacatcactggctaccaagcttccaaggatgacttggctgtctacacttcgttttcggctgctccctcgtccaagtatatcaacgtagcaaggtggtt

SEQ ID NO: 27699 - DNA, 136 bp, Zea mays
ggagatgaatgcatttctcggatcgttcatccgggacaataattaaaggggatccggatttgttcttgtgaaagagaaaaaaaaagaaagagaaaaaaaaaaagaggaaaaaaaagtaaaagaaaagagcggaaag

SEQ ID NO: 27700 - DNA, 259 bp, Zea mays
gagaccaacaagcaacatagaaagtggaatacagtagcaaaaatagagcaacaatggcggccaagatattttccatccttatgctccttgctctttctgcatgtgttgctaacgcgaccatttttcctcaatactcacaagctcctatagctgcccttcttcccccataccttccatcaatgaccgctttagtatgtgaaaacccagcccttcaaccctacaggatccagcaagcaatcgcaacaagcaacttaccttt

SEQ ID NO: 27701 - DNA, 255 bp, Zea mays
gaccattttcccgcaatgctcgcaagctcctatagcttcccttcttcccccgtacctctcaccagcggtgtcttcggtatgtgaaaacccaattcttcaaccctacaggatccaacaggcaatcgcagctggcatcttacctttatcacccttgttcctccaacaatcatcagccctattacaacagttacctttggtgcatttattggcacaaaacatcagggcacaacaactacaacaacttgtgctagcaaa

SEQ ID NO: 27702 - DNA, 252 bp, Zea mays
gtagccgcctcgctttctcctcttccgccccaccccggtgaggcgctgatccatcgcctcggacagcggctccagaacctccgcgttgcagaaacacagtagcgagaactattcggtggggccgaagatggtgtcgctgaaggtgccaaagcgcctcgccgcaagcgttctcaagtgtgggaaaggcaaagtgtggcttgaccccaatgaagttagtgagatctccatggcgaactcccgccataacatccg

SEQ ID NO: 27703 - DNA, 226 bp, Zea mays
ggacgtcagcctagcaattagctcatcgactccagattggagaactcgacaccatgaaggtgctgatcgttgcccttgctctcctggcgctcgctgcgagcgccgcctccagtacaagcggcggctgtggctgccagacaccaccgtttcatctaccgcctccgttctatatgccgcctccgttctatctgccgccgcagcagcagccgcagccatggcaataccc

SEQ ID NO: 27704 - DNA, 255 bp, Zea mays
cagcaacatagaaagcacaatagtgtaccaacaatggcagccaaaatattttgcctccttatgctccttggtctttctgcaagtgctgctacggcgaccattttcccgcaatgctcgcaagctcctatagcttcccttcttcccccgtacctctcaccagcggtgtcttcggtatgtgaaaacccaattcttcaaccctacaggatccaacaggcaatcacagctggcatcttacctttatcacccttgttcctc

SEQ ID NO: 27705 - DNA, 256 bp, Zea mays
ctttataccaactaccaacatacatagtgaagtacactagcaacatcttagcaccaatggcagccaagatttttgcgctccttgccctccttgctctttcagcaagtgttgctaccgcgactattattccacaatgctcacaacaatacctctctccagtgatagccgcgagatttgaatacccatctatacaatcctacaggctacaagaggccatcacagcaagcatcttacggtcgttagcattgaccgtcca

SEQ ID NO: 27706 - DNA, 209 bp, Zea mays
gccttcctggaagggtttaatgaactcattccacgggagctgatatctatcttcaacgacaaagagcttgaacttctgattagcggtcttccagatattgacttggacgatttgaaagcaaatacagaatattctggctacagcatagcctctccagtcatccagtggttctgggaaatcgttcaggggttcagcaaggaagacaaagc

SEQ ID NO: 27707 - DNA, 252 bp, Zea mays
gttcaaaatgtgaagctcatccgtgacaagaattcagggcagcttcagggttatggttttgttgagtttacaagccgtgcagctgcagaacgagttcttcagacatacaatggacaaatgatgccaaatgttgacttgacatttcggctgaattgggccagtgctggtgaaaagcgcgatgatactcctgaatatactatttttgttggggatttggctgcagatgttacagattacttgttacaagagaca

SEQ ID NO: 27708 - DNA, 252 bp, Zea mays
cagaccattagctttatctactccagagcgcagaagaacccgatcgacaccatgagggtgttgctcgttgccctcgctctcctggctctcgctgcgagcgccacctccacgcatacaagcggcggctgcggctgccagccaccgccgccggttcatctaccgccgccggtgcatctgccacctccggttcacctgccacctccggtgcatctcccaccgccggtccacctgccgccgccggtccacctgcca

SEQ ID NO: 27709 - DNA, 247 bp, Zea mays
gcaaagcggcagtgcgtagagaggatcgtcgaacagaacagcatgaagatggtcatcgttctcgtcgtgtgcctggctctgtcagctgccagcgcctctgcaatgcagatgccctgcccctgcgcggggctgcagggcttgtacggcgctggcgccggcctgacgacgatgatgggcgccggcgggctgtacccctacgcggagtacctgaggcagccgcagtgcagcccgctggcggcggcgccct

SEQ ID NO: 27710 - DNA, 248 bp, Zea mays
gcaagccaggttccgctgtccttcgattagtacggggaaagaagaagaagaagaagcccaggccggagaaccatcgcctgcatttcgatctgtttcaccgcaattcgcattgttagtcgtgtattggagttatgtgtacttggtttccaagaactttggttccttgtttttttttctttcttgtttgagcgtttttgggcagcgctggcctggttcctagtatggtgagaattggctgcaccttttgc

SEQ ID NO: 27711 - DNA, 247 bp, Zea mays
caccatgccactaccctactcaaccgccccggcctcagcctcatccccagccacacccatgcccgtgccaacagccgcatccaagcccgtgccagctgcagggaacctgcggcgttggcagcaccccgatcctgggccagtgcgtcgagttcctgaggcatcagtgcagcccgacggcgacgccctactgctcgcctcagtgccagtcgttgcggcagcagtgttgccagcagctcaggcaggtgga

SEQ ID NO: 27712 - DNA, 247 bp, Zea mays
cagaaacacacctagcgaacgcactagcaacgacctaacaacaatggcttccaagacattatccctccttgcgcttcttgccctttttgtgagtgcaacaaatgcgttcattattccacaatgctcacttgctccgagtgccattattccacagttcctccctccagttacttcaatgggcttcgaacacccagctgtgcaagcctataggctacaacaagcgcttgcggcgagcgtcttagaacaa

SEQ ID NO: 27713 - DNA, 246 bp, Zea mays
ggtggagccgcagcaccggtaccaggcgatcttcggcttggtcctccagtccatcctgcagcagcagccgcaaagcggccaggtcgcggggctgttggcggcgcagatagcgcacaactgacggcgatgtgcggcctgcagcagccgactccatgcccctacgctgctgccggcggtgtcccccactgaagaaactatgtgctgtagtatagccgctggctagctagctagttgagtcatttagcg

SEQ ID NO: 27714 - DNA, 247 bp, Zea mays
catacatagtgaagtacactagcaacatcttagcaccaatggcagccaagatttttgcgctccttgccctccttgctctttcagcaagtgttgctaccgcgactattattccacaatgctcacaacaatacctctctccagtgatagccgcgagatttgaatacccatctatacaatcctacaggctacaagaggccatcacagcaagcatcttacggtcgttagcattgaccgtccaacaaccata

SEQ ID NO: 27715 - DNA, 247 bp, Zea mays
ccaactagcaacatagaaagcacaatagtgtaccaacaatggcagccaaaatattttgcctccttatgctccttggtctttctgcaagtgctgctacggcgaccattttcccgcaatgctcgcaagctcctatagcttcccttcttcccccgtacctctcaccagcggtgtcttcggtatgtgaaaacccaattcttcaaccctacaggatccaacaggcaatcacagctggcatcttacctttatc

SEQ ID NO: 27716 - DNA, 246 bp, Zea mays
agacgaggagctctctgtccacctgggtgcttacatgcggcagaagaacgccaatgttgaggttactctgcgcatagtatgccaaccacaagcacttttccggatcaggccggtcaaccgatgctctgccacgattgctggccacacggaagctgtaattgctgtttcttttagccctgatggaaagagtttggcgagcggttcaggtgacaccactgttcgcttttgggacctgagtacacagac

SEQ ID NO: 27717 - DNA, 247 bp, Zea mays
tcagaccattagctttatctactccagagcgcagaagaacccgatcgacaccatgagggtgttgctcgttgccctcgctctcctggctctcgctgcgagcgccacctccacgcatacaagcggcggctgcggctgccagccaccgccgccggttcatctaccgccgccggtgcatctgccacctccggttcacctgccacctccggtgcatctcccaccgccggtccacctgccgccgccggtccac

SEQ ID NO: 27718 - DNA, 281 bp, Zea mays
agcaacaacaattcctaccagcactgagccacctagccatggtgaaccctgccgcctacttgcaacagcagttgcttgcatcaaacccacttgctctggcaaacgtagttgcaaaccagccacaaccacagctgcaacagtttctgccagcgctcagtcaactagccatggtgaaccctgccgcctacctacaacagcaacaactgctttcatctagcccgctcgctgtggccaatgcacctacatacctgcaacaacaattgttgcaacagattgtacca

SEQ ID NO: 27719 - DNA, 278 bp, Zea mays
tagaaagcacaatagtgtaccaacaatggcagccaaaatattttgcctccttatgctccttggtctttctgcaagtgctgctacggcgaccattttcccgcaatgctcgcaagctcctatagcttcccttcttcccccgtacctctcaccagcggtgtcttcggtatgtgaaaacccaattcttcaaccctacaggatccaacaggcaatcgcagctggcatcttacctttatcacccttgttcctccaacaatcatcagccctattacaacagttac

SEQ ID NO: 27720 - DNA, 276 bp, Zea mays
gtgctgccgtccaggccgctatcctcagtggtgagggcaacgagaaggtgcaggacctgcttctgcttgacgtcactcctctctctctgggtctggagactgccggaggagtgatgaccgtccttatcccgaggaacaccaccatccccaccaagaaggagcaggtgttctccacctactcggacaaccagcctggtgtgttgatccaggtgtacgagggtgagaggacccggacccgcgacaacaacctgcttgggaagttcgagctctccggca

SEQ ID NO: 27721 - DNA, 242 bp, Zea mays
gatacaaccacagttgttgccgttctaccagcacgctgcgcctaacgctggcaccctcttacaactgcaacaattgctgccattcaaccaacttgctttgacaaacccagcagcgttctaccaacaacccatcattggtggtgccctcttttagatttcttatgagttatagttcaataataaagttttttgtctgatgtttgtggcttcccagaaataagaaagtacatttctagattctt

SEQ ID NO: 27722 - DNA, 273 bp, Zea mays
cctgcagcatgtgcgatcgtgatgaaaacttcagttggccttgtctacctgcttgcctgtctgctatcacctttcatgccctccttttctgatgaagtattacgtcaattaaatttatctccagaagaaaatttgtcattaagtgaagaaaagggagaaattgcaaaggcaaaatctccttgggattttgtaccagcagggcacagaatagggaagcctgcacctctgttcaaggaattgaaagatgaagacgtagctctccatagagaaaaa

SEQ ID NO: 27723 - DNA, 271 bp, Zea mays
cttcaatgggcttcgaacacccagctgtgcaagcctataggatacaacaagcaattgcggcgagcgtcttacaacaaccaatttcccagttgcaacaacaatccttggcacatctaacaatacaaaccatcgcaacgcaacagcaacaacaattcctaccagcactgagccacctagccatggtgaaccctgccgcctacttgcaacagcagttgcttgcatcaaacccacttgctctggcaaacgtagttgcaaaccagccacaacaaca

SEQ ID NO: 27724 - DNA, 271 bp, Zea mays
agacaatcacccttgaggtggagtcttcggataccattgacaatgtcaaggccaagatccaggacaaggagggcatcccacccgaccagcagcgcctcatcttcgccggcaagcagctggaggatggccgcaccctggcggattacaacatccagaaggagagcactctccacctggtgctccgcctcaggggtggcatgcagatttttgtgaagacattgactggcaagaccatcaccttggaggtggagagctctgacaccattgacaa

SEQ ID NO: 27725 - DNA, 267 bp, Zea mays
caaatgcgttcattattccacaatgctcacttgctccgagtgccattattccacagttcctccctccagttacttcaatgggcttcgaacacccagctgtgcaagcctataggctacaacaagcgcttgcggcgagcgtcttagaacaaccaattgcccaattacaacaacaatccttggcacatctaaccatacaaaccatcgcaacgcagcagcaacaagcactgagccacctagccgtggtgaaccctatcgcctacttgcaac

SEQ ID NO: 27726 - DNA, 265 bp, Zea mays
ttcaaaaacacaccaagcgaacgcactagcaacgacctaacaccaatggctaccaagatattagccctccttgcgcttcttgcccttttagtgagcgcaacaaatgcgttcattattccacagtgctcacttgctcctagtgccagtattccacagttcctcccaccagttacttcaatgggcttcgaacatccagccgtgcaagcctacaggctacaactagcgcttgcggcgagcgccttacaacaaccaattgcccaattgc

SEQ ID NO: 27727 - DNA, 269 bp, Zea mays
gctgaagaggagatgctgccgggagctggcggacatcccggcgtactgccggtgcacggcgctgagcatcctcatggacggcgcgatcccgccgggcccggacgcgcagctggagggccgcctagaggacctgccgggctgcccgcgggaggtgcagaggggattcgccgccaccctcgtcacggaggccgagtgcaacctggccaccatcagcggcgtcgccgaatgcccctggattctcggcggcggaacgatgccctccaagtaac

SEQ ID NO: 27728 - DNA, 267 bp, Zea mays
gtgggccaccgagaagaaggagaaggctctagtcgagaagaagaagtccatcgagagccgcaagctcatcttcacccgcgcaaagcagtacgccgaggaatacgatgcccaggagaaggaactggtgcagcttaagcgcgaggcccgtttgaagggtggtttctatgtcagtcctgaggcaaagctgctctttgtggtccgcatccggggtattaatgccatgcaccctaagaccaggaagatcttgcagcttctgcgattgaggca

SEQ ID NO: 27729 - DNA, 269 bp, Zea mays
ctgccgcctacctacaacagcaacaactgatttcatctagcactctcgctgtggttaatgcacctacatacctgcaacaacagttgctgcaacagattgtaccagctctgactcagctagctgtggcaaaccctgctgcctacttgcaacagctgcttccattcaaccaactgactgtgtcgaactctgctgcgtacctacaacagcgacaacagttacttaatccactagcggtggctaacccattggtcgttgccttcctacagcag

SEQ ID NO: 27730 - DNA, 271 bp, Zea mays
ttagaacaaccaattgcccaattacaacaacaatccttggcacatctaaccatacaaaccatcgcaacgcagcagcaacaagcactgagccacctagccgtggtgaaccctatcgcctacttgcaacaacagctgcttgcatccaacccacttgctttggcaaacgtagctgcataccaacaacaacaacagttgcaacagtttctaccagcgctcagtcaactagccatggtgaaccctatcgcctacctacaacagcaacaacttcttt

SEQ ID NO: 27731 - DNA, 271 bp, Zea mays
cagcaaagcggcagtgcgtagagaggatcgtcgaacagaacagcatgaagatggtcatcgttctcgtcgtgtgcctggctctgtcagctgccagcgcctctgcaatgcagatgccctgcccctgcgcggggctgcagggcttgtacggcgctggcgccggcctgacgacgatgatgggcgccggcgggctgtacccctacgcggagtacctgaggcagccgcagtgcagcccgctggcggcggcgccctactacgccgggtgtgggcagac

SEQ ID NO: 27732 - DNA, 299 bp, Zea mays
aattaagctgcaagattcggctcgagggacgtcagcctagcaattagctcatcgactccagattggagaactcgacaccatgaaggtgctgatcgttgcccttgctctcctggcgctcgctgcgagcgccgcctccagtacaagcggcggctgtggctgccagacaccaccgtttcatctaccgcctccgttctatatgccgcctccgttctatctgccgccgcagcagcagccgcagccatggcaataccccactctaccaccgcagctaagcccgtgccagcagttcggatcctgcg

SEQ ID NO: 27733 - DNA, 271 bp, Zea mays
ccaagttccattattacacagttcctcccaccagttacttcaatgggcttcgaacacccagctgtgcaagcctataggctacaacaagcaattgcggcgagcgtcttacaacaaccaatttcccagttgcaacaacaatccttggcacatctaacaatacaaaccatcgcaacgcaacagcaacaacaattcctaccagcactgagccacctagccatggtgaaccctgccgcctacttgcaacagcagttgcttgcatcaaacccacttg

SEQ ID NO: 27734 - DNA, 267 bp, Zea mays
cgcacatatctactatactatactctaggaagcaaggacaccaccgccatggcagccaagatgcttgcattgttcgctctcctagctctttgtgcaagcgccactagtgcgacccatattccagggcacttgccaccagtcatgccattgggtaccatgaacccatgcatgcagtactgcatgatgcaacaggggcttgccagcttgatggcgtgtccgtccctgatgctgcagcaactgttggccttaccgcttcagacgatgcca

SEQ ID NO: 27735 - DNA, 264 bp, Zea mays
gaccaactagcaacatagaaagcacaatagtgtaccaacaatggcagccaaaatattttgcctccttatgctccttggtctttctgcaagtgctgctacggcgaccattttcccgcaatgctcgcaagctcctatagcttcccttcttcccccgtacctctcaccagcggtgtcttcggtatgtgaaaacccaattcttcaaccctacaggatccaacaggcaatcacagctggcatcttacctttatcacccttgttcctcca

SEQ ID NO: 27736 - DNA, 264 bp, Zea mays
attcaaggcgattaatgatgaggggatgccaatttaccagaggcctttcatgaaggggaagctgtacatccatttcacggtggagttccctgactcgttggcaccagagcagtgcaaggctctcgagacagtacttccaccaaggccttcatccaagctgacagacatggagatagatgaatgcgaggagacgactatgcatgatgtgaacaacatcgaggaagagatgcgcaggaagcaagctcacgctgcccaggaggcgta

SEQ ID NO: 27737 - DNA, 261 bp, Zea mays
ttgccctttttgtgagcgcaacaaatgcgttcattattccacaatgctcacttgctcctagtgccattataccacagttcctccgaccagttacttcaatgggcttcgaacacctagctgtgcaagcctacaagctacaacaagcgcttgcggcgagcgtcttacaacaaccaattaaccaattgcaacaacaatccttggcacatctaaccatacaaaccatcgcaacacaacagcaacaacagttcctaccagcactga

SEQ ID NO: 27738 - DNA, 262 bp, Zea mays
cagcctagcaattagctcatcgactccagattggagaactcgacaccatgaaggtgctgatcgttgcccttgctctcctggcgctcgctgcgagcgccgcctccagtacaagcggcggctgtggctgccagacaccaccgtttcatctaccgcctccgttctatatgccgcctccgttctatctgccgccgcagcagcagccgcagccatggcaataccccacactaccaccgcagctaagcccgtgccagcagttcggatc

SEQ ID NO: 27739 - DNA, 262 bp, Zea mays
agcaattagctcatcgactccagattggagaactcgacaccatgaaggtgctgatcgttgcccttgctctcctggcgctcgctgcgagcgccgcctccagtacaagcggcggctgtggctgccagacaccaccgtttcatctaccgcctccgttctatatgccgcctccgttctatctgccgccgcagcagcagccgcagccatggcaataccactctcaaccaccgcagctaagcccgtgccagcagttcggatcctgcgg

SEQ ID NO: 27740 - DNA, 260 bp, Zea mays
ccatattccagggcacttgccaccagtcatgccattgggtaccatgaacccatgcatgcagtactgcatgatgcaacaggggcttgccagcttgatggcgtgtccgtccctgatgctgcagcaactgttggccttaccgcttcagacgatgccagtgatgatgccacagatgatgacgcctaacatgatgtcaccattgatgatgccgagcatgatgtcaccaatggtcttgccgagcatgatgtcgcaaatgatgatgc

SEQ ID NO: 27741 - DNA, 257 bp, Zea mays
attggagatccagcaagacctggacagaagtggcacgtcttctacgccactgagtacccagagcaaccaatggttaaccttgagatgtgcatgactggtctggacaagaagaaagcttgtgtctttttcaagactaatgctgatgggaacacaacatgtgccaaggaaatgacaaagctctctggcatctctgaaatcatccccgagatggagatctgcgattttgacttcgaaccctgtggctactccatgaatgc

SEQ ID NO: 27742 - DNA, 260 bp, Zea mays
agtatgtgaaaacccaattcttcaaccctacaggatccaacaggcaatcgcagcaggcatcttacctttatcacccttgttcctccaacaaccgtcagccctattacagcagttacctttggtgcatttgttggcacaaaacatcaaggcacaacaactacaacaacttgtgctaggaaaccttgctgcctactctcagcaacagcagtttcttccattcaaccaactggctgcattgaactctgctgcttatttgcaac

SEQ ID NO: 27743 - DNA, 263 bp, Zea mays
cgcgccgcctgcaactgcctcaagaacgccgccgccggcgtcagcggcctcaacgccggcaacgccgccagcatcccctccaagtgcggcgtcacatcccctacaccatcagcacctccaccgactgctccagggtgaactgaaccctaaacgacgacgacgggcgacggcggccacctgaagacgatccatatctatcccgccgtacgtcggcgcccgcggatcggaccgtcatgaccatatctagctacctacgcatgatc

SEQ ID NO: 27744 - DNA, 264 bp, Zea mays
tacacagttcctcccaccagttacttcaatgggcttcgaacacccagctgtgcaagcctataggctacaacaagcaattgcggcgagcgtcttacaacaaccaatttcccagttgcaacaacaatccttggcacatctaacaatacaaaccatcgcaacgcaacagcaacaacaattcctaccagcactgagccacctagccatggtgaaccctgccgcctacttgcaacagcagttgcttgcatcaaacccacttgctctggc

SEQ ID NO: 27745 - DNA, 264 bp, Zea mays
agaagaggaagatcctgctgcctaagccatcatcccaagtgcttggtaaagatatgatgtcccttgtatcgctgctagtcagcactgagtcgtttgaggtgctcgtggtgatgttaggtactagatgggtgtcattacttatgaatgcgatgttgctgtgacagaactgcatttccttttgtactatggttgtccaagttgtcattaccatgatgtgaggtagcttaactggttgttgctataccttatgcagcattttgctga

SEQ ID NO: 27746 - DNA, 264 bp, Zea mays
ggaggatgttacaggcttattgatatccctatgagtaactgcttcaacagtggtataaataagatatttgtgatgagtcagttcaattctacttcgcttaaccgccatattcatcgtacataccttgaaggcgggatcaactttgctgatggatctgtacaggtattagcggctacacaaatgcctgaagagccagctggatggttccagggtacagcagactctatcagaaaatttatctgggtactcgaggattattacagt

SEQ ID NO: 27747 - DNA, 264 bp, Zea mays
gacccctgctgcttatttgcagcaacaacaactactaccattcagccagctagctactgcctactctcagcagcaacaatttcttccatttaaccaattcgccgcactgaacccctctgcttatttccagcagcaaatactactaccatttggccagctagctacaacaagccccgcttccttcttgacacaacaacaattgcttccgttctaccagcagtttgtggctaaccccgcaacccttttacaactgcaacagttgct

SEQ ID NO: 27748 - DNA, 263 bp, Zea mays
gtgctgctacggcgaccattttcccgcaatgctcgcaagctcctatagcttcccttcttcccccgtacctctcaccagcggtgtcttcggtatgtgaaaacccaattcttcaaccctacaggatccaacaggcaatcacagctggcatcttacctttatcacccttgttcctccaacaatcatcagccctattacatcagttacctttggtgcatttattggcacaaaacatcagggcacaactacaacaacttgtgctagca

SEQ ID NO: 27749 - DNA, 258 bp, Zea mays
gatatggacaccatcaccatcagcatgaccaccacaagatccaccgattcgagcagggcgacgtggtggccatgccggccggcgcccagcactggctgtacaacgacggcgacgcgccgcttgtggcggtctacgtcttcgacgagaacaacaacatcaaccagctcgagccttccatgaggaaattcttgctggctgggggcttcagcaaggggcagccccacttcgccgagaacatcttcaaagggattgacgccc

SEQ ID NO: 27750 - DNA, 260 bp, Zea mays
agctgctccgtctcacaaaccctctagcttgctttgctgctccacctgcaagtctgcaaccgcgtacagagatgtcgacggtgagccgtgcgtccctcgaccagaagctcgccctcgccaagcgctgctcccgagaggcgaccctcgccggagccaaggcggcagccgtggcgactatcgcctccgcgatccccaccctggccagcgtgcggatgctgccatgggccaaggccaacatcaaccccaccggccaggcgctc

SEQ ID NO: 27751 - DNA, 258 bp, Zea mays
gcacacagcaatggcgttcacgcggcgtcatccgtgcggcatcctcctcctctccctgctggcggcatccggctcgctgtcgctggccgccaccggcccgggcgacgtggccgtcttctggggccggaacaaggacgagggcacgctgcgcgaggcctgcgacacgggcacctacaccaccgtcatcatctccttcctccgaggcttcggccacggcgccgcctactactcgctcgacctgtacatcgaccagggcgg

SEQ ID NO: 27752 - DNA, 258 bp, Zea mays
caaggaggacaaagagaagagagatgcaattgacacaaaaaatcaggccgattctgtggtctaccagactgagaagcaactgaaggagcttggcgataaagtccccgctcccgtgaaagagaaggtggatgtgaagctccaggagctcaaagaggcaatatctggtggatcaacacagagtatgaaggatgccatgtctgctttgaaccaggaggtgatgcagattggccaggcaatgtataaccagtctggtgccag

SEQ ID NO: 27753 - DNA, 255 bp, Zea mays
gcaacatagaaagcacaatagtgtaccaacaatggcagccaaaatattttgcttccttatgctccttggtctttctgcaagtgctgctaccgcaaccattttcccacaatgctcacaagctcctatagcttcctttcttcccccatacctctcaccagcggtgtcttcagtatgtgaaaacccaattcttcaaccctacaggatccaacaggcaatcgcagcaggcatcttacctttatcacccttgttcctcca

SEQ ID NO: 27754 - DNA, 257 bp, Zea mays
ggctgccagacaccaccgtttcatctaccgcctccgttctatatgccgcctccgttctatctgccgccgcagcagcagccgcagccatggcaataccccactcaaccaccgcagctaagcccgtgccagcagttcggatcctgcggcgtcggcagcgtcggcagcccgttcctgggccagtgcgtcgagttcctgaggcaccagtgcagcccggcggcgacgccctacggctcgccacagtgccaggcgctgcagca

SEQ ID NO: 27755 - DNA, 256 bp, Zea mays
cgaacacattagcaacaacctaacaacaatggctaccaagatattatccctccttgcgcttcttgcgctttttgcgagcgcaacaaatgcgttcattattccacaatgctcacttgctccaagttccattattacacagttcctcccaccagttacttcaatgggcttcgaacacccagctgtgcaagcctataggctacaacaagcaattgcggcgagcgtcttacaacaaccaatttcccagttgcaacaacaa

SEQ ID NO: 27756 - DNA, 259 bp, Zea mays
atgtcaccaatggtcttgccgagcatgatgtcgcaaatgatgatgccacaatgtcactgcgacgccgtctcgcagattatgctgcaacagcagttaccattcatgttcaacccaatggccatgacgattccacccatgttcttacagcaaccctttgttggtgctgcattctagatagaaatatttgtgttgtatcgaataatgagttgacatgccatcgcgtgtgactcattattaacaataaaacaagtttcctctt

SEQ ID NO: 27757 - DNA, 95 bp, Zea mays
attttagattacatatgagatgtactcgataatggtgccctcattccggcatgtgtttcctagaaataatcaatatattgattgagatttatctc

SEQ ID NO: 27758 - DNA, 220 bp, Zea mays
gaaacacaccaagcgaacacattagcaacaacctaacaacaatggctaccaagatattatccctccttgcgcttcttgcgctttttgcgagcgcaacaaatgcgttcattattccacaatgctcacttgctccaagttccattattacacagttcctcccaccagttacttcaatgggcttcgaacacccagctgtgcaagcctataggctacaacaagc

SEQ ID NO: 27759 - DNA, 272 bp, Zea mays
ctctgcttcttatttgcaacaacaacaactaccattcagccagctacctgctgcctacccccagcaatttcttccattcaaccaactggcagcattgaactctcctgcttatttacagcagcaacaactactaccattcagccagctagctggtgtgagccctgctaccttcttgatacaaccacagttgttgccgttctaccagcacgctgcgcctaacgctggcaccctcttacaactgcaacaattgctgccattcaaccaacttgctt

SEQ ID NO: 27760 - DNA, 270 bp, Zea mays
caacaatccttggcacatctaaccctacaaaccattgcaacgcaacaacaacaacaacaacagtttctgccatcactgagccacctagccgtggtgaaccctgtcacctacttgcaacagcagctgcttgcatccaacccacttgctctggcgaacgtagctgcataccagcaacaacaacagctgcaacagtttatgccagtgctcagtcaactagccatggtgaaccctgccgtctacctacaactactttcatctagcccgctcgcg

SEQ ID NO: 27761 - DNA, 103 bp, Zea mays
tgagaccaacaagcaacatagaaagtggaatccagtagcaacaacagagcaacaatggcgaccaagatattttccctccttatgctccttgctctttctgcat

SEQ ID NO: 27762 - DNA, 129 bp, Zea mays
cagatccaagaagagggaagagcaccaaggaccttcggcgcccgttcaggatccacatcttcccgagcgagttcttggttgacctcttcccccttcggacaacctcaaaggctcttggtgtagcttgca

SEQ ID NO: 27763 - DNA, 264 bp, Zea mays
tggccatgatgatggcgcagaacatgccggccatgggtggactctaccagtaccagctgcccagctaccgcaccaacccctgtggcgtctccgctgccattccgccctactactgattcatgatatttgggaaatctcctctatccatctctctctatctatatatgtaataatgcagtaagacgacacacattatcatgtgtggtatgaccaataatatatgcatggtcataataaagttttggttttaatgaatcaaaaaca

SEQ ID NO: 27764 - DNA, 264 bp, Zea mays
gcgacggtgaactgcgcggacaacacgggcgccaagaacctctacatcatctccgtcaagggcatcaagggccgcctcaaccgcctcccgtccgcctgcgttggcgacatggtcatggccaccgtcaagaaggggaagcccgacctcaggaagaaggtgatgcccgccgtcatcgtccgccagcgcaagccgtggcgccgcaaggacggtgtctacatgtacttcgaagataatgctggagtgattgtgaatcccaagggtgag

SEQ ID NO: 27765 - DNA, 263 bp, Zea mays
ccattattacacagttcctcccaccagttacttcaatgggcttcgaacacccagctgtgcaagcctataggctacaacaagcaattgcggcgagcgtcttacaacaaccaatttcccagttgcaacaacaatccttggcacatctaacaatacaaaccatcgcaacgcaacagcaacaacaattcctaccagcactgagccacctagccatggtgaaccctgccgcctacttgcaacagcagttgcttgcatcaaacccactt

SEQ ID NO: 27766 - DNA, 261 bp, Zea mays
catatctactatactatactctaggaagcaaggacaccaccgccatggcagccaagatgcttgcattgttcgctctcctagctctttgtgcaagcgccactagtgcgacccatattccagggcacttgccaccagtcatgccattgggtaccatgaacccatgcatgcagtactgcatgatgcaacaggggcttgccagcttgatggcgtgtccgtccctgatgctgcagcaactgttggccttaccgcttcagacgatgc

SEQ ID NO: 27767 - DNA, 260 bp, Zea mays
caaagcggcagtgcgtagagaggatcgtcgaacagaacagcatgaagatggtcatcgttctcgtcgtgtgcctggctctgtcagctgccagcgcctctgcaatgcagatgccctgcccctgcgcggggctgcagggcttgtacggcgctggcgccggcctgacgacgatgatgggcgccggcgggctgtacccctacgcggagtacctgaggcagccgcagtgcagcccgctggcggcggcgccctactacgccgggtgt

SEQ ID NO: 27768 - DNA, 259 bp, Zea mays
tcctgcagtccttcctgcagcagcagccgcagggcgagctcgcggcgctgatggcggcccaggtagcgcacagctgacggcgatgtgcggcctgcagctgcagcagccaggtccctgcccttgcaacgcagctgccggcggtgtctactactgaggaaactatgtactgtagtaataatgtaatggagccgctgactagctacctagctcgctagtttactcatttagcggcgatgagtaacgtagtgtcacccatcac

SEQ ID NO: 27769 - DNA, 262 bp, Zea mays
ggcaatcacagctggcatcttacctttatcacccttgttcctccaacaatcatcagccctattacatcagttacctttggtgcatttattggcacaaaacatcagggcacaacaactacaacaacttgtgctagcaaaccttgctgcctactctcagcaacagcagtttcttccattcaaccaactagctgcattgaactctgcttcttatttgcaacaacaacaactaccattcagccagctacctgctgcctacccccag

SEQ ID NO: 27770 - DNA, 261 bp, Zea mays
gatagatcatggacactagccaacggtactggtgtgattgatattcaacacccttgcaggtctaatgttgctgttcggaaggagctgcacaaaccagcttcagatcgctcttgtatccatctcgagtttgacatttctggcactggtcttgtgtatgaaaccggagaccatgttggtgtatatgcagaaaattctgttcagactgtggaggaggttgaaaggctacttgacctttctccagacacattcttctccatccat

SEQ ID NO: 27771 - DNA, 262 bp, Zea mays
aagcaacatagaaagtggaatccagtagcaacaacagagcaacaatggcgaccaagatattttccctccttatgctccttgctctttctgcatgtgttgctaacgcgacaattttccctcaatgctcacaagctcctatagcttcccttcttcccccataccttccatcaatgatagcttcagtatgtgaaaacccagctcttcagccctataggctccaacaagcaatcgcagcaagcaacatacctttatcacccttgtt

SEQ ID NO: 27772 - DNA, 259 bp, Zea mays
cgtcgccgctgagatcctaggaagaaatggagctctctcgcaagctcttcacggccgtcctcctcgtcatgctgctgctgctgtccgcagaggtcgggccggtggcggtggcggaggcgcggacgtgccagtcgcagagccacaggttccggggcccctgcctccgccggtccaactgcgccaacgtctgcaggaccgaggggttccccggcggcaggtgccgcggcttccgccgccgctgcttctgcaccacgcactg

SEQ ID NO: 27773 - DNA, 259 bp, Zea mays
attctttctccccgcgtgctctctatctctcccctctttctctccctctgcccgacgactaggccgccgccgccacggccccgccgccgccgccgtgcccaggtctttgtcggtccttgtccggcaacgagcaccctacagatggaatctgtgggctttatgaaaggaaaattagggatatcaacccaatgatcccaaacataacttatgacatcagcgacctctataacttcattgatggcctagccgacattagtgc

SEQ ID NO: 27774 - DNA, 258 bp, Zea mays
ccgtcagccctattacagcagttacctttggtgcatttgttggcacaaaacatcaaggcacaacaactacaacaacttgtgctaggaaaccttgctgcctactctcagcaacagcagtttcttccattcaaccaactggctgcattgaactctgctgcttatttgcaacaacaactaccattcagtcagctagctgctgcctacccccagcaatttcttccattcaaccaactggcagcattgaactctgctgcttat

SEQ ID NO: 27775 - DNA, 256 bp, Zea mays
agcattcagaaacacacctagcgaacgtcactagcaacgacctaacaacaatggcttccaagacattatccctccttgcgcttcttgccctttttgtgagtgcaacaaatgcgttcattattccacaatgctcacttgctccgagtgccattattccacagttcctccctccagttacttcaatgggcttcgaacacccagctgtgcaagcctataggctacaacaagcgcttgcggcgagcgtcttagaacaacc

SEQ ID NO: 27776 - DNA, 253 bp, Zea mays
caactagcaacatagaaagcacaatagtgtaccaacaatggcagccaaaatattttgcctccttatgctccttggtatttctgcaagtgctgctacggcgaccattttcccgcaatgctcacaagctcctatagcttcccttcttcccccgtacctctcaccagcggtgtcttcggtatgtgaaaacccaattcttcaaccctacaggatccaacaggcaatcgcagctggcatcttacctttatcacccttg

SEQ ID NO: 27777 - DNA, 253 bp, Zea mays
tcctatagcttcccttcttcccccgtacctctcaccagcggtgtcttcggtatgtgaaaacccaattcttcaaccctataggatccaacaggcaatcgcagctggcatcttacctttatcacccttgttcctccaacaatcatcagccctattacagcagttacctttggtgcatttattggcacaaaacatcagggcacaacaactacaacaacttgtgctagcaaaccttgctgcctactctcagcaacaa

SEQ ID NO: 27778 - DNA, 254 bp, Zea mays
cgaaggcaagaccgggttccacatgggccgcctcagcgtcgactgtaacgtcgtggagccggcggacgtcaagaaggtggccaccacattgcagcgcgccatcaaggtggtcggcacgccggcgtacgaggagatggtgaggaactgcatgatccaggatctctcctggaagggccctgccaagaactgggagaacgtgctgctcagcctcggggtcgccggcggcgagccaggggtcgaaggcgaggagatcg

SEQ ID NO: 27779 - DNA, 255 bp, Zea mays
caagcaacatagaaagtggaatccagtagcaacaacagagcaacaatggcgaccaagatattttccctccttatgctccttgctctttctgcatgtgttgctaacgcgacaattttccctcaatgctcacaagctcctatagcttcccttcttcccccataccttccatcaatgatagcttcagtatgtgaaaacccagctcttcagccctataggctccaacaagcaatcgcagcaagcaacatacctttatca

SEQ ID NO: 27780 - DNA, 254 bp, Zea mays
ccttgctctttctgcatgtgttgctaacgcgacaattttccctcaatgctcacaagctcctatagcttcccttcttcccccataccttccatcaatgatagcttcagtatgtgaaaacccagctcttcagccctataggctccaacaagcaatcgcagcaagcaacatacctttatcacccttgttgtttcaacaatcgccagccctatctttggtgcagtcattggtacaaaccatcagggcacagcagctgc

SEQ ID NO: 27781 - DNA, 258 bp, Zea mays
ggcagccaaaatattttgcttccttatgctccttggtctttctgcaagtgctgctaccgcaaccattttcccacaatgctcacaagctcctatagcttcctttcttcccccatacctctcaccagcggtgtcttcagtatgtgaaaacccaattcttcaaccctacaggatccaacaggcaatcgcagcaggcatcttacctttatcacccttgttcctccaacaaccgtcagccctattacagcagttacctttggt

SEQ ID NO: 27782 - DNA, 190 bp, Zea mays
gaagcaccaaagccaaagccaaagaatcctcttgacttgctgccaccaagcaagatggtccttgatgactggaagaggctatactcaaacacaaagactaacttccgggaggttgccatcaaaggtttctgggacatgtacgacccagagggctactctttgtggttctgtgactacaagtacaatgatg

SEQ ID NO: 27783 - DNA, 256 bp, Zea mays
agctggcatcttacctttatcacccttgttcctccaacaatcatcagccctattacatcagttacctttggtgcatttattggcacaaaacatcagggcacaacaactacaacaacttgtgctagcaaaccttgctgcctactctcagcaacagcagtttcttccattcaaccaactagctgcattgaactctgcttcttatttgcaacaacaacaactaccattcagccagctacctgctgcctacccccagcaa

SEQ ID NO: 27784 - DNA, 256 bp, Zea mays
aacaatacaagccatcacaacgcaacagcaacaacagttcctaccagcactgagccacctagccatggtgaaccctgccgcctacttgcaagagcagctgcttgcatccaacccacttgctctggcgaacgtagttgcaaaccagcaacaacaacagctacaacagtttctgccaacgctcagtcaactagccatggtgaaccctgccgcctacgtacaacaacaacaactgctttcatctagcccgctcgctgtg

SEQ ID NO: 27785 - DNA, 251 bp, Zea mays
attgagaccaactagcaacatagaaagcacaatagtgtaccaacaatggcagccaaaatattttgcctccttatgctccttggtctttctgcaagtgctgctacggcgaccattttcccgcaatgctcgcaagctcctatagcttcccttcttcccccgtacctctcaccagcggtgtcttcggtatgtgaaaacccaattcttcaaccctacaggatccaacaggcaatcacagctggcatcttaccttt

SEQ ID NO: 27786 - DNA, 251 bp, Zea mays
agcccgtgccagcagttcggatcctgcggcgtcggcagcgtcggcagcccgttcctgggccagtgcgtcgagttcctgaggcaccagtgcagcccggcggcgacgccctacggctcgccacagtgccaggcgctgcagcagcagtgctgccaccagatcaggcaggtggagccgctgcaccggtaccaggcgacatacggtgtggtcctgcagtccttcctgcagcagcagccgcagggcgagctcgcggc

SEQ ID NO: 27787 - DNA, 117 bp, Zea mays
aattagctcatcgactccagattggagaactcgacaccatgaaggtgctgatcgttgcccttgctctcctggcgctcgctgcgagcgccgcctccagtacaagcggcggctgtggct

SEQ ID NO: 27788 - DNA, 106 bp, Zea mays
catgcaatgtttttgttgtcaaggacaatgttatttctaccccagcaataaaagggacaatattacctggtatcacaagggaaagtataattgacgctgctttgag

SEQ ID NO: 27789 - DNA, 249 bp, Zea mays
aagcaatcgcagcaagcaacatacctttatcacccttgtttcaacaatcgccagccctatctttggtgcagtcattggtacaaaccatcaaggcacagcagctgcagcaactcgtgctacctgtgatcaaccaagtagctctggcaaacctttctccctactatcagcaacaacaatttcttccattcaaccaactatctacactgaaccctgctgcttatttgcagcaacaactattaccattcagcc

SEQ ID NO: 27790 - DNA, 248 bp, Zea mays
tgggtcttcagaccattagctttatctactccagagcgcagaagaacccgatcgacaccatgagggtgttgctcgttgccctcgctctcctggctctcgctgcgagcgccacctccacgcatacaagcagcggctgcggctgccagccaccgccgccggttcatctaccgccgccggtgcatctgccacctccggttcacctgccacctccggtgcatctcccaccgccggtccacctgccgccgccg

SEQ ID NO: 27791 - DNA, 247 bp, Zea mays
gctcgccacagtgccaggcgctgcagcagcagtgctgccaccagatcaggcaggtggagccgctgcaccggtaccaggcgacatacggtgtggtcctgcagtccttcctgcagcagcagccgcagggcgagctcgcggcgctgatggcggcccaggtagcgcacagctgacggcgatgtgcggcctgcagctgcagcagccaggtccctgcccttgcaacgcagctgccggcggtgtctactactga

SEQ ID NO: 27792 - DNA, 249 bp, Zea mays
aagaacccgatcgacaccatgagggtgttgctcgttgccctcgctctcctggctctcgctgcgagcgccacctccacgcatacaagctgcggctgcggctgccagccaccgccgccggttcatctaccgccgccggtgcatctgccacctccggttcacctgccacctccggtgcatctcccaccgccggtccacctgccgccgccggtccacctgccaccgccggtccatgtgccgccgccggttcat

SEQ ID NO: 27793 - DNA, 247 bp, Zea mays
gaaacacaccaagcgaacgcactagcaacgacctaacaacaatggctaccaagatattagccctccttgcgcttcttgccctttttgtgagcgcaacaaatgcgttcattattccacaatgctcacttgctcctagtgccattattccacagttcctcccaccagttacttcaatgggcttcgaacacctagctgtgcaagccaacatgcaacaacaagcgcttgcggcgagcgtcttacaacaacc

SEQ ID NO: 27794 - DNA, 248 bp, Zea mays
caccagtgcagcccggcggcgacgccctacggctcgccacagtgccaggcgctgcagcagcagtgctgccaccagatcaggcaggtggagccgctgcaccggtaccaggcgacatacggtgtggtcctgcagtccttcctgcagcagcagccgcagggcgagctcgcggcgctgatggcggcccaggtagcgcacagctgacggcgatgtgcggtctgcagctgcagcagccaggtccctgcccttgc

SEQ ID NO: 27795 - DNA, 203 bp, Zea mays
agctgggtgttgcaccgtgtctgcattatctgtggttacattctggaccctgtattttctatgcttttatgcccctactgtttagtattaattatcaataaatttgtttgggacggttgaaaaaaaaaaaaaaaaaacaaaaaaaaaaaaaaaaaaaaaaaaaaaaaaaaaaaaaacaaaaaaaagaaaacaaacaccaaaaa

SEQ ID NO: 27796 - DNA, 129 bp, Zea mays
gtgctcacaaacttctggggcatgaattttaccaccgataagctcagatctctagtaaagaagtggcagacattgattgaagcccatgttgatgtcaagacaaccgacaactacatgctgcgtttgttc

SEQ ID NO: 27797 - DNA, 115 bp, Zea mays
ccttgtagctagctcatatgtctgaataataagcacagcaagaagatgaatgcatttctcggatcgttcatccggaacaataattaaaggggatccggatttgttcttgtgatat

SEQ ID NO: 27798 - DNA, 127 bp, Zea mays
cgagcgccacctccacgcatacaagcggcggctgcggctgccagccaccgccgccggttcatctaccgccgccggtgcatctgccacctccggttcacctgccacctccggtgcatctcccaccgtc

SEQ ID NO: 27799 - DNA, 122 bp, Zea mays
caaccatcgcaacgcaacagcaacaacaatttctaccagcactgagccaactagctgtggtgaaccctgtcgcctacttgcaacagcagttgcttgcatccaacccacttgctctggcaaac

SEQ ID NO: 27800 - DNA, 121 bp, Zea mays
tgacggcgacgcctactgctcgcctcagtgccagtcgttgcggcagagtgttgccagcagctcaggcaggtggagccgcagcaccggtaccaggcgatcttcggcttggtgctccagtcca

SEQ ID NO: 27801 - DNA, 121 bp, Zea mays
cgcaatttcttccattcaaccaactgacagcattgaactctcctgcttatttacagcagcaacaactactaccattcagccagctagctggtgtgagccctgctaccttcgtgacacaacc

SEQ ID NO: 27802 - DNA, 123 bp, Zea mays
gtcgacgggttcagaaacctgagatgcgcaaggaagctgacgagcgggacgccctcacgggccgcaccgctggccgaccctgatcttctgtgaagggttcgagttggagcacgcctgtcggga

SEQ ID NO: 27803 - DNA, 120 bp, Zea mays
gcaagcacaatagtgtaccaacaatggcagccaaaatattttgcttccttatgctccttggtctttctgcaagtgctgctaccgcaaccattttcccacaatgctcacaagctcgtatag

SEQ ID NO: 27804 - DNA, 125 bp, Zea mays
aagaacccgatcgacaccatgagggtgttgctcgttgccctcgctctcctggctctcgctgcgagcgccacctccacgcatacaagcggcggctgcggctgccagccaccgccgccggttcatct

SEQ ID NO: 27805 - DNA, 123 bp, Zea mays
cagcacaatagtgtaccaacaatggcagccaaaatattttgcttccttatgctccttggtctttctgcaagtgctgctaccgcaaccattttcccacaatgctcacaagctcctatagcttcc

SEQ ID NO: 27806 - DNA, 118 bp, Zea mays
ggacgtcagcctagcaattagctcatcgactccagattggagaactcgacaccatgaaggtgctgatcgttgcccttgctctcctggcgctcgctgcgagcgccgcctccagtacaag

SEQ ID NO: 27807 - DNA, 117 bp, Zea mays
gacatcattggtgtgaccaaaggtaaaggttatgagggcgtggtcactcgttggggtgtcacccgccttccccgcaaaacccacaggggtctccgcaaggttgcttgtatcggtgca

SEQ ID NO: 27808 - DNA, 116 bp, Zea mays
tcagcattcaaaaacacaccaagcgaacgcactagcaacgacctaacaccaatggctaccaagatattagccctccttgcgcttcttgcccttttagtgagcgcaacaaatgcgtt

SEQ ID NO: 27809 - DNA, 119 bp, Zea mays
cgcagtgcagcccgctggcggcggcgccctactacgccgggtgtgggcagccgagcgccatgttccagccgctccggcaacagtgctgccagcagcagatgaggatgatggacgtgcag

SEQ ID NO: 27810 - DNA, 118 bp, Zea mays
cgacaagcaacatagaaagtggaatccagtagcaacaatagagcaacaatggcgaccaagatattttccctccttatgctccttgctctttctacatgtgttgctaacgcgacaattt

SEQ ID NO: 27811 - DNA, 116 bp, Zea mays
catattccagggcacttgccaccagtcatgccattgggtaccatgaacccatgcatgcagtactgcatgatgcaacaggggcttgccagcttgatggcgtgtccgtccctgatgct

SEQ ID NO: 27812 - DNA, 118 bp, Zea mays
ctactatactatactctaggaagcaaggacaccaccgccatggcagccaagatgcttgcattgttcgctctcctagctctttgtgcaagcgccactagtgcgacccatattccagggc

SEQ ID NO: 27813 - DNA, 121 bp, Zea mays
gctagttgctgcctacccccagcaatttcttccattcaaccaactagcagcattgaactctgctgcttatttacagcagcaacaactactaccattcagccagctaggtgatgtgagccct

SEQ ID NO: 27814 - DNA, 118 bp, Zea mays
cttttgtctccttatgctccttggtctttctgcaagtgctgctacggcgaccattttcccgcaatgctcgcaagctcctatagcttcccttcttcccccgtacctctcagcagcggtg

SEQ ID NO: 27815 - DNA, 121 bp, Zea mays
catctaaccatacaaaccatcgcaacgcaacagcaacaacaatttctaccagcactgagccaactagctgtggtgaaccctgtcgcctacttgcaacagcagttgcttgcgtccaacccac

SEQ ID NO: 27816 - DNA, 116 bp, Zea mays
cgacaactacaacaacttgtgctagcaaaccttgctgcctactctcagcaacagcagtttcttccattcaaccaactagctgcattgaactctgcttcttatttgcaacaacaaca

SEQ ID NO: 27817 - DNA, 117 bp, Zea mays
gtgcgctggtttatgatcactcgattcaggcattcctgccatatgatcgacagtggataaagcaaaagttgtttcaacacctgaagaaattggctcagcggtagcacaactgttgtt

SEQ ID NO: 27818 - DNA, 113 bp, Zea mays
gcttcccttcttcccccgtacctctcaccagcggtgtcttcggtatgtgaaaacccaattcttcaaccctacaggatccaacaggcaatcgcagctggcatcttacctttatg

SEQ ID NO: 27819 - DNA, 112 bp, Zea mays
ctgagatcaaaatcactgcttccgttctttgacagtgcctatcaaggctttgcaagtggaagtcttgacaaagatgctcagtcagtgcgtatgtttgttgctgatggtggtg

SEQ ID NO: 27820 - DNA, 112 bp, Zea mays
cggatcctgcggcgtcggcagcgtcggcagcccgttcctgggccagtgcgtcgagttcctgaggcaccagtgcagcccggcggcgacgccctacggctcgccacagtgccag

SEQ ID NO: 27821 - DNA, 108 bp, Zea mays
tggcgtcgtcgtctagcagcagccaccgccgcctcatcctcgcagccgccgtcctgctctccgtgctcgcggctgccagcgccagtggcgggacctcctgcgtgccgg

SEQ ID NO: 27822 - DNA, 221 bp, Zea mays
cgcgctgccagcagcagatgaggatgatggacgtgcagtccgtcgcgcacagctgcagatgatgatgcagcttgagcgtgccgctgccgccagcagcagcctgtacgagccagctctgatgcagcagcagcagcagctgctggcagcccagggtctcaatcccatggccatgatgatggcgcagaacatgccgggcctgggtggactctaccagtaccagc

SEQ ID NO: 27823 - DNA, 100 bp, Zea mays
cagcattcaaaaacacaccaagcgaacgcactagcaacgacctaacaccaatggctaccaagatattagccctccttgcgcttcttgcccttttagtgag

SEQ ID NO: 27824 - DNA, 170 bp, Zea mays
cgcttcaacaagcaatcgcagcaagcaacatacctttatcgcccttgttgtttcaacaatcaccagccctatctttggtgcagtcattggtacaaaccatcagggcacaacagctgcagcaactcgtgctacctgtgatcaaccaagtagctctggcaaacctttctccc

SEQ ID NO: 27825 - DNA, 254 bp, Zea mays
gcgtagagaggatcgtcgaacagaacagcatgaagatggtcatcgttctcgtcgtgtgcctggctctgtcagctgccagcgcctctgcaatgcagatgccctgcccctgcgcggggctgcagggcttgtacggcgctggcgccggcctgacgacgatgatgggcgccggcgggctgtacccctacgcggagtacctgaggcagccgcagtgcagcccgctggcggcggcgccctactacgccgggtgtgggcag

SEQ ID NO: 27826 - DNA, 260 bp, Zea mays
cgcaacatagaaagtggaatccagtagcaacaatagagcaacaatggcgaccaagatattttccctccttatgctccttgctctttctacatgtgttgctaacgcgacaattttccctcaatgctcacaagctcctatagcttcccttcttcccccataccttccatcaattatagcttcaatatgtgaaaacccagctcttcaaccatataggcttcaacaagcaatcgcagcaagcaacatacctttatcgcccttgt

SEQ ID NO: 27827 - DNA, 101 bp, Zea mays
ggcaatcgcaacaggcatcttaccattatcacccttgttcctccaacaaccgtcagccctattacagcagttacctttggtccatttggtggcacaaaaca

SEQ ID NO: 27828 - DNA, 255 bp, Zea mays
  unsure (1)..(255): unsure at all n locations
cgtgatgggaacatatgtcatcgcaaagatcaagaaagaagacggaaatatttatgtcttgttgaatgggatgggtgccacaccagaaggaaatgttccattcctcgatttgtttgatataaatactgggagtanagagcgtatatgggagagcgacagggaaaagtactatgaaactgttgttgcactgatgtcagacaaaactgacggggaactgctccttgatcagttaaagatacttacgtcgaaagaatc

SEQ ID NO: 27829 - DNA, 112 bp, Zea mays
cccccactgaagaaactatgtgctgtagtatagccgctggctagctagctagttgagtcatttagcggcgatgattgagtaataatgtgtcacgcatcaccatgggtggcag

SEQ ID NO: 27830 - DNA, 120 bp, Zea mays
caagaaggttgtcatttctgctcctagcaaggatgcccccatgttcgttgttggtgtcaacgagaaggagtacaagtctgacatcaacattgtctctaatgctagctgcacaaccaactg

SEQ ID NO: 27831 - DNA, 252 bp, Zea mays
cgtttctgccatcactgagccacctagccgtggtgaaccctgtcacctacttgcaacagcagctgcttgcatccaacccacttgctctggcgaacgtagctgcataccagcaacaacaacagctgcaacagtttatgccagtgctcagtcaactagccatggtgaaccctgccgtctacctacaactactttcatctagcccgctcgcggtgggcaatgcacctacgtacctacaacaaacagtgctgcaac

SEQ ID NO: 27832 - DNA, 167 bp, Zea mays
caagtagctctggcaaacctttctccctactctcagcaacaacaatttcttccattcaaccaactgtctacactgaaccctgctgcttatttgcagcaacaactattaccattcagccagctagctactgcctactctcagcaacaacaacttcttccatttaacca

SEQ ID NO: 27833 - DNA, 155 bp, Zea mays
agtgcacttcattgttcagcagcattttgatgctccatcaatgtgggcaatctttccacttcaggacctccttgcactgaaagacaagtacaccaaaagaccagcgccagaggaaacaatcaatgaccccactaacccagagcactattggagat

SEQ ID NO: 27834 - DNA, 96 bp, Zea mays
tgccaggcgctgcagcagcagtgctgccaccagatcaggcaggtggagccgctgcaccggtaccaggcgacatacggtgtggtcctgcagtccttc

SEQ ID NO: 27835 - DNA, 252 bp, Zea mays
aacaattcctaccagcactgagccacctagccatggtgaaccctgccgcctacttgcaacagcagttgcttgcatcaaacccacttgctctggcaaacgtagttgcaaaccagccacaacaacagctgcaacagtttctgccagcgctcagtcaactagccatggtgaaccctgccgcctacctacaacagcaacaactgctttcatctagcccgctcgctgtggccaatgcacctacatacctgcaacaac

SEQ ID NO: 27836 - DNA, 143 bp, Zea mays
cattttgagcattcagaaacacaccaagcgaagtcactagcaacaacctaacaacaatggctaccaagatattatccctccttgcgcttcttgcgctttttgcgagcgcaacaaatgcgtccattattccacaatgctcactt

SEQ ID NO: 27837 - DNA, 247 bp, Zea mays
ctctgcaagtgctgctacggcgaccattttcccgcaatgctcgcaagctcctatagcttcccttcttcccccgtacctctcaccagcggtgtcttcggtatgtgaaaacccaattcttcaaccctacaggatccaacaggcaatcacagctggcatcttacctttatcacccttgttcctccaacaatcatcagccctattacatcagttacctttggtgcatttattggcacaaaacatcagggca

SEQ ID NO: 27838 - DNA, 97 bp, Zea mays
acgtggctgatgaactttctccctcaatagtcttcattgatgagattgacgcagttggaacgaagaggtatgatgctcattcccgaggggagcgtga

SEQ ID NO: 27839 - DNA, 254 bp, Zea mays
cgctcagcatggatgatgcttactcatcagttcattgaatactgtatatggggatgggacaatctcccaaggacagtcctgatgtattacgcaaattttctttcttcaccagagggttacttccacactgtcatctgcaatgtccccgagttccgcaacaccacagtcaaccatgatctacatttcatttcttgggacaacccaccaaagcaacaccctcattatctcacactcgctgacttcgatggtatggt

SEQ ID NO: 27840 - DNA, 120 bp, Zea mays
acctacaactactttcatctagcccgctcgcggtgggcaatgcacctacgtacctacaacaacagttgctgcaacaaattgtaccagctctgactcagctagctgtggcaaaccctgctg

SEQ ID NO: 27841 - DNA, 118 bp, Zea mays
atcagccctattacaacagttacctttggtgcatttattggcacaaaacatcagggcacaacaactacaacaacttgtgctagcaaaccttgctgcctactctcagcaacagcagttt

SEQ ID NO: 27842 - DNA, 108 bp, Zea mays
cagcaacatagaaagtggaatccagtagcaacaatagagcaacaatggcgaccaagatattttccctccttatgctccttgctctttctacatgtgctgctaacgcga

SEQ ID NO: 27843 - DNA, 164 bp, Zea mays
caacaactacaacaacttgtgctagcaaaccttgctgcctactctcagcaacagcagtttcttccattcaaccaactaggttcattgaactctgcttcttatttgcaataacaacaactaccattcagccagctacctgctgcctacccccagcaatttcttcc

SEQ ID NO: 27844 - DNA, 163 bp, Zea mays
tcagaccattagctttatctactccagagcgcagaagaacccgatcgacaccatgagggtgttgctcgttgccctcgctctcctggctctcgctgcgagcgccacctccacgcatacaagcggcggctgcggctgccagccaccgccgccggttcatctaccg

SEQ ID NO: 27845 - DNA, 150 bp, Zea mays
cgcagcttgagcgtgccgctgccgccagcagcagcctgtacgagccagctctgatgcagcagcagcagcagctgctggcagcccagggtctcaaccccatggccatgatgatggcgcagaacatgccggccatgggtggactctaccagt

SEQ ID NO: 27846 - DNA, 159 bp, Zea mays
cctacttgcaacagcagctgcttgcatccaacccacttgctctagcaaacgtagttgcaaaccagcaacaacaacaactgcaacagtttctgccagcgcttagtcaactagccatggtgaaccctgccgcctacctacaacagcaacaactgctttcat

SEQ ID NO: 27847 - DNA, 248 bp, Zea mays
aacagttcctaccagcactgagccacctagccatggtgaaccctgtcgcctacttgcaacagcagctgcttgcatccaacccacttgctctagcaaacgtagttgcaaaccagcaacaacaacaactgcaacagtttctgccagcgcttagtcaactagccatggtgaaccctgccgcctacctacaacagcaacaactgctttcatctagcccgctcgctgtggccaatgcacctacatacctgcag

SEQ ID NO: 27848 - DNA, 247 bp, Zea mays
gctggatcatcttgttatgaaccaagatgcggagctttttactgtgagcaacagttccctgtcagaatttgctgttttgggctttgaattgggttactccatggagaacccaaactcattggtcttatgggaagctcagtttggtgatttttcaaatggagctcaagtgatatttgatcagttcctgagtagtggggagtcaaaatggctccgccagactggccttgtcgtttgccttcctcatgga

SEQ ID NO: 27849 - DNA, 111 bp, Zea mays
gctaacaggagaagagccatatgtagatttacattatggtgttataataggtggcattgtgagcaacactctacggccgccagtgcccgactcctgcgaccccgagtggag

SEQ ID NO: 27850 - DNA, 249 bp, Zea mays
ctgcggcgttggcagcaccccgatcctgggccagtgcgtcgagttcctgaggcatcagtgcagcccgacggcgacgccctactgctcgcctcagtgccagtcgttgcggcagcagtgttgccagcagctcaggcaggtggagccgcagcaccggtaccaggcgatcttcggcttggtcctccagtccatcctgcagcagcagccgcaaagcgctcaggtcgcggggctgttggcggcgcagatagcgaa

SEQ ID NO: 27851 - DNA, 92 bp, Zea mays
aagatattatccctccttgcgcttcttgcgctttttgcgagcgcaacaaatgcgttcattattccgcaatgctcacttgctccaagttccat

SEQ ID NO: 27852 - DNA, 115 bp, Zea mays
ccgcaccctagcagactacaacatccaaaaggagagcaccctccaccttgtgctccgtctccgtggtggtcagtaagtcatgggtcgtttaagctgccgatgtgcctgcgtcgtc

SEQ ID NO: 27853 - DNA, 159 bp, Zea mays
cctgaagttatactgggcttgccttatgacaaaaagatagatgtatggtcacttggttgtatattagcagagctttgcaccggaaatgtacttttccaaaatgattctcctgcaacattacttgctcgtgtgatgggtatcattggctccatagaacaa

SEQ ID NO: 27854 - DNA, 113 bp, Zea mays
gctagctagttgagtcatttagcggcgatgattgagtactaatgtgtcacgcatcaccatgggtggcagtgtcagtgtgagcaatgacctgaatgaacaattgaactgaaaag

SEQ ID NO: 27855 - DNA, 180 bp, Zea mays
ctcgaccggatgtcgggggtcaggacaagatcagacctctctggaggcattacttccagaacacacagggtcttatctttgttgtggatagcaatgaccgtgaccgtgttgttgaagccagagatgagctgcacaggatgctgaacgaggatgagctacgtgatgctgtgctgcttgttt

SEQ ID NO: 27856 - DNA, 192 bp, Zea mays
gcatgatctggagataggtcctggtgctccaaccatattcaactgcgtcattgagataccaaggggcagcaaggttaaatatgaacttgacaagaaaactggactgatcaaggtggaccgtgtgctgtattcatcagttgtttaccctcacaactatggattcattcctcgcacgctttgtgaagacagtga

SEQ ID NO: 27857 - DNA, 243 bp, Zea mays
cattcgggctttaagagagaaggagtccaaattaaaggctgcaaggatgaacatttatgtccggagaggtggtccgaactaccaaactggactcgccaaaatgcgcaccctaggcgccgaacttggcgttccaattgaggtctatggaccagaggcgaccatgactgggatctgcaaagaagccattgattgcatcatggccgcgtaaatcacaaatgtggttgttccatttgaagtcacatc

SEQ ID NO: 27858 - DNA, 248 bp, Zea mays
agctggtccagctggcgcccagtagctactctgccgattggcaggatcaatatgtttttgcacgcaatggcaaaccgattggaccacaggcgaattctaagtggctctacatcgccccgacggggatgtacgggtgcgtgaactacctcaaggagaagtatgggaatccaacgatctacataacggagaacggaatggaccagcctggaaacttgacccgagaccagtacctgcgcgacgccacgagg

SEQ ID NO: 27859 - DNA, 248 bp, Zea mays
atagaaagtagaatccattagcaacaatagagcaacaatggcgaccaagatattttccctccttatgctccttgctctttctacatgtgttgctaacgcgacaattttccctcaatgctcacaagctcctatagcttcccttcttcccccataccttccatcaattatagcttcagtatgtgaaaacccagctcttcaaccatataggcttcaacaagcaatcgcagcaagcaacatacctttatcgc

SEQ ID NO: 27860 - DNA, 248 bp, Zea mays
agatcagcaaagcggcagtgcgtagagaggatcgtcgaacagaacagcatgaagatggtcatcgttctcgtcgtgtgcctggctctgtcagctgccagcgcctctgcaatgcagatgccctgcccctgcgcggggctgcagggcttgtacggcgctggcgccggcctgacgacgatgatgggcgccggcgggctgtacccctacgcggagtacctgaggcagccgcagtgcagcccgctggcggcggc

SEQ ID NO: 27861 - DNA, 244 bp, Zea mays
attcatgtgaccccagaggacggcttcagctatgcaagctacgaggtcatgggctttaacccgggctctttctcttatggtgacctggttaagagggtgctgaggtgctttggtccaactgagttctctgttgccgtgaccatcttcggtgatcgggacaatgcgaagacctgggggacgaaactggatgctgaggcctatgcttgcagcaacatggttgagcaggtgctgccgtttggtggct

SEQ ID NO: 27862 - DNA, 258 bp, Zea mays
tcacttaccacttcttccattggaagaaaggaaccccttttgctgctgatgaccaaggcatctacagcagattgacatggtgggagcaaattgacaatggtcagcagcttactcggaacagaaagtttttgactgtggtacctgtggtgctgtatctgatcgcatcgcacttgactgactacaagcagccgatgtttttcctcaatacaatggcagtttttgtgctagttgtggcaaaattgccaaacatgcacaagg

SEQ ID NO: 27863 - DNA, 244 bp, Zea mays
ccatcttcgtcttcaagttccgcacccacttcggtggaggcaagtccactggcttcggcctcatctacgataacctcgagtctgccaagaagttcgagcccaaataccgcctcatcaggaatggtcttgctactaaggttgagaagtcccgcaagcaaatgaaagagcggaagaacagggccaagaagatccgtggtgtcaagaagaccaaggctggtgacgccaagaagaagtaaacagtcat

SEQ ID NO: 27864 - DNA, 251 bp, Zea mays
gtcctcgccggcactgatgtcaagggcaccatcttcttttcacacgagggggatggtccgaccaccgtgactggaagtatctctggcctcaagccagggctccatgggttccatgtgcacgcgcttggcgacaccaccaacggctgcatgtcgactgggccacacttcaatcctgttggcaaggagcatggcgcaccggaagatgaggaccgccatgccggtgatcatgggaatgtgacagcgggagaaga

SEQ ID NO: 27865 - DNA, 253 bp, Zea mays
gaaaacccaattcttcaaccctacaggatccaacaggcaatcacagctggcatcttacctttatcacccttgttcctccaacaatcatcagccctattacatcagttacctttggtgcatttattggcacaaaacatcagggcacaacaactacaacaacttgtgctagcaaaccttgctgcctactctcagcaacagcagtttcttccattcaaccaactagctgcattgaactctgcttcttaattgcaac

SEQ ID NO: 27866 - DNA, 252 bp, Zea mays
cttacctttatcacccttgttcctccaacaatcatcagccctaatacatcagttacctttggtgcatttattggcacaaaacatcagggcacaacaactacaacaacttgtgctagcaaaccttgctgcctactctcagcaacagcagtttcttccattcaaccaactagctgcattgaactctgcttcttatttgcaacaacaacaactaccattcagccagctacctgctgcctacccccagcaatttct

SEQ ID NO: 27867 - DNA, 243 bp, Zea mays
agtgttgctaacgcgacaattttccctcaatgctcacaagctcctatagcttcccttcttcccccataccttccatcaattatagcttcaatatgtgaaaacccagctcttcaaccatataggcttcaacaagcaatcgcagcaagcaacatacctttatcgcccttgttgtttcaacaatcgccagccctatctttggtgcagtcattggtacaaaccatcagggcacaacagcatcagcaa

SEQ ID NO: 27868 - DNA, 238 bp, Zea mays
cagaaacacaccaagcgaacgcactagcaacgacctaacaacaatggctaccaagataatagccctccttgcgcttcttgccctttttgtgagcgcaacaaatgcgttcattattccacaatgctcacttgctcctagtgccattattccacagttcctcccaccagttacttcaatgggcttcgaacacctagctgtgcaagccaacatgcaacaacaagcgcttgcggcgagcgtc

SEQ ID NO: 27869 - DNA, 237 bp, Zea mays
agcaatcgcagcaagcaacatacctttatcgcccttgttgtttcaacaatcaccagccctatctttggtgcagtcattggtacaaaccatcagggcacaacagctgcagcaactcgtgctacctgtgatcaaccaagtagctctggcaaacctttctccctactctcagcaacaacaatttcttccattcaaccaactgtctacactgaaccctgctgcttatttgcagcaacaact

SEQ ID NO: 27870 - DNA, 238 bp, Zea mays
  unsure (1)..(238): unsure at all n locations
ggacgtcagcctagcaattagctcatcgactccagattggagaactcgacaccatgaaggtgctgatcgntgcccttgctctcctggcgctcgctgcgagcgccgcctccagtacaagccgcggctgtggctgccagacaccaccgtttcatctaccgcctccgttctatatgccgcctccgttctatctgccgccgcagcagcagccgcagccatggcaataccccactcaaccacc

SEQ ID NO: 27871 - DNA, 243 bp, Zea mays
aaatgcgttcattattccacaatgctcacttgctccaagttccattattacacagttcctcccaccagttacttcaatgggcttcgaacacccagctgtgcaagcctataggctacaacaagcaattgcggcgagcgtcttacaacaaccaatttcccagttgcaacaacaatccttggcacatctaacaatacaaaccatcgcaacgcaacagcaacaacaattcctaccagcactgagcca

SEQ ID NO: 27872 - DNA, 235 bp, Zea mays
tcaattatagcttcagtatgtgaaaacccagctcttcaaccatataggcttcaacaagcaatcgcagcaagcaacatacctttatcgcccttgttgtttcaacaatcaccagccctatctttggtgcagtcattggtacaaaccatcagggcacaacagctgcagcaactcgtgctacctgtgatcaaccaagtagctctggcaaacctttctccctactctcagcaacaacaat

SEQ ID NO: 27873 - DNA, 159 bp, Zea mays
attgagaccaactagcaacataggaagcacaatagtgtaccatcaatggcagccagaatattttgcctccttatgctccttggtctttctgcaagtgctgctacggcgaccattttcccgcaatgctcgcaagctcctatagcttcccttcttcgcccg

SEQ ID NO: 27874 - DNA, 248 bp, Zea mays
ccagcaagcaacatagaaagtagaatccattagcaacaatagagcaacaatggcgaccaagatattttccctccttatgctccttgctctttctacatgtgttgctaacgcgacaattttccctcaatgctcacaagctcctatagcttcccttcttcccccataccttccatcaattatagcttcagtatgtgaaaacccagctcttcaaccatataggcttcaacaagcaatcgcagcaagcaaca

SEQ ID NO: 27875 - DNA, 235 bp, Zea mays
gcggaattactgcagagggccaaggtgtgaaggttgaatcgtcagcagttccttcagccccaactccagatgttgctgaagcacaggccccagttgctgaggaggacgacgacgatgatgttgacctttttggtgaggagaccgaagatgagaagaaggctgctgaagagcgtgctgcagctgccaaggcttctggcaagaagaaagaatctgggaagtcatcagttttacttga

SEQ ID NO: 27876 - DNA, 234 bp, Zea mays
actgaaccctgctgcttatttgcagcaacaactattaccatttagccagctagctactgcctactctcagcaacaacaacttcttccatttaaccaattggccgcactgaaccccgctgcttatttgcagcagcaaatactactaccatttagccagctagctgcagcaaaccgtgcttccttcttgacacagcaacagttgctgcctttctaccagcagtttgcggctaaccc

SEQ ID NO: 27877 - DNA, 234 bp, Zea mays
agccgcagcaccggtaccaggcgatcttcggcttggtcctccagtccatcctgcagcagcagccgcaaagcgccaggtcgcggggctgttggcggcgcagatagcgcacaactgacggcgatgtgcggcctgcagcagccgactccatgcccctacgctgctgccggacggtgtcccccactgaagaaactatgtgctgtagtatagccgctggctagctagctagttgagtca

SEQ ID NO: 27878 - DNA, 127 bp, Zea mays
ccgcaacccatcgttggtggtgccatcttttagattacatatgagatgtactcgataatggtgccctcatagcggcatgtgtttcctaaaaataatcaatatattgattgagctttatctcgatata

SEQ ID NO: 27879 - DNA, 236 bp, Zea mays
attccacaatgctcacttgctcctagtgccattataccacagttcctccgaccagttacttcaatgggcttcgaacacctagctgtgcaagcctacaagctacaacaagcgcttgcggcgagcgtcttacaacaaccaattaaccaattgcaacaacaatccttggcacatctaaccatacaaaccatcgcaacacaacagcaacaacagttcctaccagcactgagccaacgaga

SEQ ID NO: 27880 - DNA, 107 bp, Zea mays
caacaagcaatcgcagcaagcaacatacctttatcgcccttgttgtgtcaacaatcgccagccctaactttggtgcagtcattggtacaaaccatcagggcacaaca

SEQ ID NO: 27881 - DNA, 238 bp, Zea mays
agcagagaagatccttatggtgaagaaagcggaggcagaagcagaggcgaaatatctttctggtgtcggtatcgctaaacagcggcaggcgataaccgacggccttagagagaacatcctgaacttctcacactcggtgtcgggcaccagcgcgaaggaggtcatggacctgatcatggtcacgcagtacttcgacaccatcaaggagctcggggacggctccaagaacaccacgatc

SEQ ID NO: 27882 - DNA, 198 bp, Zea mays
cgctcctagtgccattataccacagttcctccgaccagttacttcaatgggcttcgaacacctagctgtgcaagcctacaggctacaacaagcgcatgcggcgagcgtcttacaacaaccagttaaccaattgcaacaacaatccttggcacatctaaccatacaaaccatcgcaacacaacagcaacaacagttcct

SEQ ID NO: 27883 - DNA, 195 bp, Zea mays
accgaattgctatgccaaggttatcatggtaactggtgatcatagagtgggcatattcgccaaagaaagaatcctcgctggtgaagagttattctacgattaccgctatgagcctgacagagctcctgcttgggcccgtaagcctgaggcgtcgggagcaaaggatgatgggcaaccgttcaatgggcgtgcaaa

SEQ ID NO: 27884 - DNA, 265 bp, Zea mays
attgaactctgctgcttatttacaacagcaacagctaccaccattcagccagctagctgatgtgagccctgttgccttcttgacacaacaacagttgttgccgttctacctgcacgctgcgcctaacgctggcaccctcttacaactgcaacaattgctgccattcaaccaacttgctttgacaaacccaacaacgttctaccaacaacccatcattggcggtagcctcttttagattgcttatgagttatagttcaataatgaa

SEQ ID NO: 27885 - DNA, 263 bp, Zea mays
aaccaactgtctacactgaaccctgctgcttatttacaacagcaacaactgatttcatctagccctctcgctgtggttaatgcacctacatacctgcaacaacagttgctgcaacagattgtaccagctctgactcagctagctgtggcaaaccctgctgcctacttgcaacagctgcttccattcaaccaactgactgtgtcgaactctgctgcgtacctacaacagcgacaacagttacttaatcgactagcggtggctaa

SEQ ID NO: 27886 - DNA, 248 bp, Zea mays
gtcgtgtggagactggtgtcatcaagcctggtatggtagtcacctttggtccaactggcctgactactgaggtgaagtctgttgagatgcaccacgaggcgcttcaggaggctcttccgggcgacaatgttggcttcaacgtgaagaacgttgctgtcaaggatctcaagcgtgggttcgtggcctccaactccaaggatgaccctgccaaggaggctgccagcttcacctcgcaggtcatcatcatg

SEQ ID NO: 27887 - DNA, 258 bp, Zea mays
caattgcccaattgcaacaacaatccttggcacatctaaccctacaaaccattgcaacgcaacaacaacaacaacagtttctgccatcactgagccacctagccgtggtgaaccctgtcacctacttgcaacagcagctgcttgcatccaacccacttgctctggcgaacgtagctgcataccagcaacaacaacagctgcaacagtttatgccagtgctcagtcaactagcgatggtgaaccctgccgtctgactac

SEQ ID NO: 27888 - DNA, 262 bp, Zea mays
accgtggatgtgtcagttgttgacctcactgtcagaatcgagaagggggcctcttacgaggaaatcaagaaagctattaaggctgcttctgagggcccactcaagggtattatgggctacgtggaggaggatctggtttccaccgacttcaccggtgacagcaggtcgagcatcttcgacgccaaggccgggattgccctgaacgaccacttcatcaagctcgtctcttggtacgacaacgagtggggctacagcaaccgcg

SEQ ID NO: 27889 - DNA, 264 bp, Zea mays
caacaagcaacatagaaagtggaatccagtagcaacaatagagcaacaatggcgaccaagatattttccctccttatgctccttgctctttctacatgtgttgctaacgcgacaattttccctcaatgctcacaagctcctatagcttcccttcttcccccataccttccatcaattatagcttcaatatgtgaaaacccagctcttcaaccatataggcttcaacaagcaatcgcagcaagcaacatacctttatcgccttgt

SEQ ID NO: 27890 - DNA, 264 bp, Zea mays
tcgcactagcaacgacctaacaacaatggctaccaagatattagccctccttgcgcttcttgccctttttgtgagcgcaacaaatgcgttcattattccacaatgctcacttgctcctagtgccattattccacagttcctcccaccagttacttcaatgggcttcgaacacctagctgtgcaagccaacatgcaacaacaagcgcttgcggcgagcgtcttacaacaaccaattgcccaattgcaacaacaatccttgccaca

SEQ ID NO: 27891 - DNA, 202 bp, Zea mays
ctcggctctcgcatcgatgaagaacgtagcaaaatgcgatacctggtgtgaattgcagaatcccgcgagccatcgagtttttgaacgcaagttgcgcccgaagccttctggcggagggcacgtctgcctgagcgtcacgccaaaagacactcccaacaccccccctcggggcgaaggacgtggcgtctggcaccccgcgccg

SEQ ID NO: 27892 - DNA, 258 bp, Zea mays
gatcccaggaacacgtcggatccaagataatctttccgatctccgtgctcaggttgcggcaaaccagagaggtatagcacttatcaaagaactcataaatcagtacgggttgatcactgttcaatcatatatgaaccatgttcaaaagaatgctgaggtagctgtcagggagatgctcaaaacagttgcgtctagagttgcaaaggagaatggatcatgtgttgtcgaggatgaagattatatggatgacggctctgt

SEQ ID NO: 27893 - DNA, 253 bp, Zea mays
agcgaacgcactagcaacgacctaacaacaatggctaccaagatattagccctccttgcgcttcttgccctttttgtgagcgcaacaaatgcgttcattattccacaatgctcacttgctcctagtgccattattccacagttcctcccaccagttacttcaatgggcttcgaacacctagctgtgcaagccaacatgcaacaacaagcgcttgcggcgagcgtcttacaacaaccaattgcccaattgcaac

SEQ ID NO: 27894 - DNA, 219 bp, Zea mays
tggacgtcagcctagcaattagctcatcgactccagattggagaactcgacaccatgaaggtgctgatcgttgcccttgctctcctggcgctcgctgcgagcgcgcctccagtacaagcggcggctgtggctgccagacaccaccgtttcatctaccgcctccgttctatatgccgcctccgttctatctgccgccgcagcagcagccgcagccatggc

SEQ ID NO: 27895 - DNA, 225 bp, Zea mays
ggcaacagtgctgccagcagcagatgaggatgatggacgtgcagtccgtcgcgcacagctgcagatgatgatgcagcttgagcgtgccgctgccgccagcagcagcctgtacgagccagctctgatgcagcagcagcagcagctgctggcagcccagggtctcaaccccatggccatgatgatggcgcagaacatgccggccatgggtggactctaccagtacca

SEQ ID NO: 27896 - DNA, 154 bp, Zea mays
  unsure (1)..(154): unsure at all n locations
ctccagtccatcctgcagcagcagccgcaaagcgtgccaggtcacggggctgttggcggcgcagatagcgcagcaactgacggcgatgtgcggactgcagcagccgactccatgcccctacgctgctgccggcggtgtcncccactgaagaaac

SEQ ID NO: 27897 - DNA, 257 bp, Zea mays
ctctaaccatacaaaccatcgcaacgcagcagcaacaagcactgagccacctagccgtggtgaaccctatcgcctacttgcaacaacagctgcttgcatccaacccacttgctttggcaaacgtagctgcataccaacaacaacaacagttgcaacagtttctgccagcgctcagtcaactagccatggtgaaccctatcgcctacctacaacagcaacaacttctttcatctagcccgctcgctatgggcaatgca

SEQ ID NO: 27898 - DNA, 223 bp, Zea mays
gacatcaccgagctcattgccgcgggcagggagaagtttgcttcagtcccatgtggtggcggtggtgtcgctgttgcagcagcttcacctgctgctggcggagtgctcctacagctgaggcaaagaaagaagagaaggtggaagagaaggaagaaagcgatgatgatatgggcttcagcctcttcgactaggctgcacagtcatcacagtattgtttcgggcc

SEQ ID NO: 27899 - DNA, 253 bp, Zea mays
caagatattatccctccttgcgcttcttgcgctttttgcgagcgcaacaaatgcgttcattattccacaatgctcacttgctccaagttccattattacacagttcctcccaccagttacttcaatgggcttcgaacacccagctgtgcaagcctataggctacaacaagcaattgcggcgagcgtcttacaacaaccaatttcccagttgcaacaacaatccttggcacatctaacaatgcaaaccatcgca

SEQ ID NO: 27900 - DNA, 255 bp, Zea mays
aatcctccctccagttacttcaatgggcttcgaacacccagctgtgcaagcctacaggctacaacaagcgcttgcagcgagcgtcttacaacaaccaattgcccaattacaacaacaatccttggcacatctaaccatacaaaccatcgcaacgcaacagcaacaacaatttctaccagcactgagccaactagctgtggtgaaccctgtcgcctacttgcaacagcagttgcttgcatccaacccacttgctct

SEQ ID NO: 27901 - DNA, 254 bp, Zea mays
gctctggcgaacgtagctgcataccagcaacaacaacagctgcaacagtttatgccagtgctcagtcaactagccatggtgaaccctgccgtctacctacaactactttcatctagcccgctcgcggtgggcaatgcacctacgtacctacaacaacagttgctgcaacaaattgtaccagctctgactcagctagctgtggcaaaccctgctgcctacttacaacagttgcttcgattcaaccaactggctgt

SEQ ID NO: 27902 - DNA, 252 bp, Zea mays
agatcagcaaagcggcagtgcgtagagaggatcgtcgaacagaacagcatgaagatggtcatcgttctcgtcgtgtgcctggctctgtcagctgccagcgcctctgcaatgcagatgccctgcccctgcgcggggctgcagggcttgtacggcgctggcgccggcctgacgacgatgatgggcgccggcgggctgtacccctacgcggagtacctgaggcagccgcagtgcagcccgctggcggcggcgcct

SEQ ID NO: 27903 - DNA, 253 bp, Zea mays
caacttcctgagctatgctatagatgatgcacagaaatatccataccttgcatcaatgggcatttatgtcttcaagaaagatgcacttttagaccttctcaagtcaaaatatactcaattacatgactttggatctgaaatcctcccaagagctgtactagatcatagtgtgcaggcatgcatttttacgggctattgggaggatgttggaacaatcaaatcattctttgatgcaaacttggccctcactgag

SEQ ID NO: 27904 - DNA, 252 bp, Zea mays
gtagagaggatcgtcgaacagaacagcatgaagatggtcatcgttctcgtcgtgtgcctggctctgtcagctgccagcgcctctgcaatgcagatgccctgcccctgcgcggggctgcagggcttgtacggcgctggcgccggcctgacgacgatgatgggcgccggcgggctgtacccctacgcggagtacctgaggcagccgcagtgcagcccgctggcggcggcgccctactacgccgggtgtgggcag

SEQ ID NO: 27905 - DNA, 254 bp, Zea mays
atgctgcaaggcacttgctcacccttgacgagaagaacccccgtcgtatctttgagggtgaggcgcttcttcgccgcatgaaccgctatgggctgcttgctgagggtcagaacaagcttgattatgttcttgccctcaccgctgagaacttcctcgcaaggcggcttcaaacacttgtcttcaaggctggcatggccaagtccattcaccatgctcgtgtcttgatcaagcagcgtcacatcagggttggcagg

SEQ ID NO: 27906 - DNA, 221 bp, Zea mays
attcgagaagctgaaatggctcctaaagctgctcctgccaagaacggtgatgccaagacccaggccttgaaggttgccaaggctgtgaagtctggggcagccaagaagaagaccaagaagatccgcacgtctgtgacatttcaccgccccacgaccctgaagaaggctagggaccccaagtacccacgaatcagcactaccggaaggaacaagcttgatca

SEQ ID NO: 27907 - DNA, 250 bp, Zea mays
agttacttcaatgggcttcgaacacccagctgtgcaagcctataggctacaacaagcaattgcggcgagcgtcttacaacaaccaatttcccagttgcaacaacaatccttggcacatctaacaatacaaaccatcgcaacgcaacagcaacaacaattcctaccagcactgagccacctagccatggtgaaccctgccgcctacttgcaacagcagttgcttgcatcaaacccacttgctctggcaaac

SEQ ID NO: 27908 - DNA, 182 bp, Zea mays
agaaacctgagatgcgcaaggaagctgacgagcgggaagccctcacgggccgcaccgctggccgaccctgatcttctgtgaagggttcgagttggagcacgcctgtcgggacccgaaagatggtgaactaagcaagatggttgatcgccacatttgagaatgtgtgttgggacgttttttcg

SEQ ID NO: 27909 - DNA, 248 bp, Zea mays
acggcacttgccaccagtcatgccattgggtaccatgaacccatgcatgcagtactgcatgatgcaacaggggcttgccagcatgatggcgtgtccgtccctgatgctgcagcaactgttggccttaccgcttcagacgatgccagtgatgatgccacagatgatgacgcctaacatgatgtcaccattgatgatgccgagcatgatgtcaccaatggtcttgccgagcatgatgtcgcaaatgatga

SEQ ID NO: 27910 - DNA, 251 bp, Zea mays
cttgttgtttcaacaatcaccagccctatctttggtgcagtcatatggtacaaaccatcagggcacaacagctgcagcaactcgtgctacctgtgatcaaccaagtagctctggcaaacctttctccctactctcagcaacaacaatttcttccattcaaccaactgtctacactgaaccctgctgcttatttgcagcaacaactattaccatttagccagctagctactgcctactctcagcaacaacaa

SEQ ID NO: 27911 - DNA, 205 bp, Zea mays
gaactcgacaccatgaaggtgctgatcgttgcccttgctctcctggcgctcgctgcgagcgccgcctccagtacaagcagcggctgtggctgccagacaccaccgtttcatctaccgcctccgttctatatgccgcctccgttctatctgccgccgcagcatcagccgcagccatggcaataccccactcaaccaccgcagctaa

SEQ ID NO: 27912 - DNA, 247 bp, Zea mays
agcaacatacctttatcacccttgttgtttcaacaatcgccagccctatctttggtgcagtcattggtacaaaccatcagggcacagcagctgcagcaactcgtgctacctgtgatcaaccaagtagctctggcaaacctttctccctactctcagcaacaacaatttcttccattcaaccaactgtctacactgaaccctgctgcttatttgcagcaacaactattaccattcagccagctagcta

SEQ ID NO: 27913 - DNA, 241 bp, Zea mays
ctcgaagccagatgtgttcaagagcccaaactcggacacctatgtcatattcggcgaggcgaagatcgaggacctcagctcccagctgcagacccaagctgcagagcagttcaaggctcctgacctgagccaaatgatcccgaagcctgagacatctggcctgggcctggaggacaacgaggatgaggaggttgacgaaactggtgtcgaggccaaggatgtcgagctggtgatgactcag

SEQ ID NO: 27914 - DNA, 248 bp, Zea mays
aacgcgacaattttccctcaatgctcacaagctcctatagcttcccttcttcccccataccttccatcaatgatagcttcagtatgtgaaaacccagctcttcagccctataggctccaacaagcaatcgcagcaagcaacatacctttatcacccttgttgtttcaacaatcgccagccctatctttggtgcagtcattggtacaaaccatcagggcacagcagctgcagcaactcgtgctacctgt

SEQ ID NO: 27915 - DNA, 247 bp, Zea mays
aacagttcctccgaccagttacttcaatgggcttcgaacacctagctgtgcaagcctacaggctacaacaagcgcttgcagcgagcgtcttacaacaaccaattaaccaattgcaacaacaatccttggcacatctaaccatacaaaccatcgcaacacaacagcaacaacagttcctaccagcactgagccaactagatgtggtgaaccctgtcgcctacttgcaacagcaggtggttgcatccaa

SEQ ID NO: 27916 - DNA, 181 bp, Zea mays
gaaagagaacatcaacacccagacacatcaacttatagatgctcgatcaaaacctagatttgatggtgcagttcccgagccacgaaaggggattagaagtgggcatgtgcctgggagcaaatgtgttccgtttcctcaggttcttgacagctcacaaaagctattgccttcagatgagctc

SEQ ID NO: 27917 - DNA, 205 bp, Zea mays
acatattatccctccttgcgcttcttgcgctttttgcgagcgcaacaaatgcgttcattattccacaatgctcacttgctccaagttccattattacacagttcctcacaccagttacttcaatgggcttcgaacacccagctgtgcaagcctataggctacaacaagcaattgcggcgagcgtcttacaacaaccaatttccca

SEQ ID NO: 27918 - DNA, 263 bp, Zea mays
ctctgatgctctggtcttcggtggacatggaagagttggccacgacgtggatcacttcacgtcgcctgaaggggtgccaggggtgcccgaaacgaacttcaacaaccggccgaactcgttcaaagtcctttctccgccccgcacctgtgtggcttattaccgtgtagacgaagcaggggctggacgacgtcttcacgcgaaagcagagacaggaaagacgtctccagcagagagcatcgacgtcaaagcttccagagctagta

SEQ ID NO: 27919 - DNA, 261 bp, Zea mays
ctatactatactctaggaagcaaggacaccaccgccatggcagccaagatgcttgcattgttcgctctcctagctctttgtgcaagcgccactagtgcgacccatattccagggcacttgccaccagtcatgccattgggtaccatgaacccatgcatgcagtactgcatgatgcaacaggggcttgccagcttgatggcgtgtccgtccctgatgctgcagcaactgttggccttaccgcttcagacgatgccagtgatg

SEQ ID NO: 27920 - DNA, 259 bp, Zea mays
aacagctgcagcaactcgtgctacctctgatcaaccaagtagctctggcaaacctttctccctactctcagcaacaacaatttcttccattcaaccaactgtctacactgaaccctgctgcttatttgcagcaacaactattaccatttagccagctagctactgcctactctcagcaacaacaacttcttccatttaaccaattggccgcactgaaccccgctgcttatttgcagcagcaaatactactaccatttag

SEQ ID NO: 27921 - DNA, 260 bp, Zea mays
attttcagcattcaaaaacacaccaagcgaacgcactagcaacgacctaacaccaatggctaccaagatattagccctccttgcgcttcttgcccttttagtgagcgcaacaaatgcgttcattattccacagtgctcacttgctcctagtgccagtattccacagttcctcccaccagttacttcaatgggcttcgaacatccagccgtgcaagcctacaggctacaactagcgcttgcggcgagcgccttacaacaac

SEQ ID NO: 27922 - DNA, 260 bp, Zea mays
agtgcgtcgagtttctgaggcatcagtgcagcccgacggcgacgccctactgctcgcctcagtgccagtcgttgcggcacagtgttgccagcagctcaggcaggtggagccgcagcaccggtaccaggcgatcttcggcttggtcctccagtccatcctgcagcagcagccgcaaagcggccaggtcgcggggctgttggcggcgcagatagcgcagaactgacggcgatgtgcggcctgcagcagccgactccatgccc

SEQ ID NO: 27923 - DNA, 260 bp, Zea mays
caacagttgcaacagtttctaccagcgctcagtcaactagccatggtgaaccctatcgcctacctacaacagcaacaacttctttcatctagcccgctcgctatgggcaatgcacctacatacctgcaacaacagttgttgcaacaacagttgctgcaacaaattgtaccagctcttactcagctagctgtggcaaaccctgctgcctacttgcaacaactacttccattcaaccaactgactgtgtcgaactctgctgc

SEQ ID NO: 27924 - DNA, 260 bp, Zea mays
ctgctgcatttctgcttggcaggacgattgggaggccttatgttctttcgaaatgcaaagattaccctaagtttcaagcagtagctattgccatccaaagatctggcttcaagatcgtgttgctactaaggcttgtacctttacttccgttcaacatgttgaactacctgttatctgtcactcctgttggtgttggagaatacatgctggcttcttggtttggaatgatgccaatcactcttgctttggtgtacgttgga

SEQ ID NO: 27925 - DNA, 260 bp, Zea mays
cactcactatggagttgacattggtaggaagaagaaaacccctgctgcaaagaaggataatgctgagggacaagaggttgaggcagcagctgaggaaacgaaaaagagcaaccatgtcacgaggaagcttgagaagcgcaaggagggacgtacccttgacccacacattgaggagcaatttggcagtggacggttgctggcatgcatttcttcccgtcctggacagtgtggccgagctgatgggtacatccttgagggta

SEQ ID NO: 27926 - DNA, 251 bp, Zea mays
agcggcagtgcgtagagaggatcgtcgaacagaacagcatgaagatggtcatcgttctcgtcgtgtgcctggctctgtcagctgccagcgcctctgcaatgcagatgccctgcccctgcgcggggctgcagggcttgtacggcgctggcgccggcctgacgacgatgatgggcgccggcgggctgtacccctacgcggagtacctgagagcaccgcagtgcagcccgctggcgcggcgcctactacgcggg

SEQ ID NO: 27927 - DNA, 175 bp, Zea mays
  unsure (1)..(175): unsure at all n locations
actacgttcgtccccacgagtgaccgataatacgccggcgctaagatgtntggttatcaagatctcctatctggcgacgagctcctgtcggattcattcacctacaaggagctcgagaacggcgtcctgtgggaggtcgagggaaagtgggtcacccaaggtcctgttgatgtag

SEQ ID NO: 27928 - DNA, 253 bp, Zea mays
gcgatcttcggcttggtcctccagtccatcctgcagcagcagccgcaaagcggccaggtcgcggggctgttggcggcgcagatagcgcacaactgacggcgatgtgcggcctgcagcagccgactccatgcccctacgctgctgccggcggtgtcccccactgaagaaactatgtgctgtagtatagccgctggctagctagctagttgagtcatttagcggcgatgattgagtaataatgtgtcacgcatca

SEQ ID NO: 27929 - DNA, 252 bp, Zea mays
agaaactggatgtctccgccatggctgtatacaaggtgaagcttgtcgggcctgaaggtgaagagcacgagtttgatgctccagacgacgcctacatccttgacgcagccgagactgccggtgtggagttgccatactcgtgccgtgctggggcttgctccacctgtgccggcaaaatcgagtctggttcggttgaccagtcggatgggtccttccttgatgacgggcagcaggaggaaggttatgtgctga

SEQ ID NO: 27930 - DNA, 169 bp, Zea mays
gaatcacagcaagcatcttacggtcgttagcattgaccgtccaacaaccatatgccctattgcaacaaccatccttagtgaatctgtatctccaaagaatcacagcaccacaactacaacaacggttgcttccaacaattaatcaagtagttgcagcgaaccttgctgc

SEQ ID NO: 27931 - DNA, 251 bp, Zea mays
caccatgccactaccctactcaaccgccccggcctcagcctcatccccagccacacccatgcccgtgccaacagccgcatccaagcccgtgccagctgcagggaacctgcggcgttggcagcaccccgatcctgggccagtgcgtcgagttcctgaggcatcagtgcagcccgacggcgacgccctactgctcgcctcagtgccagtcgttgcggcacagtgttgccagcagctcaggcaggtggagccgc

SEQ ID NO: 27932 - DNA, 253 bp, Zea mays
caaagcggcagtgcgtagagaggatcgtcgaacagaacagcatgaagatggtcatcgttctcgtcgtgtgcctggctctgtcagctgccagcgcctctgcaatgcagatgccctgcccctgcgcggggctgcagggcttgtacggcgctggcgccggcctgacgacgatgatgggcgccggcgggctgtacccctacgcggagtacctgaggcagccgcagtgcagcccgctggcggcggcgccctactacgc

SEQ ID NO: 27933 - DNA, 254 bp, Zea mays
gcaattagctcatcgactccagattggagaactcgacaccatgaaggtgctgatcgttgcccttgctctcctggcgctcgctgcgagcgccgcctccagtacaagcggcggctgtggctgccagacaccaccgtttcatctaccgcctccgttctatatgccgcctccgttctatctgccgccgcagcagcagccgcagccatggcaatacctcactcaaccaccgcagctaagcccgtgccagcagttcggat

SEQ ID NO: 27934 - DNA, 251 bp, Zea mays
gcaacatagaaagtggaatccagtagcaacaatagagcaacaatggcgaccaagatactttccctccttatgctccttgctctttctgcatgtgttgctaacgcgacaattttccctcaatgctcacaagctcctatagcttcccttcttcccccataccttccatcaatgatagcttcagtatgtgaaaacccagctcttcaaccctataggctccaacaagcaatcgcagcaagcaacatacctttatc

SEQ ID NO: 27935 - DNA, 253 bp, Zea mays
caacattccaaaaccatggatcatctataaatggctagctcccacatatgaactagtctctatcatcatccaatccagatcagcaaagcggcagtgcgtagagaggatcgtcgaacagaacagcatgaagatggtcatcgttctcgtcgtgtgcctggctctgtcagctgccagcgcctctgcaatgcagatgccctgcccctgcgcggggctgcagggcttgtacggcgctggcgccgcctgacgacgatga

SEQ ID NO: 27936 - DNA, 251 bp, Zea mays
gacgatgccagtgatgatgccacagatgatgacgcctaacatgatgtcaccattgatgatgccgagcatgatgtcaccaatggtcttgccgaacatgacgtcgcaaatgacgatgccacaatgtcactgcgacgccgtctcgcagattatgctgcaacagcagttaccattcatgttcaacccaatggccatgacgattccacccatgttcttacagcaaccctttgttggtgctgcagtctagatagaaa

SEQ ID NO: 27937 - DNA, 249 bp, Zea mays
cacaaattggaagaccaacatgctgacagctctcttggttccttacattttcttcaccctgcctaatgtgctgttttctctgatcagaggagaggtggggaaatggattgcgattattgctgttattctgcgtctattctttccacgccacttcccagattggttagagcttcctggttccatcatcctgctcacagtggtcgcccctagcctgttcgcggacaccttcaggggagacctcgttggtgt

SEQ ID NO: 27938 - DNA, 248 bp, Zea mays
ccgaggagctatgggcatcttgctggtttatgatgtcaccgatgaatcttcttttaacaacatccgaaactggattcggaacattgaacagcacgcctctgataacgtcaacaagattttggttggcaacaaggccgatatggacgaaagcaagagggctgtacctactgcaaaaggacaagcacttgctgatgagtacgggatcaagttttttgaaacgagtgccaagacaaacctgaatgtggagc

SEQ ID NO: 27939 - DNA, 244 bp, Zea mays
tgctcgctctccttgcaactccagtgctgctcactgccactgccagcagatcgagctgctccgtctcacaaaccctcttgctttgctgctgcacctgcaagtctgcaaccgcgcacacagagatgtcgacgacggtgagccgtgcgtccctcgaccagaagctcgccctcgccaagcgttgctcccgagaggcgaccctcgccggagccaaggcggcagcagtggcgactatcgcctccgcgat

SEQ ID NO: 27940 - DNA, 242 bp, Zea mays
aacaacaacaacaattgcaacagtttctgccagcgctcagtcaactagccatggtgaaccctgccgcctacctacaacagcaacaactgctttcatctagccctctcgttgtgggtaatgcacctacatacctgcaacaacaattgctgcaacagattgtaccagctctgactcagctagctgtggcaaaccctgctgcctacttgcaacagctgcttccattcaaccaactgactgtgtcg

SEQ ID NO: 27941 - DNA, 239 bp, Zea mays
caaggaccttcggcgcccgttcaggatccacatcttcccgagcgagttcttggttgacctcttcctcttcggaccacctccaaggctcttggtgtagcttgccactctcaccaatcaagttttcatgtctgatctcgacattcagatcccaactgccttcgatcccttcgctgaggccaatgctggggactctggtgcggcacagggtcaaaggctacgtacacgtgcgcatcagcagc

SEQ ID NO: 27942 - DNA, 247 bp, Zea mays
aacaattgcaacagtttctgccagcgctcagtcaactagccatggtgaaccctgccgcctacctacaacagcaacaactgctttcatctagccctctcgttgtgggtaatgcacctacatacctgcaacaacaattgctgcaacagattgtaccagctctgactcagctagctgtggcaaaccctgctgcctacttgcaacagctgcttccattcaaccaactgactgtgtcgaactctgctgcgta

SEQ ID NO: 27943 - DNA, 249 bp, Zea mays
cttggtgcatttattggcacaaaacatcagggcacaacaactacaacaacttgtgctagcaaaccttgctgcctactctcagcaacaacagtttcttccattcaaccaactagctgcattgaactctgcttcttatttgcaacaacaacaactaccattcagccagctatctgctgcctacccccagcaatttcttccattcaaccaactgacagctttgaactctcctgcttatttacagcagcaaca

SEQ ID NO: 27944 - DNA, 160 bp, Zea mays
ctcaagctcatgatagtgttcttggaatcattctgggaggtggtgctgggactagattgtaccccttgacaaagaagcgtgccaagcctgcagtgccattgggtgccaactatagactgattgatattcctgtcagcaattgtctcaacagcaacatatc

SEQ ID NO: 27945 - DNA, 178 bp, Zea mays
cttcagaaacacacctagcgaacgcactagcaacgacctaacaacaatggctaccaagatattatccctctttgcgcttcttgccctttttgtgagcgcaacaaatgcgttcattattccacaatgctcacttgctcctagtgccattattccacagttcctccctccagttacttca

SEQ ID NO: 27946 - DNA, 211 bp, Zea mays
cctccgtgctgaagatgtgcaaggcaggaatgtgctcacaaacttctggggcatgaattttaccaccgataagctcagatctctagtaaagaagtggcagacattgattgaagcccatgttgatgtcaagacaaccgacaactacatgctgcgtttgttctgcattggttttaccaagaggcgcccaaaccaggtcaagagaacctgctat

SEQ ID NO: 27947 - DNA, 212 bp, Zea mays
ccacaatcatcagccctattacagcagttacctttggtgcatttattggcacaaaacatcagggcacaacaactacaacaacttgtgctagcaaaccttgctgcctactctcagcaacagcagtttcttccattcaaccaactagctgcattgaactctgcttcttatttgcaacaacaacaactaccattcagccagctatctgctgccta

SEQ ID NO: 27948 - DNA, 260 bp, Zea mays
cccgcaacaaatgcgttcattattccacagtgctcacttgctcatagtgccagtattccacagttcctcccaccagttacttcaatgggcttcgaacatccagccgtgcaagcctacaggctacaactagcgcttgcggcgagcgccttacaacaaccaattgcccaattgcaacaacaatccttggcacatctaaccctacaaaccattgcaacgcaacaacaacaacaacagtttctgccatcactgagccacctagc

SEQ ID NO: 27949 - DNA, 251 bp, Zea mays
gatcccaggaacacgtcggatccaagataatctttccgatctccgtgctcaggttgcggcaaaccagagaggtatagcacttatcaaagaactcataaatcagtacgggttgatcactgttcaatcatatatgaaccatgttcaaaagaatgctgaggtagctgtcagggagatgctcaaaacagttgcgtctagagttgcaaaggagaatggatcatgtgttgtcgaggatgaagattatatggatgacg

SEQ ID NO: 27950 - DNA, 256 bp, Zea mays
cttttgagcattcagaaacacacctagcgaacgcactagcaacgacctaacaacaatggctaccaagatattatccctctttgcgcttcttgccctttttgtgagcgcaacaaatgcgttcattattccacaatgctcacttgctcctagtgccattattccacagttcctccctccagttacttcaatgggcttcgaacacccagctgtgcaagcctacaggctacaacaagcgcttgcggcgagcgtcttacaa

SEQ ID NO: 27951 - DNA, 177 bp, Zea mays
tgcagcttgagcgtgccgctgccgccagcagcagcctgtacgagccagctctgatgcagcagcagcagcagctgctggcagcccagggtctcaaccccatggccatgatgatggcgcagaacatgccggccatgggtggactctaccagtaccagctgcccagctaccgcaccaacc

SEQ ID NO: 27952 - DNA, 260 bp, Zea mays
ctggacgtcagcctagcaattagctcatcgactccagattggagaactcgacaccatgaaggtgctgatcgttgcccttgctctcctggcgctcgctgcgagcgccgcctccagtacaagcggcggctgtggctgccagacaccaccgtttcatctaccgcctccgttctatatgccgcctccgttctatctgccgccgcagcagcagccgcagccatggcaataccccactcaaccaccgcagctaagcccgtgccagc

SEQ ID NO: 27953 - DNA, 259 bp, Zea mays
ccaacatagaaagcacaatagtgtaccaacaatggcagccaaaatattttgcttccttatgctccttggtctttctgcaagtgctgctaccgcaaccattttcccacaatgctcacaagctcctatagcttcctttcttcccccatacctctcaccagcggtgtcttcagtatgtgaaaacccaattcttcaaccctacaggatccaacaggcaatcgcagcaggcatcttacctttatcacccttgttcctccaacaa

SEQ ID NO: 27954 - DNA, 167 bp, Zea mays
gcaattagctcatcgactccagattggagaactcgacaccatgaaggtgctgatcgttgcccttgctctcctggcgctcgctgcgagcgcgcctccagtacaagccgcggctgtggctgccagacaccaccgtttcatctaccgcctccgttctatatgccgcctcc

SEQ ID NO: 27955 - DNA, 262 bp, Zea mays
cagcagcactggagctgctaaggctgttggcaaagtgcttcctgtcctcaatggaaaattgactggaatgtctttccgtgtcccaactgtcgatgtttctgttgttgatctgactgttaggcttgagaagtctgccacctatgatgagatcaaggctgcggtcaaggccgaggcagagggtagcctcaagggcattctgggttatgtcgaggaggaccttgtttccaccgatttccagggtgacagcaggtctagcatcttt

SEQ ID NO: 27956 - DNA, 268 bp, Zea mays
caacaaatgcgttcattattccacagtgctcacttgctcctagtgccattattccacagttcctcccaccagttacttcaatgggcttcgaacatccagccgtgcaagcctacaggctacaactagcgcttgcggcgagcgccttacaacaaccaattgcccaattgcaacaacaatcgttggcacatctaaccctacaaaccattgcaacgcaacaacaacaacaacaacagtttctgccatcactgagccacctagccgtggtgaa

SEQ ID NO: 27957 - DNA, 154 bp, Zea mays
attggtacaaaccatcagggcacaacagctgcagcaactcgtgctacctgtgatcaaccaagtagctctggcaaacctttctccctactctcagcaacaacaatttcttccattcaaccaactgtctacactgacccctgctgcttatttgcag

SEQ ID NO: 27958 - DNA, 175 bp, Zea mays
caaagcggcagtgcgtagagaggatcgtcgaacagaacagcatgaagatggtcatcgttctcgtcgtgtgcctggctctgtcagctgccagcccctctgcaatgcagatgccctgcccctgcgcggggctgcagggcttgtacggcgctggcgccggcctgacgacgatgatggg

SEQ ID NO: 27959 - DNA, 253 bp, Zea mays
ccagtggccgttatctcttgtaatttcaaggaaggctttgacaaaataccaattgatctttcgcctattgttccactgcaagcatgttagtcgccagctgtgtgcagcatggcaaatacaacaagcattccggtctgtcaagattctagggacaccaattctgcggtcatcaattctttgtcgtagcatgctcaagtttgtaaatagccttttgcattatctaacatttgaggttcttgaaccaaattggcat

SEQ ID NO: 27960 - DNA, 230 bp, Zea mays
attcaaccaacttgctttgacaaacccagcagcattctaccaacaacccatcattggtggtgccctcttttagatttcttatgagttatagttcaataataaagttttttgtctgatgtttgtggcttcccagaaataagaaagtacatttctagattcttatgtgcttctagtctccaaatgtggttgatagttattttgctctaagatcaacagtaatgaagtataaa

SEQ ID NO: 27961 - DNA, 249 bp, Zea mays
gtcatacacttgtatcgtactcccagctctcaaactgggacaagtgctcctcatgggagggcttcaaggtgtcaccattcaccgcaggagcgaggacattcagcttcgatgcaaatccatgcgattacttccagggtggcaagattaaagcaacgaccctctccctgtcagtcttggtggccattgagatgttcaactcactgaatgccctgtcagaggacggcagccttgtgagcatgccaccatggg

SEQ ID NO: 27962 - DNA, 251 bp, Zea mays
gaggatctccaagggaaagaagggtggtaagaaaaagaccgtcgatcccttctctaagaaggactggtatgacatcaaggccccatcggtcttcagtgtgcgcaacattgggaagactctcgtgtccaggacacagggtaccaggattgcctctgatggtctgaagcacagagtctttgaggtttgtctagctgatcttcagggtgacgaggatcaggcttacaggaaaatcaggctccgtgctgaagatg

SEQ ID NO: 27963 - DNA, 95 bp, Zea mays
aattggccgcactgaaccccgctgcttatttgcagcagcaaatactactaccatttagccagctagctgcagcaaaccgtgcttccttcttgaca

SEQ ID NO: 27964 - DNA, 255 bp, Zea mays
acagcggtgtcttcggtatgtgaaaacccaattcttcaaccctataggatccaacaggcaatcgcagctggcatcttacctttatcacccttgttcctccaacaatcatcagccctattacagcagttacctttggtgcatttattggcacaaaacatcagggcacaacaactacaacaacttgtgctagcaaaccttgctgcctactctcagcaacaacagtttcttccattcaaccaactagctgcattgaac

SEQ ID NO: 27965 - DNA, 176 bp, Zea mays
agcaacatagaaagtggaatccagtagcaacaatagagcaacaatggcgaccaagatattttccctccttatgctccttgctctttctacatgtgttgctaacgcgacaattttccctcaatgctcacaagctcctatagcttcccttcttcccccataccttccatcaattatag

SEQ ID NO: 27966 - DNA, 112 bp, Zea mays
cttcaagaaagatgcacttttagaccttctcaagtcaagatatactcaattacatgactttggatctgaactcctcccaagagctgtactagatcatagtgtgcaggcatgc

SEQ ID NO: 27967 - DNA, 169 bp, Zea mays
gcaattagctcatcgactccagattggagaactcgacaccatgaaggtgctgatcgttgcccttgctctcctggcgctcgctgcgagcaccgcctccagtacaagcagcggctgtggctgccagacaccaccgtttcatctaccgcctccgttctatatgccgcctccg

SEQ ID NO: 27968 - DNA, 248 bp, Zea mays
gcattgacgaccttcacaggttgtttcaatctaactccttcgatgaaaattccgtgaagatagtggcttcaaacactgggtctggagtgtacaaggatcaagacctttatgacaagtacattgacatcaaaggaatcccagagctttcagtcatcaacagaagcagcaaaggaattgagcttggatcagttgtgtcaatctctagagctattgaggtgctgtcagatggaaatctcgtcttcagaaag

SEQ ID NO: 27969 - DNA, 248 bp, Zea mays
gtcaactagccatggtgaaccctgccgcctacctacaacagcaacaactgctttcatctagccctctcgttgtgggtaatgcacctacatacctgcaacaacaattgctgcaacagattgtaccagctctgactcagctagctgtggcaaaccctgctgcctacttgcaacagctgcttccattcaaccaactgactgtgtcgaactctgctgcgtacctacaacagcgacaacagttacttaatcca

SEQ ID NO: 27970 - DNA, 248 bp, Zea mays
aacacacctagcggacgcactagcaacgacctaacaacaatggcttccaagacattatccctccttgcgcttcttgcgctttttgtgagtgcaaccaatgcgttcattattccacaatgctcacttgctccgagtgccattattcgacagttcctccctccagttacttcaatgagcttcgaacactcagctgtgcaagcctataggctataacaagcgcttgctgctagcgtcttagaacaaccaat

SEQ ID NO: 27971 - DNA, 102 bp, Zea mays
gaccattagctttatctactccagagcgcagaagaacccgatcgacaccatgagggtgttgctcgttgccctcgctctcctggctctcgctgcgagcgccac

SEQ ID NO: 27972 - DNA, 192 bp, Zea mays
agcgccactagtgcgacccatattccagggcacttgccaccagtcatgccattgggtaccatgaacccatgcatgcagtactgcatgatgcaacaggggcttgccagcttgatggcgtgtccgtccctgatgctgcagcaactgttggccttaccgcttcagacgatgccagtgatgatgccacagatgatg

SEQ ID NO: 27973 - DNA, 231 bp, Zea mays
gctcaatcaattcactcaaacctcttccccaaatcttcgattagattctcgttgacaagaagactagaaccgaacctgaccatgtcgctgatccgccgcagcaacgtgttcgatcccttctccctcgacctctgggacccctttgagggcttccccttcggctccggcagcagcagcagtctcttcccctcgttcccgcggaccagctcggagaccgcggccttcgctggc

SEQ ID NO: 27974 - DNA, 220 bp, Zea mays
cacaagagcaactgaggggcctatagttgctgataagaattgtgagaagatccactttatggcgccaaacatttattgttgtggagcaggaactgctgctgacactgaggctgttacagacatggtcagctcgcagctacagctgcaccgttacgcaacgggtcgcgaatctagagtcgtaactgctcttacactgctgaagtcacatctctttaggtat

SEQ ID NO: 27975 - DNA, 271 bp, Zea mays
agaggatcgtcgaacagaacagcatgaagatggtcatcgttctcgtcgtgtgcctggctctgtcagctgccagcgcctctgcaatgcagatgccctgcccctgcgcggggctgcagggcttgtacggcgctggcgccggcctgacgacgatgatgggcgccggcgggctgtacccctacgcggagtacctgatgcagccgcagtgcagcccgctggcggcggcgccctactacgccgggtgtgggcagacgagcgccatgtaccagccgct

SEQ ID NO: 27976 - DNA, 265 bp, Zea mays
taaggatggttaaggagctgacaggtggctataagataaaatatcatgcaaatggagttacgaactcaccaatagaaattgatttcacacctcccttcagaaggattgatatgattaaagatttggaggctatggccaatctcaatataccaaaagatctagcaagtgatgaagcgaatcgttacttgatagaagcatgtgctaagtatgatgtgaaatgtccacctccccaaacgacatcacggttgcttgacaagttagttgg

SEQ ID NO: 27977 - DNA, 273 bp, Zea mays
aagcaacatagaaagtggaatacagtagcaacaatagagcaacaatggcggccaagatattttccatccttatgctccttgctctttctgcatgtgttgctaacgcgaccatttttcctcaatactcacaagctcctatagctgcccttcttcccccataccttccatcaatgaccgcttcagtttgtgaaaacccagcccttcaaccctacaggctccaacaagcaatcgcaacaagcaacttacctttatcacccctgttctttcaacaat

SEQ ID NO: 27978 - DNA, 273 bp, Zea mays
ccctactctcagcaacaacaatttcttccattcaaccaactgtctacactgaaccctgctgcttatttgcagcaacaactattaccattcagccagctagctactgcctactctcagcaacaacaacttcttccatttaaccaattggccgcactgaaccccgctgcttatttgcagcagcaaatactactaccatttagccagctagctgcagcaaaccgtgcttccttcttgacacagcaacagttgctgcctttctaccagcagtttgcg

SEQ ID NO: 27979 - DNA, 196 bp, Zea mays
atttcatctagccctctcgctgtggttaatgcacctacatacctgcaacaacagttgctgcaacagattgtaccagctctgactcagctagctgtggcaaaccctgctgcctacttgcaacagctgcttccattcaaccaactgactgtgtcgaactctgctgcgtacctacaacagcgacaacagttacttaatc

SEQ ID NO: 27980 - DNA, 268 bp, Zea mays
gccgccgccgccgccgccgccgcctcgaaggccggttccgacgacgtgggtgccgcctccgccaacagcaccgccgcctccggtgaggacctcaagaactgggatgcggacttcgtcaaggtcgaccaggccacgcttttcgacctcatcttggctgcaaactatctgaacatcaagggtctgctcgacctgacctgtcagactgttgctgacatgatcaagggcaagacaccagaagagattcgcaagaccttcaacatcaagaatg

SEQ ID NO: 27981 - DNA, 266 bp, Zea mays
tcagcaaagcggcagtgcgtagagaggatcgtcgaacagaacagcatgaagatggtcatcgttctcgtcgtgtgcctggctctgtcagctgccagcgcctctgcaatgcagatgccctgcccctgcgcggggctgcagggcttgtacggcgctggcgccggcctgacgacgatgatgggcgccggcgggctgtacccctacgcggagtacctgaggcagccgcagtgcagcccgctggcggcggcgccctactacgccgggtgtgg

SEQ ID NO: 27982 - DNA, 267 bp, Zea mays
cgtacctacaacaacagttgctgcaacaaattgtaccagctctgactcagctagctgtggcaaaccctgctgcctacttacaacagttgcttccattcaaccaactggctgtgtcaaactctgctgcgtacctacaacagcgacaacagttacttaatccattggcagtggctaacccattggtcgctaccttcctgcagcagcaacaacaattgctgccatacaaccagttctctttgatgaaccctgccttgcagcaacccatcg

SEQ ID NO: 27983 - DNA, 267 bp, Zea mays
tgaagtccacaaacttagagatttggtgagatcactgcaagaaagggagaagactctggagctacagcttctggagtgttacggtttgcaggagcaagatgctgcggtgagggagcttgagaatcagctgaagattaacaacgttgaatcaaagttgtacttgctgaagattgaatctttacagactgaaaaccagaggctgcaaacacagctctcagagaactcaaaaatattctctgagcttgaggcgacaagaacaaaatgcaa

SEQ ID NO: 27984 - DNA, 269 bp, Zea mays
ggctccaacaagcaatcgcagcaagcaacatacctttatcacccttgttgtttcaacaatcgccagccctatctttggtgcagtcattggtacaaaccatcagggcacagcagctgcagcaactcgtgctacctgtgatcaaccaagtagctctggcaaacctttctccctactctcagcaacaacaatttcttccattcaaccaactgtctacactgaaccctgctgcttatttgcagcaacaactattaccattcagccagctagct

SEQ ID NO: 27985 - DNA, 267 bp, Zea mays
aacagctacaacagtttctgccaacgctcagtcaactagccatggtgaaccctgccgcctacgtacaacaacaacaactgctttcatctagcccgctcgctgtgggcaatgcacctacatacctgcaacaacaattgttgcaacagattgtaccagctctgactcaactagctgtggcaaaccctgttgcctacttgcaacagctgcttccattcaaccaactgactctgtcgaactctgctgcgtacctacaacagcgacaacagt

SEQ ID NO: 27986 - DNA, 154 bp, Zea mays
ggcaatcgcagcaggcatcttacctttatcacccttgttcctccaacaatcatcagccctattacagcagttacctttggtgcatttattggcaccaaacatcagggcacaacaactacaacaactcgtgctagcaaaccttgctgcctactct

SEQ ID NO: 27987 - DNA, 262 bp, Zea mays
cgcacagctgacggcgatgtgcggcctgcagcccttcctgcagcagcagccgcagggcgagctcgcggcgctgatggcggcccaggtagcgcacagctgacggcgatgtgcggcctgcagcagcagcagccaggtccctgcccttgcaacgcagctgccggcggtgtctactactgaggaaactatgtactgtagtaataatgtaatggagccgctgactagctacctagctcgctagtttactcatttagcggcgatgagt

SEQ ID NO: 27988 - DNA, 266 bp, Zea mays
agcaaagcggcagtgcgtagagaggatcgtcgaacagaacagcatgaagatggtcatcgttctcgtcgtgtgcctggctctgtcagctgccagcgcctctgcaatgcagatgccctgcccctgcgcggggctgcagggcttgtacggcgctggcgccggcctgacgacgatgatgggcgccggcgggctgtacccctacgcggagtacctgaggcagccgcagtgcagcccgctggcggcggcgccctactacgccgggtgtgggc

SEQ ID NO: 27989 - DNA, 265 bp, Zea mays
ggcaggtggagccgcagcaccggtaccaggcgatcttcggcttggtcctccagtccatcctgcagcagcagccgcaaagcggccaggtcgcggggctgttggcggcgcagatagcgcacaactgacggcgatgtgcggcctgcagcagccgactccatgcccctacgctgctgccggcggtgtcccccactgaagaaactatgtgctgtagtatagccgctggctagctagctagttgagtcatttagcggcgatgattgagtaa

SEQ ID NO: 27990 - DNA, 264 bp, Zea mays
gatcagcaaagcggcagtgcgtagagaggatcgtcgaacagaacagcatgaagatggtcatcgttctcgtcgtgtgcctggctctgtcagctgccagcgcctctgcaatgcagatgccctgcccctgcgcggggctgcagggcttgtacggcgctggcgccggcctgacgacgatgatgggcgccggcgggctgtacccctacgcggagtacctgaggcagccgcagtgcagcccgctggcggcggcgccctactacgccgggt

SEQ ID NO: 27991 - DNA, 263 bp, Zea mays
ccagaatgaatactgcatggaggttactccaaaaacattggctgatgttaaaggcggtactctcatctcttacgaaggaagagttcagcttttggagattgcccaagtacctgatgagcatgtgaatgagtttaaatcaatcgagaagtttaagatattcaacactaacaacttgtgggtgaaccttaaagctgtcaagagactagtagaggctgaggcacttaagatggaaattattccaaaccccaaggaagttgatggtg

SEQ ID NO: 27992 - DNA, 260 bp, Zea mays
gattgctggagcgtcaaggatcattggtgtcgacctgaaccccagcagattcgaagaagctaggaagttcggttgcactgaatttgtgaacccaaaagaccacaacaagccagtgcaggaggtacttgctgagatgaccaacggaggggtcgaccgcagtgtggaatgcactggcaacattaatgctatgatccaagctttcgaatgtgttcatgatggctggggtgttgctgtgctggtgggtgtgccacataaggacg

SEQ ID NO: 27993 - DNA, 260 bp, Zea mays
cagcctagcaattagctcatcgactccagattggagaactcgacaccatgaaggtgctgatcgttgcccttgctctcctggcgctcgctgcgagcgccgcctccagtacaagcggcggctgtggctgccagacaccaccgtttcatctaccgcctccgttctatatgccgcctccgttctatctgccgccgcagcagcagccgcagccatggcaataccccactcaaccaccgcagctaagcccgtgccagcagttcgga

SEQ ID NO: 27994 - DNA, 253 bp, Zea mays
tgagaccaactagcaacatagaaagcacaatagtgtaccaacaatggcagccaaaatattttgcttccttatgctccttggtctttctgcaagtgttgctaccgcaaccattttcccacaatgctcacaagctcctatagcttcccttcttcccccatacctctcaccagcggtgtcttcaatgtgtgaaaccccaattgttcaaccctacaggatccaacaggcaatcgcaacaggcatcttaccattatca

SEQ ID NO: 27995 - DNA, 262 bp, Zea mays
gaagaaacaagaacttgctaaaagatactcaaaaagagatgatgcaaccaaagatctgactgaggcagtagaggtaggagataaagatgcgattgaaaaattgagcaagaggactgtaaaggtcacaaggcaacacaacgaagattgtaaacgactattaagacttatgggggttcctgttgtagaggcaccttctgaagcagaagcagaatgtgcagccctttgcataaacgataaggtgttcgctgttgcttcagaagat

SEQ ID NO: 27996 - DNA, 260 bp, Zea mays
agctcttcaaccatataggcttcaacaagcaatcgcagcaagcaacatacctttatcgcccttgttagttcaacaatcaccagccctatctttggtgcagtcattggtacaaaccatcagggcacaacagctgcagcaactcgtgctacctgtgatcaaccaagtagctctggcaaacctttctccctactctcagcaacaacaatttcttccattcaaccaactgtctacactgaaccctgctgcttatttgcagcaac

SEQ ID NO: 27997 - DNA, 190 bp, Zea mays
gcattcagaaacacacctagcgaacgcactagcaacgacctaacaacaatggcttccaagacattatccctccttgcgcttcttgccctttttgtgagtgcaacaaatgcgttcattattccacaatgctcacttgctccgagtgccattattccacagttcctccctccagttacttcaatgggcttcg

SEQ ID NO: 27998 - DNA, 263 bp, Zea mays
ctagcccgctcgctgtgggcaatgcacctacatacctgcaacaacaattgttgcaacagattgtaccagctctgactcaactagctgtggcaaaccctgttgcctacttgcaacagctgcttccattcaaccaactgactctgtcgaactctgctgcgtacctacaacagcgacaacagttacttaatccattggtagtggctaacccattggtcgccgccttcctacagcagcaacaattgctgccatacaaccagttctct

SEQ ID NO: 27999 - DNA, 256 bp, Zea mays
atagagcgcactagcaacgacctaacaccaatggctaccaagatattagccctccttgcgcttcttgcccttttagtgagcgcaacaaatgcgttcattattccacagtgctcacttgctcctagtgccagtattccacagttcctcccaccagttacttcaatgggcttcgaacatccagccgtgcaagcctacaggctacaactagcgcttgcggcgagcgccttacaacaaccaattgcccaattgcaacaac

SEQ ID NO: 28000 - DNA, 255 bp, Zea mays
ctagcaacatagaaagcacaatagtgtaccaacaatggcagccaaaatattttgcctccttatgctccttggtctttctgcaagtgctgctacggcgaccattttcccgcaatgctcgcaagctcctatagcttcccttcttcccccgtacctctcaccagcggtgtcttcggtatgtgaaaacccaattcttcaaccctacaggatccaacaggcaatcacagctggcatcttacctttatcacccttgttcct

SEQ ID NO: 28001 - DNA, 257 bp, Zea mays
gcaaagcggcagtgcgtagagaggatcgtcgaacagaacagcatgaagatggtcatcgttctcgtcgtgtgcctggctctgtcagctgccagcgcctctgcaatgcagattccctgcccctgcgcggggctgcagggcttgtacggcgctggcgccggcctgacgacgatgatgggcgccggcgggctgtacccctacgcggagtacctgatgcagccgcagtgcagcccgctggcggcggcgccctactacgccgg

SEQ ID NO: 28002 - DNA, 254 bp, Zea mays
ccatgttgctgctcagaactgctgggtgaagaagggaggtgctttcactggtgaagtcagtgctgagatgctcgtcaaccttggtgttccctgggtcattcttggacactctgaaaggagagctctgctgggagaatcaaatgaatttgttggagacaaggttgcgtatgccctgtctcagggactaaaggtcattgcatgtgttggtgagacccttgagcagagggaggctgggtctaccatggatgttgttg

SEQ ID NO: 28003 - DNA, 257 bp, Zea mays
tagcaacatagaaagcacaatagtgtaccaacaatggcagccaaaatattttgcctccttatgctccttggtctttctgcaagtgctgctacggcgaccattttcccgcaatgctcgcaagctcctatagcttcccttcttcccccgtacctctcaccagcggtgtcttcggtatgtgaaaacccaattcttcaaccctacaggatccaacaggcaatcacagctggcatcttacctttatcacccttgttcctcca

SEQ ID NO: 28004 - DNA, 254 bp, Zea mays
aactctcctgcttatttacagcagcaacaactactaccattcagccagctagctggtgtgagccctgctaccttcttgacacaaccacagttgttgccgttctaccagcacgttgcgcctaacgctggcaccctcttacaactgcaacaattgctgccatttaaccaacttgctttgacgaatcctaccaccttattgcagcagcccaccattggtggtgccatcttctagatttttttatgctttatactgta

SEQ ID NO: 28005 - DNA, 266 bp, Zea mays
tttcagcattcaaaaacacaccaagcgaagcaactagcaacgacctaacaccaatggctaccaagatattagccctccttgcgcttcttgcccttttagtgagcgcaacaaatgcgttcattattccacagtgctcacttgctcctagtgccagtattccacagttcctcccaccagttacttcaatgggcttcgaacatccagccgtgcaagcctacaggctacaactagcgcttgcggcgagcgccttacaacaaccaattgcc

SEQ ID NO: 28006 - DNA, 252 bp, Zea mays
accaactagcagcattgaactctgctgcttatttacagcagcaacaactactaccattcagccagctagctgatgtgagccctgctgccttcttgacacaacaacagttgttgccgttctaactgcacgctatgcctaacgctggcaccctcttacaactgcaacaattgctgccattcaaccaacttgctttgacaaacccaacagtgttctaccaacaacccatcattggtggtgccctcttttagattg

SEQ ID NO: 28007 - DNA, 227 bp, Zea mays
cagttacttaatccactagcggtggctaacccattggtcgctgccttcctacagcagcaacaattgctgccatacaaccagttctctttgatgaaccctgccttgtcgtggcagcaacccatcgttggtggtgccatcttttagattacatatgagatgtactcgataatggtgccctcatagcggcatgtgtttcctaaaaataatcaatatattgattgagattt

SEQ ID NO: 28008 - DNA, 255 bp, Zea mays
cagcaacaacaacagctgcaacagtttatgccagtgctcagtcaactagccatggtgaaccctgccgtctacctacaactactttcatctagcccgctcgcggtgggcaatgcacctacgtacctacaacaacagttgctgcaacaaattgtaccagctctgactcagctagctgtggcaaaccctgctgcctacttacaacagttgcttccattcaaccaactggctgtgtcaaactctgctgcgtacctacaa

SEQ ID NO: 28009 - DNA, 254 bp, Zea mays
atgaacccatgcatgcagtactgcatgatgcaacaggggcttgccagcttgatggcgtgtccgtccctgatgctgcagcaactgttggccttaccgcttcagacgatgccagtgatgatgccacagatgatgacgcctaacatgatgtcaccattgatgatgccgagcatgatgtcaccaatggtcttgccgagcatgatgtcgcaaatgatgatgccacaatgtcactgcgacgccgtctcgcagattatgct

SEQ ID NO: 28010 - DNA, 257 bp, Zea mays
aagggatcttccagcccgtgctgccaccggagaagaaggtcccggagctatggttctacacagagctcaaaactaggaccagctccatcacgctcgccatacgcatggacaacctgtacctcgtgggcttcaggaccccgggcggggtgtggtgggagttcggcaaggacggcgacacccacctcctcggcgacaaccccaggtggctcggcttcggcggcaggtaccaggacctcatcggcaacaagggtctggag

SEQ ID NO: 28011 - DNA, 272 bp, Zea mays
tggacaagtgcaagatgaaatatgcatttatctcagatggttgcttactgagagaatgcaacatcgagcattctgtgattggagtctgctcacgtgtcagctctggatgtgaactcaaggactccgtgatgatgggagcggacatctatgaaactgaagaagaagcttcaaagctactgttagctgggaaggtcccagttggaataggaaggaacacaaagataaggaactgtatcattgacatgaatgctaggattgggaagaacgtggtg

SEQ ID NO: 28012 - DNA, 130 bp, Zea mays
aggcaatcgcagctggcatcttacctttatcacccttgttcctccaacaatcatcagccctattacaacagttacctttggtgcatttattggcacaaaacatcagggcacaacaactacaacaacttgt

SEQ ID NO: 28013 - DNA, 270 bp, Zea mays
acagcatgaagatggtcatcgttctcgtcgtgtgcctggctctgtcagctgccagcgcctctgcaatgcagatgccctgcccctgcgcggggctgcagggcttgtacggcgctggcgccggcctgacgacgatgatgggcgccggcgggctgtacccctacgcggagtacctgaggcagccgcagtgcagcccgctggcggcggcgccctactacgccgggtgtgggcagccgagcgccatgttccagccgctccggcaacagtgctgcc

SEQ ID NO: 28014 - DNA, 268 bp, Zea mays
cgccgctgcaccggtaccaggcgacatacggtgtggtcctgcagtccttcctgcagcagcagccgcagggcgagctcgcggcgctgatggcggcccaggtagcgcacagctgacggcgatgtgcggcctgcagctgcagcagccaggtccctgcccttgcaacgcagctgccggcggtgtctactactgaggaaactatgtactgtagtaataatgtaatggagccgctggctagctacctagctcgctagtttactcatttagcggc

SEQ ID NO: 28015 - DNA, 270 bp, Zea mays
gtataccctatatctctatagccaacacacacacaaatactctccattccattccatctcaaaggatagaataatgggcggtctctccaccaagcttttcgtggtcctcctcctgctcgtttgttacaccgggacgcaaggcgggccggtgactatggtgtcggcgaggaagtgcgagtcgcagagcttccgcttcaagggaccttgctcgagggacgccaactgcgcaaacgtctgcctgaccgaagtttcaccggcggcgtgtgcaag

SEQ ID NO: 28016 - DNA, 269 bp, Zea mays
aaacacacctagcgaacgcactagcaacgacctaacaacaatggcttccaagacattatccctccttgcgcttcttgccctttttgtgagtgcaacaaatgcgttcattattccacaatgctcacttgctccgagtgccattattccacagttcctccctccagttacttcaatgggcttcgaacacccagctgtgcaagcctataggctacaacaagcgcttgcggcgagcgtcttagaacaaccaattgcccaattacaacaacaat

SEQ ID NO: 28017 - DNA, 249 bp, Zea mays
ctgttttccactgctttgacggcgagaacgtggagagtgctcatcctcctatgaagaaggactacaaactagctaatcttctctgctgggaggaggaagcggatgccatggaggagaaggcgggagtgcttgatgagtaagacgggcttctggtgtcgatttgcttctgagttgtttattttatatcgtcgcaatttcgtggttgtcgtttggttattctgtgaagcagccaagccaggctattgttat

SEQ ID NO: 28018 - DNA, 262 bp, Zea mays
aggcaatgaaaaggacgacgatgaagctgatactgttggttgctgtacgctgaaggttgataatgttacatgtatgcctccaaatcagattcagtttgactttctgggtaaagattcaataagatactttaacaccgtagaggttgaagagcttgtgtacaaggcaattgagggtttccgtgctggaaagaagccaggacaagatctatttgacaagattgatacatctaggctaaatgctcacttgaaggatctaatgcct

SEQ ID NO: 28019 - DNA, 269 bp, Zea mays
gcgaaccttgctgcttacctccagcaacaacaatttcttccattcaatcaactagctggggtgaaccctgctgcttacttgcaggcacaacagctactaccattcaaccaacttgtcaggagccctgctgccttcttactgcagcaacagttgcttccattccatctacaagttgtggcaaacattgctgctttcttgcaacaacaacaacaattgctgccattttacccacaggttgtgggaaacattaacgccttcttgcaacagca

SEQ ID NO: 28020 - DNA, 268 bp, Zea mays
aacaagcaacatagaaagtggaatccagtagcaacaatagagcaacaatggcgaccaagatattttccctccttatgctccttgctctttctgcatgtgttgctaacgcgacaattttccctcaatgctcacaagctcctatagcttcccttcttcccccataccttccatcaatgatagcttcagtatgtgaaaacccagctcttcaaccctataggctccaacaagcaatcgcagcaagcaacatacctttatcacccttgtttca

SEQ ID NO: 28021 - DNA, 268 bp, Zea mays
caacgacctaacaacaatggcttccaagacattatccctccttgcgcttcttgccctttttgtgagtgcaacaaatgcgttcattattccacaatgctcacttgctccgagtgccattattccacagttcctccctccagttacttcaatgggcttcgaacacccagctgtgcaagcctataggctacaacaagcgcttgcggcgagcgtcttagaacaaccaattgcccaattacaacaacaatccttagcacatctaaccatacaa

SEQ ID NO: 28022 - DNA, 201 bp, Zea mays
cgccccaagggcccgtgccattggctcagcccgcccggccgacgcgccgcggcgggccgcctcgaagctcccttcccaacgggcggcgtgctgaatcctttgcagacgacttaaaacgcgacggggcattgtaagtggcagagtggccttgctgccacgatccactgagatccagccccgcgtcgcacggattcgtcccta

SEQ ID NO: 28023 - DNA, 265 bp, Zea mays
acagttacctttggtgcatttattggcacaaaacatcatggcacaacaactacaacaacttgtgctagcaaaccttgctgcctactctcagcaacagcagtttcttccattcaaccaactagctgcattgaactctgcttcttatttgcaacaacaacaactaccattcagccagctatctgctgcctacccccagcagtttcttccattcaaccaactgacagcattgaactctcctgcttatttacagcagcaacaactacta

SEQ ID NO: 28024 - DNA, 266 bp, Zea mays
cattgatggatggttccacactggtgacattggtgagtggcaacctgatggatctatgaaaatcatagaccgtaaaaagaatatattcaaactttcacagggtgaatatgtggcagttgaaaatttggagaatgtttatggtcttgtttctgctatagactcgatatggatatatgggaacagctttgagtcctttcttgttgctgtggtcaatcccaacaaggaggttctcgagagttgggctgcagcaaatggaataagtggtg

SEQ ID NO: 28025 - DNA, 263 bp, Zea mays
gcttgattgttccaggtattcgcagtcgaccgtgtcctcggagcacgatgaaggttgttgctgcctacctgcttgctgtcctcgctgggaatgccagcccctccgctgaggatttgactggcattctggagtcagttggctgtgaagttgacaatgaaaggatggaactgctgctgtcccaactgagcggtaaggacatcaccgagctcattgccgcgggcagagagaagtttgcttcagtcccatgtggcggcggcggagtg

SEQ ID NO: 28026 - DNA, 262 bp, Zea mays
accgcagctaagcccgtgccagcagttcggatcctgcggcgtcggcagcgtcggcagcccgttcctgggccagtgcgtcgagttcctgaggcaccagtgcagcccggcggcgacgccctacggctcgccacagtgccaggcgctgcagcagcagtgctgccaccagatcaggcaggtggagccgctgcaccggtaccaggcgacatacggtgtggtcctgcagtccttcctgcagcagcagccgcagggcgagctcgcggcg

SEQ ID NO: 28027 - DNA, 263 bp, Zea mays
ctgctttcatctagccctctcgttgtgggtaatgcacctacatacctgcaacaacaattgctgcaacagattgtaccagctctgactcagctagctgtggcaaaccctgctgcctacttgcaacagctgcttccattcaaccaactgactgtgtcgaactctgctgcgtacctacaacagcgacaacagttacttaatccactagcagtgcctaacccattggtcactgccttcctacagcagcaacaattgctaccatacag

SEQ ID NO: 28028 - DNA, 263 bp, Zea mays
gcacaatagtgtaccaacaatggcagccaaaatattttgcctccttatgctccttggtatttctgcaagtgctgctacggcgaccattttcccgcaatgctcacaagctcctatagcttcccttcttcccccgtacctctcaccagcggtgtcttcggtatgtgaaaacccaattcttcaaccctacaggatccaacaggcaatcgcagctggcatcttacctttatcacccttgttcctccaacaatcatcagccctattac

SEQ ID NO: 28029 - DNA, 263 bp, Zea mays
attttgagcattcagaaacacaccaagcgaacgcagctagcaacgacctaacaacaatggctaccaagatattagccctccttgcgcttcttgccctttttgtgagcgcaacaaatgcgttcattattccacaatgctcacttgctcctagtgccattattccacagttcctcccaccagttacttcaatgggcttcgaacacctagctgtgcaagccaacatgcaacaacaagcgcttgcggcgagcgtcttacaacaacca

SEQ ID NO: 28030 - DNA, 260 bp, Zea mays
agcaattagctcatcgactccagattggagaactcgacaccatgaaggtgctgatcgttgcccttgctctcctggcgctcgctgcgagcgccgcctccagtacaagcggcggctgtggctgccagacaccaccgtttcatctaccgcctccgttctatatgccgcctccgttctatctgccgccgcagcagcagccgcagccatggcaataccccactcaaccaccgcagctaagcccgtgccagcagttcggatcctgc

SEQ ID NO: 28031 - DNA, 257 bp, Zea mays
aacagaacagcatgaagatggtcatcgttctcgtcgtgtgcctggctctgtcagctgccagcgcctctgcaatgcagatgccctgcccctgcgcggggctgcagggcttgtacggcgctggcgccggcctgacgacgatgatgggcgccggcgggctgtacccctacgcggagtacctgaggcagccgcagtgcagcccgctggcggcggcgccctactacgccgggtgtaggcagccgagcgccatgttccagccg

SEQ ID NO: 28032 - DNA, 219 bp, Zea mays
atgaaccctgctgcttatttgcagcaacaactattaccattcagccagctagctactgcctactctcagcaacaacaacttcttccatttaaccaattggccgcactgaaccccgctgcttatttgcagcagcaaatactactaccatttagccagctagctgcagcaaaccgtgcttcgttcttgacacagcaacagttgcggcctttctaccagcag

SEQ ID NO: 28033 - DNA, 259 bp, Zea mays
ccagatcagcaaagcggcagtgcgtagagaggatcgtcgaacagaacagcatgaagatggtcatcgttctcgtcgtgtgcctggctctgtcagctgccagcgcctctgcaatgcagatgccctgcccctgcgcggggctgcagggcttgtacggcgctggcgccggcctgacgacgatgatgggcgccggcgggctgtacccctacgcggagtacctgaggcagccgcagtgcagcccgctggcggcggcgccctacta

SEQ ID NO: 28034 - DNA, 257 bp, Zea mays
taggaagcaaggacaccaccgccatggcagccaagatgcttgcattgttcgctctcctagctctttgtgcaagcgccactagtgcgacccatattccagggcacttgccaccagtcatgccattgggtaccatgaacccatgcatgcagtactgcatgatgcaacaggggcttgccagcttgatggcgtgtccgtccctgatgctgcagcaactgttggccttaccgcttcagacgatgccagtgatgatgccacag

SEQ ID NO: 28035 - DNA, 256 bp, Zea mays
caaagcggcagtgcgtagagaggatcgtcgaacagaacagcatgaagatggtcatcgttctcgtcgtgtgcctggctctgtcagctgccagcgcctctgcaatgcagatgccctgcccctgcgcggggctgcagggcttgtacggcgctggcgccggcctgacgacgatgatgggcgccggcgggctgtacccctacgcggagtacctgaggcagccgcagtgcagcccgctggcggcggcgccctactacgccgg

SEQ ID NO: 28036 - DNA, 254 bp, Zea mays
cgcaattggacaagtgcaagatgaaagatgcatttatctcagatggttgcttactgagagaatgcaacatcgagcattctgtgattggagtctgctcacgtgtcagctctggatgtgaactcaaggactccgtgatgatgggagcggacacctatgaaactgaagaagaagcttcaaagctactgttagctgggaaggtcccagttggaataggaaggaacacaaagataaggaactgtatcattgacatgaat

SEQ ID NO: 28037 - DNA, 255 bp, Zea mays
agccgctgcaccggtaccaggcgacatacggtgtggtcctgcagtccttcctgcagcagcagccgcagggcgagctcgcggcgctgatggcggcccaggtagcgcacagctgacggcgatgtgcggcctgcagctgcagcagccaggtccctgcccttgcaacgcagctgccggcggtgtctactactgaggaaactatgtactgtagtaataatgtaatggagccgctggctagctacctagctcgctagttta

SEQ ID NO: 28038 - DNA, 184 bp, Zea mays
agctcatcgactccagattggagaactcgacaccatgaaggtgctgatcgttgcccttgctctcctggcgctcgctgcgagcgccgcctccagtacaagcggcggctgtggctgccagacaccaccgtttcatctaccgcctccgttctatatgccgcctccgttctatctgccgccgcagcag

SEQ ID NO: 28039 - DNA, 254 bp, Zea mays
cggcagtgcgtagagaggatcgtcgaacagaacagcatgaagatggtcatcgttctcgtcgtgtgcctggctctgtcagctgccagcgcctctgcaatgcagatgccctgcccctgcgcggggctgcagggcttgtacggcgctggcgccggcctgacgacgatgatgggcgccggcgggctgtacccctacgcggagtacctgaagcagccgcagtgcagcccgctggcggcggcgccctactacgccgggtg

SEQ ID NO: 28040 - DNA, 184 bp, Zea mays
gcggcagtgcgtagagaggatcgtcgaacagaacagcatgaagatggtcatcgttctcgtcgtgtgcctggctctgtcagctgccagcgcctctgcaatgcagatgccctgcccctgctcggggctgcagggcttgtacggcgctggcgccggcctgacgacgatgatgggcgccggcgggctg

SEQ ID NO: 28041 - DNA, 252 bp, Zea mays
atatattttccctccttatgctccttgctctttctacatgtgttgctaacgcgacaattttccctcaatgctcacaagctcctatagcttcccttcttcccccataccttccatcaattatagcttcagtatgtgaaaacccagctcttcaaccatataggcttcaacaagcaatcgcagcaagcaacatacctttatcgcccttgttgtttcaacaatcaccaggcctatctttggtgcagtcattggtac

SEQ ID NO: 28042 - DNA, 252 bp, Zea mays
cctacagcaacaactattaccattcagccagctagctactgcctactctcagcaacaacaacttcttccatttaaccaattggccgcactgaaccccgctgcttatttgcagcagcaaatactactaccatttagccagctagctgcagcaaaccgtgcttccttcttgacacagcaacagttgctgcctttctaccagcagtttgcggctaaccccgcaaccctcttacaactacaacgattgttgccctt

SEQ ID NO: 28043 - DNA, 253 bp, Zea mays
tgagcattcagaaacacaccaagcgaacgtcactagcaacgacctaacaacaatggctaccaagatattagccctccttgcgcttcttgccctttttgtgagcgcaacaaatgcgttcattattccacaatgctcacttgctcctagtgccattattccacagttcctcccaccagttacttcaatgggcttcgaacactagctgtgcaagccaacatgcaacaacaagcgcttgcggcgagcgtcttacaac

SEQ ID NO: 28044 - DNA, 254 bp, Zea mays
atttggtccatttggtggcacaaaacatcagggcacaacaactacaacaacttgtgctagcaaaccttgctgcatactctcagcaacatcagtttcttccattcaaccaactggctgcattgaactctgctgcttatttgcaacaacaattaccattcagccagctagttgctgcctacccccagcaatttcttccattcaaccaactagcagcattgaactctgctgcttatttacagcagcaacaactacta

SEQ ID NO: 28045 - DNA, 252 bp, Zea mays
gaccaacaagcaacatagaaagtggaatccagtagcaacaatagagcaacaatggcgaccaagatattttccctccttatgctccttgctctttctacatgtgttgctaacgcgacaattttccctcaatgctcacaagctcctatagcttcccttcttcccccataccttccatcaattatagcttcaatatgtgaaaacccagctcttcaaccatataggcttcaacaagcaatcgcagcaagcaacata

SEQ ID NO: 28046 - DNA, 262 bp, Zea mays
ggaatccagtagcaacaatagagcaacaatggagaccaagatattttccctccttatgctccttgctctttctacatgtgttgctaacgcgacaattttccctcaatgctcacaagctcctatagcttccctttttcccccataccttccatcaattatagcttcagtatgtgaaaacccagctcttcaaccatataggcttcaacaagcaatcgcagcaagcaacatacctttatcgcccttgttgtgtcaacaatcgcca

SEQ ID NO: 28047 - DNA, 158 bp, Zea mays
agcaattagctcatcgactccagattggagaactcgacaccatgaaggtgctgatcggtgcccttgctctcctggcgctcgctgcgagcgccgcctccagtacaagcggcggctgtggctgccagacaccaccgtttcatctaccgcctccgttctat

SEQ ID NO: 28048 - DNA, 257 bp, Zea mays
agatgctgcaacaaattgtaccagctctgactcagctagctgtggcaaaccctgctgcctacttacaacagttgcttccattcaaccaactggctgtgtcaaactctgctgcgtacctacaacagcgacaacagttacttaatccattggcagtggctaacccattggtcgctaccttcctgcagcagcaacaacaattgctgccatacaaccagttctctttgatgaaccctgccttgcagcaacccatcgttgga

SEQ ID NO: 28049 - DNA, 223 bp, Zea mays
aggtcttcagaccattagctttatctactccagagcgcagaagaacccgatcgacaccatgagggtgttgctcgttgccctcgctctcctggctctcgctgcgagcgccacctccacgcatacaagcggcggctgcggctgccagccaccgccgccggttcatctaccgccgccggtgcatctgccacctccggttcacctgccacctcctgtgcatctccca

SEQ ID NO: 28050 - DNA, 255 bp, Zea mays
gacgtcagcctagcaattagctcatcgactccagattggagaactcgacaccatgaaggtgctgatcgttgcccttgctctcctggcgctcgctgcgagcgccgcctccagtacaagcggcggctgtggctgccagacaccaccgtttcatctaccgcctccgttctatatgccgcctccgttctatctgccgccgcagcagcagccgcagccatggcaataccccactcaatcaccgcagctaagcccgtgcca

SEQ ID NO: 28051 - DNA, 251 bp, Zea mays
acaatttcttccattcaaccaactggcagcattgaactctcctgcttatttacagcagcaacaactactaccattcagccagctagctggtgtgagccctgctaccttcttgacacaaccacagttgttgccgttctaccagcacgctgcgcctaacgctggcaccctcttacaactgcaacaattgctgccattcaaccaacttgctttgacaaacctagcagtgttctaccaacaacccatcattggtg

SEQ ID NO: 28052 - DNA, 250 bp, Zea mays
tattttcagcattcaaaaacacaccaagcgaacgcactagcaacgacctaacaccaatggctaccaagatattagccctccttgcgcttcttgcccttttagtgagcgcaacaaatgcgttcattattccacagtgctcacttgctcctagtgccagtattccacagttcctcccaccagttacttcaatgggcttcgaacatccagccgtgcaagcctacaggctacaactagcgcttgcggcgagcgc

SEQ ID NO: 28053 - DNA, 247 bp, Zea mays
atgaagagattgtgaaggaagtctcatcctacctcaagaaagttgggtacaaccctgataagattgcctttgttcccatttctggttttgagggcgacaacatgattgagaggtccaccaaccttgactggtacaaaggcccaaccctgcttgaggctcttgaccagatcaccgagcccaagaggccttcggacaagcccctgcgtctgcccctccaggatgtgtacaagattggtggtattggaac

SEQ ID NO: 28054 - DNA, 252 bp, Zea mays
cgacctaacaacaatggctaccaagatattatccctctttgcgcttcttgccctttttgtgagcgcaacaaatgcgttcattattccacaatgctcacttgctcctagtgccattattccacagttcctccctccagttacttcaatgggcttcgaacacccagctgtgcaagcctacaggctacaacaagcgcttgcggcgagcgtcttacaacaaccaattgcccaattacaacaacaatcctttgcaca

SEQ ID NO: 28055 - DNA, 254 bp, Zea mays
gcggcagtgcgtagagaggatcgtcgaacagaacagcatgaagatggtcatcgttctcgtcgtgtgcctggctctgtcagctgccagcgcctctgcaaagcagatgccctgcccccgcgcggggctgcaaggcttgtacagcgctggcgccggcctgacgacgatgatgggcgccggcgggctgtacccctacgcggagtacctgaggcagccgcagtgcagcccgctggcggcggcgccctactacgccgggt

SEQ ID NO: 28056 - DNA, 187 bp, Zea mays
agtctatctcaagaggggtgacattatcaagaccatcccggacttttggctcacagcgtttatgagccatcctctattaagtgagcttctgactgaagaggaccagaagatattcaagtacttagactccattgatgtggatgattctgatgttaaggcaggatactccattcatcttaacttctct

SEQ ID NO: 28057 - DNA, 87 bp, Zea mays
ccaatccagatcagcaaagcggcagtgcgtagagaggatcgtcgaacagaacagcatgaagatggtcatcgttctcgtcgtgtgcct

SEQ ID NO: 28058 - DNA, 252 bp, Zea mays
acttcaatgggcttcgaacacctagctgtgcaagcctacaggctacaacaagcgcttgcagcgagcgtcttacaacaaccaattaaccaattgcaacaacaatccttggcacatctaaccatacaaaccatcgcaacacaacagcaacaacagttcctaccagcactgagccaactagatgtggtgaaccctgtcgcctacttgcaacagcaggtgcttgcatccaacccacttgctctggcaaacgtagct

SEQ ID NO: 28059 - DNA, 249 bp, Zea mays
gaaagaccttgtggctcagcagaacatgtatgcgcactgcttcctctcgctttgcccgccccgccaatgcctggcatgggtggccctccacctccgatgggcggaatgggcatgcctccgatgggtatgccgccgatgccagcatttgggatgccaccgatgggaagctactgatttggttttgcagcataagtggaacttcattggagttgtagatggttgacagtttggaatcaatattcttcattg

SEQ ID NO: 28060 - DNA, 248 bp, Zea mays
cgcaaattgcaccaagaaatccatcgagaggccgtcgacaggggaattaatggcgtcgtcgtctagcagcagccaccgccgcctcatcctcgcagccgccgtcctgctctccgtgctcgcggctgccagcgccacgccgggacctcctgcgtgccggggtgggccatcccgcacaacccgctcccgagctgccgctggtacgtgaccagccggacctgcggcatcgggccgcgcctcccgtggccgga

SEQ ID NO: 28061 - DNA, 243 bp, Zea mays
aacgcaaattgcaccaagaaatccatcgagaggccgtcgacaggggaattaatggcgtcgtcgtctagcagcagccaccgccgcctcatcctcgcagccgccgtcctgctctccgtgctcgctgctgccagcgccacgccgggacctcctgcgtgccggggtgggccatcccgcacaacccgctcccgagctgccgctggtacgtgaccagccggacctgcggcatcgggccgcgcctcccgt

SEQ ID NO: 28062 - DNA, 241 bp, Zea mays
aatcatccagatcaggctatgggtggagcagtgagtattcggatgaagaagaagagaaggaagaggaacacagaccagaggagcatgaggaagaggaagatgaatacgataggagggtgaaggaggtccatgcaagcggagaactccgtatggacgctcttcacatatgaaagctagtggaagagaaagttgcatgtagataactgggttgttgcggatctgaaggatccagtgggatgta

SEQ ID NO: 28063 - DNA, 245 bp, Zea mays
gcgctcagtcaactagccatggtgaaccctatcgcctacctacaacagcaacaacttctttcatctagcccgctcgctatgggcaatgcacctacatacctgcaacaacagttgttgcaacaacagttgctgcaacaaattgtaccagctcttactcagctagctgtggcaaaccctgctgcctacttgcaacaactacttccattcaaccaactgactgtgtcgaactctgctgcgtacctaca

SEQ ID NO: 28064 - DNA, 248 bp, Zea mays
caagccatcacaacgcaacagcaacaacagttcctaccagcactgagccacctagccatggtgaaccctgccgcctacttgcaagagcagctgcttgcatccaacccacttgctctggcgaacgtagttgcaaaccagcaacaacaacagctacaacagtttctgccaacgctcagtcaactagccatggtgaaccctgccgcctacgtacaacaacaacaactgctttcatctagcccgctcgctgt

SEQ ID NO: 28065 - DNA, 171 bp, Zea mays
ccaagcccgtgccagctgcagggaacctgcggcgttggcagcaccccgatcctgggccagtgcgtcgagttcctgaggcatcagtgcagcccgacggcgacgccctactgctcgcctcagtgccagtcgttgcggcacagtgttgccagcagctcaggcaggtggagccgc

SEQ ID NO: 28066 - DNA, 91 bp, Zea mays
acatatctactatactatactctaggaagcaaggacaccaccgccatggcagccaagatgcttgcattgttcgctctcctagctctttgtg

SEQ ID NO: 28067 - DNA, 242 bp, Zea mays
agggcaatctgtatacgatgattggtttatgctgcttttcaatgttgttcttacctcgcttcctgttatatcactcggagtttttgagcaagatgtttcgtccgaaatctgcttacagttcccagcattataccagcaagggccaaagaaccttttctttgattggtaccggatccttggatggatggggaacggcctcttctcctctctagctatattcttcctcaatctctgcatattct

SEQ ID NO: 28068 - DNA, 238 bp, Zea mays
cacgagctgaacaacatctagtacgatgggccacttctcaactctatgatattgatgccataacgaagatggttgatccttccattcgaggacaatgttctgataaggcattatcccgttttgctgacattattagccgctgcattcagcatgaaccagaattcaggccaccaatgtctgaagttgtccaagacttaactcgcatggtaagtaatgtatcaagggcttccatgtaggc

SEQ ID NO: 28069 - DNA, 238 bp, Zea mays
gcaaagcggcagtgcgtagagaggatcgtcgaacagaacagcatgaagatggtcatcgttctcgtcgtgtgcctggctctgtcagctgccagcgcctctgcaatgcagatgccctgcccctgcgcggggctgcagggcttgtacggcgctggcgccggcctgacgacgatgatgggcgccggcgggctgtacccctacgcggagtacctgaggcagccgcagtgcagcccgctggcgg

SEQ ID NO: 28070 - DNA, 243 bp, Zea mays
caggcctatgtattcaaaccctcctcttcatggtgcctctatcgttgctaccatactcagggacagcgagatgttcaacgaatggactctggaactgaaggccatggctgataggatcattaacatgaggcaacaactatttaatgcgctgaaatccagaggaacccctggtgattggagccatatcattaagcaaattgggatgtttactttcactgggctgaatagcgaacaagtcgcatt

SEQ ID NO: 28071 - DNA, 262 bp, Zea mays
caactagcaacatagaaagcacaatagtgtaccaacaatggcagccaaaatattttgcctccttatgctccttggtatttctgcaagtgctgctacggcgaccattttcccgcaatgctcacaagctcctatagcttcccttcttcccccgtacctctcaccagcggtgtcttcggtatgtgaaaacccaattcttcaaccctacaggatccaacaggcaatcgcagctggcatcttacctttatcacccttgttcctccaa

SEQ ID NO: 28072 - DNA, 259 bp, Zea mays
tcgtcttgtgttgttcggagcgggcagcagcacacagccccatcccaatcctagtcgatcttcttcccctcctcaaggaagaaaagaagctgaaccatggggaagagaaagtcagctgctaagccacctcctaagaagcggatggacaagcttgacactgtcttttcctgcccattctgcaaccacgggagtagtgttgagtgccgaattgacatgaagaatctgattggcgaacatcttgtagaatctgtcaggaaaa

SEQ ID NO: 28073 - DNA, 258 bp, Zea mays
acaacaaccaattgcccaattgcaacaacaatccttgccacatctaacaatacaagccatcacaacgcaacagcaacaacagttcctaccagcactgagccacctagccatggtgaaccctgccgcctacttgcaagagcagctgcttgcatccaacccacttgctctggcgaacgtagttgcaaaccagcaacaacaacagctacaacagtttctgccaacgctcagtcaactagccatggtgaaccctgccgccta

SEQ ID NO: 28074 - DNA, 256 bp, Zea mays
gacaagaattgttccccaaatctagtgacctataacacattgatggatggattttatgagattggttctattgatacagcagcatctctttgggctgccattttagataatggtttgaaaccagatattgttacttacaatacaagaattaagggcctgtgctcttgtaataggacacctgaaggagtcctgttattgaatgaggtgcttgcaacaggtattatgccatctgtcattacctggagcatattagtaa

SEQ ID NO: 28075 - DNA, 254 bp, Zea mays
atagaaagcacaatagtgtaccaacaatggcagccaaaatattttgcctccttatgctccttggtctttctgcaagtgctgctacggcgaccattttcccacaatgctcacaagctcctatagcttcccttcttcccccgtacctctcaccagcggtgtcttcggtatgtgaaaacccaattcttcaaccctataggatccaacaggcaatcgcagctggcatcttacctttatcacccttgttcctccaacaa

SEQ ID NO: 28076 - DNA, 253 bp, Zea mays; identical to SEQ ID NO: 26770

SEQ ID NO: 28077 - DNA, 249 bp, Zea mays
cgcaccacatcatggccggcgccgacgtgctcgccgtcaccagccgcttcgagccctgcggcctcatccagctgcaggggatgcgatacggaacgccctgcgcctgcgcgtccaccggtggactcgtcgacaccatcatcgaaggcaagaccgggttccacatgggccgcctcagcgtcgactgtaacgtcgtggagccggcggacgtcaagaaggtggccaccacattgcagcgcgccatcaaggtgg

SEQ ID NO: 28078 - DNA, 250 bp, Zea mays
actctcagcaacaacaacttcttccatttaaccaattggccgcactgaaccccgctgcttatttgcagcagcaaatactactgccatttagcgagctagctgcagcaagtcgtgcttccttcttgacacagcaacagttgctgcctttctacaagcagtttgcggctaaccccgcaaccctcttacaactacaacaattgttgccctttgtccaacttgctttgacaaacccagcagcctcctaccaaca

SEQ ID NO: 28079 - DNA, 249 bp, Zea mays
cagcaaagcggcagtgcgtagagaggatcgtcgaacagaacagcatgaagatggtcatcgttctcgtcgtgtgcctggctctgtcagctgccagcgcctctgcaatgcagatgccctgcccctgcgcggggctgcagggcttgtacggcgctggcgccggcctgacgacgatgatgggcgccggcgggctgtacccctacgcggagtacctgaggcagccgcagtgcagcccgctggcggcggcgccct

SEQ ID NO: 28080 - DNA, 247 bp, Zea mays
cctatggacaagtatgtgtagctgcttgcttgtgctagtgtaatgtagtgtagtggtggccagtggcacaacctaataagcgcatgaactaattgcttgcgtgtgtagttaagtaccgatcggtaattttatattgcgagtaaataaatggacctgtagtggtggagtaaataatccctgctgttcggtgttcttatcgctcctcgtatagatattatatagagtacatttttctctctctgaaaaa

SEQ ID NO: 28081 - DNA, 250 bp, Zea mays
ctgcaacaacaattgttgcaacagattgtaccagctctgactagtctagttgtggcaaaccctgctgcctacttgcaacagctgcttccattcaaccaactgactatgtcgaactctgctgcgtacctacaacagcgacaacagttacttaatccactagcagtggctaacccattggtcgctgccttcctacagcagcaacaattgctgccatacaaccagttctctttgataaaccctgtcttgtcgg

SEQ ID NO: 28082 - DNA, 247 bp, Zea mays
cgttgcccttgctctcctggcgctcgctgcgaggccgcctccagtacaagcggcggctgtggctgccagacaccaccgtttcatctaccgcctccgttctatatgccactccgttctatctgccgccgcagcagcagccgcatttatggcagtactgcgctcaaccaccgcagctaagcccgtgccagcagttcggatcctgcggcgtcggcagcgtcggcagcccgttcctgggccagtgcgtcga

SEQ ID NO: 28083 - DNA, 250 bp, Zea mays
atttttgtttattatgctgagcttagaggcgagaaagctgccataaagaaaatggatacaaaggcatctcaagaattcctcaatgaattgaagattttgacacgcgtccatcacacaaatctggtgcgcttaattggttattgtgttgagagttgcttatttcttgtttatgaatttattgagaacggaaacctaagccagcatctgcatgggacgggttatgaacctctctcatggacgagtagagtgc

SEQ ID NO: 28084 - DNA, 253 bp, Zea mays
caacaactacaacaacttgtgctagcaaaccttgctgcctactctcagcaacagcagtttcttccattcaaccaactagctgcattgaactctgcttcttatttgcaacaacaacaactaccattcagccagctacctgctgcctacccccagcaatttcttccattcaaccaactggcagcattgaactctcctgcttatttacagcagcaacaactactaccattcagccagctagctggtgtgagccctg

SEQ ID NO: 28085 - DNA, 250 bp, Zea mays
aaaaacccagctcttcagccctataggctccaacaagcaatcgcagcaagcaacatacctttatcacccttgttgtttcaacaatcgccagccctatctttggtgcagtcattggtacaaaccatcagggcacagcagctgcagcaactcgtgctacctgtgatcaaccaagtagctctggcaaacctttctccctactctcagcaacaacaatttcttccattcaaccaactgtctacactgaaccctg

SEQ ID NO: 28086 - DNA, 247 bp, Zea mays
cagaaacacaccaagcgaacacattagcaacaacctaacaacaatggctaccaagatattatccctccttgcgcttcttgcgctttttgcgagcgcaacaaatgcgttcattattccacaatgctcacttgctccaagttccattattacacagttcctcccaccagttacttcaatgggcttcgaacacccagctgtgcaagcctataggctacaacaagcaattgcggcgagcgtcttacaacaa

SEQ ID NO: 28087 - DNA, 248 bp, Zea mays
attccactccgacattcacgtgcagctgtcgggagcaggcaatggcgccggatctaagcgaactcgccgccgccgctccagcccgtggcgcctacctcgccggcgtcggtgtcgcggtcctcctcgctgcctccttcctcccagtagccgagtcgtcctgcgtgcgagataactcattggtgagagacataagccaaatgccgcaaagcagctatgggattgaaggattgtcacatataacagttgct

SEQ ID NO: 28088 - DNA, 247 bp, Zea mays
  unsure (1)..(247): unsure at all n locations
agcgaagcnactagcaacgacctaacaccaatggctaccaagatattagccctccttgcgcttcttgcccttttagtgagcgcaacaaatgcgttcattattccacagtgctcacttgctcctagtgccagtattccacagttcctcccaccagttacttcaatgggcttcgaacatccagccgtgcaagcctacaggctacaactagcgcttgcggcgagcgccttacaacaaccaattgcccaat

SEQ ID NO: 28089 - DNA, 244 bp, Zea mays
gcaacgacctaacaacaatggcttccaagacattatccctccttgcgcttcttgccctttttgtgagtgcaacaaatgcgttcattattccacaatgctcacttgctccgagtgccattattccacagttcctccctccagttacttcaatgggcttcgaacacccagctgtgcaagcctataggctacaacaagcgcttgctgcgagcgtcttagaacaaccaattgcccaattacaacaaca

SEQ ID NO: 28090 - DNA, 245 bp, Zea mays
cagctagctactgcctactctcagcaacaacaacttcttccatttaaccaattggccgcactgaaccccgctgcttatttgcagcagcaaatactactaccatttagccagctagctgcagcaaaccgtgcttccttcttgacacagcaacagttgctgcctttctaccagcagtttgcggctaaccccgcaaccctcttacaactacaacaattgttgccctttgtccaacttgctttgacaga

SEQ ID NO: 28091 - DNA, 243 bp, Zea mays
gatcttacagtcgggcagttcgtgtatgttgttaggaagagaatcaagctcagtgctgagaaggctatcttcatatttgtgaaaaacacccttccaccaacagctgctctgatgtcttcaatctatgaagagaacaaggacgaggatgggttcctctacatgacttacagtggtgagaacaccttcggactgctctagatggctcaccgcaatcgggtcgggtagccttgcccatgcctcctg

SEQ ID NO: 28092 - DNA, 243 bp, Zea mays
cggctcgagggttttgaaggggcctggactacgaaccctttggtctttgacaactcttacttcaaggaacttctgagtggcgacaaggagggccttcttcagctcccaagtgacaaagccctgctgagcgaccctgtcttccgccctcttgtggagaaatatgctgcagatgagaaggcattctttgatgactacaaagaggcccacctcaagctctccgaactggggtatgctgatgcttaa

SEQ ID NO: 28093 - DNA, 247 bp, Zea mays
cgaacacccagctgtgcaagcctacaggctacaacaagcgcttgcggcgagcgtcttacaacaaccaattgcccaattacaacaacaatccttggcacatctaaccatacaaaccatcgcaacgcaacagcaacaacaatttctaccagcactgagccaactagctgtggtgaaccctgtcgcctacttgcaacagcagttgcttgcatccaacccacttgctctggcaaacatagttgcataccaa

SEQ ID NO: 28094 - DNA, 203 bp, Zea mays
ctttctctaagaaggattggtatgacatcaaggcaccgtcggtgatcagtgtgcgcaacatcgggaagactctcgtatccaggacacagggtaccaggattgcttctgagggtctgaagcacagagtctttgaggtttgcctagctgatcttcagggcgacgaggatcaagcttacaggaaaatcaggctccgtgctgaagat

SEQ ID NO: 28095 - DNA, 245 bp, Zea mays
atttattggcacaaaacatcagggcacaacaactacaacaacttgtgctagcaaaccttgctgcctactctcagcaacagcagtttcttccattcaaccaactagctgcattgaactctgcttcttatttgcaacaacaacaactaccattcagccagctatctgctgcctacccccagcaatttcttccattcaaccaactgacagcattgaactctcctgcttatttacagcagcaacaacta

SEQ ID NO: 28096 - DNA, 243 bp, Zea mays
gcaacatagaaagcacaatagtgtaccaacaatggcagccaaaatattttgcctccttatgctccttggtatttctgcaagtgctgctacggcgaccattttcccgcaatgctcacaagctcctatagcttcccttcttcccccgtacctctcaccagcggtgtcttcggtatgtgaaaacccaattcttcaaccctacaggatccaacaggcaatcgcagctggcatcttacctttatcacc

SEQ ID NO: 28097 - DNA, 241 bp, Zea mays
ccctgctgcttatttgcagcaacaactattaccattcagccagctagctactgcctactctcagcaacaacaacttcttccatttaaccaattggccgcactgaaccccgctgcttatttgcagcagcaaatactactaccatttagccagctagctgcagcaaaccgtgcttccttcttgacacagcaacagttgctgcctttctaccagcagtttgcggctaaccccgcaaccctctta

SEQ ID NO: 28098 - DNA, 242 bp, Zea mays
cacagtgctcacttgctcctagtgccagtattccacagttcctcccaccagttacttcaatgggcttcgaacatccagccgtgcaagcctacaggctacaactagcgcttgcggcgagcgccttacaacaaccaattgcccaattgcaacaacaatccttggcacatctaaccctacaaaccattgcaacgcaacaacaacaacaacagtttctgccatcactgagccacctagccgtggtg

SEQ ID NO: 28099 - DNA, 239 bp, Zea mays
ccaccagttacttcaatggccttcgaacacccagctgtgcaagcctataggctacaacaagcgattgcggcgagcgtcttacaacaaccaattgcccaattgcaacaacaatccttggcacatctaacaatacaaaccatcgcaacgcaacagcaacaacagttcctaccagcactgagccacctagccatggtgaaccctgtcgcctacttgcaacagcagctgcttgcatccaaccc

SEQ ID NO: 28100 - DNA, 238 bp, Zea mays
ccatcagggcacaacaactacaacaacttgtgctagcaaaccttgctgcctactctcagcaacagcagtttcttccattcaaccaactagctgcattgaactctgcttcttatttgcaacaacaacaactaccattcagccagctacctgctgcctacccccagcaatttcttccattcaaccaactggcagcattgaactctcctgcttatttacagcagcaacaactactaccatt

SEQ ID NO: 28101 - DNA, 237 bp, Zea mays
atgcaacatagaaagtggaatccagtagcaacaatagagcaacaatggcgaccaagatattttccctccttatgctccttgctctttctgcatgtgttgctaacgcgacaattttccctcaatgctcacaagctcctatagcttcccttcttcccccataccttccatcaatgatagcttcagtatgtgaaaacccagctcttcaaccctataggctccaacaagcaatcgcagcaa

SEQ ID NO: 28102 - DNA, 236 bp, Zea mays
cagcaaagcggcagtgcgtagagaggatcgtcgaacagaacagcatgaagatggtcatcgttctcgtcgtgtgcctggctctgtcagctgccagcgcctctgcaatgcagatgccctgcccctgcgcggggctgcagggcttgtacggcgctggcgccggcctgacgacgatgatgggcgccggcgggctgtacccctacgcggagtacctgaggcagccgcagtgcagcccgctg

SEQ ID NO: 28103 - DNA, 240 bp, Zea mays
atcaagctcatgatagtgttcttggaatcattctgggaggtggtgctgggactagattgtaccccttgacaaagaagcgtgccaagcctgcagtgccattgggtgccaactatagactgattgatattcctgtcagcaattgtctcaacagcaacatatccgagatctatgtgctaacgcaatttaactctgcgtccctcaaccgtcacctctcaagagcctacgggagcaacattggag

SEQ ID NO: 28104 - DNA, 272 bp, Zea mays
aagccatggtgaaccctatcgcctacctacaacagcaacaacttctttcatctagcccgctcgctatgggcaatgcacctacatacctgcaacaacagttgttgcaacaacagttgctgcaacaaattgtaccagctcttactcagctagctgtggcaaaccctgctgcctacttgcaacaactacttccattcaaccaactgactgtgtcgaactctgctgcgtacctacaacagctacaacagttacttaatccactagcggtggctaac

SEQ ID NO: 28105 - DNA, 269 bp, Zea mays
gtgaaatatgggtttttgagagttcagatgagatttcaacggatcttgctgagtatatctcacaagtttcagaaatttctgtcaaagaaaggggatactttgccatcgccttatctggaggtcccctagtcagttttttggggaaactttgtgaagctccatacaacaagacactggattggtccaaatggtacatcttctggtctgatgaacgtgctgtggcaaaaaaccatgcagagagtaactataggttaacaaaagaaggattc

SEQ ID NO: 28106 - DNA, 264 bp, Zea mays
gcgagcagatgcaggtgggcgctgtgggcgggaggcaggtgtaccagaacgtcctccacgctatctactgcatcctcaagatggagggcgccggcggcctgtaccgaggtctcggccctagctgcatcaagctcatgcccgccgccggcatcgccttcatgtgctacgaggcgtgcaagaagatcctcgtcgacaaggaggaggatgaggaggaggaggacgaagccggcggcggagaggatgacaagaaaaaggttgaatgat

SEQ ID NO: 28107 - DNA, 262 bp, Zea mays
tgcaatgcagatgccctgcccctgcgcggggctgcagggcttgtacggcgctggcgcggcctgacgacgatgatgggcgccggcgggctgtacccctacgcggagtacctgaggcagccgcagtgcagcccgctggcggcggcgccctactacgccgggtgtgggcagccgagcgccatgttccagccgctccggcaacagtgctgccagcagcagatgaggatgatggacgtgcagtccgtcgcgcagagctgcagatgat

SEQ ID NO: 28108 - DNA, 263 bp, Zea mays
gatcgtcgaacagaacagcatgaagatggtcatcgttctcgtcgtgtgcctggctctgtcagctgccagcgcctctgcaatgcagatgccctgcccctgcgcggggctgcagggcttgtacggcgctggcgccggcctgacgacgatgatgggcgccggcgggctgtacccctacgcggagtacctgatgcagccgcagtgcagcccgctggcggcggcgccctactacgccgggtgtgggcagacgagcgccatgtaccagc

SEQ ID NO: 28109 - DNA, 254 bp, Zea mays
attgagaccaacaagcaacatagaaagtggaatccagtagcaacaatagagcaacaatggcgaccaagatattttccctccttatgctccttgctctttctgcatgtgttgctaacgcgacaattttccctcaatgctcacaagctcctatagcttcccttcttcccccataccttccatcaatgatagcttcagtatgtgggaagaagggaagctataggagcttgtgagcattaaggaaaaaagatgattgg

SEQ ID NO: 28110 - DNA, 262 bp, Zea mays
atagggtggaagggctgctagtttcaacatcattcccagcagcactggagctgctaaggctgttggcaaagtgcttcctgtcctcaatggaaaattgactggaatgtctttccgtgtcccaactgtcgatgtttctgttgttgatctgactgttaggcttgagaagtctgccacctatgatgagatcaaggctgcggtcaaggccgaggcagagggtagcctcaagggcattctgggttatgtcgaggaggaccttgtttcc

SEQ ID NO: 28111 - DNA, 265 bp, Zea mays
agcgaccattttcccgcaatgctcgcaagctcctatagcttcccttcttcccccgtacctctcaccagcggtgtcttcggtatgtgaaaacccaattcttcaaccctacaggatccaacaggcaatcacagctggcatcttacctttatcacccttgttcctccaacaatcatcagccctattacatcagttacctttggtgcatttattggcacaaaacatcagggcacaacaactacaacaacttgtgctagcaaaccttgct

SEQ ID NO: 28112 - DNA, 265 bp, Zea mays
ggaagtttgtgacacaaggagcatacgacacacggaacatcttccagtcactagatcttgcatggacattgcttcggatcttccctcgcgaacttctccaccgtatcccggcgaagaccttggaccagtactatagcagagatgcctcccactgaatcactgatcgttgatcagtgttccaatagtttggcaagtgttgaataaattgaacagattggcttcatggccttttccctgtatttatgtgtagtcaggtccaattctt

SEQ ID NO: 28113 - DNA, 269 bp, Zea mays
agatacccctctgttacttgcagaaactggagactgactgcaccttggagtggatcgaaaatcacagtgcctgcgaaattcatactcagcaagaacgacgtcggcctgcagtccttcggaaccgagaagtacgtcaagagtggcgctctgaaggagaacgttccagaccttgagatttcgatcatcgaggggcaccatttcgtccagcaggaagaggccgggacagtgaattcggaaatactctccttccttgacaagtttcccagcga

SEQ ID NO: 28114 - DNA, 266 bp, Zea mays
aggcaaacctttctccctactctcagcaacaacaatttcttccattcaaccaactgtctacactgaaccctgctgcttatttgcagcaacaactattaccattcagccagctagctactgcctactctcagcaacaacaacttcttccatttaaccaattggccgcactgaaccccgctgcttatttgcagcagcaaatactactaccatttagccagctagctgcagcaaaccgtgcttccttcttgacacagcaacagttgctg

SEQ ID NO: 28115 - DNA, 257 bp, Zea mays
ggcgcaccacatcatggccggcgccgacgtgctcgccgtcaccagccgcttcgagccctgcggcctcatccagctgcaggggatgcgatacggaacgccctgcgcctgcgcgtccaccggtggactcgtcgacaccatcatcgaaggcaagaccgggttccacatgggccgcctcagcgtcgaatgtaacgtcgtggagccggcggacgtcaagaaggtggccaccacattgcagcgcgccatcaaggtggtcggca

SEQ ID NO: 28116 - DNA, 156 bp, Zea mays
actagttctagatcgcgagcagcctcctaccaacaacacatcattggtggtgccctcttttagattgcttattagttgtaattcaataataaagttttttggatgatgtatgtggccaaccagaaataagaagttacatttccagattttaatgtg

SEQ ID NO: 28117 - DNA, 259 bp, Zea mays
gactagttccattattccacagttcctcccaccagttacttcaatggccttcgaacacccagctgtgcaagcctataggctacaacaagcgattgcggcgagcgtcttacaacaaccaattgcccaattgcaacaacaatccttggcacatctaacaatacaaaccatcgcaacgcaacagcaacaacagttcctaccagcactgagccacctagccatggtgaaccctgtcgcctacttgcaacagcagctgcttgca

SEQ ID NO: 28118 - DNA, 262 bp, Zea mays
cactgaacctcgctgcttatttgcagcagcaaatattactaccatttagccagctagctgcagcaagccgtgcttccttcttgacacagcaacagttgctgcctttctaccagcagtttgcggctaaccccgcaaccctcttacaactacaacaattgttgccctttgtccaacttgctttgacaaacccagcagcctcctaccaacaacacatcattggtggtgccctcttttagattgcttattagttgtaattcaataa

SEQ ID NO: 28119 - DNA, 262 bp, Zea mays
agcaacatagaaagcacaatagtgtaccaacaatggcagccaaaatattttgcctccttatgctccttggtctttctgcaagtgctgctacggcgaccattttcccgcaatgctcgcaagctcctatagcttcccttcttcccccgtacctctcaccagcggtgtcttcggtatgtgaaaacccaattcttcaaccctacaggatccaacaggcaatcgcagctggcatcttacctttatcacccttgttcctccaacaatc

SEQ ID NO: 28120 - DNA, 268 bp, Zea mays
gagaccaacaagcaacatagaaagtggaatccagtagcaacaacagagcaacaatggcgaccaagatattttccctccttatgctccttgctctttctgcatgtgttgctaacgcgacaattttccctcaatgctcacaagctcctatagcttcccttcttcccccataccttccatcaatgatagcttcagtatgtgaaaacccagctcttcagccctataggctccaacaagcaatcgcagcaagcaacatacctttatcaccctt

SEQ ID NO: 28121 - DNA, 272 bp, Zea mays
cctatctttggtgcagtcattggtacaaaccatcaaggcacagcagctgcagcaactcgtgctacctgtgatcaaccaagtagctctggcaaacctttctccctactctcagcaacaacaatttcttccattcaaccaactgtctacattgaaccgtgctgcttatttgcagcaacaactattaccattcagccagctagctactgcctactctcagcaacaacaacttcttccatttaaccaattggccgcactgaaccccgctgcttatt

SEQ ID NO: 28122 - DNA, 258 bp, Zea mays
  unsure (1)..(258): unsure at all n locations
cagaaacacaccaagcgaacgcnactagcaacaacctaacaacaatggctaccaagatattatccctccttgcgcttcttgcgctttttgcgagcgcaacaaatgcgtccattattccacaatgctcacttgctcctagttccattattccacagttcctcccaccagttacttcaatggccttcgaacacccagctgtgcaagcctataggctacaacaagcgattgctgcgagcgtcttacaacaaccaattgccc

SEQ ID NO: 28123 - DNA, 255 bp, Zea mays
cgaggatgggtccgtgttcagccctgaggtgctcgacctttctgaggaggacctgattgagaagtttgccactggtgtctccatggttgcctccctgtcactggcgatctcgtacccgacccttgctgctgtgccccacatgttcatcaatgggtacaagaatgtgcttgctgttgctgtcgagacagactactcatacccacatgctgacaagatcaaggagtacctcaaggacccaagcaagtttgctgttgc

SEQ ID NO: 28124 - DNA, 251 bp, Zea mays
ctatctttggtgcagtcattggtacaaaccatcagggcacagcagctgcagcaactcgtgctacctgtgatcaaccaagtagctctggcaaacctttctccctactctcagcaacaacaatttcttccattcaaccaactgtctacactgaaccctgctgcttatttgcagcaacaactattaccattcagccagctagctactgcctactctcagcaacaacaacttcttccatttaaccaattggccgc

SEQ ID NO: 28125 - DNA, 251 bp, Zea mays; identical to SEQ ID NO: 25347

SEQ ID NO: 28126 - DNA, 254 bp, Zea mays
ctacaagcaacatagaaagtggaatacagtagcaacaatagagcaacaatggcggccaagatattttccatccttatgctccttgctctttctgcatgtgttgctaacgcgaccatttttcctcaatactcacaagctcctatagctgcccttcttcccccataccttccatcaatgaccgcttcagtttgtgaaaacccagcccttcaaccctacaggctccaacaagcaatcgcaacaagcaacttaccttt

SEQ ID NO: 28127 - DNA, 252 bp, Zea mays
attccagcttgaaggcattccaccagccccaagaggcatgccccagatcgaggttacctttgacattgatgccaatggcattgtaaaggtgtcagctagggacaaagccacaggcaaagaacaagaaatcaccatcaagtcttctggtggtttgtcagaggtcgaaattgagaagatggtgaaggaggcagagctacattctcagaaggaccaggaaaggaagtctcttattgatctcaagaactctgcaga

SEQ ID NO: 28128 - DNA, 159 bp, Zea mays
ctttgtccaacttgctttgacaaacccagcagcctcctaccaacaacacatcattggtggtgccctcttttagattgcttattagttgtaattcaataataaagttttttggatgatgtatgtggccaaccagaaataagaagttacatttccagattc

SEQ ID NO: 28129 - DNA, 253 bp, Zea mays
ctttggtgcagtcattggtacaaaccatcagggcacagcagctgcagcaactcgtgctacctgtgatcaaccaagtagctctggcaaacctttctccctactctcagcaacaacaatttcttccattcaaccaactgtctacactgaaccctgctgcttatttgcagcaacaactattaccattcagccagctagctactgcctactctcagcaacaacaacttcttccatttaaccaattggccgcactgaa

SEQ ID NO: 28130 - DNA, 250 bp, Zea mays
gaagaacccgatcgacaccatgagggtgttgctcgttgccctcgctctcctggctctcgctgcgagcgccacctccacgcatacaagcagcggctgcggctgccagccaccgccgccggttcatctaccgccgccggtgcatctgccacctccggttcacctgccacctccggtgcatctcccaccgccggtccacctgccgccgccggtccacctgccaccgccggtccatgtgccgccgccggatcat

SEQ ID NO: 28131 - DNA, 253 bp, Zea mays
atagaaagcacaatagtgtaccaacaatggcagccaaaatattttgcttccttatgctccttggtctttctgcaagttttgctaccgcaaccattttcccacaatgctcacaagctcctatagcttcccttcttcccccatacctctcaccagcggtgtcttcaatgtgtgaaaccccaattgttcaaccctacaggatccaacaggcaatcgcaacaggcatcttaccattatcacccttgttcctccaaca

SEQ ID NO: 28132 - DNA, 262 bp, Zea mays
ccgatattatccctctttgcgcttcttgccctttttgtgagcgcaacaaatgcgttcattattccacaatgctcacttgctcctagtgccattattccacagttcctccctccagttacttcaatgggcttcgaacacccagctgtgcaagcctacaggctacaacaagcgcttgcggcgagcgtcttacaacaaccaattgcccaattacaacaacaatccttggcacatctaaccatacaaaccatcgcaacgcaacagc

SEQ ID NO: 28133 - DNA, 202 bp, Zea mays
cgccccggcctcagcctcatccccagccacacccatgcccgtaacaacagccgcatccaagcccgtgccagctgcagggaacctgcggcgttggcagcaccccgatcctgggccagtgcgtcgagtttctgaggcatcagtgcagcccgacggcgacgccctactgctcgcctcagtgccagtcgttgcggcagcagtgttg

SEQ ID NO: 28134 - DNA, 255 bp, Zea mays
aaccggggctgaagaaggaggaggtcaaggtggaggtcgaggacggcaacgtccttcagatcagcggcgagcgcaacaaggagcaggaggagaagacggacacctggcaccgcgtggagcggagcagcgggagattcctgcgcaggttccgactgcccgagaacgccaagacggagcagatcagggccgccatggagaacggcgtgcttacagtcactgtgcccaaggaggacgccaagaagcctgaagtgaagt

SEQ ID NO: 28135 - DNA, 250 bp, Zea mays
agcaaagcggcagtgcgtagagaggatcgtcgaacagaacagcatgaagatggtcatcgttctcgtcgtgtgcctggctctgtcagctgccagcgcctctgcaatgcagatgccctgcccctgcgcggggctgcagggcttgtacggcgctggcgccggcctgacgacgatgatgggcgccggcgggctgtacccctacgcggagtagctgaggcagccgcagtgcagcccgctggcggcggcggcctac

SEQ ID NO: 28136 - DNA, 108 bp, Zea mays
aacgtagctgcataccagcaacaacaacagctgcaacagtttatgccagtgctcagtcaactagccatggtgaaccctgccgtctacctacaactactttcctctagc

SEQ ID NO: 28137 - DNA, 256 bp, Zea mays
cgtggagccgcagcaccggtaccaggcgatcttcggcttggtcctccagtccatcctgcagcagcagccgcaaagcggccaggtcgcggggctgttggcggcgcagatagcgcacaactgacggcgatgtgcggcctgcagcagccgactccatgcccctacgctgctgccggcggtgtcccccactgaagaaactatgtgctgtagtatagccgctggctagctagctagttgagtcatttagcggcgatgattg

SEQ ID NO: 28138 - DNA, 243 bp, Zea mays
caaggtctcttaaaagtgctagcagggatcgacacaaacttcacggtcacatcaaaggcaaccgatgatgatggtgattttgctgagctgtatgtgttcaagtggacaactcttctgatcccccccaccactgtgcttgtgattaacctggttggtatagtggctggagtgtcgtatgctatcaacagtggctaccaatcatggggtccactattcgggaagctgttctttgcaatctgggtg

SEQ ID NO: 28139 - DNA, 257 bp, Zea mays
ggacgtcagcctagcaattagctcatcgactccagattggagaactcgacaccatgaaggtgctgatcgttgcccttgctctcctggcgctcgctgcgagcgccgcctccagtacaagcggcggctgtggctgccagacaccaccgtttcatctaccgcctccgttctatatgccgcctccgttctatctgccgccgcagcagcagccgcagccatggcaataccccactcaaccaaatcagctaagcccgtgccag

SEQ ID NO: 28140 - DNA, 258 bp, Zea mays
caagctcctatagcttcccttcttcccccataccttccatcaatgatagcttcagtatgtgaaaacccagctcttcaaccctataggctccaacaagcaatcgcagcaagcaacatacctttatcacccttgtttcaacaatcgccagccctatctttggtgcagtcattggtacaaaccatcaaggcacagcagctgcagcaactcgtgctacctgtgatcaaccaagtagctctggcaaacctttctccctactat

SEQ ID NO: 28141 - DNA, 256 bp, Zea mays
actagcaacatcttagcaccaatggcagccaagatttttgcgctccttgccctccttgctctttcagcaagtgttgctaccgcgactattattccacaatgctcacaacaatacctctctccagtgatagccgcgagatttgaatacccatctatacaatcctacaggctacaagaggccatcacagcaagcatcttacggtcgttagcattgaccgtccaacaaccatatgccctattgcaacaaccatccttag

SEQ ID NO: 28142 - DNA, 256 bp, Zea mays
ctagctgcattgaactctgcttcttatttgcaacaacaacaactaccattcagccagctacctgctgcctacccccagcaatttcttccattcaaccaactggcagcattgaactctcctgcttatttacagcagcaacaactactaccattcagccagctagctggtgtgagccctgctaccttcttgatacaaccacagttgttgccgttctaccagcacgctgcgcctaacgctggcaccctcttacaactgc

SEQ ID NO: 28143 - DNA, 256 bp, Zea mays
gcaacaacaacttcttccatttaaccaattggccgcactgaaccccgctgcttatttgcagcagcaaatactactaccatttagccagctagctgcagcaaaccgtgcttccttcttgacacagcaacagttgctgcctttctaccagcagtttgcggctaaccccgcaaccctcttacaactacaacaattgttgccctttgtccaacttgctttgacagaccgagcggcctcctaccaacaacacatcattggt

SEQ ID NO: 28144 - DNA, 253 bp, Zea mays
gcaacatagaaagtggaatccagtagcaacaatagagcaacaatggagaccaagatattttccctccttatgctccttgctctttctacatgtgttgctaacgcgacaattttccctcaatgctcacaagctcctatagcttccctttttcccccataccttccatcaattatagcttcagtatgtgaaaacccagctcttcaaccatataggcttcaacaagcaatcgcagcaagcaacatacctttatcgc

SEQ ID NO: 28145 - DNA, 257 bp, Zea mays
cgtcgagttcctgaggcaccagtgcagcccggcggcgacgccctacggctcgccacagtgccaggcgctgcagcagcagtgctgccaccagatcaggcaggtggagccgctgcaccggtaccaggcgacatacggtgtggtcctgcagtccttcctgcagcagcagccgcagggcgagctcgcggcgctgatggcggcccaggtagcgcacagctgacggcgatgtgcggcctgcagctgcagcagccaggtccctg

SEQ ID NO: 28146 - DNA, 255 bp, Zea mays
ggaagagtcgctcagagataacttcgtcgttgtgtatgagttgctcgatgagatgatggattttgggtacccacaatacacggaggcgaagatattgagtgagttcatcaagacagatgcatacaggatggaggtcacacagcgtccacccatggccgtgacaaatgctgtgtcatggaggagcgaggggatccggtacaagaagaatgaagtcttcttggatgtagtggagagtgttaacattctagttaacag

SEQ ID NO: 28147 - DNA, 256 bp, Zea mays
catgaaggtcttgaatgtcttggccaagtatattgtggatgaggtcaaagacaaaagtggtcaacagatggatgtgctcttatggaagcaggaaggtgtcaaaaaccttcctttgcaggagaatggatgggactgcggcatgtttatgctcaaatacattgacttctacagcagagatatggacctcattttcggacagaagcaaatgcattacttccgcacgaggacagcgaaggaaatactgagtttgagagct

SEQ ID NO: 28148 - DNA, 249 bp, Zea mays
cagaccattagctttatctactccagagcgcagaagaacccgatcgacaccatgagggtgttgctcgttgccctcgctctcctggctctcgctgcgagcgccacctccacgcatacaagcagcggctgcggctgccagccaccgccgccggttcatctaccgccgccggtgcatctgccacctccggttcacctgccacctccggtgcatctcccaccgccggtacacctgccgccgccggtccacctg

SEQ ID NO: 28149 - DNA, 253 bp, Zea mays
ctcgagaggaagtggtgcgtgctgaagccttctgtgaacctcaacgacccgaagctggccgacaacgtgggatacgcgtgctccatggcggactgcaccagccttggctacaagacgtcgtgcgggatgctggacatccgcggcaacgtctcgtacgcgttcaacaactacttccagaagaacgaccaggacgacgtggcctgcgggttccagggcctcgcgacgaccacgggccaggaccccagcaccggga

SEQ ID NO: 28150 - DNA, 256 bp, Zea mays
gcagcaacaactactaccattcagccagctagctggtgtgagccctgctaccttcttgacacaaccacagttgttgccgttctaccagcacgctgcgcctaacgctggcaccctcttacaactgcaacaattgctgccattcaaccaacttgctttgacaaacccagcagcattctaccaacaacccatcattggtggtgccctcttttagatttcttatgagttatagttcaataataaagttttttgtctgatg

SEQ ID NO: 28151 - DNA, 244 bp, Zea mays
ctgggccagtgcgtcgagttcctgaggcaccagtgcagcccggcggcgacgccctacggctcgccacagtgccaggcgctgcagcagcagtgctgccaccagatcaggcaggtggagccgctgcaccggtaccaggcgacatacggtgtggtcctgcagtccttcctgcagcagcagccgcaaggcgagctcgcggcgctgatggcggcccaggtagcgcagaagctgacggccatgtgcggtc

SEQ ID NO: 28152 - DNA, 251 bp, Zea mays
cccaatgcaacatcttgagcaacaatatgaattcatgacatctgatcaccagtatatttcccggatacatgaggaggataaggtgactgtgttcgacaagggagatttggtatatgtgttcaacttccactgcaacaacagctactttgactaccgtattggttgtcgaaagcctgaggtgtataaggtggtcttggactccgacgctggactatttggtggatttagcaggatccatcacgcagccgagc

SEQ ID NO: 28153 - DNA, 247 bp, Zea mays
cagcctagcaattagctcatcgactccagattggagaactcgacaccatgaaggtgctgatcgttgcccttgctctcctggcgctcgctgcgagcgccgcctccagtacaagcggcggctgtggctgccagacaccaccgtttcatctaccgcctccgttctatatgccgcctccgttctatctgccgccgcagcagcagccgcagccatggcaataccccactcaacatccgcagctaagcccgtg

SEQ ID NO: 28154 - DNA, 251 bp, Zea mays
cgagtgccattattccacagttcctccctccagttacttcaatgggcttcgaacacccagctgtgcaagcctataggctacaacaagcgcttgcggcgagcgtcttagaacaaccaattgcccaattacaacaacaatccttggcacatctaaccatacaaaccatcgcaacgcagcagcaacaagcactgagccacctagccgtggtgaaccctatcgcctacttgcaacaacagctgcttgcatccaac

SEQ ID NO: 28155 - DNA, 250 bp, Zea mays
acgctacctagcaacgacttaacaacaatggctaccaagatattagccctccttgcgcttcttgccctttttgtgagcgcaacaaatgcgttcattattccacaatgctcacttgctcctagtgccattataccacagttcctccgaccagttacttcaatgggcttcgaacacctagctgtgcaagcctacaagctacaacaagcgcttgcggcgagcgtcttacaacaaccaattaaccaattgcaac

SEQ ID NO: 28156 - DNA, 250 bp, Zea mays
agcaattagctcatcgactccagattggagaactcgacaccatgaaggtgctgatcgttgcccttgctctcctggcgctcgctgcgagcgccgcctccagtacaagcagcggctgtggctgccagacaccaccgtttcatctaccgcctccgttctatatgccgcctccgttctatctgccgccgcagcagcagccgcagccatggcaataccccacactaccaccgcagctaagcccgtgccagcagtt

SEQ ID NO: 28157 - DNA, 249 bp, Zea mays
acactggtaagcatggccacgccaaatgccactttgtcgccatagacatattcaatgggaaaaagcttgaagatattgttccttcatcacacaactgtgacattccgcatgtgaaccgtactgagtatcagctgattgatatttctgaggatggatttgtgagccttcttacttcagatggcaacactaaggatgatcttagactcccaactgatgagactcttgtggcccagattaaggaagggttcg

SEQ ID NO: 28158 - DNA, 248 bp, Zea mays
attgagcattcagaaacacacctagcgaagcgcactagcaacgacctaacaacaatggcttccaagacattatccctccttgcgcttcttgccctttttgtgagtgcaacaaatgcgttcattattccacaatgctcacttgctccgagtgccattattccacagttcctccctccagttacttcaatgggcttcgaacacccagctgtgcaagcctataggctacaacaagcgcttgcggcgagcgt

SEQ ID NO: 28159 - DNA, 170 bp, Zea mays
ctctatgcctaacgctggcaccctcttacaactgcaacaattgctgccattcaaccaacttgctttgacaaactcaacagtgttctaccaacaacccatcattggtggtgccctcttttagattgcttatgagttatagttcaataatgaagttttttggatgatgtttg

SEQ ID NO: 28160 - DNA, 248 bp, Zea mays
gcggcagtgcgtagagaggatcgtcgaacagaacagcatgaagatggtcatcgttctcgtcgtgtgcctggctctgtcagctgccagcgcctctgcaatgcagatgccctgcccctgcgcggggctgcagggcttgtacggcgctggcgccggcctgacgacgatgatgggcgccggcgggctgtacccctacgcggagtacctgagagcaccgcagtgcagcccgctggcggcggcgccctactacg

SEQ ID NO: 28161 - DNA, 252 bp, Zea mays
attttcagcattcaaaaacacaccaagcgaacgcactagcaacgacctaacaccaatggctaccaagatattagccctccttgcgcttcttgcccttttagtgagcgcaacaaatgcgttcattattccacagtgctcacttgctcctagtgccattattccacagttcctcccaccagttacttcaatgggcttcgaacatccagccgtgcaagcctacaggctacaactagcgcttgcggcgagcgcctt

SEQ ID NO: 28162 - DNA, 248 bp, Zea mays
agaacctcaaactaaggagaagaaaccgtacacaccctttccaccgcctcaacagcctagcaagattgatcttgaacttgagaacggtgagtatttcatgagtgacaaaaagaaatcagcaaagaaatggcaagagaagctggacaagcaatctgggagagctgaagaaaataaaagaaaaagagaggctgcatttgttcctccaaaggagaacactgcaggtccatccaaatctgacaagaatgcca

SEQ ID NO: 28163 - DNA, 251 bp, Zea mays
tagcaattatagcttcagtatgtgaaaacccagctcttcaaccatataggcttcaacaagcaatcgcagcaagcaacatacctttatcgcccttgttgtttcaacaatcaccagccctatctttggtgcagtcattggtacaaaccatcagggcacaacagctgcagcaactcgtgctacctgtgatcaaccaagtagctctggcaaacctttctccctactctcagcaacaacaatttcttccattcaac

SEQ ID NO: 28164 - DNA, 246 bp, Zea mays
ggccatcgttgaatatgtttttagtggccatcggttcaaactaacaattcccaaggagacttgtagtatcgccttctcattatctggtgtccgttgtcctggtaaaggcgagccatactcagacgaagctattgctttgatgaggagaaggatacttcaacgagatgtggagatagaggttgaagcagttgataggacaggaacgttcataggttctttgtgggagtccaagaccaacatgggctc

SEQ ID NO: 28165 - DNA, 246 bp, Zea mays
cagttacctttggtgcatttattggcacaaaacatcagggcacaacaactacaacaacttgtgctagcaaaccttgctgcctactctcagcaacagcagtttcttccattcaaccaactaggttcattgaactctgcttcttatttgcaacaacaacaactaccattcagccagctacctgctgcctacccccagcaatttcttccattcaaccaactagcagcattgaactctcctgcttattta

SEQ ID NO: 28166 - DNA, 245 bp, Zea mays
atcaagaccatcccggacttttggctcacagcgtttttgagccatcctctactaagtgagcttctgactgaagaggatcagaagatattcaagtacttggactccattgatgtcgatgattctgatgttaaggcaggatattccatttaccttaacttctctgagaacccgtactttgaagacacaaagcttacaaagacctattcctttgttgatgatggaacaaccacaataaaagcttctca

SEQ ID NO: 28167 - DNA, 247 bp, Zea mays
tctcaccagcggtgtcttcaatgtgtgaaaacccaattgttcaaccctacaggatccaacaggcaatcgcaacaggcatcttaccattatcacccttgttcctccaacaaccgtcagccctattacagcagttacctttggtccatttggtggcacaaaacatcagggcacaacaactacaacaacttgtgctagcaaaccttgctgcatactctcagcaacatcagtttcttccattcaaccaact

SEQ ID NO: 28168 - DNA, 246 bp, Zea mays
accgcagctaagcccgtgccagcagttcggatcctgcggcgtcggcagcgtcggcagcccgttcctgggccagtgcgtcgagttcctgaggcaccagtgcagcccggcggcgacgccctacggctcgccacagtgccaggcgctgcagcagcagtgctgccaccagatcaggcaggtggagccgctgcaccggtaccaggcgacatacggtgtggtcctgcagtccttcctgcagcagcagccgca

SEQ ID NO: 28169 - DNA, 246 bp, Zea mays
agttgaccaaagccaactggaccgtgctaaagcctcagctaaatcagcgatactggcgaatttggaatcacaggcatcactaacagaggacatggggcgccaagttttggcatttggtgaaaggaaacctgctgagcaccttctcaaggctatagatggtgttactatgaaagatataacgtctgttgctgaaaagatcatttcatccccattgacaatggcatctcatggaaacgttctgaatat

SEQ ID NO: 28170 - DNA, 261 bp, Zea mays
aactattaccattcagccagctagctactgcctactctcagcaacaacaacttcttccatttaaccaattggccgcactgaaccccgctgcttatttgcagcagcaaatactactaccatttagccagctagctgcagcaaaccgtgcttccttcttgacacagcaacagttgctgcctttctaccagcagtttgcggcctaccccgcaaccctccttacactaccaccattgttgccctttgtccacttgctttgacgac

SEQ ID NO: 28171 - DNA, 239 bp, Zea mays
acaccttccccaccgactatgttccgacagtgtttgataacttcagtgccaacgttgtggttgatggtaatactgtcaacctcggcctctgggacactgcaggtcaagaggattacaacagactgagaccactgagctatcgtggagctgatgtttttcttctggctttctcactgatcagtaaggccagctatgagaatgtttcgaagaagtggatacctgaactgaagcattatgca

SEQ ID NO: 28172 - DNA, 237 bp, Zea mays
cagaaacacaccaagcgaacacattagcaacaacctaacaacaatggctaccaagatattatccctccttgcgcttcttgcgctttttgcgagcgcaacaaatgcgttcattattccacaatgctcacttgctccaagttccattattacacagttcctcccaccagttacttcaatgggcttcgaacacccagctgtgcaagcctataggctacaacaagcaattgcggcgagcgt

SEQ ID NO: 28173 - DNA, 251 bp, Zea mays
catctgtatctccaaagaatcgcggcacaacaactacaacaacagttgctaccaacaatcaatcaagtagttgcagcgaaccttgctgcttacctccagcaacaacagtttcttccattcaatcaactagctggggtgaaccctgctatctacttgcaggcacaacagctactaccatttaaccaacttgtcgggagcccttatgccttcttactgcaacaacagcttctgccattccatctgcaagctgt

SEQ ID NO: 28174 - DNA, 128 bp, Zea mays
atcaacaacatcaacaacaattccagggtcatgacaagcagcaacaaccacaacagcctcagcaatatcagcagggccaggaaaaatcacaacagcaacaatgtcattgccaggagcagcaacagact

SEQ ID NO: 28175 - DNA, 261 bp, Zea mays
gttctagatcgcgagcaagagatcaagcggttctttgaagattataagaagaatgagaataaagaggttgctgtcgatgcattcttgcctgcgaccacagctcgagaggccattcagtactccatggatctgtatgcgcagtatattttgcaaagcttgaggcagtagattggaagcaactatttatctgggcggcttggaatgagtgtgatcctaataagccaaaacacttgatattgtgtgcaaatcttggggttgaga

SEQ ID NO: 28176 - DNA, 128 bp, Zea mays
agaaagtggaatccagtagcaacaacagagcaacaatggcgaccaagatattttccctccttatgctccttgctctttctgcatgtgttgctaacgcgacaattttccctcaatgctcacaagctcct

SEQ ID NO: 28177 - DNA, 127 bp, Zea mays
cttgctcctagtgccattattccacagttcctcccaccagttacttcaatgggcttcgaacatccagccgtgcaagcctacaggctacaactagcgcttgcagcgagcgccttacaacaaccaattg

SEQ ID NO: 28178 - DNA, 127 bp, Zea mays
atttgcagcaacaactattaccattcagccagctagctactgcctactctcagcaacaacaacttcttccatttaaccaattggccgcactgaaccccgctgcttatttgcagcagcaaatactact

SEQ ID NO: 28179 - DNA, 125 bp, Zea mays
gtggaacttcagattggtctgaagaattatgatccacagaaggacaagcgtttcagtggctctgttaagttgccccatatccctcgtcacaagatgaaggtgtgcatgcttggtgatgcccagca

SEQ ID NO: 28180 - DNA, 242 bp, Zea mays
gagtacatgaacttggtcctcgaagacgctgaggaaatcaacgtcaagaaaaacactaggaaatcactgggccggatactcctcaaaggtgacaatataactttgatgatgaacagtggcaagtgaagattcttatggcaggaacgatgtttggtgctcgcttcgattatctgtgacacaatgtactccatccatccgtccagacttaaatgatgtatcatgtcattgtggtttagtgagag

SEQ ID NO: 28181 - DNA, 226 bp, Zea mays
gtcaactagccatggtgaaccctgccgtctacctacaactactttcatctagcccgctcgcggtgggcaatgcacctacgtacctacaacaacagttgctgcaacaaattgtaccagctctgactcagctagctgtggcaaaccctgctgcctacttacaacagttgcttccattcaaccaactggctgtgtcaaactctgctgcgtacctacaacagcgacaaca

SEQ ID NO: 28182 - DNA, 138 bp, Zea mays
caacactaacaacttgtgggtgaaccttaaagctgtcaagagactagtagagctgagcacttaagatggaattatcaacccagaagtgatgggaatctcacttgactgatggacattcgtcttcaacgtgatagtccg

SEQ ID NO: 28183 - DNA, 258 bp, Zea mays
attgagaccaacaagcaacatagaaagtggaatccagtagcaacaatagagcaacaatggcgaccaagatattttccctccttatgctccttgctctttctgcatgtgttgctaacgcgacaattttccctcaatgctcacaagctcctatagcttcccttcttcccccataccttccatcaatgatagcttcagtatgtgaaaacccagctcttcaaccctataggctccaacaagcaatcgcagcaagcaacatac

SEQ ID NO: 28184 - DNA, 255 bp, Zea mays
ctcagctagctgtggcaaaccctgctgcctacttgcaacagctgcttccattcaaccaactgactgtgtcgaactctgctgcgtacctacaacagcgacaacagttacttaatccactagcagtgcctaacccattggtcactgccttcctacagcagcaacaattgctaccatacagccagttctctttgatgaaccctgccttgtcgtggcagcaacccatcgttggaggtgccatcttttagattacatatg

SEQ ID NO: 28185 - DNA, 240 bp, Zea mays
cagaccattagctttatctactccagagcgcagaagaacccgatcgacaccatgagggtgttgctcgttgccctcgctctcctggctctcgctgcgagcgccacctccacgcatacaagcagcggctgcggctgccagccaccgccgccggttcatctaccgccgccggtgcatctgccacctccggttcacctgccacctccggtgcatctcccaacgccggtccaactgcccgcggcg

SEQ ID NO: 28186 - DNA, 121 bp, Zea mays
ctccagtacaagcagcggctgtggctgccagacaccaccgtttcatctaccgcctccgttctatatgccgcctccgttctatctgccgccgcagcagcagccgcagccatggcaatacccc

SEQ ID NO: 28187 - DNA, 247 bp, Zea mays
agacaggacgtgcaaacccggccatgcttgaccggattgaggttgagtactacggaactccagtaaacttgaagagcattgcacagataagcactccagatgcaacttctcttcttattcaaccatatgataagtcaagcctcaagcttattgagaaaactatagttgctgcaaatcttggtgtgacaccaagcaatgatggagaagtaatacgagtgactgtcccaccattgacatctgatcgcag

SEQ ID NO: 28188 - DNA, 118 bp, Zea mays
cagaaacacaccaagcgaacacattagcaacaacctaacaacaatggctaccaagatattatccctccttgcgcttcttgcgctttttgcgagcgcaacaaatgcgttcattattcca

SEQ ID NO: 28189 - DNA, 247 bp, Zea mays
gtgaagtacactagcaacatcttagcaccaatggcagccaagatttttgcgctccttgccctccttgctctttcagcaagtgttgctaccgcgactattattccacaatgctcacaacaatacctctctccagtgatagccgcgagatttgaatacccatctatacaatcctacaggctacaagaggccatcacagcaagcatcttacggtcgttagcattgaccgtccaacaaccatatgccctat

SEQ ID NO: 28190 - DNA, 245 bp, Zea mays
tcgttctcgtcgtgtgcctggctctgtcagctgccagcgcctctgcaatgcagatgccctgcccctgcgcggggctgcagggcttgtacggcgctggcgccggcctgacgacgatgatgggcgccggcgggctgtacccctacgcggagtacctgaagcagccgcagtgcagcccgctggcggcagcgccctactacgccgggtgtgggcagacgagcgccatgtaccagccgctccggcaacag

SEQ ID NO: 28191 - DNA, 241 bp, Zea mays
agctgactgaggcggacattcgcctgttcgtgactctcattcggttcgatgaggtctacgccgttcacttcaagtgcaacaagaagctgctgagggagtacccaaacctgttcaactacaccaaggacatataccagatccccggcatcagcagcaccgtcaacatggaacacatcaggaagcactactacggaagccatccgtccataaacccatacgggattaatcccgctggaccaac

SEQ ID NO: 28192 - DNA, 248 bp, Zea mays
ccgtaagaacgaagagcatgtgaaccttatcaaggaatatcgtggcaagatcgaggctgaactgagcaatatctgtgatggaatcttgaagctgcttgactcccacctagtgccttcttctactgctgctgaatcaaaggtcttctacctcaagatgaagggtgactatcacaggtatcttgcggaatttaagactggtgctgagaggaaggaatctgctgagagcacaatggtggcctataaggctg

SEQ ID NO: 28193 - DNA, 248 bp, Zea mays
gttgcaacaacaatccttggcacatctaacaatacaaaccatcgcaacgcaacagcaacaacaattcctaccagcactgagccacctagccatggtgaaccctgccgcctacttgcaacagcagttgcttgcatcaaacccacttgctctggcaaacgtagttgcaaaccagccacaacaacagctgcaacagtttctgccagcgctcagtcaactagccatggtgaaccctgccgcctacctacaac

SEQ ID NO: 28194 - DNA, 113 bp, Zea mays
ggctaaccccgcaaccctcttacaactacaacaattgttgccctcttttagattgcttattagttgtaattcaataataaagttttttggatgatgtatgtggccaaccagaa

SEQ ID NO: 28195 - DNA, 215 bp, Zea mays
tgcagcagccgactccatgcccctacgctgctgccggcggtgtcccccactgaagaaactatgtgctgtagtatagccgctggctagctagctagttgagtcatttagcggcgatgattgagtaataatgtgtcacgcatcaccatgggtggcagtgtcagtgtgagcaatgacctgaatgaacaattgaaatgaaaagaaaaaagtattgttcc

SEQ ID NO: 28196 - DNA, 244 bp, Zea mays
agcaattagctcatcgactccagattggagaactcgacaccatgaaggtgctgatcgttgcccttgctctcctggcgctcgctgcgagcgccgcctccagtacaagcagcggctgtggctgccagacaccaccgtttcatctaccgcctccgttctatatgccgcctccgttctatctgccgccgcagcagcagccgcagccatggcaataccccactcaacgactgcagctaagcccgtgcca

SEQ ID NO: 28197 - DNA, 233 bp, Zea mays
caacaatggcagctaaaatattttgcctccttatgctccttggtctttctgcaagtgctgctacggcgaccattttcccacaatgctcacaagctcctatagcttcccttcttcccccgtacctctcaccaacggtgtcttcggtatgtgaaaacccaattcttcaaccctacaggatccaacaggcaatcgcagctggcatcttacctttatcacccttgttcctccaacaa

SEQ ID NO: 28198 - DNA, 111 bp, Zea mays
caactagcaacatagaaagcacaatagtgtaccaacaatggcagccaaaatattttgcttccttatgctccttggtctttctgcaagtgctgctaccgcaaccattttccc

SEQ ID NO: 28199 - DNA, 237 bp, Zea mays
tgagaccaacaagcaacatagaaagtggaatccagtagcaacaacagagcaacaatggcgaccaagatattttccctccttatgctccttgctctttctgcatgtgttgctaacgcgacaattttccctcaatgctcacaagctcctatagcttcccttcttcccccataccttccatcaatgatagcttcagtatgtgaaaaccagctcttcagcctataggctccacaagcaatc

SEQ ID NO: 28200 - DNA, 251 bp, Zea mays
ccaactagcaacatacatagtgaagtacactagcaacatcttagcaccaatgggagccaagatttttgccctccttgccctccttgctctttcagcaagcgctgctacctcgacttttattccacaatgctcacaacaatacctctctccggagacagccgcgggatttcaatacccaactatacaatcctacatggtacaagaggccatcaagcaagcatcttacggtcattagcattaaccctccacaa

SEQ ID NO: 28201 - DNA, 252 bp, Zea mays
ggcagacgagcgccatgtaccagccgctccggcaacagtgctgccagcagcagatgaggatgatggacgtgcagtccgtcgcgcacagctgcagatgatgatgcagcttgagcgtgccgctgccgccagcagcagcctgtacgagccagctctgatgcagcagcagcagcagctgctggcagcccagggtctcaaccccatggccatgatgatggcgcagaacatgccggccatgggtggactctaccagta

SEQ ID NO: 28202 - DNA, 245 bp, Zea mays
  unsure (1)..(245): unsure at all n locations
ttagctcatcgactccagattggagaactcgacaccatgaaggtgctgatcgttgcccttgctctcctggcgctcgctgcgagcgccgcctccagtacaagcagcggctgtggctgccagacaccaccgtttcatctaccgcctccgttctatatgccgcctccgttctatctgccgccgcagcagcagccgcagccatggaactacnccactcaaccaccgcagctaagcccgtgccagcagtt

SEQ ID NO: 28203 - DNA, 255 bp, Zea mays
atcagccctattacatcagttacctttggtgcatttattggcacaaaacatcagggcacaacaactacaacaacttgtgctagcaaaccttgctgcctactctcagcaacagcagtttcttccattcaaccaactagctgcattgaactctgcttcttatttgcaacaacaacaactaccattcagccagctacctgctgcctacccccagcaatttcttccattcaaccaactggcagcattgaactctcctgc

SEQ ID NO: 28204 - DNA, 250 bp, Zea mays
gcaattagctcatcgactccagattggagaactcgacaccatgaaggtgctgatcgttgcccttgctctcctggcgctcgctgcgagcgccgcctccagtacaagcagcggctgtggctgccagacaccaccgtttcatctaccgcctccgttctatatgccgcctccgttctatctgccgccgcagcagcagccgcagccatggcaataccccactcaaccaccgcagctaagcccgtgccagcagttc

SEQ ID NO: 28205 - DNA, 142 bp, Zea mays
gtcagcctagcaattagctcatcgactccagattggagaactcgacaccatgaaggtgctgatcgttgcccttgctctcctggcgctcgctgcgagcgccgcctccagtacaagcagcggctgtggctgccagacaccaccg

SEQ ID NO: 28206 - DNA, 239 bp, Zea mays
atatagcgcacaactgacggcgatgtgcagcctgcagcagccgactccatgcccctacgctgctgccggcggtgtcccccactgaagaaactatgtgctgtagtatagccgctggctagctagctagttgagtcatttagcggcgatgattgagtaataatgtgtcacgcatcaccatgggtggcagtgtcagtgtgagcaatgacctgaatgaacaattgaaatgaaaagaaaaagta

SEQ ID NO: 28207 - DNA, 256 bp, Zea mays
gttctatatgccgcctccgttctatctgccgccgcagcagcagccgcagccatggcaataccccactcaaccaccgcagctaagcccgtgccagcagttcggatcctgcggcgtcggcagcgtcggcagcccgttcctgggccagtgcgtcgagttcctgaggcaccagtgcagcccggcggcgacgccctacggctcgccacagtgccaggcgctgcagcagcagtgctgccaccagatcaggcaggtggagcgc

SEQ ID NO: 28208 - DNA, 242 bp, Zea mays
gaaggagcatagagcaggtgaaggaggacgtgaagagggacttcattccggctctggtgttaggcggaaccatctggcctgctgtgcagatcgcgaacttccgcttcgttcccgtgcggtaccagctcctgtatgtgaacttgttctgcctcctggacagctgcttcctgtcgtggattgagcagcagggtgacgcctcctggaagcggtggttcacttcgttccagaaaatcgaagaccag

SEQ ID NO: 28209 - DNA, 247 bp, Zea mays
attttgagcattcagaaacacaccaagcgaactacattagcaacaacctaacaacaatggctaccaagatattatccctccttgcgcttcttgcgctttttgcgagcgcaacaaatgcgttcattattccacaatgctcacttgctccaagttccattattacacagttcctcccaccagttacttcaatgggcttcgaacacccagctgtgcaagcctataggctacaacaagcaattgcggcgag

SEQ ID NO: 28210 - DNA, 247 bp, Zea mays
caattagctcatcgactccagattggagaactcgacaccatgaaggtgctgatcgttgcccttgctctcctggcgctcgctgcgagcgccgcctccagtacaagcagcggctgtggctgccagacaccaccgtttcatctaccgcctccgttctatatgccgcctccgttctatctgccgccgcagcagcagccgcagccatggcaatacactactcaaccaccgcagctaagcccgtgccagcagt

SEQ ID NO: 28211 - DNA, 247 bp, Zea mays
tgagaccaactagcaacatagaaagcacaatagtgtaccaacaatggcagccaaaatattttgcctccttatgctccttggtctttctgcaagtgctgctacggcgaccattttcccgcaatgctcgcaagctcctatagcttcccttcttcccccgtacctctcaccagcggtgtcttcggtatgtgaaaacccaattcttcaaccctacaggatccaacaggcaatcacagctggcatcttacct

SEQ ID NO: 28212 - DNA, 247 bp, Zea mays
attacttaatccattggcagtggctaacccattggtcgctaccttcctgcagcagcaacaacaattgctgccatacaaccagttctctttgatgaaccctgccttgcagcaacccatcgttggaggtgccatcttttagattacatatgagatgtactcgacaatggtgccctcataccgacatgtgtttcctagaaataatcaatatattgattgagatttatctcgaaaaaaaaaaaaataaaaa

SEQ ID NO: 28213 - DNA, 247 bp, Zea mays
atttgccgcaacagaagttgatcctggtgttgcatggtacttgtatccaaggcttgggtacctcccttatgttagcacaactgaggaaacagctatttcttcattgaagaggtcgcttggtgctctgaacacacaccttgcttcaaacacataccttgttgggcatgctgttactctagctgacattgtaatgacatgcaacctctaccatggaattgcacggatcttgtaccaagacttcacgtct

SEQ ID NO: 28214 - DNA, 248 bp, Zea mays
cataccttgcatcaatgggcatttatgtcttcaagaaagatgcacttttagaccttctcaagtcaaaatatattcaattacatgactttggatctgaaatcctcccaagagctgtactagatcatagtgtgcaggcatgcatttttacgggctattgggaggatgttggaacaatcaaatcattctttgatgcaaacttggccctcactgagcagccttccaagtttgatttttatgatccaaaaaca

SEQ ID NO: 28215 - DNA, 245 bp, Zea mays
ctggctaccaagcttccaaggatgacttggctgtctacacttcgttttcgtctgctccctcgtccaagtatatcaacgtagcaaggtggtttaatcacattgatgcgctcgtgaggctgagcggaattactgcagagggccaaggtgtgaaggttgaatcgtcagcagttccttcagccccaactccagatgttgctgaagcacaggccccagttgctgaggaggacgacgacgatgatgttgac

SEQ ID NO: 28216 - DNA, 248 bp, Zea mays
ctagcaattagctcatcgactccagattggagaactcgacaccatgaaggtgctgatcgttgcccttgctctcctggcgctcgctgcgagcgccgcctccagtacaagcagcggctgtggctgccagacaccaccgtttcatctaccgcctccgttctatatgccgcctccgttctatctgccgccgcagcagcagccgcagccatggcaataccccaaacaaccaccgcagctaagcccgtgccagc

SEQ ID NO: 28217 - DNA, 169 bp, Zea mays
gtcagcctagcaattagctcatcgactccagattggagaactcgacaccatgaaggtgctgatcgttgcccttgctctcctggcgctcgctgcgagcgccgcctccagtacaagcagcggctgtggctgccagacaccaccgtttcatctaccgcctccgttctatatg

SEQ ID NO: 28218 - DNA, 238 bp, Zea mays
aacagcgacaacagttacttaatccactagcggtggctaacccattggtcgctgccttcctacagcagcaacaattgctgccatacaaccagttctctttgatgaaccctgccttatcgtggcagcaacccatcgttggtggtgccatcttttagattacatatgagatgtactcgataatggtgccctcatagcggcatgtgtttcctaaaaataatcaatatattgattgagattt

SEQ ID NO: 28219 - DNA, 241 bp, Zea mays
gcaacatagaaagcacaatagtgtaccaacaatggcagccaaaatattttgcctccttatgctccttggtatttctgcaagtgctgctacggcgaccattttcccgcaatgctcacaagctcctatagcttcccttcttcccccgtacctctcaccagcggtcttcggtatgtgaaaacccaattcttcaaccctacaggatccaacaggcaatcgcagctggcatcttacctttatcacc

SEQ ID NO: 28220 - DNA, 235 bp, Zea mays
agctcacttgctcctagtgccattattccacagttcctccctccagttacttcaatgggcttcgaacacccagctgtgcaagcctacaggctacaacaagcgcttgcggcgagcgtcttacaacaaccaattgcccaattacaacaacaatccttggcacatctaaccatacaaaccatcgcaacgcaacagcaacaacaatttctaccagcactgagccaactagctgtggtga

SEQ ID NO: 28221 - DNA, 241 bp, Zea mays
accgcagctaagcccgtgccagcagttcggatcctgcggcgtcggcagcgtcggcagcccgttcctgggccagtgcgtcgagttcctgaggcaccagtgcagcccggcggcgacgccctacggctcgccacagtgccaggcgctgcagcagcagtgctgccaccagatcaggcaggtggagccgctgcaccggtaccaggcgacatacggtgtggtcctgcagtccttcctgcagcagcag

SEQ ID NO: 28222 - DNA, 242 bp, Zea mays
aagcaacatagaaagtggaatccagtagcaacaatagagcaacaatggcgaccaagatattttccctccttatgctccttgctctttctacatgtgttgctaacgcgacaattttccctcaatgctcacaagctcctatagcttcccttcttcccccataccttccatcaattatagcttcaatatgtgaaaacccagctcttcaaccatataggcttcaacaagcaatcgcagcaagcaac

SEQ ID NO: 28223 - DNA, 237 bp, Zea mays
acaacaacaacaactaccattcagccagctacctgctgcctacccccagcaatttcttccattcaaccaactagcagcattgaactctcctgcttatttacagcagcaacaactactaccattcagccagctagctggtgtgagccctgctaccttcttgacacaaccacagttgttgccgttctaccagcacgttgcgcctaacgctggcaccctcttacaactgcaacaattgct

SEQ ID NO: 28224 - DNA, 245 bp, Zea mays
accgcaaccattttcccacaatgctcacaagctcctatagcttcccttcttcccccatacctctcaccagcggtgtcttcaatgtgtgaaaacccaattgttcaaccctacaggatccaacaggcaatcgcaacaggcatcttaccattatcacccttgttcctccaacaaccgtcagccctattacagcagttacctttggtccatttggtggcacaaaacatcagggcacaacaactacaaca

SEQ ID NO: 28225 - DNA, 237 bp, Zea mays
gaccaactagcaacatagaaagcacaatagtgtaccaacaatggcagccaaaatattttgcctccttatgctccttggtctttctgcaagtgctgctacggcgaccattttcccgcaatgctcgcaagctcctatagcttcccttcttcccccgtacctctcaccagcggtgtcttcggtatgtgaaaacccaattcttcaaccctacaggatccaacaggcaatcgcagctggcat

SEQ ID NO: 28226 - DNA, 246 bp, Zea mays
cacaagttctaccacggccgcaccggtcgcgtctggaacgtcaccaagcgcgccatcggcgtcgaggtcaacaagcaggtcaatgggcgcatcatcaggaagcgtatccatgtccgtgtggagcatgtgcagccgtcccgctgcacagaagagttccgcctgaggaaggcgaagaatgaccagctgaaggcggatgccaaaaagcgcggcgaggttatcagcaccaagaggcagccattgggtccc

SEQ ID NO: 28227 - DNA, 244 bp, Zea mays
cggcgacgccctactgctcgcctcagtgccagtcgttgcggcacagtgttgccagcagctcaggcaggtggagccgcagcaccggtaccaggcgatcttcggcttggtcctccagtccatcctgcagcagcagccgcaaagcggccaggtcgcggggctgttggcggcgcagatagcgcacaactgacggcgatgtgcggcctgcagcagccgactccatgcccctacgctgctgccggcggtg

SEQ ID NO: 28228 - DNA, 112 bp, Zea mays
atccagttctctttgataaaccctgtcttgtcgaggcagcaacccatcgttggaggtgccatcttttagattacatatgagatgtactcgataatggtgccctcattccggc

SEQ ID NO: 28229 - DNA, 167 bp, Zea mays
gcccgctccgccccggggtcgatcaggtcgagggcaccgtgaaggccgtcgtcggccccgtctacgaccgtttccacgccgtcccgctcgacctcctcaagttcatcgaccgcaaggttggtgagtccgttgaggagatagaccgccgcgtccctccagtggtgaag

SEQ ID NO: 28230 - DNA, 244 bp, Zea mays
agctcatcgactccagattggagaactcgacaccatgaaggtgctgatcgttgcccttgctctcctggcgctcgctgcgagcgccgcctccagtacaagcagcggctgtggctgccagacaccaccgtttcatctaccgcctccgttctatatgccgcctccgttctatctgccgccgcagcagcagccgcagccatggcaatactccactcaaccaccgcagctaagccgtgccagcagttcg

SEQ ID NO: 28231 - DNA, 244 bp, Zea mays
ctcgagccgattttcagcattcaaaaacacaccaagcgaacgcactagcaacgacctaacaccaatggctaccaagatattagccctccttgcgcttcttgcccttttagtgagcgcaacaaatgcgttcattattccacagtgctcacttgctcctagtgccagtattccacagttcctcccaccagttacttcaatgggcttcgaacatccagccgtgcaagcctacaggctacaactagcg

SEQ ID NO: 28232 - DNA, 268 bp, Zea mays
gaaacacaccaagcgaactacctagcaacgacttaacaacaatggctaccaagatattagccctccttgcgcttcttgccctttttgtgagcgcaacaaatgcgttcattattccacaatgctcacttgctcctagtgccattataccacagttcctccgaccagttacttcaatgggcttcgaacacctagctgtgcaagcctacaagctacaacaagcgcttgcggcgagcgtcttacaacaaccatttacccaattgcaacaaca

SEQ ID NO: 28233 - DNA, 269 bp, Zea mays
gacgcagacggtgcaggtgaagccagggtggaggaaagggaagcaggtggtgctggaaggcatgggggacgagcggccggggtgcctgccgggcgacgccgtcctgacggtgtccgagaggaggcacccggcgttcaagcgggtgggcgacgacctggtgctcagggcggaggtgccgctggcgggcgcgctcaccggctggtccctctcgttccggctcctcggcggccggaaggtgacctgctcgttcgaggacgaggtcatccgcc

SEQ ID NO: 28234 - DNA, 269 bp, Zea mays
ctacaatggcagctaaaatattttgcctccttatgctccttggtctttctgcaagtgctgctacggcgaccattttcccacaatgctcacaagctcctatagcttcccttcttcccccgtacctctcaccaacggtgtcttcggtatgtgaaaacccaattcttcaaccctacaggatccaacaggcaatcgcagctggcatcttacctttatcacccttgttcctccaacaatcatcagccctattacagcagttacctttggtgcat

SEQ ID NO: 28235 - DNA, 269 bp, Zea mays
gatcattgccgtgacccttaaacaaaacagaccgcgaacgagtcacccgtgccgccgggctccggcccggcacgctgcccccccgaacctcccgcggtgaaggggggtgccgcgaaaaagaacccacggcgccccgggcgccaaggaacaccagtactacctcctgccccgcggagctgtcggcccgccttccgctcccagggcagcggttacaccgtaatcgacacgactctcggcaacggatatctcggctctcgcatcgatgaaga

SEQ ID NO: 28236 - DNA, 266 bp, Zea mays
ctgacgaacagcacttgaatcaccagaattcatgatctggactgttttttcttagaccaataacagcaggaaaatgttagcttatcttacttagggctagtttgttaactccatttttccaagacattcttatttttctaagggaaaattaactaattttccttgggaaaatggaattcccttagaaaaacgaggttgccaaactagcccttaaagatttgcctatggattatttcctgcttgctatcggtgcgatcggtatacct

SEQ ID NO: 28237 - DNA, 268 bp, Zea mays
atcacaacagcaacaatgtcattgccaggagcagcaacagactacaaggtgcagctataactactatagcagtagctcaaatctaaaaaattgtcatgaattcctaaggcagcagtgcagccctttggtaatgccttttctccaatcacgtttgatacaaccaagtagctgccaggtattgcagcaacaatgttgtcatgatcttaggcagattgagccacaatacattcaccaagcaatctacaacatggttcaatccataatccag

SEQ ID NO: 28238 - DNA, 267 bp, Zea mays
tggacgtgcagtccgtcgcgcacagctgcagatgatgatgcagcttgagcgtgccgctgccgccagcagcagcctgtacgagccagctctgatgcagcagcagcagcagctgctggcagcccagggtctcaaccccatggccatgatgatggcgcagaacatgccggccatgggtggactctaccagtaccagctgcccagctaccgcaccaacccctgtggcgtctccgctgccattccgccctactactgattcatgatatttgg

SEQ ID NO: 28239 - DNA, 264 bp, Zea mays
gttgcaaaccatggacatggctttggcgtctaaagcctcccctccgccatggaatgccaccgccgccgagcagccaattccaaagcgtgacaaagccgctgcaaatgattcaacatacctcaatcctcaagctcatgatagtgttcttggaatcattctgggaggtggtgctgggactagattgtaccccttgacaaagaagcgtgccaagcctgcagtgccattgggtgccaactatagactgattgatattcctgtcagcaa

SEQ ID NO: 28240 - DNA, 265 bp, Zea mays
attgagcattcagaaacacaccaagcgaactacattagcaacaacctaacaacaatggctaccaagatattatccctccttgcgcttcttgcgctttttgcgagcgcaacaaatgcgttcattattccacaatgctcacttgctccaagttccattattacacagttcctcccaccagttacttcaatgggcttcgaacacccagctgtgcaagcctataggctacaacaagcaattgcggcgagcgtcttacaacaaccaattt

SEQ ID NO: 28241 - DNA, 264 bp, Zea mays
gcaggatgatgacggacaagttatcgaaccccactccatcagtgctgggctggattaccctggcgttggacccgagcacagtttcttgaaggacattggacgtgccgaatacgatagtgtgactgaccaggaggcactggatggtatgtctcgctctctttccattgtctgttattggttgaactatttttctttttgacgaattgatttccaatgaacctacaaaatgctgttagtgttggtatcagctttcaacatcttgac

SEQ ID NO: 28242 - DNA, 267 bp, Zea mays
cgcgcgtcacccgaaagggaatcgggttaagatttcccgagccgggacgtggcggcagacggcgacgttaggaagtccggcaagctctacgagtacgcctccaccagcatagaggatacatataaccgctatcagcaattttctggagaaggaaggaatataaatgacgatcgaaatagaaacgataacaaggatgaagcttcttcagatttgcagttgatgctgagcaagattgcgacctggtctccccagagcaatgctgacgaa

SEQ ID NO: 28243 - DNA, 264 bp, Zea mays
cacccagctgtgcaagcctacaggctacaacaagcgcttgcggcgagcgtcttacaacaaccaattgcccaattacaacaacaatccttggcacatctaaccatacaaaccatcgcaacgcaacagcaacaacaatttctaccagcactgagccaactagctgtggtgaaccctgtcgcctacttgcaacagcagttgcttgcatccaacccacttgctctggcaaacatagttgcataccaacaacaacaacaattgcaacag

SEQ ID NO: 28244 - DNA, 264 bp, Zea mays
tcggagaaggctgcagctcacttgaagggtggtgccaagaaggttgtcatctctgctcctagcaaggatgcccccatgtttgtcgttggtgtcaacgagaaggagtacaagtctgacattaacattgtctccaatgctagctgcacaaccaactgccttgctcctcttgctaaggtcatcaatgacaagttcggtatcgttgagggtctgatgaccactgtccatgccatcactgctacccagaagactgttgatgggccctca

SEQ ID NO: 28245 - DNA, 260 bp, Zea mays
ggcttcgttccatccggcttctcggcggctgcggagatgagggggatggcgcaccggctgctgcgggacgcgcaggcggacgggtgggagcggtcggacttccccatcatctagtagtcatgcctcggcgacaacccctacgtccggatgttaagagctgaatatgacaaagaatgcaaaatttgtgcacgtccttttactgtattccggtggcgtcctgggcgagatgcaaggtacaagaagactgagatctgccagac

SEQ ID NO: 28246 - DNA, 262 bp, Zea mays
aacaactacaacaacttgtgctagcaaaccttgctgcctactctcagcaacagcagtttcttccattcaaccaactagctgcattgaactctgcttcttatttgcaacaacaacaactaccattcagccagctacctgctgcctacccccagcaatttcttccattcaaccaactggcagcattgaactctcctgcttatttacagcagcaacaactactaccattcagccagctagctggtgtgagccctgctaccttctt

SEQ ID NO: 28247 - DNA, 263 bp, Zea mays
ccggagcaggtagaacgctgcacaatccccttcgccgccgccaagatggtgaacgttcctaagaccaagaagacgtactgcaagaacaaagagtgcaagaagcacacactccacaaggtgactcagtataagaagggcaaggatagcctgtctgcccagggaaagcgccgttatgaccgcaagcagtcaggatatggtggtcagaccaagcctgtcttccacaagaaggccaagaccaccaagaagattgttctgaagctgca

SEQ ID NO: 28248 - DNA, 262 bp, Zea mays
caatagtgtaccaacaatggcagccaaaatattttgcttccttatgctccttggtctttctgcaagtgctgctaccgcaaccattttcccacaatgctcacaagctcctatagcttcctttcttcccccatacctctcaccagcggtgtcttcagtatgtgaaaacccaattcttcaaccctacaggatccaacaggcaatcgcagcaggcatcttacctttatcacccttgttcctccaacaaccgtcagccctattacag

SEQ ID NO: 28249 - DNA, 262 bp, Zea mays
cactccttgcgtatatgttgtcaacaagattgatcagataacactcgaggagctggaaatcttggacaaacttccccattactgcccggttagtgctcatcttgaatggaatcttgatggacttctggagaaggtatgggaatacttggatttggttaggatatacacaaaacctaaagggctgaacccagattatgaggatcctgttatcgtatcatctaagaagaaaaccgtggaagatttctgcgacagaatccacaag

SEQ ID NO: 28250 - DNA, 263 bp, Zea mays
attttgagcattcagaaacacaccaagcgaactgacctagcaacgacttaacaacaatggctaccaagatattagccctccttgcgcttcttgccctttttgtgagcgcaacaaatgcgttcattattccacaatgctcacttgctcctagtgccattataccacagttcctccgaccagttacttcaatgggcttcgaacacctagctgtgcaagcctacaagctacaacaagcgcttgcggcgagcgtcttacaacaacca

SEQ ID NO: 28251 - DNA, 261 bp, Zea mays
atttagtgttccagtttcccaccgaataactgccggctgcgatatattgttaatgccatccagattcgaaccttgtggtctcaatcagctatatgctatgcagtatggcacagttcctgttgtccatgcaactgggggccttagagataccgtggagaacttcaaccctttcggtgagaatggagagcagggtacagggtgggcattcgcacccctaaccacagaaaacatgttgtggacattgcgaactgcaatatctac

SEQ ID NO: 28252 - DNA, 258 bp, Zea mays
aaccatcagggcacaacagctgcagcaactcgtgctacctgtgatcaaccaagtagctctggcaaacctttctccctactctcagcaacaacaatttcttccattcaaccaactgtctacactgaaccctgctgcttatttgcagcaacaactattaccatttagccagctagctactgcctactctcagcaacaacaacttcttccatttaaccaattggccgcactgaaccccgctgcttatttgcagcagcaaat

SEQ ID NO: 28253 - DNA, 258 bp, Zea mays
ctcaaacacagtcctctaggaaaaattatgctgatgcaaaccgtgtatctgctatcattttgggcggaggcactggatctcagctctttcctctgacaagcacaagagctacgcctgctgtacctgttggaggatgttacaggcttattgatatccctatgagtaactgcttcaacagtggtataaataagatatttgtgatgagtcagttcaattctacttcgcttaaccgccatattcatcgtacataccttgaag

SEQ ID NO: 28254 - DNA, 259 bp, Zea mays
gcaacatagaaagcacaatagtgtaccaacaatggcagccaaaatattttgcttccttatgctccttggtctttctgcaagtgctgctaccgcaaccattttcccacaatgctcacaagctcctatagcttcctttcttcccccatacctctcaccagcggtgtcttcagtatgtgaaaacccaattctttaaccctacaggatccaacaggcaatcgcagcaggcatcttacctttatcacccttgttcctccaacaa

SEQ ID NO: 28255 - DNA, 261 bp, Zea mays
gaaccctgccgcctacctacaacagcaacaactgctttcatctagccctctcgttgtgggtaatgcacctacatacctgcaacaacaattgctgcaacagattgtaccagctctgactcagctagctgtggcaaaccctgctgcctacttgcaacagctgcttccattcaaccaactgactgtgtcgaactctgctgcgtacctacaacagcgacaacagttacttaatccactagcagtgcctaacccattggtcactgc

SEQ ID NO: 28256 - DNA, 257 bp, Zea mays
caagctcctatagcttcccttcttcccccgtacctctcaccaacggtgtcttcggtatgtgaaaacccaattcttcaaccctacaggatccaacaggcaatcgcagctggcatcttacctttatcacccttgttcctccaacaatcatcagccctattacagcagttacctttggtgcatttattggcacaaaacatcagggcacaacaactacaacaacttgtgctagcaaaccttgctgcctactctcagcaaca

SEQ ID NO: 28257 - DNA, 255 bp, Zea mays
caaagcggcagtgcgtagagaggatcgtcgaacagaacagcatgaagatggtggacgtgcagtccgtcgcgcacagctgcagatgatgatgcagcttgagcgtgccgctgccgccagcagcagcctgtacgagccagctctgatgcagcagcagcagcagctgctggcagcccagggtctcaaccccatggccatgatgatggcgcagaacatgccggccatgggtggactctaccagtaccagctgcccagcta

SEQ ID NO: 28258 - DNA, 252 bp, Zea mays
ggctgcaattcggttggaggaggatggtgataacattgagaacactctttcccttgctcttgttgacacttcaagacatgggactacagataggagtatccaattgtccgatccactagcctccagctcatgggaaagggttgctgaggagaagactttaattacccctgtgcagtgcaaaaatttgtggaggcaattcaaagctgaaactgaatatacagtcactcaagccatagctgctcaggaagcaaa

SEQ ID NO: 28259 - DNA, 243 bp, Zea mays
cacaaaacatcagggcacaacaactacaacaacttgtgctagcaaaccttgctgcctactctcagcaacagcagtttcttccattcaaccaacttgctttgacaaacccagcagcattctaccaacaacccatcattggtggtgccctcttttagatttcttatgagttatagttcaataataaagttttttgtctgatgtttgtggcttcccagaaataagaaagtacatttctagattctt

SEQ ID NO: 28260 - DNA, 257 bp, Zea mays
gacaccaccgtttcatctaccgcctccgttctatatgccgcctccgttctatctgccgccgcagcagcagccgcagccatggcaataccccactcaaccaccgcagctaagcccgtgccagcagttcggatcctgcggcgtcggcagcgtcggcagcccgttcctgggccagtgcgtcgagttcctgaggcaccagtgcagcccggcggcgacgccctacggctcgccacagtgccaggcgctgcagcagcagtgct

SEQ ID NO: 28261 - DNA, 252 bp, Zea mays
gtgcgtagagaggatcgtcgaacagaacagcatgaagatggtcatcgttctcgtcgtgtgcctggctctgtcagctgccagcgcctctgcaatgcagatgccctgcccctgcgcggggctgcagggcttgtacggcgctggcgccggcctgacgacgatgatgggcgccggcgggctgtacccctacgcggagtacctgaggcagccgcagtgcagcccgctggcggcggcgccctactacgccgggtgtgg

SEQ ID NO: 28262 - DNA, 255 bp, Zea mays
aacaatccttggcacatctaacaatacaaaccatcgcaacgcaacagcaacaacaattcctaccagcactgagccacctagccatggtgaaccctgccgcctacttgcaacagcagttgcttgcatcaaacccacttgctctggcaaacgtagttgcaaaccagccacaacaacagctgcaacagtttctgccagcgctcagtcaactagccatggtgaaccctgccgcctacctacaacagcaacaactgcttt

SEQ ID NO: 28263 - DNA, 253 bp, Zea mays
gcaacaacaacaacaacaacagtttctgccatcactgagccacctagccgtggtgaaccctgtcacctacttgcaacagcagctgcttgcatccaacccacttgctctggcgaacgtagctgcataccagcaacaacaacagctgcaacagtttatgccagtgctcagtcaactagccatggtgaaccctgccgtctacctacaactactttcatctagcccgctcgcggtgggcaatgcacctacgtaccta

SEQ ID NO: 28264 - DNA, 253 bp, Zea mays
cagaaacacaccaagcgaacacattagcaacaacctaacaacaatggctaccaagatattatccctccttgcgcttcttgcgctttttgcgagcgcaacaaatgcgttcattattccacaatgctcacttgctccaagttccattattacacagttcctcccaccagttacttcaatgggcttcgaacacccagctgtgcaagcctataggctacaacaagcaattgcggcgagcgtcttacaacaaccaatt

SEQ ID NO: 28265 - DNA, 254 bp, Zea mays
gacggcaaaacgcttctgaaagacgaagcagagaaggtgatcaggtgcctggaagcagccatctccagaagagtatccgagggattcacgctggaggtgtgcggccgggaccgggtgggcttgctgtcggacgtgacgagggtgctccgggagcacgggctcacggtgagccgcgccgacgtgacgacggcgggcgggcaggccacaaacgtcttctacgtccggaacccctcgggccagccagtggacatgaa

SEQ ID NO: 28266 - DNA, 256 bp, Zea mays
agctcatcgactccagattggagaactcgacaccatgaaggtgctgatcgttgcccttgctctcctggcgctcgctgcgagcgccgcctccagtacaagcggcggctgtggctgccagacaccaccgtttcatctaccgcctccgttctatatgccgcctccgttctatctgccgccgcagcagcagccgcagccatggctataccccactcaaccaccgcagctaagcccgtgccagcagttcggatcctgcggc

SEQ ID NO: 28267 - DNA, 256 bp, Zea mays
aagccatggtgaaccctgccgcctacttgcaagagcagctgcttgcatccaacccacttgctctggcgaacgtagttgcaaaccagcaacaacaacagctacaacagtttctgccaacgctcagtcaactagccatggtgaaccctgccgcctacgtacaacaacaacaactgctttcatctagcccgctcgctgtgggcaatgcacctacatacctgcaacaacaattgttgcaacagattgtaccagctctgac

SEQ ID NO: 28268 - DNA, 256 bp, Zea mays
attcttcaaccctacaggatccaacaggcaatcgcagcaggcatcttacctttatcacccttgttcctccaacaaccgtcagccctattacagcagttacctttggtgcatttgttggcacaaaacatcaaggcacaacaactacaacaacttgtgctaggaaaccttgctgcctactctcagcaacagcagtttcttccattcaaccaactggctgcattgaactctgctgcttatttgcaacaacaactaccat

SEQ ID NO: 28269 - DNA, 252 bp, Zea mays
gttcgcgctgccggagatcacggcgacggggaacaacgcgacgctcttcaactcgggagtgatggtcatcgagccttcgaactgcacgttccggctactgatggagcacatcgacgagataacgtcgtacaacggcggggaccaggggtacctgaacgagatattcacgtggtggcaccggatcccgaagcacatgaacttcctgaagcatttctgggagggcgacgaggacgaggtgaaggcgaagaagac

SEQ ID NO: 28270 - DNA, 250 bp, Zea mays
cttcgtctgcccgaccgagattactgcgtttagtgacagatacgaggaatttgagaagttgaacactgaggttcttggtgtttccattgacagtgtgttctcccaccttgcatgggtgcagacagacaggaagtcgggtgggctcggcgatcttaaatacccacttgtttctgatgtgaccaaatcaatttcaaaggcctttggtgttctgatccctgaccagggtattgctttgagaggactgttcatc

SEQ ID NO: 28271 - DNA, 256 bp, Zea mays
cctcgagccgctcgagccgctcgagccggctcgaggaccaactaccaacatagaaagcacaatagtgtaccaacaatggcaaccaaaatatattgcttccttatgctccttggtctttctgcaagtgctgctaccgcaaccattttcccacaatgctcacaagctcctatagcttcctttcttcccccatacctctcaccagcggtgtcttcagtatgtgaaaacccaattcttcaaccctacaggatccaacagg

SEQ ID NO: 28272 - DNA, 247 bp, Zea mays
gagcacgtcaaggtgtgggcggacagaacagcctggtgatcaagggcgagggcgagaaggaggatagcgaggacgaggccgccccgcctccgagatacagcggtcgcatcgagctcgcgccagaggtttacaggatggacaagatcaaggcggagatgaagaacggcgtgctcaaggtggtcgtgccgaaggtgaaggagcagcagcgcaaggacgtgttccaagtcaacgtcgagtagatgtttcc

SEQ ID NO: 28273 - DNA, 250 bp, Zea mays
acaatttcttccattcaaccaactgtctacactgaaccctgctgcttatttgcagcaacaactattaccatttagccagctagctactgcctactctcagcaacaacaacttcttccatttaaccaattggccgcactgaaccccgctgcttatttgcagcagcaaatactactgccatttagcgagctagctgcagcaagtcgtgcttccttcttgacacagcaacagttgctgcctttctacaagcag

SEQ ID NO: 28274 - DNA, 250 bp, Zea mays
cagcctagcaattagctcatcgactccagattggagaactcgacaccatgaaggtgctgatcgttgcccttgctctcctggcgctcgctgcgagcgccgcctccagtacaagcggcggctgtggctgccagacaccaccgtttcatctaccgcctccgttctatatgccgcctccgttctatctgccgccgcagcagcagccgcagccatggcaataccccactcactcaccgcagctaagcccgtgcca

SEQ ID NO: 28275 - DNA, 246 bp, Zea mays
attgagaccaactagcaacatagaaagcacaatagtgtaccaacaatggcagccaaaatattttgcctccttatgctccttggtctttctgcaagtgctgctacggcgaccattttcccgcaatgctcgcaagctcctatagcttcccttcttcccccgtacctctcaccagcggtgtcttcggtatgtgaaaacccaattcttcaaccctacaggatccaacaggcaatcacagctggcatctta

SEQ ID NO: 28276 - DNA, 251 bp, Zea mays
tagcaacatcttagcaccaatgggagccaagatttttgccctccttgccctccttgctctttcagcaagcgctgctacctcgacttttattccacaatgctcacaacaatacctctctccggtgacagccgcgggatttcaatacccaactatacaatcctacatggtacaagaggccatccaagcaagcatcttacggtcattagcattaaccctccaacaaccatatgctctattgcaacagccatcct

SEQ ID NO: 28277 - DNA, 249 bp, Zea mays
agcagttcggatcctgcggcgtcggcagcgtcggcagcccgttcctgggccagtgcgtcgagttcctgaggcaccagtgcagcccggcggcgacgccctacggctcgccacagtgccaggcgctgcagcagcagtgctgccaccagatcaggcaggtggagccgctgcaccggtaccaggcgacatacggtgtggtcctgcagtccttcctgcagcagcagccgcagggcgagctcgcggcgctgatgg

SEQ ID NO: 28278 - DNA, 249 bp, Zea mays
ggacggcggcgatggcgaagaggctgctcccgtctctgaaccgggtgctggtcgagaagctggtgcagcccaagaagaccgccggcggcatcctccttccggaaacatccaagcaggtagcaccatcgtccgctaccgttgttttttagtagtttaggggattcagtttccggcgagggacgtttggatcatggtgtcgggcaaggtgttccgcgccgtcgcttgccgaactgaaaacggctgcagcag

SEQ ID NO: 28279 - DNA, 243 bp, Zea mays
ccacactgtaaatgcagcaaaagctgatgcagttgaaaggataaaggaaattactgatggtaggggtgtagatgtggctatagaggcacttggtaaggcgttaacattttcccagtgcgccaagagtgtgcgtgatggaggcaaagctgttatgatcgggcttgctgcaacgaacgtaatgggagaggttgatataacccgtcttgtccgacgacaggtgaaaatcattggctcatatggcgc

SEQ ID NO: 28280 - DNA, 248 bp, Zea mays
ggttgagaagccaggatccaaactccataagaaggaaacttgtgaggctgttaccatcattgaaacccctcctcttgtcattgttgggctcgtggcatatgtgaagactcctcgtggcctccgcacactcaactctgtttgggcccaacatcttagcgaagaagtgaggagaaggttctacaagaactggtgcaagatcgagaagaaggctttcacaaagtatgctctcaaatatgaaaatgatgctg

SEQ ID NO: 28281 - DNA, 249 bp, Zea mays
cccataccttccatcaatgatagcttcagtatgtgaaaacccagctcttcaaccctataggctccaacaagcaatcgcagcaagcaacatacctttatcacccttgtttcaacaatcgccagccctatctttggtgcagtcattggtacaaaccatcaaggcacagcagctgcagcaactcgtgctacctgtgatcaaccaagtagctctggcaaacctttctccctactatcagcaacaacaatttct

SEQ ID NO: 28282 - DNA, 250 bp, Zea mays
gtgaaccctgccggctacttgcaacagcagttgcttgcatcaaacccacttgctctggcaaacgtagttgcaaaccagccacaacaacagctgcaacagtttctgccagcgctcagtcaactagccatggtgaaccctgccgcctacctacaacagcaacaactgctttcatctagcccgctcgctgtggccaatgcacctacatacctgcaacaacaattgttgcaacagattgtaccagctctgactc

SEQ ID NO: 28283 - DNA, 251 bp, Zea mays
gaccattttcccacaatgctcacaagctcctatagcttcccttcttcccccgtacctctcaccaacggtgtcttcggtatgtgaaaacccaattcttcaaccctacaggatccaacaggcaatcgcagctggcatcttacctttatcacccttgttcctccaacaatcatcagccctattacagcagttacctttggtgcatttattggcacaaaacatcagggcacaacaactacaacaacttgtgctag

SEQ ID NO: 28284 - DNA, 242 bp, Zea mays
attgaatttgctgaacgtctcctgttaccacagttcaaagatttgcaagatgaagaggtgaaagaataccacaggcgtgatggttttgaggtgggcaatgcggacaagatattcgaaagtacatcgaagggtcagctgacgcggagatctgcatgaacagtgaactctagatctgcatatgaccccgtgaactctctagatctgcaaacaacccagtgtgcctcttggaagtgtgttggtga

SEQ ID NO: 28285 - DNA, 244 bp, Zea mays
agcaaagcggcagtgcgtagagaggatcgtcgaacagaacagcatgaagatggtcatcgttctcgtcgtgtgcctggctctgtcagctgccagcgcctctgcaatgcagatgccctgcccctgcgcggggctgcagggcttgtacggcgctggcgccggcctgacgacgatgatgggcgccggcgggctgtacccctacgcggagtacctgaggcagccgcagtgcagcccgctggcggcggcg

SEQ ID NO: 28286 - DNA, 243 bp, Zea mays
aaccaagtagctctggcaaacctttctccctactctcagcaacaacaatttcttccattcaaccaactgtctacactgaaccctgctgcttatttgcagcaacaactattaccattcagccagctagctactgcctactctcagcaacaacaacttcttccatttaaccaattggccgcactgaaccccgctgcttatttgcagcagcaaatactactaccatttagccagctagctgcagca

SEQ ID NO: 28287 - DNA, 123 bp, Zea mays
ccgatcgacaccatgagggtgttgctcgttgcactcgctctcctggctctcgctgcgagcgccacctccacgcatacaagcagcggctgcggctgcacagaagcgcacgtggttcatctaccg

SEQ ID NO: 28288 - DNA, 241 bp, Zea mays
caaacacaccaagcgaactacctagcaacgacttaacaacaatggctaccaagatattagccctccttgcgcttcttgccctttttgtgagcgcaacaaatgcgttcattattccacaatgctcacttgctcctagtgccattataccacagttcctccgaccagttacttcaatgggcttcgaacacctagctgtgcaagcctacaagctacaacaagcgcttgcggcgagcgtcttaca

SEQ ID NO: 28289 - DNA, 244 bp, Zea mays
gtgaccttaaagaacttgtttctaagttcattccggaagttattggcaaagagattgagaagtctacctccagcatcttcccacttcaaaacgtcttcatccgcaaggtgaagatactcaaggcccccaagtttgatctcgggaagttgatggaggttcatggcgactacaaagaggacgttggtgtgaagcttgagaggcctgtcgagggtgatgaggctatgcaggaggttgctgctgccga

SEQ ID NO: 28290 - DNA, 244 bp, Zea mays
atagaaagcacaatagtgtaccaacaatggcagccaaaatattttgcctccttatgctccttggtatttctgcaagtgctgctacggcgaccattttcccgcaatgctcacaagctcctatagcttcccttcttcccccgtacctctcaccagcggtgtcttcggtatgtgaaaacccaattcttcaaccctacaggatccaacaggcaatcgcagctggcatcttacctttatcacccttgtt

SEQ ID NO: 28291 - DNA, 242 bp, Zea mays
cgcaaattgcaccaagaaatccatcgagaggccgtcgacaggggaattaatggcgtcgtcgtctagcagcagccaccgccgcctcatcctcgcagccgccgtcctgctctccgtgctcgctgctgccagcgccagcgccgggacctcctgcgtgccggggtgggccatcccgcacaacccgctcccgagctgccgctggtacgtgaccagccggacctgcggcatcgggccgcgcctcccgt

SEQ ID NO: 28292 - DNA, 269 bp, Zea mays
cgtcacctagcaattagctcatcgactccagattggagaactcgacaccatgaaggtgctgatcgttgcccttgctctcctggcgctcgctgcgagcaacgcctccagtacaagcggcggctgtggctgccagacaccaccgtttcatctaccgcctccgttctatatgccgcctccgttctatctgccgccgcagcagcagccgcagccatggcaataccccactcaaactccgcagctaagcccgtgccagcagttcggatcctgcg

SEQ ID NO: 28293 - DNA, 265 bp, Zea mays
agcgccactagtgcgacccatattccagggcacttgccaccagtcatgccattgggtaccatgaacccatgcatgcagtactgcatgatgcaacaggggcttgccagcttgatggcgtgtccgtccctgatgctgcagcaactgttggccttaccgcttcagacgatgccagtgatgatgccacagatgatgacgcctaacatgatgtcaccattgatgatgccgagcatgatgtcaccaatggtcttgccgagcatgatgtcgc

SEQ ID NO: 28294 - DNA, 263 bp, Zea mays
ccatgcccgtaccaacagccgcatccaagcccgtgccagctgcagggaacctgcggcgttggcagcaccccgatcctgggccagtgcgtcgagttcctgaggcatcagtgcagcccgacggcgacgccctactgctcgcctcagtgccagtcgttgcggcagcagtgttgccagcagctcaggcaggtggagccgcagcaccggtaccaggcgatcttcggcttggtcctccagtccatcctgcagcagcaaccgcaaagcgc

SEQ ID NO: 28295 - DNA, 265 bp, Zea mays
cagcaaagcggcagtgcgtagagaggatcgtcgaacagaacagcatgaagatggtcatcgttctcgtcgtgtgcctggctctgtcagctgccagcgcctctgcaatgcagatgccctgcccctgcgcggggctgcagggcttgtacggcgctggcgccggcctgacgacgatgatgggcgccggcgggctgtacccctacgcggagtacctgaggcagccgcagtgcagcccgctggcggcggcgccctactacgccgggtgtgg

SEQ ID NO: 28296 - DNA, 264 bp, Zea mays
ttgagaccaactagcaacatagaaagcacaatagtgtaccaacaatggcagccaaaatattttgcctccttatgctccttggtctttctgcaagtgctgctacggcgaccattttcccgcaatgctcgcaagctcctatagcttcccttcttcccccgtacctctcaccagcggtgtcttcggtatgtgaaaacccaattcttcaaccctacaggatccaacaggcaatcgcagctggcatcttacctttatcacccttgttcc

SEQ ID NO: 28297 - DNA, 261 bp, Zea mays
atcgatgagtatgctattggccagctcaaggagttcgagggcaagaagctcgtctcggccaccaaggagggcctgaagctcgacgagagtgaggatgagaagaagcggaaggaggagctcaaggagaagttcgagggcctgtgcaaggtgatcaaggaggtgctgggcgacaaggtggagaaggttgtggtctctgaccgcgtggtggactccccctgctgcctggtgacgggcgagtacggctggacggccaacatggag

SEQ ID NO: 28298 - DNA, 259 bp, Zea mays
actatatcatgtgctcctgttgatgagagccgagcttctaaaaatgggctagtgaagattgatcatactggacgtgtacttcaattctttgaaaaaccaaagggtgctgatttgaattctatgagagttgagaccaacttcctgagctatgctatagatgatgcacagaaatatccataccttgcatcaatgggcatttatgtcttcaagaaagatgcacttttagaccttctcaagtcaaaatatattcaattacatg

SEQ ID NO: 28299 - DNA, 259 bp, Zea mays
acagttgctaccaacaatcaatcaagtagttgcagcgaaccttgctgcttacctccagcaacaacagtttcttccattcaatcaactagctggggtgaaccctgctatctacttgcaggcacaacagctactaccatttaaccaacttgtcgggagcccttatgccttcttactgcaacaacagcttctgccattccatctgcaagctgtggcaaacattgttgctttcttgagacaacaacatttgttgccattttac

SEQ ID NO: 28300 - DNA, 264 bp, Zea mays
atgcaacatagaaagtggaatccagtagcaacaatagagcaacaatggcgaccaagatattttccctccttatgctccttgctctttctacatgtgttgctaacgcgacaattttccctcaatgctcacaagctcctatagcttcccttcttcccccataccttccatcaattatagcttcaatatgtgaaaacccagctcttcaaccatataggcttcaacaagcaatcgcagcaagcaacatacctttatcgcccttgttgt

SEQ ID NO: 28301 - DNA, 214 bp, Zea mays
tggatcgtgtaccttggtatggtaagagccgcttgacaggaagtcgagcgttcgggcgcaagatgcgttgtctggcatgctgttccttgaccatttgtgctgctagtatgtactgttataagctgccctagaagttgcagcaaacctttttatgaacctttgtatttccattacctgctttggatcaactatatctgtcatcctatatattact

SEQ ID NO: 28302 - DNA, 264 bp, Zea mays
cagaccattagctttatctactccagagcgcagaagaacccgatcgacaccatgagggtgttgctcgttgccctcgctctcctggctctcgctgcgagcgccacctccacgcatacaagcagcggctgcggctgccagccaccgccgccggttcatctaccgccgccggtgcatctgccacctccggttcacctgccacctccggtgcatctcccaccgccggtccacctgccgccgccggtccacctgccaccgccggtccat

SEQ ID NO: 28303 - DNA, 264 bp, Zea mays
agcagttcggatcctgcggcgtcggcagcgtcggcagcccgttcctgggccagtgcgtcgagttcctgaggcaccagtgcagcccggcggcgacgccctacggctcgccacagtgccaggcgctgcagcagcagtgctgccaccagatcaggcaggtggagccgctgcaccggtaccaggcgacatacggtgtggtcctgcagtccttcctgcagcagcagccgcagggcgagctcgcggcgctgatggcggcccaggtagcgc

SEQ ID NO: 28304 - DNA, 260 bp, Zea mays
cctgctttgacaatctctaaggttttgctttctatctgctccctgcttactgatcccaacccagacgatcctcttgtccctgagattgctcacatgtacaagacggatcggcctaagtacgaggcaacagcccgcagctggacccagaaatatgccatgggatgaaaatgaaatgaagtcgaaactccatattcggcattactgcttaaatgcagacgattgtggtgttgccccatgaaactttttgtggggacgtatgt

SEQ ID NO: 28305 - DNA, 260 bp, Zea mays
gcaacatagaaagcacaatagtgtaccaacaatggcagccaaaatattttgcctccttatgctccttggtctttctgcaagtgctgctacggcgaccattttcccacaatgctcacaagctcctatagcttcccttcttcccccgtacctctcaccagcggtgtcttcggtatgtgaaaacccaattcttcaaccctataggatccaacaggcaatcgcagctggcatcttacctttatcacccttgttcctccaacaat

SEQ ID NO: 28306 - DNA, 255 bp, Zea mays
acgttgcagaacatatttttgatgaataatctgctgtatattgtgcagaaggtgaaagattcagagctcaagacattgcttggtgataactggattcgcaagcgtcgtggtcagattaggcaatactctacagggtatcttcgatcatcatggactagggtgttagcttgcctgagagatgatgggcttccgcacacgatgggttcatcaagcacactcaaagccgcattgaaggatagattcaaaaactttaac

SEQ ID NO: 28307 - DNA, 256 bp, Zea mays
ttcagaaacacacctagcgaacgcactagcaacgacctaacaacaatggcttccaagacattatccctccttgcgcttcttgccctttttgtgagtgcaacaaatgcgttcattattccacaatgctcacttgctccgagtgccattattccacagttcctccctccagttacttcaatgggcttcgaacacccagctgtgcaagcctataggctacaacaagcgcttgcggcgagcgtcttagaacaaccaattg

SEQ ID NO: 28308 - DNA, 255 bp, Zea mays
gctcctagtgccattataccacagttcctccgaccagttacttcaatgggcttcgaacacctagctgtgcaagcctacaagctacaacaagcgcttgcggcgagcgtcttacaacaaccaattaaccaattgcaacaacaatccttggcacatctaaccatacaaaccatcgcaacacaacagcaacaacagttcctaccagcactgagccaactagatgtggtgaaccctgtcgcctacttgcaacagcaggtg

SEQ ID NO: 28309 - DNA, 257 bp, Zea mays
caatagtgtaccaacaatggcagccaaaatattttgcctccttatgctccttggtctttctgcaagtgctgctacggcgaccattttcccgcaatgctcgcaagctcctatagcttcccttcttcccccgtacctctcaccagcggtgtcttcggtatgtgaaaacccaattcttcaaccctacaggatccaacaggcaatcgcagctggcatcttacctttatcacccttgttcctccaacaatcatcagccctat

SEQ ID NO: 28310 - DNA, 258 bp, Zea mays
ctcccaagtagctctggcaaacctttctccctactctcagcaacaacaatttcttccattcaaccaactgtctacattgaaccgtgctgcttatttgcagcaacaactattaccattcagccagctagctactgcctactctcagcaacaacaacttcttccatttaaccaattggccgcactgaaccccgctgcttatttgcagcagcaaatactactaccatttagccagctagctgcagcaagccgtgcttcctt

SEQ ID NO: 28311 - DNA, 260 bp, Zea mays
accaactagcaacatagaaagcacaatagtgtaccaacaatggcagccaaaatattttgcttccttatgctccttggtctttctgcaagtgctgctaccgcaaccattttcccacaatgctcacaagctcctatagcttcctttcttcccccatacctctcaccagcggtgtcttcagtatgtgaaaacccaattcttcaaccctacaggatccaacaggcaatcgcagcaggcatcttacctttatcacccttgttcct

SEQ ID NO: 28312 - DNA, 255 bp, Zea mays
gcagtttcttccattcaaccaactggctgcattgaactctgctgcttatttgcaacaacaactaccattcagtcagctagctgctgcctacccccagcaatttcttccattcaaccaactggcagcattgaactctgctgcttatttacaacagcaacagctaccaccattcagccagctagctgatgtgagccctgttgccttcttgacacaacaacagttgttgccgttctacctgcacgctgcgcctaacgc

SEQ ID NO: 28313 - DNA, 256 bp, Zea mays
ctagcaacatagaaagcacaatagtgtaccaacaatggcagccaaaatattttgcctccttatgctccttggtctttctgcaagtgctgctacggcgaccattttcccacaatgctcacaagctcctatagcttcccttcttcccccgtacctctcaccagcggtgtcttcggtatgtgaaaacccaattcttcaaccctataggatccaacaggcaatcgcagctggcatcttacctttatcacccttgttcctc

SEQ ID NO: 28314 - DNA, 254 bp, Zea mays
catcagggcacaacaactacaacaacttgtgctagcaaaccttgctgcatactctcagcaacatcagtttcttccattcaaccaactggctgcattgaactctgctgcttatttgcaacaacaattaccattcagccagctagttgctgcctacccccagcaatttcttccattcaaccaactagcagcattgaactctgctgcttatttacagcagcaacaactactaccattcagccagctagctgatgtga

SEQ ID NO: 28315 - DNA, 253 bp, Zea mays
caacatagaaagcacaatagtgtaccaacaatggcagccaaaatattttgcctccttatgctccttggtctttctgcaagtgctgctacggcgaccattttcccgcaatgctcgcaagctcctatagcttcccttcttcccccgtacctctcaccagcggtgtcttcggtatgtgaaaacccaattcttcaaccctacaggatccaacaggcaatcgcagctggcatcttacctttatcacccttgttcctcc

SEQ ID NO: 28316 - DNA, 249 bp, Zea mays
caacaagcaacatagaaagtggaatccagtagcaacaatagagcaacaatggcgaccaagatactttccctccttatgctccttgctctttctgcatgtgttgctaacgcgacaattttccctcaatgctcacaagctcctatagcttcccttcttcccccataccttccatcaatgatagcttcagtatgtgaaaacccagctcttcaaccctataggctccaacaagcaatcgcagcaagcaacata

SEQ ID NO: 28317 - DNA, 251 bp, Zea mays
gtgctctggaccgagagccgcgacgtcggcaacggcttccgctgcgtccgcatggtcaacaacatctacctcaacttcgacgccttccacggcgacaaggcccacggcggcgtccatgacggtaccgagatcgtgctctggaagtggtgcgagggcgacaaccagcgctggaagatcctcccttggtgaacgaacgaaagaaactactagctggtaccctaataataattctgctggctgcggcgatccca

SEQ ID NO: 28318 - DNA, 252 bp, Zea mays
attgagaccaactagcaacatagaaagcacaatagtgtaccaacaatggcagccaaaatattttgcctccttatgctccttggtctttctgcaagtgctgctacggcgaccattttcccgcaatgctcgcaagctcctatagcttcccttcttcccccgtacctctcaccagcggtgtcttcggtatgtgaaaacccaattcttcaaccctacaggatccaacaggcaatcgcagctggcatcttaccttta

SEQ ID NO: 28319 - DNA, 250 bp, Zea mays
aacctcttgtcggtcgcatacaagaatgtgattggggctcgccgtgcttcatggcgcattgtctcttctattgaacagaaggaggagtcccgtaagaacgaagagcatgtgaaccttatcaaggaataccgtgcgaagatcgaggctgaactgagcaatatctgtgatggcatcctgaagctgcttgactcccacctagtgccttcttctactgctgctgaatcaaaggtcttctacctcaagatgaagg

SEQ ID NO: 28320 - DNA, 249 bp, Zea mays
ggcgcgcccgccgcgcgagcccgcgtgacgcactcgatgccgccggagaaggcggaggtgttccgctcgctggagggctgggcggcgcggtcgctgctgccgctgctcaagcccgtggaggagtgctggcagccggcggacttcctcccggactcctcgtccgagatgttcgggcacgaggtccgcgagctgcgcgcccgcgccgcggggctccccgacgagtacttcgtcgtgctcgtgggcgacatg

SEQ ID NO: 28321 - DNA, 249 bp, Zea mays
agcagctctctgttcctgaaatcaccaatgccgtctttgagccctcaagcatgatggccaagtgtgacccaaggcatgggaagtacatggcttgctgcttgatgtaccgtggtgatgttgttcccaaggatgtcaatgctgcagtcgcaaccatcaagaccaagagaactgtccagtttgtggactggtgccccaccggattcaagtgtggcatcaactaccagccaccgtctgttgtccctggaggcg

SEQ ID NO: 28322 - DNA, 250 bp, Zea mays
tgagatgaacaagaaggtttacaagatcggcaaggctggacaagagacccacgatgcctccacagagtttgacaggactgagaaggacatcactcccatgggtggcttcccccattatggtatcgtgaagggtgactacctgatgatcaagggctgctgtgtgggtccaaagaagagggtggtgaccctccgccagtccctcctgaagcagacttcccggctggcgctggaggagatcaagctcaagttc

SEQ ID NO: 28323 - DNA, 250 bp, Zea mays
ttgggatgctaattaatgtccatttcttgtggaaccatgtggatatactccttgcagcagtaattttggtgatcaccgtaaagacctttattgttgctattgttgtaaaagggtttgggtatagcaacaaaacatctcttcttgtcggcatgtcacttgcacaaataggagagtttgcttttgttctcttaagccgtgcttcaagtattcatctaatcgagggcaagctatacctgcttcttcttggaac

SEQ ID NO: 28324 - DNA, 255 bp, Zea mays
ggcggaagtaagaggcgatggggcactccaacgtgtggaactcgcaccccaagaactacgggcccggatcccgcgtctgccgggtctgtgcgaaccctcatggactgatcaggaagtacgggctgatgtgctgcaggcagtgcttccgcagcaacgccaaggacattggcttcatcaagtaccgctgaagtcagctgggcgggctatctgaatgccatctcttggacagtgtagtagaggcgatgccacaatttt

SEQ ID NO: 28325 - DNA, 271 bp, Zea mays
aagcaacatagaaagtggaatccagtagcaacaatagagcaacaatggcgaccaagatactttccctccttatgctccttgctctttctgcatgtgttgctaacgcgacaattttccctcaatgctcacaagctcctatagcttcccttcttcccccataccttccatcaatgatagcttcagtatgtgaaaacccagctcttcaaccctataggctccaacaagcaatcgcagcaagcaacatacctttatcacccttgttcaacaatcg

SEQ ID NO: 28326 - DNA, 268 bp, Zea mays
ctcaccacaccaaccaacaagcaaaaattccccaatcctctcgtctccgcggcgaagatgtcggggcgcggcaagggcggcaagggcctgggcaagggcggcgcgaagtcaccggaaggtgctgcgcgacaacatccaggggatcacgaagccggcgatccggaggctggcgcggcggggcggcgtgaagcgcatctcggggctcatctacgaggagacccgcggcgtgctcaagatcttcctggagaacgtcatccgcgacgccgtc

SEQ ID NO: 28327 - DNA, 261 bp, Zea mays
ctttggtgcagtcattggtacaaaccatcagggcacaacagctgcaacaactcgtgctaccagtgatcagccaagtagctctggcaaacctttctccctactctcagcaacaacaatttcttccattcaaccaactgtctacactgaaccctgctgcttatttacaacaacaacaactactaccattcagccagctagctactgcctactctcagcagcaacaatttcttccatttaaccaattggccgcactgaacccct

SEQ ID NO: 28328 - DNA, 260 bp, Zea mays
gccgccaccaggtgcagagtctttcgtcatctcttctccggcgaagaacccccagtcgcccaccagatcacttgttaaactttgttgaggggtgatggcggtttctttcgcaaacctcagctccgaggcagggcttaaaaagcttgatgagtaccttctcactcgcagctacatcactggctaccaagcttccaaggatgacttggctgtctacacttcgttttcgtctgctccctcgtccaagtatatcaacgtagcaa

SEQ ID NO: 28329 - DNA, 260 bp, Zea mays
ccaagttccattattacacagttcctcccaccagttacttcaatgggcttcgaacacccagctgtgcaagcctataggctacaacaagcaattgcggcgagcgtcttacaacaaccaatttcccagttgcaacaacaatccttggcacatctaacaatacaaaccatcgcaacgcaacagcaacaacaattcctaccagcactgagccacctagccatggtgaaccctgccgcctacttgcaacagcagttgcttgcatc

SEQ ID NO: 28330 - DNA, 259 bp, Zea mays
caatagtgtaccaacaatggcagccaaaatattttgcctccttatgctccttggtctttctgcaagtgctgctacggcgaccattttcccgcaatgctcgcaagctcctatagcttcccttcttcccccgtacctctcaccagcggtgtcttcggtatgtgaaaacccaattcttcaaccctacaggatccaacaggcaatcacagctggcatcttacctttatcacccttgttcctccaacaatcatcagccctatta

SEQ ID NO: 28331 - DNA, 260 bp, Zea mays
ctacaacatcaatgtgaaggccaacaacaacatcaccaacaatcacaaggccatgtgcaacaacacgaacagagccatgagcaacaccaaggacagagccatgagcaacaacatcaacaacaattccagggtcatgacaagcagcaacaaccacaacagcctcagcaatatcagcagggccaggaaaaatcacaacagcaacaatgtcattgccaggagcagcaacagactacaaggtgcagctataactactatagcag

SEQ ID NO: 28332 - DNA, 260 bp, Zea mays
ctcagcaacagcagtttcttccattcaaccaactagctgcattgaactctgcttcttatttgcaacaacaacaactaccattcagccagctacctgctgcctacccccagcaatttcttccattcaaccaactggcagcattgaactctcctgcttatttacagcagcaacaactactaccattcagccagctagctggtgtgagccctgctaccttcttgatacaaccacagttgttgccgttctaccagcacgctgcg

SEQ ID NO: 28333 - DNA, 257 bp, Zea mays
attttgagcattcagaaacacaccaagcgaacctactagcaacgacctaacaacaatggctaccaagatattagccctccttgcgcttcttgccctttttgtgagcgcaacaaatgcgttcattattccacaatgctcacttgctcctagtgccattattccacagttcctcccaccagttacttcaatgggcttcgaacacctagctgtgcaagccaacatgcaacaacaagcgcttgcggcgagcgtcttacaac

SEQ ID NO: 28334 - DNA, 265 bp, Zea mays
ctacaacagctgcaacagtttctgccagcgctcagtcaactagccatggtgaaccctgccgcctacctacaacagcaacaactgctttcatctagcccgctcgctgtggccaatgcacctacatacctgcaacaacaattgttgcaacagattgtaccagctctgactcagctagttgtggcaaaccctgctgcctacttgcaacagctgcttccattcaaccaactgactatgtcgaactctgctgcgtacctacaacagcgac

SEQ ID NO: 28335 - DNA, 257 bp, Zea mays
gcatgtgttgctaacgcgacaattttccctcaatgctcacaagctcctatagcttcccttcttcccccataccttccatcaatgatagcttcagtatgtgaaaacccagctcttcaaccctataggctccaacaagcaatcgcagcaagcaacatacctttatcacccttgtttcaacaatcgccagccctatctttggtgcagtcattggtacaaaccatcagggcacagcagctgcagcaactcgtgctacctgt

SEQ ID NO: 28336 - DNA, 260 bp, Zea mays
caacaatggcagccaaaatattttgcctccttatgctccttggtctttctgcaagtgctgctacggcgaccattttcccgcaatgctcgcaagctcctatagcttcccttcttcccccgtacctctcaccagcggtgtcttcggtatgtgaaaacccaattcttcaaccctacaggatccaacaggcaatcacagctggcatcttacctttatcacccttgttcctccaacaatcatcagccctattacatcagttacct

SEQ ID NO: 28337 - DNA, 258 bp, Zea mays
aagccatcacaacgcaacagcaacaacagttcctaccagcactgagccacctagccatggtgaaccctgccgcctacttgcaagagcagctgcttgcatccaacccacttgctctggcgaacgtagttgcaaaccagcaacaacaacagctacaacagtttctgccaacgctcagtcaactagccatggtgaaccctgccgcctacgtacaacaacaacaactgctttcatctagcccgctcgctgtgggcaatgcac

SEQ ID NO: 28338 - DNA, 257 bp, Zea mays
catctaccgcctccgttctatatgccgcctccgttctatctgccgccgcagcagcagccgcagccatggcaataccccactcaaccaccgcagctaagcccgtgccagcagttcggatcctgcggcgtcggcagcgtcggcagcccgttcctgggccagtgcgtcgagttcctgaggcaccagtgcagcccggcggcgacgccctacggctcgccacagtgccaggcgctgcagcagcagtgctgccaccagatcag

SEQ ID NO: 28339 - DNA, 256 bp, Zea mays
gcattcaaaaacacaccaagcgaacgtcactagcaacgacctaacaccaatggctaccaagatattagccctccttgcgcttcttgcccttttagtgagcgcaacaaatgcgttcattattccacagtgctcacttgctcctagtgccattattccacagttcctcccaccagttacttcaatgggcttcgaacatccagccgtgcaagcctacaggctacaactagcgcttgcggcgagcgccttacaacaacca

SEQ ID NO: 28340 - DNA, 253 bp, Zea mays
cagcctagcaattagctcatcgactccagattggagaactcgacaccatgaaggtgctgatcgttgcccttgctctcctggcgctcgctgcgagcgccgcctccagtacaagcggcggctgtggctgccagacaccaccgtttcatctaccgcctccgttctatatgccgcctccgttctatctgccgccgcagcagcagccgcagccatggcaataccccactcgtccaccgcagctaagcccgtgccagca

SEQ ID NO: 28341 - DNA, 253 bp, Zea mays
ctctatactggaatcgattcccgccatatcactttgacgagcaaaatggtgcaagaacatagtggacttcacgtgcagccacataaagctattgttggtgccaatgcgttcgctcatgaaagtggaattcatcaggatgggatgcttaaatataaaggaacttacgaaattatatcgcctgatgatattggtctaacacgtgcaaatgaatttggtattgttcttgggaaactcagcggaaggcatgctgtga

SEQ ID NO: 28342 - DNA, 256 bp, Zea mays
gttcctcccaccagttacttcaatgggcttcgaacacctagctgtgcaagccaacatgcaacaacaagcgcttgcggcgagcgtcttacaacaaccaattgcccaattgcaacaacaatccttgccacatctaacaatacaagccatcacaacgcaacagcaacaacagttcctaccagcactgagccacctagccatggtgaaccctgccgcctacttgcaagagcagctgcttgcatccaacccacttgctctg

SEQ ID NO: 28343 - DNA, 261 bp, Zea mays
cgcctctgcaatgcagatgccctgcccctgcgcggggctgcagggcttgtacggcgctggcgccggcctgacgacgatgatgggcgccggcgggctgtacccctacgcggagtacctgaggcagccgcagtgcagcccgctggcggcggcgccctactacgccgggtgtgggcagccgagcgccatgttccagccgctcacggaacagtgctgccagcagcagatgaggatgatggacgtgcagtccgtcgcgcacagctg

SEQ ID NO: 28344 - DNA, 238 bp, Zea mays
agttcctggaacatagcacatcagatgcacgatcttgtcttcctgcggcaggatcgtgcatctgatgtgccatgttccaggaacttgacgaaatccagatccagggaccacgacgattccagttgattcaaggagacggagagtgtagaaagcgtcaggcgctttcttagcagctttagcagcctcgattgccttctgtggcagatgaatctgagggaaaactagttctagatcgcga

SEQ ID NO: 28345 - DNA, 256 bp, Zea mays
ccaatccagatcagcaaagcggcagtgcgtagagaggatcgtcgaacagaacagcatgaagatggtcatcgttctcgtcgtgtgcctggctctgtcagctgccagcgcctctgcaatgcagatgccctgcccctgcgcggggctgcagggcttgtacggcgctggcgccggcctgacgacgatgatgggcgccggcgggctgtacccctacgcggagtacctgaggcagccgcagtgcagcccgctggcggcggcg

SEQ ID NO: 28346 - DNA, 255 bp, Zea mays
gcaacatagaaagcacaatagtgtaccaacaatggcagccaaaatattttgcttccttatgctccttggtctttctgcaagtcttgctaccgcaaccattttcccacaatgctcacaagctcctatagcttcccttcttcccccatacctctcaccagcggtgtcttcaatgtgtgaaaacccaattgttcaaccctacaggatccaacaggcaatcgcaacaggcatcttaccattatcacccttgttcctcca

SEQ ID NO: 28347 - DNA, 252 bp, Zea mays
atccatcgagaggccgtcgacaggggaattaatggcgtcgtcgtctagcagcagccaccgccgcctcatcctcgcagccgccgtcctgctctccgtgctcgctgctgccagcgccagcgccgggacctcctgcgtgccggggtgggccatcccgcacaacccgctcccgagctgccgctggtacgtgaccagccggacctgcggcatcgggccgcgcctcccgtggccggaactgaagaggagatgctgccg

SEQ ID NO: 28348 - DNA, 249 bp, Zea mays
gaacccgatcgacaccatgagggtgttgctcgttgccctcgctctcctggctctcgctgcgagcgccacctccacgcatacaagcagcggctgcggctgccagccaccgccgccggttcatctaccgccgccggtgcatctgccacctccggttcacctgccacctccggtgcatctcccaccgccggtccacctgccgccgccggtccacctgccaccgccggtccatgtgccgccgccgattcatct

SEQ ID NO: 28349 - DNA, 247 bp, Zea mays
gcttcctcccgttagactaggttaggctagggtgtcgaccagctcgcggaaatggtggccttcaggttccatcagtaccaggtggtggggcgcgcgctgccgacgcccggcgacgagcaccccaagatctaccgcatgaagctctgggccaccaacgaagtccgcgccaagagcaagttctggtacttcctgaggaagttgaagaaggttaagaagagcaacggtcaggtcctggccatcaacgaga

SEQ ID NO: 28350 - DNA, 249 bp, Zea mays
cagcaatatcagcagggccaggaaaaatcacaacagcaacaatgtcattgccaggagcagcaacagactacaaggtgcagctataactactatagcagtagctcaaatctaaaaaattgtcatgaattcctaaggcagcagtgcagccctttggtaatgccttttctccaatcacgtttgatacaaccaagtagctgccaggtattgcagcaacaatgttgtcatgatcttaggcagattgagccacaa

SEQ ID NO: 28351 - DNA, 246 bp, Zea mays
gatgaactaaggcagaaaggatcgacaagtgacatgatattcaagatcccttttctgatcagctatatcagctccatcatgacattaatggagggtgatgtgatactaacaggtactcctgagggtgtgggtcctgtgcgagtaggtcagaagatcaaagctggtataactgacctaattgatgtcgagttcgatgttcagaggcgcaaccggtcattttccacatgatacaataagcaagaaagt

SEQ ID NO: 28352 - DNA, 248 bp, Zea mays
cagaaacacaccaagcgaactacctagcaacgacttaacaacaatggctaccaagatattagccctccttgcgcttcttgccctttttgtgagcgcaacaaatgcgttcattattccacaatgctcacttgctcctagtgccattataccacagttcctccgaccagttacttcaatgggcttcgaacacctagctgtgcaagcctacaagctacaacaagcgcttgcggcgagcgtcttacaacaac

SEQ ID NO: 28353 - DNA, 248 bp, Zea mays
attttcagcattcaaaaacacaccaagcgaacgcactagcaacgacctaacaccaatggctaccaagatattagccctccttgcgcttcttgcccttttagtgagcgcaacaaatgcgttcattattccacagtgctcacttgctcctagtgccattattccacagttcctcccaccagttacttcaatgggcttcgaacatccagccgtgcaagcctacaggctacaactagcgcttgcggcgagcg

SEQ ID NO: 28354 - DNA, 250 bp, Zea mays; identical to SEQ ID NO: 27277

SEQ ID NO: 28355 - DNA, 174 bp, Zea mays
caacggtgtcttcggtatgtgaaaacccaattcttcaaccctacaggatccaacaggcaatcgcagctggcatcttacctttatcacccttgttcctccaacaatcatcagccctattacagcagttacctttggtgcatttattggcacaaaacatcatggcacaacaactac

SEQ ID NO: 28356 - DNA, 263 bp, Zea mays
gtcgagaactccgagcacaagttcgtgctgaaggacaagaagaagccgatcatcttctcgatggcgcgtctcgaccgcgtgaagaacatgacaggcctggtcgagatgtacggcaagaacgcgcgcctgagggagctggcgaacctcgtgatcgttgccggtgaccacggcaaggagtccaaggacagggaggagcaggcggagttcaagaagatgtacagcctcatcgacgagtacaagttgaagggccatatccggtggat

SEQ ID NO: 28357 - DNA, 261 bp, Zea mays
agcaaagcgtcagtgcgtagagaggatcgtcgaacagaacagcatgaagatggtcatcgttctcgtcgtgtgcctggctctgtcagctcccagcgcctctgcaatgcagatgccctgcccctgcgcggggctgcagggcttgtacggcgctggcgcggcctgacgacgatgatgggcgccggcgggctgtacccctacgcggagtacctgaggcagccgcagtgcagcccgctggcggcggcgccctactacgccgggtgt

SEQ ID NO: 28358 - DNA, 262 bp, Zea mays
cgtcacctagcaattagctcatcgactccagattggagaactcgacaccatgaaggtgctgctcgttgcccttgctctcctggcgctcgctgcgagcgccgcctccagtacaagcggcggctgtggctgccagacaccaccgtttcatctaccgcctccgttctatatgccgcctccgttctatctgccgccgcagcagcagccgcagccatggcagttccccactcaaccaccgtagctaagcccgtgccagcagttcgga

SEQ ID NO: 28359 - DNA, 263 bp, Zea mays
ttagtggaatccagtagcaacaatagagcaacaatggcgtccaagctattttccctccttatgctccttgctctttctacatgtgttgctaacgcgacaattttccctcaatgctcacaagctcctatagcttcccttcttcccccataccttccatcaattatagcttcaatatgtgaaaacccagctcttcaaccatataggcttcaacaagtaatcgcagcaagcaacatacctttatcgcccttgttgtttcaacaatc

SEQ ID NO: 28360 - DNA, 267 bp, Zea mays
acgaacacctagctgtgcaagccaacatgcaacaacaagcgcttgcggtgagcgtcttacaacaaccaattgcccaattgcaacaacaatccttgccacatctaacaatacaagccatcacaacgcaacagcaacaacagttcctaccagcactgagccacctagccatggtgaaccctgccgcctacttgcaagagcagctgcttgcatccaacccacttgctctggcgaacgtagttgcaaaccagcaacaacaacagctacaac

SEQ ID NO: 28361 - DNA, 264 bp, Zea mays
gaacacccagctgtgcaagcctataggctacaacaagcgattgcggcgagcgtcttacaacaaccaattgcccaattgcaacaacaatccttggcacatctaacaatacaaaccatcgcaacgcaacagcaacaacagttcctaccagcactgagccacctagccatggtgaaccctgtcgcctacttgcaacagcagctgcttgcatccaacccacttgctctagcaaacgtagttgcaaaccagcaacaacaacaactgcaa

SEQ ID NO: 28362 - DNA, 258 bp, Zea mays
tcgcccggcggcgatgcctacggctcgccacagtgccaggtgctgcagcagcagtgctgacaccagatcaggcaggtggagccgctgtaccggtaccaggtgacatacggtgtggtcctgcagtcgttcctgcagcagcagcagcagggcgtgctcgcggtgctgatggcggcccaggtagcgcacagctgacggcgatgtgcggtctgcagctgcagcagccaggtccctgcccttgcaacgcagttgccggtggtg

SEQ ID NO: 28363 - DNA, 261 bp, Zea mays
tgaaccctgccgtctacctacaactactttcatctagcacgctcgcggtgggcaatgcacctacgtacctacaacaacagttgctgcaacaaattgtaccagctctgactcagctagctgtggcaaaccctgctgcctacttacaacagttgcttccattcaaccaactggctgtgtcaaactctgctgcgtacctacaacagcgacaacagttacttaatccattggcagtggctaacccattggtcgctaccttcctgc

SEQ ID NO: 28364 - DNA, 260 bp, Zea mays
cagcaacaacaacagctacaacagtttctgccaacgctcagtcaactagccatggtgaaccctgccgcgtacgtacatcaacaacaactgctttcatctagctcgctcgctgtgggcaatgcacctacatacctgcaacaacaattgttgcaacagattgtaccagctctgactcaactagctgtggctaaccctgttgcctacttgcaacagctgcttccattcaaccaactgactctgtcgaactctgctgtgtacct

SEQ ID NO: 28365 - DNA, 253 bp, Zea mays
aaatggctaccaagatattatccctccttgcgcttcttgcgctttttgcgagcgcatcaaatgcgttcattatgccacaatgctcacttgctccaagttccattattacacagttcctgccaccagttacttcaatgggcttcgaatacccagctgtgcaagcctatatgctacaacaagcaattgcggcgagcgtcttacaataactaatttcccagttgcaacaacaatccttggcacatctaacaataca

SEQ ID NO: 28366 - DNA, 118 bp, Zea mays
ccgggccaagtatgtgtagctgcacgcttgtgctagtgtactgtcgtgtagtggtggccagtggcacgacctaatcagcgcatggactaattgcttgcgtgtgtagtcaagtaccgct

SEQ ID NO: 28367 - DNA, 140 bp, Zea mays
taatacgcaacagcattctaccaacaacccatcattggtggtgccctcttttagatttcttatgagttatagttcaataataaagttttttgtctgctgtttgtgcgttcccagaaataagaacgtacatttctagatta

SEQ ID NO: 28368 - DNA, 224 bp, Zea mays
ggacgtcagcctagcaattagctcatcgcctccagattggagaactcgacaccatgaacgtgctgatcgttgcccttgctctcctggcgctcgctgcgagtgccgcctccagtaccagtggcggctgtgagctgcacagacacccacgtttcatctagcgcctccgttctatatgctgcctccgttctatctgctgcggtacagctaccgcagtcatggcgata

SEQ ID NO: 28369 - DNA, 256 bp, Zea mays
cttacctttatcacccttgttcctccaacaatcatcagccctattacatcagttacctttggtgcatttattggcacaaaacatcagggcacaacaactacaacaacttgtgctagcaaaccttgctgcctactctcagcaacagcagtttcttccattcaaccaactagctgcattgaactctgcttcttatttgcacacaacaacaactaccattcagccagctacctgctgcctacccccagtaatttcttcc

SEQ ID NO: 28370 - DNA, 255 bp, Zea mays
ctacaatcatcagccctattacatcagttacctttggtgcatttattggcacaaaacatcagggtacaacaactacaacaacttgtgttagcaaaccttgctgcctactctcagcaacagcagtttcttccattcaaccaactagctgcattgagctctgcttcttatttgcaacaacaacaactaccattcagccagctacctgctgcctactcccagcaatttcttccattcaaccaactggcagcattgaac

SEQ ID NO: 28371 - DNA, 232 bp, Zea mays
cctccctccagttacttcaatgggcttcgaacacccagctgtgcaagcctataggctacaacaagcgcttgcggcgagcgtcttagagcaaccaattgcccaattacaacaacaatccttggcacatctaaccatacgaaccatcgtaacgcagcagcaacaagtattgagcaatgtagtcgtggtgaaccatatcgcctacttgcaacaacagctgcttggatccaaccca

SEQ ID NO: 28372 - DNA, 253 bp, Zea mays
caatcgccagccctatctttggtgcagtcattggtacaaaccatcagggcacaacagctgtagcaactcgtgctacctctgatcgactaagtagctctggcaaacctttctccgtactctcagcaacaacaatttcttcgattcaaccaactgtctacactgaacgctgctgcttatttgcagcaacaactattaccatttagccagctagctactgcgtactctcagcaacaacaagttcttccatttaacc

SEQ ID NO: 28373 - DNA, 248 bp, Zea mays
atgagaccaacaagcaacatagacagtggaatccagtagcaacaacagagtaacaatggcgaccaagatattttccctccttatgctccttgctctttctgcatgtgttgctaacgcgacaattttccctcaatgctcacaagctcctatagcttcccttcttcccccataccttccatcaatgatagcttcagtatgtgaaaacccagctcttcagccctataggctccaacaagcaatcgcagcaa

SEQ ID NO: 28374 - DNA, 254 bp, Zea mays
caccatcggtgtcttcggtcatgtgtagacccaattcttcaaccctagaggatccaacaggcactcgcagctcgcatcttacctttatcacccttgttcctccaacaatcatcagccctattacagcagttacctttggtgcatttattggcacaaaacatcagggctcaacaactacaacaacttgtgctagcacaccttgctgcctactctcagcaacagcagtttcttccattcaaccaactagctgcatt

SEQ ID NO: 28375 - DNA, 257 bp, Zea mays
cgcacgcaacatagaaagtagaatccattagcgacaatagagcaacaatggcgagcaagatattttccctccttatgctcgttgctctttctacatgtgttgctaacgcgacaattttccctcaatgttcacaagctcctatagcttcccttcttcccccatacattccatcaattatagcttcagtatgtgtaaacccagctcttcaaccatataggcttcaacaagcaatcgcagcaagcaacatacctttatcg

SEQ ID NO: 28376 - DNA, 254 bp, Zea mays
attttgagcattctgagacacaccaagcgatgtcagtagcaatgatataacaacaatggctaccatgatattagccctcgttgcgctcagcaccctttttgtgagtgcaacagatgcgttcattattgcacaatgctcacttgctcctagtgccattagtgcacagttcctcctaccagttacttcaatgggcttggtacacctagctgtgtatgcctacatgctagaacaagcgcttgcggcgagcgtgttac

SEQ ID NO: 28377 - DNA, 250 bp, Zea mays
attccctgaagcacagccttccccacacaagaacttcgctgacgaggttgccttcctgaatcgcttcttcggtggcctcaagtccggtggcaatgcttatgtgattggtgactctgcgaacccgggcagaagtggcacgtctactacgccgctgagcaccctgaggagcctgttgttactctagagatgtgcatgactgggctggacaagaagaaagcttctgtcttcttcaagaccactgctgatggtt

SEQ ID NO: 28378 - DNA, 247 bp, Zea mays
tagaaattgagaaatgtgaaaaattatctagtgagctaagcacttgccgtgagatgattgacaaccttaggaatgacaatgctagtttaaatgctaaggttgattcacatgtttgcaatgtttcaacttcaaatcctagagatgatcatgttgatttacttgctaggattgatgagttagatgcttccctagctagccttagaattgaaaatgagaaattgcttgttaaggctaaagattttgatgt

SEQ ID NO: 28379 - DNA, 250 bp, Zea mays
aaaaaatataggcccaaatgatcggctaattcatgtttatcacttcaagaaagatattaatcagactcagcagattcagaacttcggagaccctttcgttttggtcgttcatgaaggtgagactttagcagaagtcatgaagcgcatacagagtaaactgcaagtctctgctgatgaattttccaagtggaaatttgcatttatatcaatgaatcggccagactacctccaggattcagatgttgtacct

SEQ ID NO: 28380 - DNA, 251 bp, Zea mays
atagcagttacctttggtccatttggtggcacaaaacatcagggcacaacaactacaacaacttgtgctagcacaccttgctgcatactctcagcaacatcagtttcttccattcaaccaactggctgcattgaactctgctgcttatttgcaacaacaattaccattcagccagctagttgctgcctacccccagcaatttcttccattcaaccaactagcagcattgaactctgctgcttatttacagc

SEQ ID NO: 28381 - DNA, 266 bp, Zea mays
atccaatggaaatccacacagaaaggcatttcccagaaaagaagtagctgggaacttctgcagggagggtggtataggtccactcaggttattgttgctcaaatccaaatgtctcaacttggggaggcgaaggacagggatgggtccagaaagagagttgttctggagaagcaatgctgtcagttcagtgatgtcttgcaccttcgatggtatttctccattgaacgagttataggacaggtctaagaatgttagactggaagaaa

SEQ ID NO: 28382 - DNA, 265 bp, Zea mays
attttgagcattcagaaacacaccaagcgaagcacctagcaacaacctaacaacaatggctaccaagatattatccctccttgcgcttcttgcgctttttgcgagcgcaacaaatgcgtccattattccacaatgctcacttgctcctagttccattattccacagttcctcccaccagttacttcaatggccttcgaacacccagctgtgcaagcctataggctacaacaagcgattgcggcgagcgtcttacaacaaccaatt

SEQ ID NO: 28383 - DNA, 261 bp, Zea mays
ctgacaccattgacaatgtgaaggccaagatccaggacaaggagggcattcccccagaccagcagcgtctgatctttgcgggcaagcagctggaggatggccgcactctcgcggactacaacatccagaaggagagcacccttcaccttgttctccgcctcagaggtggtatgcagatctttgtaaagaccctgactggaaaaaccataaccctggaggttgagagctcggacaccatcgacaatgtgaaggcgaagatcc

SEQ ID NO: 28384 - DNA, 260 bp, Zea mays
ccaagcgaactacctagcaacgacttaacaacaatggctaccaagatattagccctccttgcgcttcttgccctttttgtgagcgcaacaaatgcgttcattattccacaatgctcacttgctcctagtgccattataccacagttcctccgaccagttacttcaatgggcttcgaacacctagctgtgcaagcctacaggctacaacaagcgcttgcggcgagcgtcttacaacaaccaattaaccaattgcaacaaca

SEQ ID NO: 28385 - DNA, 262 bp, Zea mays
agtgatggcccaaaaagttaccagatctggctgggtggaacaccaaaccagagtacgctagcagaatcatttatggacaaagtgaagcttgatgacatcgagaaggttttggaacctctctttacctattggaatggcacacgccaggtaggcgaatcttttggaagcttcacaaaccgaacaggattcgacaaattgaaagaggtagtgaataagtgggcagagtcaccatcagccgcatgaagatttcgctttcgttgga

SEQ ID NO: 28386 - DNA, 259 bp, Zea mays
gcgacatacggtgtggtcctgcagtccttcctgcagcagcagccgcaggcgagctcgcggcgctgatggcggcccaggtagcgcacagctgacggcgatgtgcggcctgcagctgcagcagccaggtccctgcccttgcaacgcagctgccggcggtgtctactactgaggaaactatgtactgtagtaataatgtaatggagccgctggctagctacctagctcgctagtttactcatttagcggcgatgagtaacgt

SEQ ID NO: 28387 - DNA, 257 bp, Zea mays
ggatcgtcgaacagaacagcatgaagatggtcatcgttctcgtcgtgtgcctggctctgtcagctgccagcgcctctgcaatgcagatgccctgcccctgcgcggggctgcagggcttgtacggcgctggcgcggcctgacgacgatgatgggcgccggcgggctgtacccctacgcggagtacctgaggcagccgcagtgcagcccgctggcggcggcgccctactacgccgggtgtgggcagacgagcgccatgt

SEQ ID NO: 28388 - DNA, 263 bp, Zea mays
tagatgatgatgcagcttgagcgtgccgctgccgccagcagcagcctgtacgagccagctctgatgcagcagcagcagcagctgctggcagcccagggtctcaaccccatggccatgatgatggcgcagaacatgccggccatgggtggactctaccagtaccagtaccagctgcccagctaccgcaccaacccctgtggcgtctccgctgccattccgccctactactgattcatgatatttgggaaatctcctctatccat

SEQ ID NO: 28389 - DNA, 264 bp, Zea mays
tcaacaagcaacatagaaagtggaatccagtagcaacaatagagcaacaatggcgaccaagatattttccctccttatgctccttgctctttctgcatgtgttgctaacgcgacaattttccctcaatgctcacaagctcctatagcttcccttcttcccccataccttccatcaatgatagcttcagtatgtgaaaacccagctcttcaaccctataggctccaacaagcaatcgcagcaagcaacatacctttatcaccctt

SEQ ID NO: 28390 - DNA, 261 bp, Zea mays
ctacatagaaagcacaatagtgtaccaacaatggcagccaaaatattttgcctccttatgctccttggtctttctgcaagtgctgctacggcgaccattttcccgcaatgctcgcaagttcctatagcttcccttcttcccccgtacctctcaccagcggtgtcttcggtatgtgaaaacccaattcttcaaccctacaggatccaacaggcaatcacagctggcatcttacctttatcacccttgttcctccaacaatca

SEQ ID NO: 28391 - DNA, 258 bp, Zea mays
caccaatggtcttgccgagcatgatgtcgcaaatgatgatgccacaatgtcactgcgacgccgtctcgcagattatgctgcaacagcagttaccattcatgttcaacccaatggccatgacgattccacccatgttcttacagcaaccctttgttggtgctgcattctagatagaaatatttgtgttgtatcgaataatgagttgacatgccatcgcgtgtgactcattattaacaatagaacaagtttcctcttatt

SEQ ID NO: 28392 - DNA, 261 bp, Zea mays
attttgagcattcagaaacacaccaagcgaactacactagcaacgacctaacaacaatggctaccaagatattagccctccttgcgcttcttgccctttttgtgagcgcaacaaatgcgttcattattccacaatgctcacttgctcctagtgccattattccacagttcctcccaccagttacttcaatgggcttcgaacacctagctgtgcaagcctacatgctacaacaagcgcttgcggcgagcgtcttacaacaac

SEQ ID NO: 28393 - DNA, 259 bp, Zea mays
gtcaactgtccctaggacagatattattttcttttgttcacccaacaatcctactggtgctgctgcatctcgggaccaactaaccaaattagtaaaatttgcaaaggacaacgggtccatcatagtctatgattctgcttatgcaatgtacatatcagatgacagcccaaagtctatctttgaaattcctggagcaaaggaggttgctattgagacagcctcattctcgaagtacgctgggttcacaggtgtccgtcta

SEQ ID NO: 28394 - DNA, 258 bp, Zea mays
acttggtctttctgcaagtgctgctacggcgaccattttcccgcaatgctcgcaagctcctatagcatcccttcttgcaacgtacctctcaccagcggtgtcttcggtatgtgaaaacccaattcttcaaccctacaggatccaacaggcaatcacagctggcatcttacctttatcacccttgttcctccaacaatcatcagcactgctaccttcttgacacaaccacagttgttgccgttctaccagcacgctgcg

SEQ ID NO: 28395 - DNA, 118 bp, Zea mays
atacaactgcaacaattgctgccattcaaccaacttgctttgacaaactcaacagtgttctaccaacaacccatcattggtggtgccctcttttagattgcttatgagttatagttca

SEQ ID NO: 28396 - DNA, 259 bp, Zea mays
cagctgcttgcatccaacccacttgctctggcgaacgtagctgcataccagcaacaacaacagctgcaacagtttatgccagtgctcagtcaactagccatggtgaaccctgccgtctacctacaactactttcatctagcccgctcgcggtgggcaatgcacctacgtacctacaacaacagttgctgcaacaaattgtaccagctctgactcagctagctgtggcaaaccctgctgcctacttacaacagttgcttc

SEQ ID NO: 28397 - DNA, 258 bp, Zea mays
ataactagcaacatagaaagcacaatagtgtaccaacaatggcagccaaaatattttgcctccttatgctccttggtctttctgcaagtgctgctacggcgaccattttcccacaatgctcacaagctcctatagcttcccttcttcccccgtacctctcaccagcggtgtcttcggtatgtgaaaacccaattcttcaaccctataggatccaacaggcaatcgcagctggcatcttacctttatcacccttgttcc

SEQ ID NO: 28398 - DNA, 258 bp, Zea mays
tgaaaacccaattcttcaaccctacaggatccaacaggcaatcgcagcaggcatcttacctttatcacccttgttcctccaacaaccgtcagccctattacagcagttacctttggtgcatttgttggcacaaaacatcaaggcacaacaactacaacaacttgtgctaggaaaccttgctgcctactctcagcaacagcagtttcttccattcaaccaactggctgcattgaactctgctgcttatttgcaacaaca

SEQ ID NO: 28399 - DNA, 260 bp, Zea mays
ataccacagttcctccgaccagttacttcaatgggcttcgaacacctagctgtgcaagcctacaagctacaacaagcgcttgcagcgagcgtcttacaacaaccaattaaccaattgcaacaacaatccttggcacatctaaccatacaaaccatcgcaacacaacagcaacaacagttcctaccagcactgagccaactagatgtggtgaaccctgtcgcctacttgcaacagcaggtgcttgcatccaacccacttgc

SEQ ID NO: 28400 - DNA, 259 bp, Zea mays
gcaattagctcatcgactccagattggagaactcgacaccatgaaggtgctgatcgttgcccttgctctcctggcgctcgctgcgagtccgcctccagtacaagcggcggctgtggctgccagacaccaccgtttcatctaccgcctccgttctatatgccgcctccgttctatctgccgccgcagcagcagccgcagccatggctataccccactcaaccaccgcagctaagcccgtgccagcagttcggatcctgcg

SEQ ID NO: 28401 - DNA, 260 bp, Zea mays
gaactctgctgcttatttgcaacaacaattaccattcagccagctagttgctgcctacccccagcaatttcttccattcaaccaactagcagcattgaactctgctgcttatttacagcagcaacaactactaccattcagccagctagctgatgtgagccctgctgccttcttgacacaacaacagttgttgccgttctacctgcacgctatgcctaacgctggcaccctcttacaactgcaacaattgctgccattca

SEQ ID NO: 28402 - DNA, 266 bp, Zea mays
gaggtgaggctggttggagtggaggcagctggccatggcgtagacaccgacaagcatgcggcgactttgacaaagggccaagtcggagttctccatggatccatgagctatttgctgcaggatgatgacggacaagttatcgaaccccactccatcagtgctgggctcgattaccctggcgttggacccgagcacagtttcttgaaggacattggacgtgccgaatacgatagtgtgactgaccaggaggcactggatgctttcaa

SEQ ID NO: 28403 - DNA, 256 bp, Zea mays
atctaaccctacaaaccattgcaacgcaacaacaacaacaacagtttctgccatcactgagccacctagccgtggtgaaccctgtcacctacttgcaacagcagctgcttgcatccaacccacttgctctggcgaacgtagctgcataccagcaacaacaacagctgcaacagtttatgccagtgctcagtcaactagccatggtgaaccctgccgtctacctacaactactttcatctagcccgctcgcggtggg

SEQ ID NO: 28404 - DNA, 253 bp, Zea mays
atttcttccattcaaccaactggcagcattgaactctgctgcttatttacaacagcaacagctaccagcattcagccagctagctgatgtgagccctgttgccttcttgacacaacaacagttgttgccgttctacctgcacgctgcgcctaacgctggcaccctcttacaactgcaacaattgctggcattcaaccgacttgctttgacagacccaacagcgttctaccaacaacccatcattggtggtgcc

SEQ ID NO: 28405 - DNA, 254 bp, Zea mays
attgctccaagttccattattacacagttcctcccaccagttacttcaatgggcttcgaacacccagctgtgcaagcctataggctacaacaagcaattgcggcgagcgtcttacaacaaccaatttcccagttgcaacaacaatccttggcacatctaacaatacaaaccatcgcaacgcaacagcaacaacaattcctaccagcactgagccacctagccatggtgaaccctgccgcctacttgcaacagca

SEQ ID NO: 28406 - DNA, 253 bp, Zea mays
attacctttatcacccttgttcctccaacaatcatcagccctactacagcagttacctttggtgcatttattggcacaaaacatcagggcacaacaactacaacaacttgtgctagcaaaccttgctgcctactctcagcaacaacagtttcttccattcaaccaactagctgcattgaactctgcttcttatttgcaacaacaacaactaccattcagccagctatctgctgcctacccccagcaatttctt

SEQ ID NO: 28407 - DNA, 252 bp, Zea mays
gtaaaaatatcagattttggtgtgagtgccattatatctagttcctcttcgcaacgagatacatttattggcacacgcaactacatggcgccagaaagaatcgatggaaagaaacatggttctatgagtgatatctggagtttgggactagtgatactggaatgtgcaaccggcatctttccatttcctccttgtgaaagcttctacgaacttctcgtggctgttgttgatcaaccgccaccttctgcgccg

SEQ ID NO: 28408 - DNA, 253 bp, Zea mays
attttataatgcaaacttgggaataaccaagaagccaataccagatttcagcttctatgaccgttttgctccaatttatacacaacctcgacacctgccaccttcaaaggttcttgatgctgatgtgacagacagtgttattggtgaaggatgtgttattaaaaactgcaagataaaccattctgtagttggactccgatcttgcatatctgaaggtgctatcatagaggacagtttactaatgggtgcggac

SEQ ID NO: 28409 - DNA, 252 bp, Zea mays
gccagcagttcggatcctgcggcgtcggcagcgtcggcagcccgttcctgggccagtgcgtcgagttcctgaggcaccagtgcagcccggcggcgacgccctacggctcgccacagtgccaggcgctgcagcagcagtgctgccaccagatcaggcaggtggagccgctgcaccggtaccaggcgacatacggtgtggtcctgcagtccttcctgcagcagcagccgcagggcgagctcgcggcgctgatgg

SEQ ID NO: 28410 - DNA, 254 bp, Zea mays
ccttgttcctccaacaatcatcagccctattacatcagttacctttggtgcatttattggcacaaaacatcagggcacaacaactacaacaacttgtgctagcaaaccttgctgcctactctcagcaacagcagtttcttccattcaaccaactagctgcattgaactctgcttcttatttgcaacaacaacaactaccattcagccagctacctgctgcctacccccagcaatttcttccattcaaccaactg

SEQ ID NO: 28411 - DNA, 253 bp, Zea mays
gtggaatacagtagcaaaaatagagcaacaatggcggccaagatattttccatccttatgctccttgctctttctgcatgtgttgctaacgcgaccatttttcctcaatactcacaagctcctatagctgcccttcttcccccataccttccatcaatgaccgctttagtatgtgaaaacccagcccttcaaccctacaggatccagcaagcaatcgcaacaagcaacttacctttatcacacctgttctttc

SEQ ID NO: 28412 - DNA, 254 bp, Zea mays
ggcaagcgcgagatcgccgccttcttcgcgcacgccacgcacgagaccgggcatttctgctacatcagcgagatcaacaagagcaacgcctactgcgacccgaccaagaggcagtggccgtgcgccgcggggcagaagtactacgggcgcggcccgctgcagatctcgtggaactacaactacgggcccgcagggagggccatcggcttcgacgggctcggggaccccggcagggtggcgcgggacaccgtggt

SEQ ID NO: 28413 - DNA, 257 bp, Zea mays
atcaccaacggtgtcttcggtatgtgaaaacccaattcttcaaccctacaggatccaacaggcaatcgcagctggcatcttacctttatcacccttgttcctccaacaatcatcagccctattacagcagttacctttggtgcatttattggcacaaaacatcagggcacaacaactacaacaacttgtgctagcaaaccttgctgcctactctcagcaacagcagtttcttccattcaaccaactagctgcattga

SEQ ID NO: 28414 - DNA, 219 bp, Zea mays
gtcatcgatctcgtttcaaatccatccatcctcgtttcctccgtcccgcagcatctcaaccccatggccaagatcaagatcgggatcaatgggttcggcaggatcggaaggctggtggccagggtggccctgcagagtgacgatgtcgagctcgtcgccgtgaacgactccttcatcagcaccgactacatgacctacatgttccagtacgacactgtg

SEQ ID NO: 28415 - DNA, 260 bp, Zea mays
ttgcaaaccagcaacaacaacagctacaacagtttctgccaacgctcagtcaactagccatggtgaaccctgccgcctacgtacaacaacaacaactgctttcatctagcccgctcgctgtgggcaatgcacctacatacctgcaacaacaattgttgcaacagattgtaccagctctgactcaactagctgtggcaaaccctgttgcctacttgcaacagctgcttccattcaaccaactgactctgtcgaactctgct

SEQ ID NO: 28416 - DNA, 255 bp, Zea mays
accagatgatccctgtccatatcttctttccatatggaccccaggtgaaactgcacaatcgatcgatgcccccaagacattctgtgattcaggggagacgggtagactatgtggaagttcaacatgctttagttgcaacaatatacgagaaatgcaggctcagaaagtcagaggaacacttttgataccatgccgaacagcaatgagaggaagcttcccacttaatgggacgtattttcaagttaatgaggtatt

SEQ ID NO: 28417 - DNA, 249 bp, Zea mays
caactgtctacactgaaccctgctgcttatttgcagcaacaactattaccatttagccagctagctactgcctactctcagcaacaacaacttcttccatttaaccaattggccgcactgaaccccgctgcttatttgcagcagcaaatactactaccatttagccagctagctgcagcaaaccgtgcttccttcttgacacagcaacagttgctgcctttctaccagcagtttgcggctaaccccgca

SEQ ID NO: 28418 - DNA, 249 bp, Zea mays
gggcgccggcgggctgtacccctacgcggagtacctgaggcagccgcagtgcagcccgctggcggcggcgccctactacgccgggtgtgggcagacgagcgccatgtaccagccgctccggcaacagtgctgccagcagcagatgaggatgatggacgtgcagtccgtcgcgcagagctgcagatgatgatgcagcttgagcgtgccgctgccgccagcagcagcctgtacgagccagctctgatgcag

SEQ ID NO: 28419 - DNA, 249 bp, Zea mays
  unsure (1)..(249): unsure at all n locations
gcattcagaaacacaccaagcgaagtnactagcaacgacctaacaacaatggctaccaagatattagccctccttgcgcttcttgccctttttgtgagcgcaacaaatgcgttcattattccacaatgctcacttgctcctagtgccattattccacagttcctcccaccagttacttcaatgggcttcgaacacctagctgtgcaagccaacatgcaacaacaagcgcttgcggcgagcgtcttacaa

SEQ ID NO: 28420 - DNA, 250 bp, Zea mays
tatggcgaccaagatattttccctccttatgctccttgctctttctacatgtgttgctaacgcgacaattttccctcaatgctcacaagctcctatagcttcccttcttcccccataccttccatcaattatagcttcagtatgtgaaaacccagctcttcaaccatataggcttcaacaagcaatcgcagcaagcaacatacctttatcgcccttgttgtttcaacaatcaccagccctatctttggtg

SEQ ID NO: 28421 - DNA, 250 bp, Zea mays
attcagaaacacaccaagcgaagctacctagcaacgacttaacaacaatggctaccaagatattagccctccttgcgcttcttgccctttttgtgagcgcaacaaatgcgttcattattccacaatgctcacttgctcctagtgccattataccacagttcctccgaccagttacttcaatgggcttcgaacacctagctgtgcaagcctacaggctacaacaagcgcttgcggcgagcgtcttacaaca

SEQ ID NO: 28422 - DNA, 252 bp, Zea mays
tatcaactaccattcagccagctacctgttgcctacttgcaacagctgcttccattcaaccaactgactatgtcgaactctgctgcgtacctacaacagcgacaacagttacttaatccactagcagtggctaacccattggtcgctgccttcctacagcagcaacaattgctgccatacaaccagttctctttgataaaccctgtcttgtcgaggcagcaacccatcgttggaggtgccatcttttagatt

SEQ ID NO: 28423 - DNA, 248 bp, Zea mays
ccaactagcaacatagaaagcacaatagtgtaccaacaatggcagccaaaatattttgcctccttatgctccttggtctttctgcaagtgctgctactgcgaccattttcccgcaatgctcgcaagctcctatagcttcccttcttcccccgtacctctcaccagcggtgtcttcggtatgtgaaaacccaattcttcaaccctacaggatccaacaggcaatcacagctggcatcttacctttatca

SEQ ID NO: 28424 - DNA, 253 bp, Zea mays
tgagaccaactagcaacatagaaagcacaatagtgtaccaacaatggcagccaaaatattttgcctccttatgctccttggtctttctgcaagtgctgctacggcgaccattttcccacaatgctcacaagctcctatagcttcccttcttcccccgtacctctcaccagcggtgtcttcggtatgtgaaaacccaattcttcaaccctataggatccaacaggcaatcgcagctggcatcttacctttatca

SEQ ID NO: 28425 - DNA, 257 bp, Zea mays
tatcattgtaaggccgaagtgcaagcgaaagaccccatataggggcatccgccgacgcccttggggaaaatgggctgctgaaatccgcgatcctacaaagggtgttcgtgtttggataggcacgtataaaacaccagaagatgcagctagagcatatgacgctgaggcccgcaagattaggggcaataaagcaaaggtgaatttccctaatgaaccaccaaacatggtgagcaatgcaccaaaactaattgttactg

SEQ ID NO: 28426 - DNA, 198 bp, Zea mays
cagcaaagcggcagtgcgtagagaggatcgtcgaacagaacagcatgaagatggtcatcgttctcgtcgtgtgcctggctctgtcagctgccagcgcctctggaatgcagatgccctgcccctgcgcggggctgcagggcttgtaaggcgctggcgccggcctgacgacgatgatgggcgccggcgggctgtacccct

SEQ ID NO: 28427 - DNA, 156 bp, Zea mays
cagaaacacacctagcgaagcgactagcaacgacctaacaacaatgggtaaccaggtattaaccctccttggggctccttccccttttgggagcggcaaaaaagcggtcaataattcaacaatgtcaattggtcccagtggcaataattcaaaggt

SEQ ID NO: 28428 - DNA, 251 bp, Zea mays
gttcctcccaccagttacttcaatggccttcgaacacccagctgtgcaagcctataagcaacaacaagcgattgctggcgagcgtcttacaacaaccaattgcccaatgcaacaacaatccttggcacatctaacaatacaaaccatcgcaacgcaacagcaacaacaggtactaccagcactgagccacctagccatggtgaaccctgtcgcctacttgcaacagcagctgcttgcatccaacccacttg

SEQ ID NO: 28429 - DNA, 227 bp, Zea mays
aagaaacacaccaagcgaagacatctagcaacaacctaacaacaatggctaccaagatattatccctccttgcgcttcttgcgctttttgcgagcgcaacacatgcgttcattattccacaatgctcacttgctccaagttccattattacacagttcctcccaccagttacttcaatggggttcgacacaccagctgtgcaagcctatagggtactacaagcaatt

SEQ ID NO: 28430 - DNA, 248 bp, Zea mays
agcagcaacaactactaccattcagccagctagctggtgtgagccctgctaccttcttgatacaaccacagttgttgccgttctaccagcacgctgcgcctaacgctggcaccctcttacaactgcaacaattgctgccattcaaccaacttgctttgacaaacccagcagcgttctaccaacaacccatcattggtggtgccctcttttagatttcttatgagttatagttcaataataaagttttt

SEQ ID NO: 28431 - DNA, 242 bp, Zea mays
ctcaagaaggcctaccgcaaggctgctatcaagaaccaccccgacaagggcggtgaccccgagaagttcaaggagctcgcacaagcctatgaggttttgagtgatccagagaaacgtgagatttatgatcagtatggtgaagatgcccttaaggaaggaatgggcggtggaggatcccatgttgatccatttgacatcttctcatcattttttggaccctcttttggaggaggtggtgggag

SEQ ID NO: 28432 - DNA, 246 bp, Zea mays
gatcgacaccatgagggtgttgctcgttgccctcgctctcctggctctcgctgcgagcgccacctccacgcatacaagcagcggctgcagctgccagccaccgccgccggttcatctaccgccgccggtgcatctgccacctccggttcacctgccacctccggtgcatctcccaccgccggtccacctgccgccgccggtccacctgccaccgccggtccatgtgccgccgccggttcatctgcc

SEQ ID NO: 28433 - DNA, 241 bp, Zea mays
ggtgaaccctgccgtctacctacaactactttcatctagcccgctcgcggtgggcaatgcacctacgtacctacaacaacagttgctgcaacaaattgtaccagctctgactcagctagctgtggcaaaccctgctgcctacttacaacagttgcttccattcaaccaactggctgtgtcaaactctgctgcgtacctacaacagcgacaacagttacttaatccattggcagtggctaac

SEQ ID NO: 28434 - DNA, 244 bp, Zea mays
ggtggattggctcactgaaaaaatgcgtacaaataacttcaccgtatcagctatgcatggtgacatgccccaacaagaaagggatgccattatgggtgagttcaggtctggcgcaactcgtgtgctaataactacagatgtttgggctcgaggactggacgttcagcaggtttcacttgtcataaattatgatctcccaaataatcgtgagctttacatccatcgcattggtcgttctggtcgt

SEQ ID NO: 28435 - DNA, 247 bp, Zea mays
cgtggtttaactgccagaagctgaagctaccggaaggctgtggatacgaattccagatgcagtatggatcaattggctggtcagtgggcgcaactctaggatacgcacaggctgccaaggataaacgtgtcattgcctgcattggagacggcagctttcaggtgacggcacaagaagtgtcaacgatgctccggtgggggcacaacagcatcatcttcctgataaacaatggagggtacacaatcga

SEQ ID NO: 28436 - DNA, 248 bp, Zea mays
gatcttgaaaggtgatgatgtggacttaatgatcattgctagaggaacaccgggattctctggtgcagaccttgctaacttggtaaatgttgctgctcttaaggctgccatggatggtgcaaaagctgtcacaatggatgatcttgagtatgcaaaggaccgaatcatgatgggtagtgagcggaagtcggcagttatctctgacgaatgcaggaagctgacagcataccatgagggagggcatgccc

SEQ ID NO: 28437 - DNA, 251 bp, Zea mays
gtcaaggatgccatctcccagattgttggggatgccaaggagaagaataggaagttcactgagactgtggaacttcagattggtctgaagaattatgatccacagaaggacaagcgtttcagtggctctgttaagttgccccatatccctcgtcccaagatgaaggtgtgcatgcttggtgatgcccagcatgttgaggaggccgagaagatgggacttgactacatggatgttgaggctctcaagaaaat

SEQ ID NO: 28438 - DNA, 253 bp, Zea mays
ttcagaaacacaccaagcgaagacaattagcaacaacctaacaacaatggctaccaagatattatccctccttgcgcttcctgcgctttttgcgagcgcaacaaatgcgttcattattccacaatgctcacttgctccaagttccattattacacagttcctcccaccagttacttcaatgggcttcgaacacccagctgtgcaagcctataggctacaacaagcaattgcggcgagcgtcttacgacaacca

SEQ ID NO: 28439 - DNA, 244 bp, Zea mays
gccgccggacttcgtgctgtgcatcggcgacgaccggtcggacgaggacatgttcgagagcatcgtgtgcccggcctccaacagcggcgtgaagctgccggccagcagcgaggtgttcgcgtgcacggtgggcaagaagccgagcatggccaggtactacctggacgacacggtggacgtggtcaagatgctggacggcctggccagcgcgccgtcgcagcagcggcccaggccggcggtgcag

SEQ ID NO: 28440 - DNA, 242 bp, Zea mays
cagaccattagctttatctactccagagcgcagaagaacccgatcgacaccatgagggtgttgctcgttgccctcgctctcctggctctcgctgcgagcgccacctccacgcatacaagcagcggctgcagctgccagccaccgccgccggttcatctaccgccgccggtgcatctgccacctccggttcacctgccacctccggtgcatctcccaccgccggtccacctgccgccgccggt

SEQ ID NO: 28441 - DNA, 238 bp, Zea mays
ggatgcgctgcaccggtaccaggcgacatacggtgtggtcctgcagtccttcctgcagcagcagccgcatggcgagctcgcggcgctgatggcggctcaggtagcgcagagctgacggcgatgtgctgcctgcagctgcagcagccaggtccctgcccttgcaacgcagctgccggcggtgtctactactgaggacactatgtactgtagtaataatgtaatggagccgctgactagc

SEQ ID NO: 28442 - DNA, 234 bp, Zea mays
gccgaactttatgatgcctatggttcagcagggacagcaaccgcaacgtcctgctggtaggcgtgctgggtctggtggaatgcagcagcccatgccaatgggtagtcagcaacagatattcgctagaggtggtcgtggctaccgctatgctactggacgtggaatgcctgatactggcatgcataatgttggtgctgtgatgccatctccatatgagatgggagggatggaatg

SEQ ID NO: 28443 - DNA, 227 bp, Zea mays
cgctggtacagggcacccgagctgctgctctgctgcgacaactacggcacgtccattgacgtctggtccgtggggtgcatattcgcggactgcttggccgcaagccgatcttcccaggaaccgagtgcctgaaccagctcaagctcatcgtcaacgtcctcggcaccatgggcgaggccgacctcgcgttcatcgacaacccgaacgcccgcaagtacatcaagtcc

SEQ ID NO: 28444 - DNA, 238 bp, Zea mays
atcagacgccagtgatgacatggttgaagctgaacccgaggaggaaaatgagcccaccctaaacaccaagcctgattaccctcctctccctgaagaacctacaggaagcagggaccttctctgcagggttgcgattcggctaccgaacaaccggaggatccaaagaaacttccttcacacagatcctatcaagctcttgtggtcattctgcgctcctcaggtcgaggacggggagagg

SEQ ID NO: 28445 - DNA, 99 bp, Zea mays
cagaccattagctttatctactccagagcgcagaagaacccgatcgacaccatgagggtgttgctcgttgccctcggtctcctgactctcgctgcgagc

SEQ ID NO: 28446 - DNA, 241 bp, Zea mays
gcacaaaacatcagggcacaacaactacaacaacttgtgctagcaaaccttgctgcctactctcagcaacagcagtttcttccattcaaccaactaggttcattgaactctgcttcttatttgcaacaacaacaactaccattcagccagctacctgctgcctacccccagcaatttcttccattcaaccaactagcagcattgaactctcctgcttatttacagcagcaacaactactac

SEQ ID NO: 28447 - DNA, 246 bp, Zea mays
attattgagaccaacaagcaacatagacagtggaatacagtagcaacaatagagcaacaatggcggcccagatattttccatccttaagctccttgctctttctgcatgtgttcgtaacgcgaccatttttcctcaatactcacaagctcctatagctgcgcttcttcccccataccttccatcaatgaccgcttcagtatgtgtaaacccagcccatcaaccctacaggctcctacaagcaatcg

SEQ ID NO: 28448 - DNA, 330 bp, Zea mays
aagcaacatagacagtggaatacagtagcaacaatagagcaacaatggcggccaagatattttccatccttatgctccttgctctttctgcatgtgttgctaacgcgaccatttttcctcaatactcacaagctcctatagctgcccttcttcccccataccttccatcaatgaccgcttcagtttgtgaaaacccagcccttcaaccctacaggctccaacaagcaatcgcaacaagcaacttacctttatcacccctgttctttcaacaatcgccagccctatctttggtgcagtcattggtacaaaccatcagggcacaacagctgc

SEQ ID NO: 28449 - DNA, 208 bp, Zea mays
  unsure (1)..(208): unsure at all n locations
atcaattatagcttcagtatgtgaanacccagctcttcaaccatataggcgtcaacaagcaatcgcagcaagcaacatacctttatcgctcttgttgtttcaacaatcaccagccctatctttggtgcagtcattggtacaaaccatcagggcacaacagctgcagcaactcgtgctacctgtgatcaaccaagtagctctggcaaac

SEQ ID NO: 28450 - DNA, 335 bp, Zea mays
cgacacaagacagttttatattgggactcgatcaacttggtgtttgggaaagatcatgcaaccggtgaagcggcaaagaccccagctgatggtgcgagagatatgagtaatgtagagggaaccggtaaagagcttacttcatcaacaacctcaggaagcttgaagaggcaacgttccagtgattccttcacctcaatgatggcggagaaattagacaagttcactgaagctattagggatgaagcaccaaaagggccgacatcaaaagagatttttagcacattggaggagatagatgggttagatgaagacacatttttagacttgtttgatat

SEQ ID NO: 28451 - DNA, 314 bp, Zea mays
ctctaaccatacaaaccatcgcaacgcaacagcaacaacaatttctaccagcactgagccaactagctgtggtgaaccctgtcgcctacttgcaacagcagttgcttgcatccaacccacttgctctggcaaacatagttgcataccaacaacaacaacaattgcaacagtttctaccagcgctcagtcaactagccatggtgaaccctgccgcctacctacaacagcaacaactgatttcatctagccctctcgctgtggttaatgcacctacatacctgcaacaacagttgctgcaacagatttgtacaact

SEQ ID NO: 28452 - DNA, 332 bp, Zea mays
cagatgaggatgatggacgtgcagtccgtcgcgcacagctgcagatgatgatgcagcttgagcgtgccgctgccgccagcagcagcctgtacgagccagctctgatgcagcagcagcagcagctgcggcagcccagggtctcaaccccatggccatgatgatggcgcagaacatgccggccatgggtggactctaccagtaccagtatcagctgcccagctaccgcaccaacccctgtggcgtctccgctgccattccgccctactactgattcatgatatttgggaaatctcctctatccatccctctctatctatatatgtaataatgca

SEQ ID NO: 28453 - DNA, 336 bp, Zea mays
  unsure (1)..(336): unsure at all n locations
agtntcttccattcaaccaactaggttcattgaactctgcttcttatttgcaacaacaacaactaccattcagccagctacctgctgcctacccccagcaatttcttccattcaaccaactagcagcattgaactctcctgcttatttacagcagcaacaactactaccattcagccagctagctggtgtgagccctgctaccttcttgacacaaccacagttgttgccgtntctacagcacgttgcgcctaacgctggcaccctcttacaactgcaacaattgctgccattcatacaacttgctttgacaaacccagcagtgntctaccaacaac

SEQ ID NO: 28454 - DNA, 206 bp, Zea mays
  unsure (1)..(206): unsure at all n locations
agcanaatacatagtgaagtacactagcaacatcttagcaccaatgggagccaagattttttccctccttgccctccttgctctttcagcaagcgctgctacctctactattattccacaatgctcacaacaatacctctctccggtgacagccgcgggatttcaacacccaactatacaatcctacatgctacatgagggcatcg

SEQ ID NO: 28455 - DNA, 335 bp, Zea mays
atagacagcacaatagtgtaccaacaatggcagccaaaatattttgcctccttatgctccttggtctttctgcaagtgctgctacggcgaccattttcccgcaatgctcgcaagctcctatagcttcccttcttcccccgtacctctcaccagcggtgtcttcggtatgtgaaaacccaattcttcaaccctacaggatccaacaggcaatcacagctggcatcttacctttatcacccttgttcctccaacaatcatcagccctactacatcagttacctttggtgcatttattggcacaagacatcagggcacaacaactacgacaacttgtg

SEQ ID NO: 28456 - DNA, 334 bp, Zea mays
cggcctttcctgcgcagaaatggcttcttaaaagaattgacaagttaagaagaagcttcctttggaaagtcagaactttggttctttctccccgacaccagcaccctttagtaaagggacgccaccagcgatttcagcagcaggatctaagaaaaatgacattgatgacgacaatgacgtcgaggtctacatgagtgccacccacgatgaagcaagtgcttggttgaagcattctaacgacccaattgatggctatgggctatggcaagaagaatgataaattctaggatcaagttacagatgacttcaacagcaccagaccagttgaccacaa

SEQ ID NO: 28457 - DNA, 334 bp, Zea mays
gtaaactcagctcttcagccctataggctccaacaagcaatcgcagcaagcaacatacctttatcacccttgttgtttcaacaatcgccagccctatctttggtgcagtcattggtacaaaccatcagggcacagcagctgcagcaactcgtgctacctgtgatcaaccaagtagctctggcaaacctttctccctactctcagcaacaacaatttcttccattcaaccaactgtctacactgaaccctgctgcttatttgcagcaacaactattaccattcagccagctagctactgcctactctcagcaacaacaacttcttccatttaacc

SEQ ID NO: 28458 - DNA, 200 bp, Zea mays
tctacctgctcaacccgtccgtgctcggccgcatcgagctgaagccgacgtccatcgagaaggaggtgttcccgcgcgtcgggcggacggggccctcttcgccatggttctcccgggtttctggatggacatcgggcagccgagggactacatcacgggcctgcgtctgtacctggactcgctgcggaagaaggcgcccg

SEQ ID NO: 28459 - DNA, 334 bp, Zea mays
cggcaatcacagctggcatcttacctttatcacccttgttcctccaacaatcatcagccctattacatcagttacctttggtgcatttattggcacaaaacatcagggcacaacaactacaacaacttgtgctagcaaaccttgctgcctactctcagcaacagcagtttcttccattcaaccaactagctgcattgaactctgcttcttatttgcaacaacaacaactaccattcagccagctacctgctgcctacccccagcaatttcttccattcaaccaactggcagcattgaactctcctgcttatttacagcagcaacaactactacc

SEQ ID NO: 28460 - DNA, 205 bp, Zea mays
agcaacatagttagcacaatagtgtaccaacaatggcagccagaatattttgcctccttatgctccttggtctttctgcaagtgctgctacggcgatcattttcccgcaatgctcgcaagctcctatagcttcacttcttctcccgtacctctcaccagcggtgtcttcggtatgtgaaaacccaattcttcaaccctacaggat

SEQ ID NO: 28461 - DNA, 204 bp, Zea mays
tgatggcgctgcaatggatgatcctgccaccgccggtccatgtgccgccgccggttcatctgccgccgccaccatgccactaccctactcaaccgccacggcctcagcctcatccccagccacacccatgcccgtgccaacagccgcatccaagcccgtgccagctgcagggaacctgcggcgttggcagcaccccgatcctgg

SEQ ID NO: 28462 - DNA, 323 bp, Zea mays
gagatggctaagatcgccgcagccgcggacgcgcgggctgtgcttcgcggccctggtggccgtggccgtctgccaaggcgatgtcgagcggcagaggctcagggacctgcagtgctggcaggaggtccaggagagcccgctcgacgcgtgccgccaggtcctcgaccggcagctaaccggcggcggcgtcggcggcccgttccggtggggcaccgggctccggatgcggtgctgccagcagctccaggacgtgagccgcgagtgccgctgcgccgccatccggagcatggtcaggggctagcgagaggcgatgcgcctctgga

SEQ ID NO: 28463 - DNA, 177 bp, Zea mays
agcagccgcccggccgacgcgccgcggcgggccgcctcgaagctcccttcccaacgggcggcgtgctgaatcctttgcagacgacataaaacgcgacggggcattgtaagtggcagagtggccttgctgccacgatccactgagatccagccccgcgtcgcacggattcgtcctttt

SEQ ID NO: 28464 - DNA, 325 bp, Zea mays
tagcccaagttccattattacacagttcctcccaccagttacttcaatgggcttcgaacacccagctgtgcaagcctataggctacaacaagcaattgcggcgagcgtcttacaacaaccaatttcccagttgcaacaacaatccttggcacatctaacaatacaaaccatcgcaacgcaacagcaacaacaattcctaccagcactgagccacctagccatggtgaaccctgccgcctacttgcaacagcagttgcttgcatcaaacccacttgctctggcaaacgtattgcaaaccagcacaacaacactgcaaagtttctgc

SEQ ID NO: 28465 - DNA, 326 bp, Zea mays
  unsure (1)..(326): unsure at all n locations
aggaattattcatgaanaccagacatacactaaatcaggcgaagattcaatagcaattgttcttaaggcaggaatggatatcaactgtggttctttcctagttcggcatactaagtcagcaattgagaagggaaaaattcaagaagaagatatcgaccgtgccctttttaatctattctcggttcagttgcgtcttggaatatttgataagcccagcaacaaccaatggttctctcaactagggcccaacagtgtgtgcacgaaagagcatagagagcttgcagcagaagctgtaaggcagggtgctgtccttctgaagaatgacc

SEQ ID NO: 28466 - DNA, 201 bp, Zea mays
agaccaactagcaacatagaaagcactatagtgtaccaacaatggcagccagaatattctgcctgcttatgctccttggtctttctgcaagtgctgctacggcgaccattttcccgtaatgctcgcaagctcctatagcgtcccttcttccgccgtacctctcaccagcggtgtcttcggtatgcgaaaacccaattcttc

SEQ ID NO: 28467 - DNA, 301 bp, Zea mays
tgtggcatctcactggagagtttgagaagaaatatgaaccaaccattggtgtggaagttcatccgttggatttcaccactaactgtggtaagatcaggttctactgctgggataccgcaggcaagagaagtttggtggcctcagggatggatactatatccatggccagtgtgcgatcatcatgtttgatgtaacctcaaggcttacttacaagaatgttcctacgttgcatagggacctgtgcacggtctgtgaaaacatccccattgtcctctgcggtaataaggttgatgtgaagaac

SEQ ID NO: 28468 - DNA, 306 bp, Zea mays
tcactggctaccaagcttccaaggatgacttggctgtctacacttcgttttcgtctgctccctcgtccaagtatatcaacgtagcaaggtggtttaatcacattgatgcgctcgtgaggctgagcggaattactgcagagggccaaggtgtgaaggttgaatcgtcagcagttccttcagccccaactccagatgttgctgaagcacaggccccagttgctgaggaggacgacgacgatgatgttgacctttttggtgaggagaccgaagatgagaagaaggctgctgaagagcgtgctgcagctg

SEQ ID NO: 28469 - DNA, 325 bp, Zea mays
cactagcaacgacctaacaacaatggctaccaagatattagccctccttgcgcttcttgccctttttgtgagcgcaacaaatgcgttcattattccacaatgctcacttgctcctagtgccattattccacagttcctcccaccagttacttcaatgggcttcgaacacctagctgtgcaagccaacatgcaacaacaagcgcttgcggcgagcgtcttacaacaaccaattgcccaattgcaacaacaatccttgccacatctaacaatacaagccatcacaacgcaacagcaacaacagttcctaccagcactgagccactag

SEQ ID NO: 28470 - DNA, 329 bp, Zea mays
catttgagcattcagaaacacaccaagcgaagctactagcaacgacctaacaacaatggctaccaagatattagccctccttgcgcttcttgccctttttgtgagcgcaacaaatgcgctcattattccacaatgctcacttgctcctagtgccattattccacagttcctcccaccagttacttcaatgggcttcgaacacctagctgtgcaagccaacatgcaacaacaagcgcttgcggcgagcgtcttacaacaaccaattgcccaattgcaacaacaatccttgccacatctaacaatacaagccatcacaacgcaacagcaac

SEQ ID NO: 28471 - DNA, 96 bp, Zea mays
ttcagaaacacacctagcgaacgcactagcaacgacctaacaacaatggctaccaagatattatcgctctttgcggttcttgccctttttgtgagc

SEQ ID NO: 28472 - DNA, 193 bp, Zea mays
tccagcatatcctgcgtttgctgaacaccaacgtggatgggaagcagaagatcatgttcgccatgacctcaatcaagggtgtcgggctgcgcttctccaacatcgtctgcaagaaggccgacatcgacatgaacaagagggccggcgagctgacgcctgatgagctggagcgcctgatgacggtcgtggccaa

SEQ ID NO: 28473 - DNA, 321 bp, Zea mays
gcagatgccctgcccctgcgcggggctgcagggcttgtacggcgctggcgccggcctgacgacgatgatgggcgccggcgggctgtacccctacgcggagtacctgaggcagccgcagtgcagcccgctggcggcggcgccctactacgccgggtgtgggcagacgagcgccatgtaccagccgctccggcaacagtgctgccagcagcagatgaggatgatggacgtgcagtccgtcgcgcacagctgcagatgatgatgcagcttgagcgtgccgctgccgccagcagcagcctgtacgagccagctctgatgcagcag

SEQ ID NO: 28474 - DNA, 185 bp, Zea mays
gcaacatagaaagcacaatagtgtaccaacaatggcagccacaatattttgcctccttatgctccttggtctttctgcaagtgctgctacggcgaccattttcccgcaatgctcgcaagctcctatagcttcccttcttcccccgtacctctcaccagcggtgtcttcggtatgtgaaaacccaa

SEQ ID NO: 28475 - DNA, 194 bp, Zea mays
cagactacaaggtgcagctataactactatagcagtagctcaaatctaaaaaattgtcatgaattcctaaggcagcagtgcagccctttggtaatgccttttctccaatcacgtttgatacaaccaagtagctgccaggtattgcagcaacaatgttgtcatgatcttaggcagattgagccacaatacattca

SEQ ID NO: 28476 - DNA, 193 bp, Zea mays
cgtttgcggctaaccccgcaaccctcttacaactacaacaattgttgccctttgtccaacttgctttgacagaccgagcggcctcctaccaacaacacatcattggtggtgccctcttttagattgcttattagttgtaattcaataataaagttttttggatgatgtatgtggccaaccagaaataagaagt

SEQ ID NO: 28477 - DNA, 320 bp, Zea mays
gatgaaggccacaaggatgaaatagtggcaattattaaggggatggggttcaaaaatgaagtttcaaataaatctattgttgagcccactcttgaatttgcaattgtacaagatgcagatcgcttggatgcaattggggcaattggtattgcaagatgttttacatatggtggtagcaagaacagcgcattacatgatcctagaattctgccacgtgatagcttgtcgaaagaaaagtacatgtccaaggaagagaagcagacatcaatcaatcattttcatgagaagctttttaaactgaaggacatgatgaagacaga

SEQ ID NO: 28478 - DNA, 179 bp, Zea mays
agctcatcgactccagattggagaactcgacaccatgaaggtgctgatcgttgcccttgctctcctggcgctcgctgcgagcgccgcctccagtacaagcggcggctgtggctgccagacaccaccgtttcatctaccgcctccgttctatatgccgcctccgttctatctgccgccgc

SEQ ID NO: 28479 - DNA, 261 bp, Zea mays
caaaacacaccaagcgaagctactagcaacgacctaacaccaatggctaccaagatattagccctccttgcgcttcttgcccttttagtgagcgcaacaaatgcgttcattattccacagtgctcacttgctcctagtgccattattccacagttcctcccaccagttacttcaatgggcttcgaacatccagccgtgcaagcctacaggctacaactagcgcttgcggcgagcgccttacaacaaccaattgcccaattg

SEQ ID NO: 28480 - DNA, 255 bp, Zea mays
ctcctatagcttcccttcttcccccataccttccatcaattatagcttcaatatgtgaaaacccagctcttcaaccatataggcttcaacaagcaatcgcagcaagcaacatacctttatcgcccttgttgtttcaacaatcgccagccctatctttggtgcagtcattggtacaaaccatcagggcacaacagctgcagcaactcgtgctacctctgatcaaccaagtagctctggcaaacctttctccctact

SEQ ID NO: 28481 - DNA, 251 bp, Zea mays
acagtttctaccagcgctcagtcaactagccatggtgaaccctatcgcctacctacaacagcaacaacttctttcatctagcccgctcgctatgggcaatgcacctacatacctgcaacaacagttgttgcaacaacagttgctgcaacaaattgtaccagctcttactcagctagctgtggcaaaccctgctgcctacttgcaacaactacttccattcaaccaactgactgtgtcgaactctgctgcgt

SEQ ID NO: 28482 - DNA, 255 bp, Zea mays
caagctcctatagcttcccttcttcccccataccttccatcaatgatagcttcagtatgtgaaaacccagctcttcagccctataggctccaacaagcaatcgcagcaagcaacatacctttatcacccttgttgtttcaacaatcgccagccctatctttggtgcagtcattggtacaaaccatcagggcacagcagctgcagcaactcgtgctacctgtgatcaaccaagtagctctggcaaacctttctccc

SEQ ID NO: 28483 - DNA, 248 bp, Zea mays
gcctaaaccacaggaacctacaaaacaccagtatgactgggatgttgcaactacgtttgcttttctacagaagtatggtcttaccggagagttcaagattaatgttgagtgcaaccatgctactctatctggacatagctgccatcatgaactggagactgcacgcattaatgggctgcttgggaacattgatgcaaacactggtgatcctcaagttggctgggacacggatcagttcatgacagaca

SEQ ID NO: 28484 - DNA, 91 bp, Zea mays
gtaataatgcagtaagacgacacacattatcatgtgtggtatgaccaataatatatgcatggtcataataaagttttggttttaatgaaaa

SEQ ID NO: 28485 - DNA, 255 bp, Zea mays
attgagaccaacaagcaacatagaaagtggaatccagtagcaacaacagagcaacaatggcgaccaagatattttccctccttatgctccttgctctttctgcatgtgttgctaacgcgacaattttccctcaatgctcacaagctcctatagcttcccttcttcccccataccttccatcaatgatagcttcagtatgtgaaaacccagctcttcagccctataggctccaacaagcaatcgcagcaagcaaca

SEQ ID NO: 28486 - DNA, 253 bp, Zea mays
agaccaacaagcaacatagaaagtggaatccagtagcaacaatagagcaacaatggcgaccaagatattttccctccttatgctccttgctctttctacatgtgttgctaacgcgacaattttccctcaatgctcacaagctcctatagcttcccttcttcccccataccttccatcaattatagcttcaatatgtgaaaacccagctcttcaaccatataggcgtcaacaagcaatcgcagcaagcaacata

SEQ ID NO: 28487 - DNA, 258 bp, Zea mays
agggaacagattcaggccgtgattaatgcaaacataattgcacctctggtgaacttctgcaaactgctgaatttgacatcaagaaagaagcagcctgggcaatttcaaatgccacttctggtggcacacatgatcagatcaagtaccttgttgcccagggttgcattaagccactctgtgatctgcttgtttgcccggatcccagaattgtaacagtttgcttggagggtcttgagaacatcctgaaagttggcgagg

SEQ ID NO: 28488 - DNA, 177 bp, Zea mays
ctgagaaactgggtttggagaaggacaacagatcaaacttcaaagcgcagtttggagacttcgctaccagtgttgatggtgtgttcgcagccggggactgcaggcgtggacaatcactggtggtatgggccatcacggaggggcggcacgctgctgcagcggtagacaagtacatat

SEQ ID NO: 28489 - DNA, 257 bp, Zea mays
cacatatctgcggcaatacgcggagaattgttctgcgaaggctgcttgtatggtggcacctaagagcatcatctcctacccacaggtctggaaagggcaagggtcgaggaagtggaagcttgaccagagcgacgggttcttcgtgcaattcgaggcaccggcgctgaggaagatatggtttgtgccaagcacaaaagagaagggacggacattgtgcaggagccctgaggccttggacatcggcatccatgaagtgc

SEQ ID NO: 28490 - DNA, 164 bp, Zea mays
attttcagcattcaaaaacacaccacgcgaagacactagctacgacctaacaccaatggctaccaagatattagccctccttgcgcttcttgcccttttagtgagcgcaacaaatgcgttcattattccacagtgctcacttgctcctagtgccattattccac

SEQ ID NO: 28491 - DNA, 205 bp, Zea mays
gcaacatagaaagcacaatagtgtaccaacaatggcagccaaaatattttgcctccttatgctccttggtctttctgcaagtgctgctacggcgaccattttcccacaatgctcacaagctcctatagcttcccttcttcccccgtacctctcaccagcggtgtcttcggtatgtgaaaacccaattcttcaaccctataggatc

SEQ ID NO: 28492 - DNA, 250 bp, Zea mays
cacaccaagcgaacacattagcaacaacctaacaacaatggctaccaagatattatccctccttgcgcttcttgcgctttttgcgagcgcaacaaatgcgttcattattccacaatgctcacttgctccaagttccattattacacagttcctcccaccagttacttcaatgggcttcgaacacccagctgtgcaagcctataggctacaacaagcaattgcggcgagcgtcctacaacaaccaatttcc

SEQ ID NO: 28493 - DNA, 250 bp, Zea mays
agtcaccaacgcaaattgcaccaagaaatccatcgagaggccgtcgacaggggaattaatggcgtcgtcgtctagcagcagccaccgccgcctcatcctcgcagccgccgtcctgctctccgtgctcgcggctgccagcgccagtctcgggacctcctgcgtgccggggtgggccatcccgtacaacccgctcccgttctgccgctgttacgtgaccagccggacctgcggcatcgggccgcgcctcccg

SEQ ID NO: 28494 - DNA, 205 bp, Zea mays
atattttcagcattcaaaaacacaccaagcgaagtcactagcaacgacctaacaccaatggctaccaagatattagccctccttgcgcttcttgcccttttagtgagcgcaacaaatgcgttcattattccacagtgctcacttgctcctagtgccattattccacagttcctcccaccagttacttcaatgggcttcgaacatc

SEQ ID NO: 28495 - DNA, 260 bp, Zea mays
gccgcctccgttctatctgccgccgcagcagcagccgcagccatggcaataccccactcaaccaccgcagctaagcccgtgccagcagttcggatcctgcggcgtcggcagcgtcggcagcccgttcctgggccagtgcgtcgagttcctgaggcaccagtgcagcccggcggcgacgccctacggctcgccacagtgccaggcgctgcagcagcagtgctgccaccagatcaggcaggtggagccgctgcaccggtacc

SEQ ID NO: 28496 - DNA, 253 bp, Zea mays
gtttctaccagcgctcagtcaactagccatggtgaaccctgccgcctacctacaacagcaacaactgatttcatctagccctctcgctgtggttaatgcacctacatacctgcaacaacagttgctgcaacagattgtaccagctctgactcagctagctgtggcaaaccctgctgcctacttgcaacagcttcttccattcaaccaactgtctacactgaaccctgctgcttatttgcagcaacaactatta

SEQ ID NO: 28497 - DNA, 252 bp, Zea mays
ctacaagcgcttgcggcgagcgtcttacaacaaccaattgcccaattgcaacaacaatccttgccacatctaacaatacaagccatcacaacgcaacagcaacaacagttcctaccagcactgagccacctagccatggtgaaccctgccgcctacttgcaagagcagctgcttgcatccaacccacttgctctggcgaacgtagttgcaaaccagcaacaacaacagctacaacagtttctgccaacgctc

SEQ ID NO: 28498 - DNA, 232 bp, Zea mays
gcagaccaccatctacaaaagggctgtagacaagaattataacctgaagatgaaagcgtcaagatttattttcagtgaaatcagccagaagttcccaatcatgcccttcactgctagggcattagaagagaagcgtgcacgcttaggcttggtggaatgcatgaaccatgagctattgcagccgtaccctgtacttcatgagaagccaggtgaccttgttgcacacataaag

SEQ ID NO: 28499 - DNA, 198 bp, Zea mays
attttcagcattcaaaaacacaccaagcgaagtcactagcaacgacctaacaccaatggctaccaagatattagccctccttgcgcttcttgcccttttagtgagcgcaacaaatgcgttcattattccacagtgctcacttgctcctagtgccattattccacagttcctcccaccagttacttcaatgggcttcga

SEQ ID NO: 28500 - DNA, 240 bp, Zea mays
ataccttccatcaattatagcttcagtatgtgaaaacccagctcttcaaccatataggcttcaacaagcaatcgcagcaagcaacatacctttatcgcccttgttgtttcaacaatcaccagccctatctttggtgcagtcattggtacaaaccatcagggcacaacagctgcagcaactcgtgctacctgtgatcaaccaagtagctctggcaaacctttctccctactctcagcaaca

SEQ ID NO: 28501 - DNA, 197 bp, Zea mays
gctgtgcgccaaggagatgaccaagctctctggtatctcggacatcatcccagagatggagatctgtgacttcgacttcgagccctgtggctactccatgaatgctgttcatggccctgctttgtcgaccattcatgtgaccccagaggacggcttcagctatgcaagctacgaggtcatgggcttcaacccgggct

SEQ ID NO: 28502 - DNA, 198 bp, Zea mays
gaaggagttgaaggacctgcagaaggacccgcccacctcctgcagcgcggtcctgttggtgaggacatgttccattggcaagcgaccatcatggggccttcggacagcccatttgcaggtggggtattcttggtgaacattcacttcccaccggattaccctttcaagccaccaaaggtgtctttccgcaccaaggtt

SEQ ID NO: 28503 - DNA, 144 bp, Zea mays
cgcaaattgcaccaagaaatccatcgagaggccgtcgacaggggaattaatggcgtcgtcgtctagcagcagccaccgccgcctcatcctcgcagccgccgtcctgctctccgtgctcgcggctgccagcgccacgccgggacc

SEQ ID NO: 28504 - DNA, 248 bp, Zea mays
attcaaaaacacaccaagcgaacgcactagcaacgacctaacaccaatggctaccaagatattagccctccttgcgcttcttgcccttttagtgagcgcaacaaatgcgttcattattccacagtgctcacttgctcctagtgccattattccacagttcctcccaccagttacttcaatgggcttcgaacatccagccgtgcaagcctacaggctacaactagcgcttgcggcgagcgccttacaac

SEQ ID NO: 28505 - DNA, 231 bp, Zea mays
ctggacgtcagcctagcaattagctcatcgactccagattggagaactcgacaccatgaaggtgctgatcgttgcccttgctctcctggcgctcgctgcgagcgccgcctccagtacaagcggcggctgtggctgccagacaccaccgtttcatctaccgcctccgttctatatgccgcctccgttctatctgccgccgcagcagcagccgcagccatggcaataccccac

SEQ ID NO: 28506 - DNA, 270 bp, Zea mays
cgactagctgcattgaactctgcttcttatttgcaacaacaacaactaccattcagccagctatctgctgcctacccccagcaatttcttccattcaaccaactgacagctttgaactctcctgcttatttacagcagcaacaactactaccattcagccagctagctggtgtgagccctgctaccttcttgacacaaccacaattgttgccgttctaccagcacgctgcgcctaacgctggcaccctcttacaactgccacaattgctg

SEQ ID NO: 28507 - DNA, 270 bp, Zea mays
ctctgcttcttatttgcaacaacaacaactaccattcagccagctacctgctgcctacccccagcaatttcttccattcaaccaactggcagcattgaactctcctgcttatttacagcagcaacaactactaccattcagccagctagctggtgtgagccctgctaccttcttgatacaaccacagttgttgccgttctaccagcacgctgcgcctaacgctggcaccctcttacaactgcaacaattgctgccattcaaccaacttgc

SEQ ID NO: 28508 - DNA, 270 bp, Zea mays
ggagaatggtctggtgccaattgttgagcctgagatccttgttgatggccctcatgacattgatcgctgtgcttacgtcactgagaccgtccttgctgcctgctacaaggcgctcaacgagcaccatgtcctcctggagggtaccctcctgaagcccaacatggtgactccaggctccgactccaagaaggtgacccctgaggtgattgctgagtacaccgtccgttacctccagaggaccgtacctgctgctgtgcctgctgttgtttt

SEQ ID NO: 28509 - DNA, 269 bp, Zea mays
gacaccaccgtttcatctaccgcctccgttctatatgccgcctccgttctatctgccgccgcagcagcagccgcagccatggcaataccccactcaaccaccgcagctaagcccgtgccagcagttcggatcctgcggcgtcggcagcgtcggcagcccgttcctgggccagtgcgtcgagttcctgaggcaccagtgcagcccggcggcgacgccctacggctcgccacagtgccaggcgctgcagcagcagtgctgccaccagatca

SEQ ID NO: 28510 - DNA, 270 bp, Zea mays
aggcgcgagacccgccgctacatcgagatgttctacgccctgaagtaccgtagcctggcaagccaggttccgctgtccttcgattagtacggggaaagaagaagaagaagaagcccaggccggagaaccatcgcctgcatttcgatctgtttcaccgcaattcgcattgttagtcgtgtattggagttatgtgtacttggtttccaagaactttggttccttgttttctattacatcgtgtttgagcgtttttgggcagcgctggcctgg

SEQ ID NO: 28511 - DNA, 269 bp, Zea mays
attgagaccaacaagcaacatagaaagtggaatccagtagcaacaacagagcaacaatggcgaccaagatattttccctccttatgctccttgctctttctgcatgtgttgctaacgcgacaattttccctcaatgctcacaagctcctatagcttcccttcttcccccataccttccatcaatgatagcttcagtatgtgaaaacccagctcttcagccctataggctccaacaagcaatcgcagcaagcaacatacctttatcaccc

SEQ ID NO: 28512 - DNA, 271 bp, Zea mays
acctgtgatcaaccaagtagctctggcaaacctttctccctactctcagcaacaacaatttcttccattcaaccaactgtctacactgaaccctgctgcttatttgcagcaacaactattaccattcagccagctagctactgcctactctcagcaacaacaacttcttccatttaaccaattggccgcactgaaccccgctgcttatttgcagcagcaaatactactaccatttagccagctagctgcagcaaaccgtgcttccttcttg

SEQ ID NO: 28513 - DNA, 223 bp, Zea mays
ctgacggcgatgtgcggcctgcagcagccgactccatgcccctatgctgctgccggcggtgtcccccactgaagacactatgtgctgtagtatagccgctggctagctagctagttgagtcatttagcggcgatgattgagtaataatgtgtcacgcatcaccatgggtggcagtgtcagtgtgagccatgacctgaatgaacaattgaactggaaagagaaa

SEQ ID NO: 28514 - DNA, 269 bp, Zea mays
attggagaactcgacaccatgaaggtgctgatcgttgcccttgctctcctggtgctcgctgcgagcgccgcctccagtacaagctgcggctgtggctgccagacaccaccgtttcatctaccgcctccgttctatatgccgcctccgttctatctgccgccgcagcagacatccgcagccatggcaataccccactcaaccaccgcagctaagcccgtgccagcagttcggatcctgcggcgtcggcagcgtcggcagcccgttcctgg

SEQ ID NO: 28515 - DNA, 271 bp, Zea mays
ccagtagcaacaacagagcaacaatggcgaccaagatattttccctccttatgctccttgctctttctgcatgtgttgctaacgcgacaattttccctcaatgctcacaagctcctatagcttcccttcttcccccataccttccatcaatgatagcttcagtatgtgaaaacccagctcttcagccctataggctccaacaagcaatcgcagcaagcaacatacctttatcacccttgttgtttcaacaatcgccagccctatctttggt

SEQ ID NO: 28516 - DNA, 272 bp, Zea mays
actatccttaattcgtttcctggtgttgatcccaatgatccatctgttaaagatttgctggcatcattgcacagccagaaagaggaagagaagaaggaagacaagtcagacaaaacagaagacgagaagaactgcttcaagctggagtgatgtcgctgtggtgcttttgtgactgatcatctctggagcttttgtgaatgatgtagctagctatctgtaattgatctagttgtgaatgatattataattgtgatacttttgtgaatatataa

SEQ ID NO: 28517 - DNA, 230 bp, Zea mays
gtcaactcaggtttactgttgatggctgtcatgggattgatgtttcctgccgttcttcatttcactcattcagaagtgcgtcaaggagcatcagaggttgcactttcaaggttcagtagttgaattatgcttgtgcgcgtacccatctatccctatttccaattaagtggacggagcaacttatacagtcccaatacgcagtgaagacgcgctattggggatactgcaga

SEQ ID NO: 28518 - DNA, 273 bp, Zea mays
cagcagcagccgcagccatggcaataccccactcaaccaccgcagctaagcccgtgccagcagttcggatcctgcggcgtcggcagcgtcggcagcccgttcctgggccagtgcgtcgagttcctgaggcaccagtgcagcccggcggcgacgccctacggctcgccacagtgccaggcgctgcagcagcagtgctgccaccagatcaggcaggtggagccgctgcaccggtaccaggcgacatacggtgtggtcctgcagtccttcctgcag

SEQ ID NO: 28519 - DNA, 273 bp, Zea mays
gtgaaccctgccgtctacctacaactactttcatctagcccgctcgcggtgggcaatgcacctacgtacctacaacaacagttgctgcaacaaattgtaccagctctgactcagctagctgtggcaaaccctgctgcctacttacaacagttgcttccattcaaccaactggctgtgtcaaactctgctgcgtacctacaacagcgacaacagttacttaatccattggcagtggctaacccattggtcgctaccttcctgcagcagcaacaa

SEQ ID NO: 28520 - DNA, 273 bp, Zea mays
agtatttccgacctgagttcctcaaccgtctcgatgagatgatcgtgttcaggcagcttaccaagctcgaggtcaaggagatagcggacatcatgctccaggaggtctttgacaggctgaaggccaaggacatcaatcttcaagtgaccgagaagttcaaggagcgggtggtggacgaaggctacaaccctagctatggtgcacgcccgctgaagcgagccatcatgaggctgctggaggacagcttgctgagaagatgctcctggggaggta

SEQ ID NO: 28521 - DNA, 267 bp, Zea mays
ctgctcaacagcaccttagttgtgcatatttctgaatgtggccttgcatcactagcatcaaaatcagtttctcagttgtctgtacacaccttattccattatgaagcacctgaagtgcatgaatctggatcagtaagcgatcgaagtgatgtttacagcttcggtgtagttatgttggagcttctaacaggacgtaaaccttatgacagttcgtatccacgagctgaacaacatctagtacgatgggccacttctcaactctatgat

SEQ ID NO: 28522 - DNA, 266 bp, Zea mays
cgtgccaacagccgcatccaagcccgtgccagctgcagggaacctgcggcgttggcagcaccccgatcctgggccagtgcgtcgagtttctgaggcatcagtgcagcccgacggcgacgccctactgctcgcctcagtgccagtcgttgcggcagcagtgttgccagcagctcaggcaggtggagccgcagcaccggtaccaggcgatcttcggcttggtcctccagtccatcctgcagcagcagccgcaaagcggccaggtcgcg

SEQ ID NO: 28523 - DNA, 265 bp, Zea mays
cgatagagcaacaatggcggccaagatattttccatccttatgctccttgctctttctgcatgtgttgctaacgcgaccatttttcctcaatactcacaagctcctatagctgcccttcttcccccataccttccatcaatgaccgcttcagtttgtgaaaacccagcccttcaaccctacaggctccaacaagcaatcgcaacaagcaacttacctttatcacccctgttctttcaacaatcgccagccctatctttggtgcag

SEQ ID NO: 28524 - DNA, 262 bp, Zea mays
aatggcttccaagacattatccctccttgcgcttcttgccctttttgtgagtgcaacaaatgcgttcattattccacaatgctcacttgctccgagtgccattattccacagttcctccctccagttacttcaatgggcttcgaacacccagctgtgcaagcctataggctacaacaagcgcttgcggcgagcgtcttagaacaaccaattgcccaattacaacaacaatccttggcacatctaaccatacaaaccatcgca

SEQ ID NO: 28525 - DNA, 266 bp, Zea mays
gccaagtctagggtttgggaatctgtaggtggggagaggggagcgcgctcagggtcagggaggcgaagatgatcgaggtggtgctgaacgaccgcctggggaagaaggtgcgggtgaagtgcaacgaggacgacaccatcggcgacctcaagaagctggtggcggcgcagacggggacgcgccccgagaagatccgcatccagaagtggtacaacatctacaaggaccacatcacgctcaaggactacgagatccacgacgggatg

SEQ ID NO: 28526 - DNA, 267 bp, Zea mays
aatctgtaggaggggagaggggagcgcgctcagggtcagggaggcgaagatgatcgaggtggtgctgaacgaccgcctggggaagaaggtgcgggtgaagtgcaacgaggacgacaccatcggcgacctcaagaagctggtggcggcgcagacggggacgcgccccgagaagatccgcatccagaagtggtacaacatctacaaggaccacatcacgctcaaggactacgagatccacgacgggatggggctcgagctctactacaa

SEQ ID NO: 28527 - DNA, 267 bp, Zea mays
gtcagcctagcaattagctcatcgactccagattggagaactcgacaccatgaaggtgctgatcgttgcccttgctctcctggcgctcgctgcgagcgccgcctccagtacaagcggcggctgtggctgccagacaccaccgtttcatctaccgcctccgttctatatgccgcctccgttctatctgccgccgcagcagcagccgcagccatggcaataccccactcaactaccgcagctaagcccgtgccagcagttcggatcctg

SEQ ID NO: 28528 - DNA, 267 bp, Zea mays
ctttctgcatgtgttgctaacgcgacaattttccctcaatgctcacaagctcctatagcttcccttcttcccccataccttccatcaatgatagcttcagtatgtgaaaacccagctcttcaaccctataggctccaacaagcaatcgcagcaagcaacatacctttatcacccttgtttcaacaatcgccagccctatctttggtgcagtcattggtacaaaccatcaaggcacagcagctgcagcaactcgtgctacctgtgatc

SEQ ID NO: 28529 - DNA, 268 bp, Zea mays
ctatcgccagccctatctttggtgcagtcattggtacaaaccatcagggcacagcagctgcagcaactcgtgctacctgtgatcaaccaagtagctctggcaaacctttctccctactctcagcaacaacaatttcttccattcaaccaactgtctacattgaaccgtgctgcttatttgcagcaacaactattaccattcagccagctagctactgcctactctcagcaacaacaacttcttccatttaaccaattggccgcactga

SEQ ID NO: 28530 - DNA, 235 bp, Zea mays
attgagaccaacaagcaacatagacagtggaatacagtagcaacaatagagcaacaatggcggccaagatattttccatccttatgctccttgctctttccgcatgtgttgctaacgcgaccatttttcctcaatactcacaagctcctatagctggccttcttcccccataccttccatcaatgaccgcttcagtttgtgaaaacccagcccttcaaacctacaggctccaaca

SEQ ID NO: 28531 - DNA, 260 bp, Zea mays
gcggcagtgcgtagagaggatcgtcgaacagaacagcatgaagatggtcatcgttctcgtcgtgtgcctggctctgtcagctgccagcgcctctgcaatgcagatgccctgcccctgcgcggggctgcagggcttgtacggcgctggcgccggcctgacgacgatgatgggcgccggcgggctgtacccctacgcggagtacctgaggcagccgcagtgcagcccgctggcggcggcgccctactacgccgggtgtgggc

SEQ ID NO: 28532 - DNA, 259 bp, Zea mays
cacccttgttcctccaacaaccgtcagccctattacagcagttacctttggtgcatttgttggcacaaaacatcaaggcacaacaactacaacaacttgtgctaggaaaccttgctgcctactctcagcaacagcagtttcttccattcaaccaactggctgcattgaactctgctgcttatttgcaacaacaactaccattcagtcagctagctgctgcctacccccagcaatttcttccattcaaccaactggcagc

SEQ ID NO: 28533 - DNA, 260 bp, Zea mays
gagccaactagctgtggtgaaccctgtcgcctacttgcaacagcagttgcttgcatccaacccacttgctctggcaaacatagttgcataccaacaacaacaacaattgcaacagtttctaccagcgctcagtcaactagccatggtgaaccctgccgcctacctacaacagcaacaactgatttcatctagccctctcgctgtggttaatgcacctacatacctgcaacaacagttgctgcaacagattgtaccagctc

SEQ ID NO: 28534 - DNA, 256 bp, Zea mays
actttttatctgcatttttgctacgagcatcctagaaatgagatggagtggtgttggaattgatgactggtggaggaatgagcagttctgggtcattggaggtgtgtcctcacacctctttgctgtgttccagggacttctcaaggtcatagctggtgttgatacaagcttcaccgtgacatcaaagggtggagatgagaggagttctcagagctatatacattcaaatggactaccttattgatacctcctacca

SEQ ID NO: 28535 - DNA, 247 bp, Zea mays
tattttcagcattcaaaaacacaccaagcgaacgcactagcaacgacctaacaccaatggctaccaagatattagccctccttgcgcttcttgcccttttagtgagcgcaacaaatgcgttcattattccacagtgctcacttgctcctagtgccattattccacagttcctcccaccagttacttcaatgggcttcgaacatccagccgtgcaagcctacaggctacaactagcgcttgcggcgag

SEQ ID NO: 28536 - DNA, 263 bp, Zea mays
cagcaaagcggcagtgcgtagagaggatcgtcgaacagaacagcatgaagatggtcatcgttctcgtcgtgtgcctggctctgtcagctgccagcgcctctgcaatgcagatgccctgcccctgcgcggggctgcagggcttgtacggcgctggcgccggcctgacgacgatgatgggcgccggcgggctgtacccctacgcggagtacctgaggcagccgcagtgcagcccgctggcggcggcgccctactacgccgggtgt

SEQ ID NO: 28537 - DNA, 261 bp, Zea mays
cgcacatatctactatactatactctaggaagcaaggacaccaccgccatggcagccaagatgcttgcattgttcgctctcctagctctttgtgcaagcgccactagtgcgacccatattccagggcacttgccaccagtcatgccattgggtaccatgaacccatgcatgcagtactgcatgatgcaacaggggcttgccagcttgatggcgtgtccgtccctgatgctgcagcaactgttggccttaccgcttcagacg

SEQ ID NO: 28538 - DNA, 264 bp, Zea mays
cgggatttcaatacccaactatacaatcttactgcaatacctctctccggtgacagccgcgggatttcaatacccaactatacaatcctacatggtacaagaggccatccaagcaagcatcttacggtcattagcattaaccctccaacaaccatatgctctattgcaacagccatccttagtgcatctgtatctccaaagaatcgcggcacaacaactacaacaacagttgctaccaacaatcaatcaagtagttgcagcgaa

SEQ ID NO: 28539 - DNA, 263 bp, Zea mays
ggcgaccaagatattttccctccttatgctccttgctctttctgcatgtgttgctaacgcgacaattttccctcaatgctcacaagctcctatagcttcccttcttcccccataccttccatcaatgatagcttcagtatgtgaaaacccagctcttcagccctataggctccaacaagcaatcgcagcaagcaacatacctttatcacccttgttgtttcaacaatcgccagccctatctttggtgcagtcattggtacaaa

SEQ ID NO: 28540 - DNA, 261 bp, Zea mays
accgcagctaagcccgtgccagcagttcggatcctgcggcgtcggcagcgtcggcagcccgttcctgggccagtgcgtcgagttcctgaggcaccagtgcagcccggcggcgacgccctacggctcgccacagtgccaggcgctgcagcagcagtgctgccaccagatcaggcaggtggagccgctgcaccggtaccaggcgacatacggtgtggtcctgcagtccttcctgcagcagcagccgcacggcgagctcgccgc

SEQ ID NO: 28541 - DNA, 266 bp, Zea mays
ctactacttccattcaaccaactgactgtgtcgaactctgctgcgtacctacaacagcgacaacagttacttaatccactagcggtggctaacccattggtcgctgccttcctacagcagcaacaattgctgccatacaaccagttctctttgatgaaccctgccttgtcgtggcagcaacccatcgttggtggtgccatcttttagattacatatgagatgtactcgataatggtgccctcatagcggcatgtgtttcctaaaaa

SEQ ID NO: 28542 - DNA, 238 bp, Zea mays
cggacggtgggtcgagagcaagcttggcatcaagatcacctgctcgcaggagacggagcccctcgggaccgcagcccgctggccctggcccgcgacaagctcgcggacggatccggcgaccctttcttcgtgctcaacagcgacgtgatcagcgagtacccgttcgccgagctcattgagttccacagggcccacggcggcgaggccacgatcatggtgaccaaggtcgacgagccgt

SEQ ID NO: 28543 - DNA, 237 bp, Zea mays
cggacgcgtgggcatgttgacaattgtcgacgatcttgtgtccatcgacactctaattgaggaccaccttacgcaagagcccatcaatgagtacgtccagagttgcgacattgtggctttcaacaagatctagagttcagtttctgagattgggcaacggcagcggctcagctcgtcaagtttgtgctgggatgccagtttatcccttctagtctattacagaaatgttgttcggag

SEQ ID NO: 28544 - DNA, 239 bp, Zea mays
cccacgcgtccgcggacgcgtggggtttctcaatacggacaacagatcctagatcttctgctagctgagacgcaaccagcgaagctctgttctcaggttggcctgtgcacttttgatggcactcacggtgttagcactggaattcgtagcgtagtggatgacaaagctgggaaatcaaatggtggtctcaagagtgatccaatgtgcaatgcctgtgagatggctgtggtatggatgca

SEQ ID NO: 28545 - DNA, 240 bp, Zea mays
acctcagctcccatatccgctcccctacctctccagcatctcccgtctccgtcgtctcgtctctgctcctcacctcgccgccagccatgggcaagatcaagatcggaatcaacggtttcggaaggatcggcaggctcgtggccagggtcgccctgcagagcgaggatgtcgagctcgtcgccgtcaacgaccccttcatcaccacggattacatgacctacatgttcaagtacgacaccg

SEQ ID NO: 28546 - DNA, 230 bp, Zea mays
cccacgcgtccgcggacgcgtgggcggaccgtgggcggacgcgtgggcacacactcgggtaaagctatctcgcgctagctaggtgctgtaagcgcttgccatggccaaaatggtgttgctctgcgtgctcgtctccttcctcctgatgcccttggcctccctagccctgacgcaggacttctgcgtcgccgacctgacctgcagcgacacgccggcggggtacccgtgca

SEQ ID NO: 28547 - DNA, 230 bp, Zea mays
gagaggatcatgatatcagactatgcagatgccacatctctgtctacctacttgtctgaatttgatgagcggaatctcccacccctatcagctggacagcggctgaacattgcgattgatattgcccgctgtctagattacctgcacaacgagcgggtgattccacatggcaacatcaagtcgtctaacgtcctgattcagaactccactccatctgctctggtgactga

SEQ ID NO: 28548 - DNA, 228 bp, Zea mays
gcggcggctacggaggcggtggcggctacggcggtcggcgcgagggtggtggtggcggctacggcggcggcggcggcggctggagggactgatgtgtggccccatcctggcttcggccgagttatcttatctatctatagtatcgtgttaccgttcgcttctgtcaccgtgttagtgtccgttctacctttggattaggtgttggtaccccttttgttcgctttggtt

SEQ ID NO: 28549 - DNA, 231 bp, Zea mays
cccacgcgtccgccgccgccaacatggtgggcgaaggcgggtacggcgtcgtgttcaggggcgtgctccgcgacggcaccgcgtcccatcaaaaacctccacaacaacaggggtcaggccgagaaagattttcgaatggaggttcagacgatcgggcgcgtccggcacaagaacctggtgagtttgctcggctactgcagcgagggagcttgcaggatgcttgtttacgag

SEQ ID NO: 28550 - DNA, 237 bp, Zea mays
cggacggtgggccgaaaccctcccccaaaaccccagagcggagaagagcgcaagatgttcggcttcgggcaacacggccaccacggccagaacccgccggcgcacggcggcgtgcaccagcccaccttcaagatcttctgcaaggccgacgaggggtactgcctcaccgtccgcgacggcaacgtggtgctggcccccgccaacccgcgcgacgagcaccagcactggtacaaggac

SEQ ID NO: 28551 - DNA, 221 bp, Zea mays
gaaataataaagcggcgtgtgacgggagaggctcggagagctgagtgagatggcactagccatggcgtccatgaccggtctctcgcagggcgttctgcccagcaggcgcgccgccaacagggccaggacggccgccgtcgtcagggcgtccgccgaggcgctggcgcaggcgggccgccgctccgtgctcgggctggtggccactggcatcgtcggcggcg

SEQ ID NO: 28552 - DNA, 222 bp, Zea mays
agaaaaggaagcatgcttctggcactagccatgctctttccttttggtttgctcttggctggagttcttgtctggtcctacctttctccttcagatataatgagaacccaaccacatttgctaattattggaactggttttgcatttggatttcttgtgggaagaatgattctggctcacttgtgtgatgaacccaagggtttgaaaacagggatgtgcatg

SEQ ID NO: 28553 - DNA, 224 bp, Zea mays
  unsure (1)..(224): unsure at all n locations
gacaaagtatcaaacgtgactatttgngaggaaccattcgacgactcaggttcctgatttcttgaatgccaaaattgatggaagaccagtgaaagaagtcattaaggataccaagtggttagaggaagagttcaccctcacagttcaaaagcgtggaggtgtgctcatccaaaaatggggcagatcatcagctgcatcgaccgctgtttcgatagtggatgcta

SEQ ID NO: 28554 - DNA, 201 bp, Zea mays
gtgacagatccgctcgctaatatgggacctgagattagctgttaaaaaatatgtaatattgctaaacatgtctatattcatcatgaacctggcgacccagacgctcgctccatccacatttattctcggcatacacaagcagcaaccatccatgagaagcatgggtgaaaaacccctattgggtcgtgtacatgtggcgga

SEQ ID NO: 28555 - DNA, 222 bp, Zea mays
cggacgcgtgggtgacgacgcctacctcgccgtggcgaggggcatccggagggccatcatcacccggcgggccgacagggtcaggtcccagctgcagtcgcacaagcgcttcgccgccgcgttccagcggtacagccgcctcgtggacggcgccaggctctacagcaccaactccatgggctctgccaagctcatcgcgtggaaggacgggatcggaaacag

SEQ ID NO: 28556 - DNA, 221 bp, Zea mays
cggacggtgggcggtggcggcggctacggtggtggcggcggcggctacggtggtggtggcggcggctacggcgatggcaaccgtggcggcggctacagcaactccgacgggaactggaggaactgagcggtggggcccgcgcggccaagttatcctgttcgctaccgtgttgtttaccctagtccagagtgtttatcttcgttcgtctcgtgtttgttgtt

SEQ ID NO: 28557 - DNA, 227 bp, Zea mays
cccacgcgtccgcccacgcgtccgggggaaactattggcgtatccagcgttgttgctgcaatgattggactctcaatacttcttgtgcttggagtgctgaactgggaggattgtttgaatgagaagtctgcatgggacaccctagcttggtttgctattttagttggcttggctgggcagcttactaaccttgggattgtgtcctggatgtcgaattgtgttgccaa

SEQ ID NO: 28558 - DNA, 243 bp, Zea mays
cctgagtcctgtccaccctgccaccgccgacgccgcgccgccgcagcaattgtcaccgtcgctatggcccgtatcaaggtgcacgagctccgggggaagagcaagacggacctgcaggcgcactcaaggagctgaagtctgagctctccctcctccgcgtaccaaggtcaccggcggcgcacccaacaagctctccaagatcaaggtggtgcgcacctcgatcgcgcgcgtgctcacagtgat

SEQ ID NO: 28559 - DNA, 225 bp, Zea mays
cccacgcgtccgcccacgcgtccgcccacgcgtccgacaatagggtcccagttgagatgtgaggtgcctgctgccgctttgaattcactgctcgatttgtgtttttctcgctgctgctgctgcttcttctttcagctttaagctgttgaactgagttgttcgtgttgtaaaatatgaggtgctagatgcatttcgaatctcataaattgttacatgtagtttgtc

SEQ ID NO: 28560 - DNA, 242 bp, Zea mays
cgctgctctccgccgctcgacgccgacgccgacgccgacacctctccctcccccattccccgtgccccggaccgcggagcagacagaggcgagatccggagcgccgcgcgatggcgaacatcgacatggcgaagatcctggcggacctggaccgcggcgccggcgacgcgcggctgcccaagaccaagctcgtctgcacgctcggcccggcctcccgctccgtgcccatgctcgagaagctg

SEQ ID NO: 28561 - DNA, 241 bp, Zea mays
cccacgcgtccgcagctgccattgccatctactgacctgtgacctccgcatttccaaacagcccgatcgagccagagctagcagatcggcaggcacctccctcctcaaggaacatggcccgcacgcagcagttggcagtagtggcgaccgccgtggtggccttggtgctgctggcggcggcggcgacctcggaggcggccatcagctgcgggcaggtggcgtcggccatcgcgtcctgcat

SEQ ID NO: 28562 - DNA, 240 bp, Zea mays
agcacatgctgttcaagggcacagggaagcgtacgccgcgcactggagcaggagattgaggacatgggtggccacctcaacgcttacacgtcgcgggagcagacgacctactacgccaaggtgcttgacaaggacgtgccccgtgcgatggaggtcctcgcggacatcctgcagaactccaatctcgaccaggcccgcattgaacgtgagcgcgaagtgatcctacgagagatggaagag

SEQ ID NO: 28563 - DNA, 243 bp, Zea mays
tcccgagcaggaggcggacaaggtaagcagcaatcgcaggaaccctagcgccgccgcacccgcaggaatgggtatcgacctcgtcgccggtgggaggaataagaagaccaagcgcactgcgcccaagtctgacgatgtctacctcaagctcctcgtcaagctctaccgtttcttggtcaggaggaccaagagcaatttcaacgctgtcattctcaagaggcttttcatgagtaaaaccaaccg

SEQ ID NO: 28564 - DNA, 242 bp, Zea mays
gtgatgggacaaccacttcggttgtccttgctcaagggatgattactgagggtgtaaaggttgtagctgctggtgctaatccagtgcagatcacccgtggtactgagaaaacagccaaagcactagtcagtgaactccaaaagatgtccaaggaggttgaggacagtgagcttgctgatgttgctgcagttagtgcgggaaataactatgaaattgggaatatgatagctgaggctatgaaa

SEQ ID NO: 28565 - DNA, 239 bp, Zea mays
caacatcaaatccctcccatctcttcccctccgccgccgtctctgctctccaagatcgcgatggcgtcagaaaagaagcagtcgaacccgatgcgggagatcaaggtgcagaagctcgtgctcaatatctccgttggagagagtggagatcgactcacccgcgccgccaaggtgttggagcagttgagtgggcagtctccggttttctccaaggcaaggtatactgtgaggtctttcgg

SEQ ID NO: 28566 - DNA, 237 bp, Zea mays
gcgagctgggagtagagaccgagaagtggagcggccatgaagatccagtgcgacgcgtgcgagggcgcggctgccacggtggtgtgctgcgccgacgaggccgcgctgtgccgcgctgcgacgtcgagatccacgccgccaacaagctcgcgagcaagcaccagcgcctcccgctcgaggcgctctccgccaagctcccgcgctgcgacgtctgccaggagaaagcggcgttcatct

SEQ ID NO: 28567 - DNA, 236 bp, Zea mays
cgcgtgcgagagacttgaccaagcagcagcagcagggatggcgcctctgaagctgtacgggatgccgctgtcccccaacgtggtgcgcgtggccaccgtgctcaacgagaagggcctcgacttcgagatcgtccccgtcgacctcaccaccggcgcccacaagcagcccgacttcctcgccctcaaccctttcggccagatcccggctctcgtcgacggagacgaagcctcttcga

SEQ ID NO: 28568 - DNA, 237 bp, Zea mays
cctcgttcctctagccgtctcgcgcaccacagcctccatttctcctccgacggcggtgcggctagctcaaccatggcggactccaaggccacctcggcggtcaccctccgcactcgcaagttcatgaccaaccgcctgctggcccgcaaacaatttgtgcttgaggttatccaccccggccgcgccaacgtctccaaggcggagttgaaggagaggcttgccaagatgtacgaggtg

SEQ ID NO: 28569 - DNA, 238 bp, Zea mays
gaagctagcgcttatagcttgtcagccatggccaccgccgccgcgtctagcctcctcaagtcctccttcgcgggctcccggctcccggccgccacgcggaccacaccggcgtccctcgtggtggccaccggcccgcgcggcgccggcgcggggcccatctgcgcgtccatgtccatgtcctcctccaacccgccctacgacctgacgtccttccggttcagccccatcaaggagtcca

SEQ ID NO: 28570 - DNA, 239 bp, Zea mays
agatgaagaaattctcctccttgagggaattgaaatgtatggtctgggaaactggcttgaagttgcagagcatgttggtaccaagtctaagttacagtgtattgatcattacacatcagcatacatgaactcaccttgttatcccctcccggatatgtctcatgttaatggcaagaataggaaggaacttctagctatggctaaagtacagggtgagagtaaaaaagggactttgctgt

SEQ ID NO: 28571 - DNA, 231 bp, Zea mays
cccacgcgtccggggcgtcggagcgagctcattctcaactcgactcaagagctctgcctcctccatcttcccttctctggcctccggagccacgctgatcagagatggaggcgaatccgaagaacaccttcacgatcaaagtggaggacgggaagcccgggaaggacggccggctggcggtcggaccggtgttccggagcgttctggccaaggatgggttcccgcagcttg

SEQ ID NO: 28572 - DNA, 232 bp, Zea mays
ctcgctcaccaagatcgagagcaggccgcaccgacaccgccccatccgcctcgtcgacgacgccaacgtcggcaccgccaagcacttcgagtacatgttctacgtcgacttccaggcgtccctcgccgagccccgcgcgcagaacgcgctggccgaggtccaggagtacacgtccttcctccgggtgctcgggagctaccccatggacatgacccccatgaccgccggctcc

SEQ ID NO: 28573 - DNA, 232 bp, Zea mays
gcgacccgtaccccgcctcccggttcaaccaaatccctctcgcctcatccccaccagcgcaaagccgccctatcgtcctgtcgtgagaagcaatggcgggccgtggcaaggcgattggcgctggtgccgcgaagaaggcaacgtcaaggagctccaaggctgggctgcagtttcccgtcggcaggatcgctcggttcctcaaggccggcaagtacgccgagcgcgtgggcgc

SEQ ID NO: 28574 - DNA, 230 bp, Zea mays
  unsure (1)..(230): unsure at all n locations
cccacgcgtccgccctttgcaagtatagtctctctgctaagcgaacgnagcttcaagctagtctcggcggctctagaagacgatgggcaaggacgacgtgatcgagagcggcgctggcggcggcgagttcgctgccaaggactacacggaccctcccccggcgccgctgatcgacgcggcggagctggggtcctggtcgctgtaccgcgccgtgatcgccgagttcatcg

SEQ ID NO: 28575 - DNA, 235 bp, Zea mays
caacttccaaacctcatcgtaggagctgttacaaaagaaagtatctatggtgcttttgaaaatggaataactgctgagcagataatttcatttcttaggcaaaatgctcaccctcgtgttgctgacaagatacccgctgtcccggagaatgtcacagatcagattaggttgtgggaaactgacctcaacagggttgagatgattccatcgcatttgtacgaagattttcctagca

SEQ ID NO: 28576 - DNA, 243 bp, Zea mays
atcgagcgcgcgccaagcaagtcttccggccggccgcgaagagcgcaatcaagcaagacaagatggtgaagctcgccttcggaagcgtcggcgactccttcagcgccacctccatcaaggcctacgtggccgagttcatcgccaccctcctcttcgtcttcgccggcgtcggttccgccatcgcctacgggcaactgacgaatggcggcgcgctggacccggcgggcctggtggcgatcgcga

SEQ ID NO: 28577 - DNA, 242 bp, Zea mays
ctttcctcttctgatgtatgcctggaaagttccatgggatgatctgacctgcaacaccaattggctcatgcaagatctgtacatggtgtgggccatcagccggcacaatgagcccatggatcttatcagcccaaccagcatagtaacgcataagacgggccaccatgggtacttcaatctgggctgcttgctcatatggcttcccgttgtcccatgtctccaaagcagcaagctcgtcattg

SEQ ID NO: 28578 - DNA, 240 bp, Zea mays
cggacggtgggcgagacgcgtgggcggacgcgtgggcggacgcgtggggccagatgtgacgtacaatgatgctggtggctgcacaggaacagattgagaaaatgcgtgcagttgttgaacttcctatgcttcacccagaaaagtttgttaagcttggtattgatcctccaaaaggcgtcctttgctatggcccacctggcactggcaagacacttcttgcaagagctgtagcaaatcgga

SEQ ID NO: 28579 - DNA, 226 bp, Zea mays
caccactccgcgctactgaggacggtacagcggcacagaggtgcgacgtacgacgacgacgacgcaggcgccacacatggcatcccagctctccgccgccgtgccccggttccacggcctccggggctacgccgcgcccaggtccgcggtggcagcgctgccgtccgtgagggtgggcaggaagaggtcgtcgtcgcagggcatccgctgcgactacatcggctcc

SEQ ID NO: 28580 - DNA, 232 bp, Zea mays
ctcaaataacatctggtgagggatctggatggaaaattgttgcaagttttgaaggcaagtttccagacagaattaaacagctaccgttggaccgacatttcgatctcaacaacgtcaaaaggattgtcttggaagcagatggttatcaaccatatttgatatctccagagaaagggttgagatccttaataaaaatagtactggaaatggcaaaggagccatcacgactatg

SEQ ID NO: 28581 - DNA, 234 bp, Zea mays
  unsure (1)..(234): unsure at all n locations
cggacgctgggntttgaagagaacggttccatggaacgggtcaccctttttctgaatctggctaatgatcgcaccattgaacgtattatcacccctcggattgctctaacaacagcagaatatttggcatatgaatgtgggaagcatgtacttgtcatcttgacagatatgagctcttatgcagacgcacttcgtgaggtttctgcagcccgagaagaggtgccaggtaggcgt

SEQ ID NO: 28582 - DNA, 234 bp, Zea mays
  unsure (1)..(234): unsure at all n locations
cggacggtggngcggacgcgtgggtttttttttttttttttttttagaaaacagtgtactaatcaggtctgataacatggcataacgctctgaacttgagacgattaaccaaaaaaagtgtactcatcaggacacacatttcggtgcaagacaatccatgagaatgctctaagctacagcgctcttgcccttcttcctctgtagcttcttcatgtagaactcaagctctttacc

SEQ ID NO: 28583 - DNA, 233 bp, Zea mays
cccagtacggccacgagacacgcccgcaccacggcggcgggggcggcgccccgcctgtgaggcagcagacgtacaggatctactgcaaggctggggaggaccagtacagcctcgcctcccgcgacggcaaggtctgcctcgtgcgcacggaccgtgatgacgacgcgcacactggatcaaggacatgaagtacagcaccagggtgaaggatgaggaaggctaccctgccatcg

SEQ ID NO: 28584 - DNA, 229 bp, Zea mays
gctgaaagcattgcacgtaaaatgttaggccagattctggtaacgaaacaaactggtccggagggaaagattgtgagcaaggtctacttgtgtgagaaactgtctcttactaatgagatgtattttgccatcacccttgataggaaaactgctggtccgctcattattgcttgcagcaagggaggaaccagtattgaagatcttgcggagaagtatcctgatatgatta

SEQ ID NO: 28585 - DNA, 229 bp, Zea mays
caagcaagcaagcaagcagcgagtacatacatactaggcagccaggcagccatggcgcccaccgtgatgatggcctcgtcggccaccgccgtcgctccgttccaggggctcaagtccaccgccagcctccccgtcgcccgccgctcctccagaagcctcggcaacgtcagcaacggcggaaggatccggtgcatgcaggtgtggccggcctacggcaacaagaagttcg

SEQ ID NO: 28586 - DNA, 230 bp, Zea mays
gcaaaacgtacatggaggtgaagggcacgggcacggcgaaccagtgcccgaccatcgacggcggcgtggagtcgttcccgttcaaggccggcaagtaccagatgaagaagctgtgcctggagccgacgtccttcaccgtcaaggcggagggcatcgccaagaacgccccgcccgagttccagaagaccaagctcatgacccgcctcacgtacacgctggacgagatcgag

SEQ ID NO: 28587 - DNA, 229 bp, Zea mays
gcgaactcgctccgaagaaggtggcgaagacatcgacctcctctgaccggccgctgtggttccccggcgccgtggcgcccgactacctggacggctcgctggtcggcgactacgggttcgacccgttcggtctcgggaagcccgtggagtacctgcagttcgagttggactcgctggaccagaacctggccaagaatgaggccggcggcatcatcggcacccggttcga

SEQ ID NO: 28588 - DNA, 231 bp, Zea mays
  unsure (1)..(231): unsure at all n locations
cggacggtggnggagcgcccaccagatcaggcgcttagaaggcgcgctggccggtggatgacgatggcgggacggcgggggactgaaccggtcttcatcgagggggcagctgccgccgcaagagctgcttgacgatctctgcagccggttccttctgaatgtgcccaaggaggagctggagtcgttcgagcggatcctgttcctgctggagcaggcgcactggttctatga

SEQ ID NO: 28589 - DNA, 229 bp, Zea mays
aatcaaacatccggaactatttgagagccttggaattgcccaaccaaagggtgtcctcctttatggacctccaggcacaggaaagacattgctggcacgtgcggttgctcatcacactgactgcaccttcatcagggtgtctggttctgaattggttcagaagtatattggtgaaggttcccggatggttcgggaactctttgttatggccagggaacatgcgccatcc

SEQ ID NO: 28590 - DNA, 223 bp, Zea mays
acccacgcgtccacccacgcgtccgcacacgcgtccgcggacgcgtgggcgggtcctaggattacaattcctgcatgggaggaaatagaagctctcttaacaagccggaagcttacaacaattgtatttttcttggatgaaacatttgaagagatcacctatgacatggcaacaactgttgctgatgctgttgaggaacttgctggcattatcaaactttcag

SEQ ID NO: 28591 - DNA, 221 bp, Zea mays
aaagcgcatcgatctcgctgtcgtcactcctcgtcacccagccaaggcgctggcggagaccggcaagtggcacgtggtgatggcctgccgcgacttcctcaaggcggccaaggcggccaagggcgccggcatggcggacggcagctacaccatcatgcacctggacctggcctccctcgacagcgtgcggcagttcgtggacagcttccggcgcgccggca

SEQ ID NO: 28592 - DNA, 221 bp, Zea mays
cccacgcgtccgcgcctcgggtcaaaccctaagcagggagttgatttatccgctgcagccatgagtaagttgcagtctgagtctgtcaaggatgccatctcccagattgttggggatgccaaggagaagaataggaagttcactgagactgtggaacttcagattggtctgaagaattatgatccacagaaggacaagcgtttcagtggctctgttaagtt

SEQ ID NO: 28593 - DNA, 220 bp, Zea mays
ctgttgtgttccttgaaaatgaacttctttatggtgaatcatttcctgtatctgctgaggtacttgattctagcttctgccttccgattggaaaggctaagatagagcgacaagggaaagatgtcactatcactgcattctccaaaatggtgggatatgcccttcaggccgctgatatactggccaaggaaggtatcagtgccgaggtaatcaatcttcg

SEQ ID NO: 28594 - DNA, 230 bp, Zea mays
ccggaccttccccagaccgacgagatcgccgacgtcatcggcgcgttccacgtcctcgcggagctcccgcccgacagcttcggcccctacatcatctccatggcgacggccccctcggacgtgctcgccgtagagctcctgcagcgcgagtgcggcgtgcgccagccgctgcccgtggtgccgctgttcgagaggctggccgacctgcagtcggcgctcgcgtccgtgga

SEQ ID NO: 28595 - DNA, 236 bp, Zea mays
cggacgcgtgggatttcttctctctctgcacctccgcctccgcctgatccatccaagacagggatcgccacgtcggactcggaggagcaccacttcgaatcgaaggccgacgctggggcgtccaagacctacccgcagcaggctggcaccgtccgtaagaacggcttcatcgtcatcaagaaccgtccctgcacagttgtggaggtttctacctccaagactggtaagcatggcca

SEQ ID NO: 28596 - DNA, 237 bp, Zea mays
gtcatccccatgagcagaatcgacgacgccgtctacaggatccttcgtgtcaagttcaccatgggtctgttcgagaacccttaccccgactctagcctcgccggcgagctcgggaagcaagaacaccgggaactggcgcgcgaagcgtcaggaaatcccttgttctcctgaagaacggcaagtcctcctacgctccgttgctgcccctcacgaagaaggccggcaagatcctggtcg

SEQ ID NO: 28597 - DNA, 234 bp, Zea mays
gccgtagcccgcagcttcgtctgttacgctacgtccggttccccaccgcgccgtgtgaaaaaaatggctgtgccggaggtggtggtggacggcgtcgtcttcccgccggcggcccgcccgccgggctccgcgggctcgcatttcctcggcggcgcaggcgtgcgtggcctcgagatcgaaggcaacttcgttaagttcacggccatcggcgtgtacctggaggacgcggccgtg

SEQ ID NO: 28598 - DNA, 202 bp, Zea mays
ccgtctgtcgctctcgctctcagacgactgggccgccgccgcttggtgctgaggctttcgttggtctcttcggcggcgacgagcacccaccagcagttctgtagaaatggctgatggtgaggacatccagcctcttgtctgcgacaatggcaccggaatggtcaaagctggttttgctggggacgatgcacaaaggccggtt

SEQ ID NO: 28599 - DNA, 239 bp, Zea mays
gagtccgcgtccagtgtgtccgctactccgctccccctcagtcctcagttcctcacctagcggtagcgtgcgcgcgggagacgtagatggcggcttcggaggcggcagcagcggcggcaacaccggtgacgccgacagaggggacggtgatcgcgatccacagcctggaggagtggagcatccagatcgaggaggccaacagcgccaagaagctggtggtgattgacttcactgcaaca

SEQ ID NO: 28600 - DNA, 234 bp, Zea mays
gacaagtggtttccaaagccaagtgtgtgtactagcaaccagctagctcgggcggcagcaggcagccatcatgtcggaggagaagcaccaccacttcttcaaccaccacaagaaggacgaggagcagcccgccggcgagtacgggtactccgagaccgaggtggtcaccgccaccggcgagggcgagtacgagaggtacaagaaggaggagaaggagcacaagcacaagcagca

SEQ ID NO: 28601 - DNA, 233 bp, Zea mays
  unsure (1)..(233): unsure at all n locations
cggacggtgggcggacgcgtgggcggacgcgtggggaacgcgtcccacctcctcaagtacgactcgatgaccggcaccttcagtgccgacgtcaagatcgtggacgacacgaccatcagcgtcgacggcaagcccatcacggtcgtctccagcagggatccgcttaagctcctatggcgtgagctcggcattgacatcggtcatcgagggcacagtagtcntcgtcgacggcc

SEQ ID NO: 28602 - DNA, 94 bp, Zea mays
cggacgcgtgggtttttttatacaagaaaaacaaattaatggatatcaacaattaaccagcaggaaacaaacattctactgtttttacttcgtc

SEQ ID NO: 28603 - DNA, 232 bp, Zea mays
caccgctccacacacaagaagagagccgagagctagctacctagcgcgcgatggcgatgtccgcttccaagatgatggcggtcgccgccgctgccctgctagccctggtcctggccgcgtcgaccgcggaggcgaggaacatctagacgacgacgacgacgacggagaagaaggacgatgcggtggtgcagccgcagaccttcccgcccttcgaccgcctcggcggcggcgc

SEQ ID NO: 28604 - DNA, 228 bp, Zea mays
cggaccgtgggagctgcctgtgctggtccggcttcttcatcctccagtcgaacacgctgcagagctacccagcggactgacgctgacgactctgatctgcttcctgggctcggtgctgaccggcggcgtggcgctcgtggcggacgccgcgacatgagcgcctgggtcattggcttcgacacccgcctcttcaccgccgtctactccgggatcgtgtgctccggcgtg

SEQ ID NO: 28605 - DNA, 231 bp, Zea mays
ctagggttttgctgctctccgaccccgagctccgaaggccgcagcatcaggcgcggcccccctcgcgtgtgaccgagatggcgctgccgaatcaggggaccgttgattaccccagcttcaagctcgtcatcgtcggcgatggtggaactggtaaaactacacttgtgaagaggcatctcactggagagtttgagaagaaatatgaaccaaccattggtgtggaagttcatc

SEQ ID NO: 28606 - DNA, 229 bp, Zea mays
cccacgcgtccgagcaggggctctggaggcactggtgcaactaacaagttctcaaaacgagggtgtaagacaagaagctgctggtgctttgtggaacctgtcatttgatgacagaaaccgtgaagccattgctgcagtgggtggcgttgaagctttggttgccctagtgcaacaatgtttgaatgcttcagaaggtcttcaggagagagctgctggtgcattgtgggga

SEQ ID NO: 28607 - DNA, 229 bp, Zea mays
cggacgcgtgggtcggacgcgtgggtgcaggcggactggtgcactgccggtgggcgaagctcggcgcggcgtactatcttcatcacggagttcctgaccaagatcggcgtcctcaacacgcccttctggtacaccgccggcgagcagcagtacttcaccgacaccaccaccctcttcatcatcgagctcatcctcatcggctgggccgagggccgccgttgggctgaca

SEQ ID NO: 28608 - DNA, 229 bp, Zea mays
gagatagtaaactgacaaggttgctgagggattcattgggagggaaaacaaagacttgcattattgctacaatatcaccttcagtatattgtttggaagagacattgagcacacttgattatgcacaccgtgcaaaaaatatcaagaacaaaccagaggtaaatcaaaggatgatgaagtctgctgtgatcaaggacttgtactatgaaattgaccgcctcaaacaaga

SEQ ID NO: 28609 - DNA, 228 bp, Zea mays
cacgcacgcatacacagcacagagtgaggtaagcatccgaaaaaagctgtgatctgatcgacatggccgccgccaccatggctctcacctcccgcgcgctcgtcggcaagccggcgaccagcaccagggacgtcttcggcgaggggcgcatcaccatgcgcaagactgctggcaagcccaagccagcggcgtccggcagcccctggtacggggccgaccgcgtcctgt

SEQ ID NO: 28610 - DNA, 270 bp, Zea mays
gttctagatcgcgatcgtgctgtgctatttccaactgtgcagtgaggactacctgtggtggtggaggtcctttctgacctcaggatcatcagcaatctacctcttcctgtacgccgggttctacttcttcactaagctacagatcactaaggttgtgtcaggcatgctgtactttggctacatgcttcttgcctcgtttgctttctgtgtgctcaccggtacgatcggcttctacgcctgcttctgcttcacaagattgatttattcatc

SEQ ID NO: 28611 - DNA, 241 bp, Zea mays
  unsure (1)..(241): unsure at all n locations
aggcgccgccgcctngatcgctccagcgccctcgccgtcggcagctcggccgccgtactcccgctaccgagctaggaggcatcaccttcgccggtccaacatgggtaagacacgtggtatgggagctgggcgcaactcaagacccacagaaggaaccagaggtgggctgacaaagcctacaagaagagccatctcggcaacgagtggaagaaaccctttgctgggtcatctcacgcaaagg

SEQ ID NO: 28612 - DNA, 202 bp, Zea mays
  unsure (1)..(202): unsure at all n locations
ctcgacaatgaggccatctatgacatctgccgccgctcccttgacattgagcgcccaacctacaccaacctcaacaggcttgtgtcncaggtcatctcatccctgactgcttccctgaggttcgatggtgctctgaacgttgatgtgaacgagttccagaccaacctggtgccctaccctaggatccacttcatgctttcgt

SEQ ID NO: 28613 - DNA, 237 bp, Zea mays
caacatcaaggtcgagtcctactggccggccctcttcgccaagctcctggagaagcgcaacgtcgaggacctcatcctctccgttggatctggtggcggactgctccagttgctgctgccgcacctgctggtggtgctgcggctgctgctgccccggctgtcgaggagaagaaggaagaggccaaggaggagtctgatgacgacatgggcttcagcctgttcgactgaggagacccc

SEQ ID NO: 28614 - DNA, 197 bp, Zea mays
gaggaggagtgcctgcggtggctcgacggcagggaccccggctcaatcgtctacgtcaacttcggcagcatcaccgtgatgaccagcgaccagctggtggagttcgcgtgggggctggccaacagcggcaggccgttcctgtggatcatccggcgcgacctcgtcaggggcgacactgccgtgctgccgccggagtt

SEQ ID NO: 28615 - DNA, 238 bp, Zea mays
gctaggtgatctcaactataggatcaacttaccatatgagaagacacatgaactcatatccaagcaggactggaacgaattgtttgggaaagaccagctgaaagtagagctgaagaaggggcatctgtttgaaggatggaccgaaggggtcatcaactttcctccaacgtataagtacaaggttaactcagaaaagtacataagtgatgataacaaatctggaaggagaacacctgca

SEQ ID NO: 28616 - DNA, 132 bp, Zea mays
gatactagtcgtccaacatataagggattccttgatgaactactgaataatatctccacaattaacacggacttagatattgaagcctctggtggatacgatgatgacctgattgccagactgttgaagctc

SEQ ID NO: 28617 - DNA, 336 bp, Zea mays
gcgtgcacgcgagaactcggaatcggctcgaggctcagctgattgagcagtccaagaaccaaaggataagtgggtgggcgcctgggcggggaccgcggagcccgaggaggagaagcgagcgaggtgccgtcgtcagctagcactagcagccatggaaggcggcgcgcacgagttcgacggctccaccttcaaggagtgcttctccctctcgtggaggaacccctacgtcctccgcctcgtcttctccgccggcatcggcggcctgctcttcggctacgacaccggtgcgttgcgactgcgtgcgcgtccttcttcctgcctgtgctgtgtgtcact

SEQ ID NO: 28618 - DNA, 138 bp, Zea mays
tacagacggaggtgaggacgacgatgcgctcgccggacggcaagaagctggacatgctagcggaggaggacctcggcagcatgccctacctcaaggcgaccatcaaggagacgctgcgcctgcacccgccggcgccgt

SEQ ID NO: 28619 - DNA, 148 bp, Zea mays
aggatgtcagagattcataatgttgctatagcagacaatcatggtcgggtccataatttatctcggtatcaggccaggtggaacaaacctaggcctgaaagtgcgacaattgatgaggaactggcttcgaagttgaattctatggcag

SEQ ID NO: 28620 - DNA, 176 bp, Zea mays
ctgccttgttaagcaaagcaacccagctgcgagacacgagagctagctagagagagatggcggccacggtttcctccttcccggtggtgaacatggagaagctggagacagaggagagggccacggccatggaggtcatccgcgacggctgcgagaactggggcttcttcgagctg

SEQ ID NO: 28621 - DNA, 313 bp, Zea mays
gaagaagccagtcaatagcgagttctactactagtagctagcctgctgatctgttctgttgtttagttcgcaaagccttctgtttcggcgaccatggaggatgagaggaacacccagcagcaccagggcggtgaggcccagcaggacgccgccgatcaggtggacgtgaaggatagggggctcctggacagccttctcggcaggaagaagcacgacgacgaccaggagaagaagaagcagacggatgagctggcgaccggcatggagaaggtcacggtgtccgagcccgagaagcacgggcacaaggaggagg

SEQ ID NO: 28622 - DNA, 248 bp, Zea mays
ctcggctaccaggacgagtcggtgctgtggacggagagccgcgacgtcggccacggcttccgctgcgtccgcatggtcaacaacatctacctcaacttcgacgccttccacggcgacaaggaccacggcggcgtgcgcgacggcaccaacatcgtgctctggaagtggtgcgagggcgacaaccagcgctggaagatcgtcccctggtaaatgtgctgttctgtggctgcactggtcatcaccatgat

SEQ ID NO: 28623 - DNA, 267 bp, Zea mays
cggctcgaggtctcctcgccctactcgggcagaagcaacggatgttgcaaacgcagttcttgatggcacagactgtgttatgctcagtggtgagactgctgctggggcttatccagagttggcggtgcagactatggctaagatctgcctgcaagcagagtcttgcgtagaccatgctgctattttcaaatcaatcatggcttcagctccaattccaatgagtccattggagagccttgcatcatcagctgttcgcacagcaaactc

SEQ ID NO: 28624 - DNA, 346 bp, Zea mays
tttctatgttaggagtggagttatctgcgtggaggactgacgacgctcgaccgggactacggatggatcaacaacatccatcacgacatcggaactcatgtcatccatcacctcttccctcagatcccgcattaccatctcatcgaggcggtaagggtttcccctactcttgcctttttcttttcttttcagtgagtttcttcgcctagatcataagacctgcttttttttggatgtggcctgcagaccgaggcagcaaagccggttcttggcaagtactacaaagagccgaagaagtcgggtgctctgcagtggcacctattccgggtgctggcacagagcttga

SEQ ID NO: 28625 - DNA, 347 bp, Zea mays
gcgacgctggcgaggagggcggggcgctccgcggcaacgacgctatggggcgcggcgaggggcttcgcatcggtggggtccgacatcgtctctgcggctcccggcgtgtcgctgcagaaggcgcggtcctgggacgagggcgtcgccaccaagttctccaccacgcctctcaaggacatcttctacgggaagaaggtggtcatcttcggcttgcccggtgcatatacaggggtttgttcacaagcgcacgttcctagttacaagaagaatattgacaagttgaaagcaaaaggaatcgactctgttatctgtgtagctgtgaatgatccgtatgtcctggatggatg

SEQ ID NO: 28626 - DNA, 302 bp, Zea mays
  unsure (1)..(302): unsure at all n locations
acctcaacgtttctcgggagattcttcaagaaagtcgaattgtaagaattatgcgcaacagacntgtcagaaagacctttgatatgattgaagagattgcggaaaaggaagataaggaggactataagaagttttgggagagctttggcaagtttatcaagcttggttgcatcgaggacacagggaatcacaagcgccttgctccattgttgcgcttccactcttctaaaaacgagggagatttgataagtcttgatcaatatgtagagagcatgcctgaacagtcaaaggcaatctactac

SEQ ID NO: 28627 - DNA, 269 bp, Zea mays
  unsure (1)..(269): unsure at all n locations
atagagtcttgcagaaacatttcctgagataagaaaagcgctgaaagagaacgagcccaaaaaatgcttatttaatgattgtgttcacctgngtgagcatggatgtgctgtgatgggggactgggaaaggtatccatactatctccagatgcttgatgagatcaaaattagagaagaaatccagctacggacatttggaacaaaaagagaaggtgatgtcaggtacaaaacaggtgtcatgggggtgaagcaagcagagcctcgtcttg

SEQ ID NO: 28628 - DNA, 248 bp, Zea mays
tgcagatgttaatctggatgacgtgaactccatcttcgatgaatccggggagccagcacagcctgttgttgagcagagagaagaaagaccatcagtgatgaacgctttcgagttaatctctacgtctcagggcctcaatctcgggacgctcttcgagaagcaaacgggttctgttaagcgagaaacaaagtttgcgtcaaggcttcctgcaaatgagatactgtcgaagatcgaagcagcagcgggac

SEQ ID NO: 28629 - DNA, 93 bp, Zea mays
  unsure (1)..(93): unsure at all n locations
atatgtttananaagagtaacactatcatagctacaatatcttttgaagccacctaaattctcacgcgaatgagatgtttctgtatatcttcc

SEQ ID NO: 28630 - DNA, 341 bp, Zea mays
agcgcacagccgccggagaagaggagggagccagcaccagccaccatgggtcgcgtccgcaccaagaccgtgaagaagacctccaggcaggtgatcgagaagtactactcccgcatgaccctcgacttccacaccaacaagaaggtgctggaagaggtctcgatcctcccctcgaagcgcctccgcaacaaggttgccggcttcaccacccacctgatgcgccgcatccagcggggccccgtccgtggcatctcgctcaagctgcaggaggaggagcgggagcgccgcatggacttcgtcccggagaagtcagcgctcgaggtcgaagagatccgcgtcga

SEQ ID NO: 28631 - DNA, 337 bp, Zea mays
cggcacgcccccatcaacctgacggagcggctgttccaggtgctccgctggtccacgggctccctggagatcttcttctcccggaacaacccgctgttcgggagcacgttcctgcacccgctgcagcgcgtggcgtacatcaacatcacgacgtacccgttcacggccatcttcctcatcttctacacgacggtgccggcgctgtcgttcgtgacggggcacttcatcgtgcagcggcccaccaccatgttctacgtgtacctggccatcgtgctgggcacgctgctgatcctggccgtcctggaggtgaagtgggcgggcgtgacggtgttcgagt

SEQ ID NO: 28632 - DNA, 251 bp, Zea mays
agcagccagtttccgtcaatggcactggccatggccacggtgctgatggcactgggcggggtagccgccacagcgcgcgccggcggcggcatcgccatctactggggccagaacggcaacgaggggacgctggcgcagacctgcgccacgggcaactacaggttcgtcaacgtggcgctcctcccgacgttcggcaggggccagacgccggcgctgaacctggcgggccactgctgaccggcgagcggcgg

SEQ ID NO: 28633 - DNA, 264 bp, Zea mays
atcggaagctcagggcagaagccatggggcagacgcatcttttgttgctcgcttgtttctgggtcctgtcaacatgctccctgctacttgatgcttcctccgatggactgttaagaatcaacctgaacaagaagagactggacaaggaagctttgactgctgcgaaattggcgaagaaggagagcaaccttcgaaggtctgtgggtgctgaccagtatctcagtgcctcaactgatgacatagtccctttggacaactacctgg

SEQ ID NO: 28634 - DNA, 281 bp, Zea mays
attcggctcgagaaattctgccgtctccaccgccgccgcagccagcgtcaccggagggatctgccgtctcccttgctccacgcgatgaacaccgacatcaccgcctcgactaagccggagtacccggtggtggatcggaacccggccttcaccaaggtggtcggcaacttctctgcgctcgactacatgcgcctctccaccatctccgccgtctccgtcaccgttggctacctctccgggatcaagccggggatccggggcccgtcgatggtcacgggcgg

SEQ ID NO: 28635 - DNA, 238 bp, Zea mays
ggctaccgcgcaccggaggtcaccgacatccgccgcgtctcgcagaaggccgacgtctacagcttcggcgtcctcctgctggagctgctcacggggaaggcgcccacgcacgccgtcgtcaacgaggaggggctcgacctgccgcgctgggtgcagtccgtcgtgcgggaggagtggaccgccgaggtgttcgaccaggagctcctcaggtaccaaaacgtcgaggaggagatggtgc

SEQ ID NO: 28636 - DNA, 142 bp, Zea mays
tgtaattctttccaatggtccaaggcggatgctgcttccgatgtagcagcatgcgattctttggacaagaggtatactattacagtgaagagtgaaaaaaagagagagttagctacatagaaagctttctgagctctatacg

SEQ ID NO: 28637 - DNA, 295 bp, Zea mays
  unsure (1)..(295): unsure at all n locations
ggactccgtgcgctcggggcncttcggccagatcttccgccccgacaacttcgtcttcggccagtccggcgacggcaacaactgggccaagggccactacaccgagggcgccgagctcatcgactccgtgctggacgtcgtgcgcaaggaggccgagaattgcgactgcctccaagggttccaggtctgccactcgctgggaggaggtactggttcaggaatgggcaccctgctcatctctaagatcagggaggagtacccggatcggatgatgttaacattctctgttttcccg

SEQ ID NO: 28638 - DNA, 271 bp, Zea mays
cctctgctctcgcccacctcccggtccggcagcagagagcgggggtgcagagagatcgagatccggaggccgcgagtgggagcgccaccaccagcgtctgcggcaatggcgggcacggtgacggtcccggggtcgtcgaccccctccacgccgctgctcaaggacgagctcgacatcgtgatcccgacgatccgcaacctcgacttcctggagatgtggcggcccttcttccagccctaccacctcatcatcgtgcaggacggcgacccga

SEQ ID NO: 28639 - DNA, 270 bp, Zea mays
  unsure (1)..(270): unsure at all n locations
cgctacgncttccctccgcaaacggaaggctctcgtgaccaccgggatgtccgccatggagaccgacatcaacgcgccgccgccgcccgccccagctggcgagggatcctctgcggccggtccgtcctcctcccgcaagcccaacaagcgcttcgagatcaagaagtggaacgccgtcgcgctctgggcatgggatatcgtcgtcgacaactgcgctatctgccgcaaccacatcatggatctatgcatcgagtgccaggcgaaccaagc

SEQ ID NO: 28640 - DNA, 329 bp, Zea mays
ggcgccagttggaaaagataatccttgacaagcacgaggacaccatgagcaaaatgggcgccatactggcttccggcattctcgacgccggcggcaggaacgtcggcatcaggctcaagtcgaggtcaaagcatgacaggctcactgccgttgtcggactagctgttttcacccagttctggtactggtacccgctgacctacttcataagcctcgccttctctccgacggccctcatcggcctcaactccgacctgaaagtgccgacgtttgagttcctgtcgaacgccaagccgtccctgttcgattaccccaagccagcgactcag

SEQ ID NO: 28641 - DNA, 327 bp, Zea mays
tatggatgtgtcatggcacggatttgtcacacgaataattgtccagttggagtggctagtcagagagaagagcttcgtgcaaggtttcctggtgttcctggtgatcttgttaactacttcctctttgttgccgaggaggttcgagctgcattagcccagttgggttatgagaagttggatgacatcattgggcgaacagatttgcttaaaccaaagcacatctcattggtgaaaacgcagcacattgatcttggatacctcctatcaaatgctggattgcctgaatggagcagctcccaaattaggagccaggacgtccacactaat

SEQ ID NO: 28642 - DNA, 226 bp, Zea mays
ctaatacaactcaaccatggaaggcctcagccacttcagtatgctgtcaacgcagctttccttgcttctctatacagcgactatcttgaagctgcagacacgcctgggtggtactgcggacctaacttctacaccacagaagtcctccgcaagtttgccaggtcacagctcgactacatccttggcaagaacccattgaagatgagctacgttgtgggtttcggaa

SEQ ID NO: 28643 - DNA, 329 bp, Zea mays
  unsure (1)..(329): unsure at all n locations
acgcctcatgtcatcatcgtgggtactggggaggatgtggcggcgcgcatcatgtcgttttctcagaagggtccacgctcggtctgcatcctctctgccaacgggtcaatctctaatgtaacactgaggcagccggatgcatctgggagcaccttcacctacgagggccgtttcgagatcctgcagctgatgggctccttcacaatggccgaggaaggccggaggagaaccggcgggctgagcgtctctcttgctggccctgacggccgcgtagtcggcggcgtagtggctgggatgctgcgtgctgcaagtcctatacangtgatcgt

SEQ ID NO: 28644 - DNA, 258 bp, Zea mays
gagagatcagcgacttaacaacaataatggccaccgccatagttcccacggacgccgagctgctgcaggcgcaggccgacctgtggcgccacagcctctactacctgacatccatggcgctcaagtgcgcggtggagctccacatcccgaccgccatccacaacctaggcgggtctgccacgctgccggacctcgtggccgcgctgtccctgccagcggccaagctcccgttcctcgggcgcgtgatgcggctgctgg

SEQ ID NO: 28645 - DNA, 266 bp, Zea mays
cgcaaggcgaaaaaggatgctcctgctggtgagaagccagagccagtcaagacacatctccgtaacatgatcattgtccctgagatgattggaagcattgttggggtctacaacggcaagacgttcaaccaggttgagatcaagcctgagatgatcggccactaccttgctgagttctccatctcctataagccggtcaagcatggcaggcccggtatcggtgccacccactcctcgcggtttattcctctgaaatgagctgttac

SEQ ID NO: 28646 - DNA, 190 bp, Zea mays
tgcaagacgctgacggacaacacgacgatcgtggagatggaccccggcagcttccgcaccttcgacctgagctactaccgcggcgtgctcaagcagcggggcctgtatcagtccgacgccgcgctcatcaccgacgccgcctccaaggccgacatcctcagcgtgatcaacgcgccgcccgaggtgttct

SEQ ID NO: 28647 - DNA, 143 bp, Zea mays
atcttctgcatgttggaaggtcgtgaagcctctgttgcaagagagaacaaggaagaaagttcatgtgttgcgtggctgcgggagagacgagcttctacagatcatggactactcctccctcgcccatttctgcagacaggagg

SEQ ID NO: 28648 - DNA, 356 bp, Zea mays
  unsure (1)..(356): unsure at all n locations
ccgtgttccgcgtaggcgtcaagtacggcgcgggcatcggctccggtgtctacgacatccactcncccaggatcccgtcggctgaggagatcgccgaccgcatcgacaagatgctggcggtgctggacaccaacatcctctgggtgaatcccgactgcggcctcaagacccgcaagtacacggangtcaagctcgccctgaccaacatggtctccgccgctaagctcatccgcatccagctcgccagcgccaagtgagcaccttttttttgccttntatcgttccgtaggaggcgtcgtcgatgccaatttgtttccaatagaacaggctgtgcccgccgttctgttgtactcgtc

SEQ ID NO: 28649 - DNA, 146 bp, Zea mays
tcacctccttcgccgttgtctaccagatcatcacatggcgtcggagaagaagcagtcgaacccgatgcgggagatgaaggtccagaagctcgtgctcaacatctccgtcggcgagatcggtgatcgcctcacccgcgccgccaagg

SEQ ID NO: 28650 - DNA, 182 bp, Zea mays
  unsure (1)..(182): unsure at all n locations
cgcaactggcgccgccactcncacgctcgcagccatgccgcccaagctcgacacgtcgcaggtggtggaggtgttcgtccgtgtgaccggcggcgatgtcggcgcacgtcttcgctggcccccaagataggcacgctcggtctttcccccaagaagatcggagaggacatcgccaaggagac

SEQ ID NO: 28651 - DNA, 182 bp, Zea mays
tcaagcacttcttccagggcctcgtggactacatcatctctggccctgtggtggccatggtctgggagggcaagagcgtcgtcacaactggccgcaagatcattggcgccaccaaccccctggcttctgagcccggcaacatccgtggcgactatgctgtcgacattggcaggttagatctc

SEQ ID NO: 28652 - DNA, 183 bp, Zea mays
  unsure (1)..(183): unsure at all n locations
cgtaagtggtgagggactgagggtctcggagtggattgatttgggattctgttcgaagatttgcttangggggcaatggcgaccgccgggaangtgatcaagtgcaaagctgcggtggcatgggaggccggcaagccactgtcgatcgaggangtggaggtagcgcctccgcaagccatggag

SEQ ID NO: 28653 - DNA, 181 bp, Zea mays
  unsure (1)..(181): unsure at all n locations
agcagggcggcgacttcacccgcggcaacggcaccggcggcgagtccatctacggcgagaagttccccgacgagaagttcgtgcgcaagcacaccgcccccggtgtgctctccatggccaacgccgggccaacaccaacggctcncagttcttcatctgcaacgtcgcgacgccttggctc

SEQ ID NO: 28654 - DNA, 180 bp, Zea mays
  unsure (1)..(180): unsure at all n locations
cgtnttctttgttatagttatttggtctgggaatagcaaatatctgtggttcattcttctctgcatatcctgccacaggctccttttctaggtcagcagtgaatcatgaaagtgtgggcaaaactgggttatctggaatcataatgggcataatcattggtggtgctctcttatttatga

SEQ ID NO: 28655 - DNA, 255 bp, Zea mays
  unsure (1)..(255): unsure at all n locations
caagctcaaacagtgattctgttatggctgaaggagaacctgcctcaaatgctgctgctggtgacaaagaacaaccaaaggatgatgacgatctactacagcaggcacttgcaatgtcaatggagggtggtgcttcaggatctgcagctgtgactgactctgctatggcagaagctggtgcagttgaccctgacttggcattggctcttcaaatgtctgtccgnagatgcaacatgtccagtgacactgatatga

SEQ ID NO: 28656 - DNA, 177 bp, Zea mays
ctcgacggcgcgtctcgaccgcgtgaagaacatgacaggcctggtcgagatgtacggcaagaacgcgcgcctgacggagctggcgaacctcgtgatcgttgccggtgaccacggcaaggagtccaaggacatggaggagcaggcggagttcaagaagatgtacagcctcatcgacga

SEQ ID NO: 28657 - DNA, 171 bp, Zea mays
  unsure (1)..(171): unsure at all n locations
tccttgtttaccattcctcgccagaacacatcctgcgatcctcgaagcctccgccgagcatcgatcatgtcggcctactgcggcaagtacgcggatgagctcatcaagaatgctcgctacatncggcaccctggcacaggtatccttgctgctgatgagtncaactggcac

SEQ ID NO: 28658 - DNA, 348 bp, Zea mays
  unsure (1)..(348): unsure at all n locations
cagctgcgccgtgctgtccagcaaggtggccgcgctcggtacgcactccgtcaacggccacgtcgcgccggcgccgactcagaacggggcggtgctggatttggtcnccgtgagtagtagtagtatcaatggcgccatcaccaagaacctgccgcagccgcttcgcatcgcggacctgtccccggcaccgatgcacgggtcgcagctgcgcgtggcctaccagggcgtgcccggcgcgtacagcgagaaggcggccgggatagcgtacccgggctgcgacgcgatcccctgcgtacagttcngagtggcgttccnagccgtggagctgtggatcgcggaccgcgccgt

SEQ ID NO: 28659 - DNA, 269 bp, Zea mays
  unsure (1)..(269): unsure at all n locations
ccataaggaggaagaaccttcatgactttgagagccttgtggtgttcttcgaagatgctgcaggtgaagcttctacctacagcttagttacgatgttcgataagctggcctcctctccagaataccagcgccgagctgcaatggtggagcacttcaacagaagcaacaagtggaagaagcgtggcatttcttgtgtgccaattacatatgaggtcaatcttcggccaactccaggcaangtgtctatcatgaatgatggttcccatcgt

SEQ ID NO: 28660 - DNA, 266 bp, Zea mays
  unsure (1)..(266): unsure at all n locations
ctccaccccactcgccgccgccgctgccaccgccgcttgctgccgcagccgccatgggggcgtacaagtacgtgtcggaactatggaggaggaagcagtcggacgtgatgcgcttcgtgcagcgcgtgcgctngctgggagtacaggcagcagccgtccatcgtccgcctcaccaggctcacccgccccgacaaggcccgtcgtctcggctacaaggccaagcagggatatgttgtctaccgtgtccgtgtgaagcgtggtggcag

SEQ ID NO: 28661 - DNA, 339 bp, Zea mays
ctccaagcccgtgagccattcagtgatgaaaccattgaatacatcaaatcacttgatgctgaagaagacatcaagcttctcaagttccatgggtgggagctgcccccacgatgcgctcgtgttctgcgcatcagcaccatgcttttgaagaaaggtgcagctcgtggcttcacaccatatgacatagggcgcatactatgcagggaaactgtgaatagggagtctgagattgaggacatcattcaggaagcagaggatgctgttctcgcagggtccagtgaaaacatgttcttagaaactgtatctgaaatcatggaccgtcacctcgacaaggagtga

SEQ ID NO: 28662 - DNA, 193 bp, Zea mays
cacaaaacatactcctgccgaagcgctgagaagtagctagacaagaataatggggttcagtgaggcacaggaagagctcgtcctccgttcatggaaagccatgaagagcgactctgagtcgactgctcttaagttcttcctcaggatctttgagatcgcgccgggtgccaagcagatgttctccttcctgcgc

SEQ ID NO: 28663 - DNA, 191 bp, Zea mays
gcttggtagcagcgatggtgtcaagggcaccatcttcttcacccaagagggagatggccctaccactgtcaccggaagtgtctctggcctcaagcctggcctccatgggttccatgtgcatgcacttggtgacaccaccaatggctgcatgtcaactggaccacactacaatcctgcgagcaaggaacatg

SEQ ID NO: 28664 - DNA, 332 bp, Zea mays
gatgacacgccgtgggatggaggcacgttcaagctgactctgcaatgtacagaagattaccccaacaaacctccaactgttcggtttgtttcgaggatgtttcatccaaacatctatgcggatggaagcatctgtttggacatcctacaaaaccagtggagccctatatatgatgttgcggcaatattgacctctattcagtccctgctgtgtgacccaaacccaaattctcctgctaactctgaagcagctagaatgttcagcgagaacaagcgtgagtacaaccgcaaagttcgtgtagttgtggagcagagctggacagccgactgaaa

SEQ ID NO: 28665 - DNA, 331 bp, Zea mays
gatcctaccgctccaaacacccgccaggtctgagagctcgactcgagatatggccgactggggccccgtggtggtggcggtggtgctgttcgtgctgctctctccgggcctgctgctgcagctgccggccaagggcgccggccgcttcgtcgagttcggcaacttccagaccagcggcgcctccatcttcgtccacgccatcatcttcttcgccctcgccgccgtcttcctcatcgccatcggcgtgcacatcactacgtactagccttggaatcttacttcatcagtctgcctgcacacccatgtgcagacctagcaagtggtttatatg

SEQ ID NO: 28666 - DNA, 191 bp, Zea mays
cagcagaagaggaagcaccaaagccaaagccacagaatcctcttgacttgctgccaccaagcaagatggtccttgatgactggaagaagctatactcatacacaaagactaacttccgggaggttgccatcaaaggtttctgggacatgtacgaaccagagggctactctttgtggttctgtgactacaag

SEQ ID NO: 28667 - DNA, 325 bp, Zea mays
gtgggtgcattgctcggatatgctcagggtgcgaaccacaagcgtgtgattgccttcattggtgatgggagcttccaggttacagcacaggatgtgtcaactatgctgcgatgtgagcagaacagcataatcttcctgatcaacaacggtgggtacacgattgaggtggaaatccatgacgggccatacaacgtcatcaagaactggaactacactggctttgtggacgccatccacaatggcttgggcaagtgctggacctccaaggtgaagatcgaggaggagctgacggctgccattgagacagcgctatgggagaagaagg

SEQ ID NO: 28668 - DNA, 334 bp, Zea mays
cgacgaccatgtcgttgctggaggcgcacatgcggggcgcgccggacggcgtgtacacgcgcgacttccccgaccggccgccggtgatgttcgacttcacgggcgacgccacggcggccaaccggtcgttcatgctcacgtccaagggcaccaaggtgaagacgctgcggtacaacgagacggtggaggtggtgctgcagaacacagccgtccttggcgccgagaaccacccgctgcacctccacggcttcaacttcttcgtgctggcgcagggcacgggcaacttcaacgcgcacaggcacgtccgcaagtacaatctcgtcaacccgcagca

SEQ ID NO: 28669 - DNA, 328 bp, Zea mays
agccggcgacatcaaccgcgaccgcacaatcaccgtgctggccgtggcaacggcgacatgggccacctcgccgccggccactactcgctcggcaccatccgccacatcctcgagctgcacgtcgtcgccgactactacgacgacaagaagctcaagcagctgtcgcacgccgccaccgccgcgtccaccttgttccagcgatccggatttgcccccggcatggcaggatacgtgaacataacgcagcaccgcggcggcaaggtgtcgttcatcgtggacgacgcggcggacagcgtcaagcaccgtcactacgtgaagcagatcgaga

SEQ ID NO: 28670 - DNA, 327 bp, Zea mays
cgtgcccgactggcttcaagtgcggaatcaactaccagcctcccagcgtcgtcccaggcggtgatctggccaaggtgcagcgtgccgtgtgtatgatctccaactccaccagtgttgtggaggtcttctcccgcattgaccacaagttcgacctcatgtacgccaagcgcgccttcgtgcactggtacgtcggtgagggtatggaggagggcgagttctccgaggctcgtgaggatctggcggcgcttgagaaggactacgaggaggtcggtgctgagtttgacgagggtgaggacggcgacgagggtgacgagtactagacgctct

SEQ ID NO: 28671 - DNA, 327 bp, Zea mays
ctccgatccatctcttcggctgcctgtgctacccttcacttcacctcacacaggaatatactacacattcctgccttagatacatatatacttttttactgaaaaaaaaggctgagccggtgcgagcgcggcttgagcaatggcgagcgcgtttagctcgagggcatgcgcgctgctggcgctgctcctggggctctgcaccgccggcgcggcggcgggcagggtggacgacgggctggaggtgacgtggggcgacggccgcgggagcgtctcgcccgatggccaggtgctgacgctgtcgctcgaccgcacctccggctccgggtt

SEQ ID NO: 28672 - DNA, 326 bp, Zea mays
ggccgcggcaagaagcgcgccgtcctgatcggcatcacgtacggcggcgcgcgccggggctgcggcgagctgcggggccccatcaacgacgtcaagtgcatgaggcagctcctctgccagagcatcgccttccccagcgacggcatcatcatgctcactgacgaccagaaggacccgttccgggtgcccaccaaggacaacatccggatggcgatgcagtggctggtgcaggggtgcagcagcggcgactccctggtgttccacttctctgggctgggcgcgcaggtcgccgacgcggactgcgacgagcaggacgggtacgacga

SEQ ID NO: 28673 - DNA, 320 bp, Zea mays
  unsure (1)..(320): unsure at all n locations
gttgttagcaacttcattgctcaggctgtgcgcggtgagcccctgactgtccagaggccaggaacacagactaggagtttctgctatgttgccgatatggttgatggtcttattaagctgatgaatggaaacaagactggaccgattaacttggggaacccaggtgaattcaccatgctggaacttgctgagaatgtgaaggagttgatcaacccagatgtgacagtgacgatgaccgagaacactcctgatgatccccgccagaggaagccggacatcacaaaggcganagaagttctgggatgggagcccaagatcgt

SEQ ID NO: 28674 - DNA, 317 bp, Zea mays
ctactccatgaatgcgatccatggctctgcattctctacaatccatgtgacgcccgaggacggtttcagctatgccagttacgaggttatgggcttggatgccactgctctatcttatggtgaccttgtcaagagggtcctccggtgctttggcccctcggagttttccgttgccgtgaccatcttcggcgggcgtggccatgccgggacatggggaaaggcactaggtgcagaggtctatgactgcaacaacatggtggagcaggagctgcctggaggcgggctcctcgtataccagagcttctgcgctgctgaag

SEQ ID NO: 28675 - DNA, 190 bp, Zea mays
gtggggtcctaacagtggagattgagcatgttgatgtcaccacactggagaaactggaaaaacagggcgttgactgcgagcctaacgcctccacaatcatgattattcaggacaagtacaggcagaaaaagcatttctcaagatgcgagatcccattgcctgacttcatggaagtagatactttacgcag

SEQ ID NO: 28676 - DNA, 333 bp, Zea mays
  unsure (1)..(333): unsure at all n locations
aacctctgtctgcgtgctctcgccttggctgtcgattttactaatttggttgcttggatgtggaccgttggcttagatagtcaattagcatgaattacttcgcgtcctttacccagtttttatccattgcttcatggatctagtggcagagggacatatgcacaatgctcggtcatttttccatacatttcgggaagctcataaggtgatgcattcaagggatcttcagaagctggaaggcatcctctctccttcacacttggaggaaacggaactggctcgatcttttaggaaaaaataaatttanaattacattatgcgagtactcgtatg

SEQ ID NO: 28677 - DNA, 252 bp, Zea mays
tggcggatccagtacggccacgagacacgcccgcaccacggcggcgggggcggcgccgcctgtgaggcagcagacgtacaggatctactgcacagctggggaggaccagtacagcctcgcctcccgcgacggcaaggtctgcctcgtgcgcacggaccgtgatgacgacgcgcacactcggatcaaggacatgaagtacagcaccagggtgaaggatgaggaaggctaccctgccatcgtcctcgtcaacaa

SEQ ID NO: 28678 - DNA, 338 bp, Zea mays
  unsure (1)..(338): unsure at all n locations
ctcgtttcaaatccatccatcctcgtttcctccgtcncgcagcatctcaaccccatggccaagatcaagatcgggatcaatgggttcggcaggatcggaaggctggtggccagggtggctctgcagagtgacgatgtcgagctcgtcgccgtgaacgaccccttcatcagcaccgactacatgacctacatgttcaagtacgacactgtacacggacagtggaagcaccatgaagtcaaggtgaaggactccaaaacccttctctttggtgagaaggaggttgctgtgtttggctgcaggaaccctgaggagatcccgtggggttcggttggtgctga

SEQ ID NO: 28679 - DNA, 330 bp, Zea mays
acacagtcctcatctctacccagcacgacgagacagtcaccaacgacgagattgctgctgacctgaaggagcacgtcatcaagccagtcatccccgagcagtacctcgacgagaagacaatcttccacctcaacccgtctggccgcttcgtcatcggcggacctcacggcgacgcgcgcctcactggccggaagatcatcatcgacacctacggtggctggggagctcacggcgcgggcgccttctccggcaatgacccgaccaaggtggaccgcagcggggcctacgtcgcgaggcaggctgccaagagcatcgtcgccgccggcctcg

SEQ ID NO: 28680 - DNA, 340 bp, Zea mays
acggcgtcggcgcgtacgtggacctgatgcagggcctggtctcgggcatgcgcgacggcaccgtccgcaccgcgctcgacaccggctgcagcgtcgccagctggggcggcgacctgctggggcggggcatcctcaccgtgtcgctggcgcccagggacaaccacgaggcccaggtgcagttcgcgctggagcgcggcatcccggccatcctcggcatcatctccacgcagcgcctgccgttcccgtccgccgccttcgacatggcgcactgctcgcgctgcctcatcgcctggaccgagttcggcggcctctacctcctggagatccaccgcgtcctccg

SEQ ID NO: 28681 - DNA, 174 bp, Zea mays
cttgtgctgacatctttaaggcctatggtgacttaatggttcactcaatcgatccactgctagtacaactgtttctgaaggcttcacaagataagcgttttgtctgtgaagctgcagaggcagctcttatatcgatgacaagttggatctcccctttactactcttgccaagaa

SEQ ID NO: 28682 - DNA, 253 bp, Zea mays
ggccgaagcgacgcacaaccacacgttcacggtagcgagagttatcgtcgtcggcggtgaagatggtgtcgctgaagctgcagaaccggctcgccgctagcgtcctcaagtgtgggaaaggcaaagtctggcttgaccccaatgaagtcagcgagatctccatggctaactcccgccagaacatccggaagttggttaaggatgggtttatcatcaggaagcctcagaaggttcactctaggtcccgtgcaag

SEQ ID NO: 28683 - DNA, 331 bp, Zea mays
  unsure (1)..(331): unsure at all n locations
cgggctggcttcctcnccttcctggtctgcttctcctcaccgttgacgaatcacgaggccggcctgcctgcctgcctgcctgctttttctgtgctccgttcgaatggacgggcagaggagtcgatgagcggccgtgggctttgattttcccctggggtctgctcttcttggtcagcaaggagacctgaacacgaattgatctctgcgccgctgcaaccccggcccgtcgaagccatggggtccggggactggttcaagacgatcatcagcaagaacaaatcgaagcggggaaagtcaaagcacgcaaagctctctggctaagtaacaaatg

SEQ ID NO: 28684 - DNA, 245 bp, Zea mays
gtgatcacagacagggagactgggaggtcaagaggctttggctttgtgaactactccgacagtgatgctgccaaggaagctatttctgcaatggatggcaaggaaattgatgggcggcaggtacgtgtcaacatggctaatgagagacctgctgggaaccgtggtggtggtggctatggcggcggcggctatggaggtggtggctacggaagtggcggcggctacggatgtggtggctatggtgg

SEQ ID NO: 28685 - DNA, 274 bp, Zea mays
cggctcgagaacagcccttgcccacgccatgacgctcagcaagaagcaaggcgcaggcactgatcagcaggccttgctggatgctcagctgcagctctggcaccacaccatcgcttttgtcaagtccatggcgctcaaggccgccgtagacctccgcatagcgacgccatccacctgcacggcggctcagccaccctctcgcagatagtcaccaaggtcacactccacccgtccaagataccatgcctgcgacgcctcatgcgcgtgctcactc

SEQ ID NO: 28686 - DNA, 322 bp, Zea mays
ggcaagactggagggcttggtgttcgtaaactcacaacaaagccaaatgaaagcctgtatgagcagaaaccagaagagccaaaacctgctatacctgccttgactgctccaactgcaaaaggtggtccatccttgcattcacgttttgaatatgtggataacgaacaatcatctgtttcaagaaccgggggatctggatctcgtgtaaccggtcatgtagcaccaccaaaatcatctgacttcttccaagagtatgggatgggtaatggattccacaagaaatcaagcaacgcctcaaaagctcagattgaggaaactgatg

SEQ ID NO: 28687 - DNA, 328 bp, Zea mays
gtgttggctgacgacaattttagcaccatagtttctgcagtcggtgaaggaagatcgatctacaacaacatgaaagctttcataagatacatgatttcgtcaaacattggtgaagtcgcttctatattcctaacttccgccctgggcattcctgagggtttgattcccgtccaacttctatgggtcaatctcgtcaccgacgggccccccgcaactgctctaggtttcaatccgcctgacaatgacatcatgaagaagccacctaggaggagcgacgactcactgatcactccctggatcttgttccgctacctggtgattggccttt

SEQ ID NO: 28688 - DNA, 332 bp, Zea mays
  unsure (1)..(332): unsure at all n locations
gtgatagtgaagctcgcacaattttgtcatgtcncggtaaatatgtttcctgataccaaatatcattaatctccatgatgtcaccaacatttggcacattcctttgttgctcagagatcagaaggcccatgaagctattttgaaggtgttagaccttcagtgcgcgagtacagttgctcgagaaccccaattgtctgaatggactgaaagagtcagcagatgtgacagattgaaatctccggttaggattgcaatggttggaaagtatactggcctgtcagactcctacctatctgttatanaggctcttttgcatgcgtcggttgctttgg

SEQ ID NO: 28689 - DNA, 319 bp, Zea mays
cggctcgagcccctcctcgccgctcgccgttgaagaggtacgcacacgggccgacgagaatggaggcggcgacgatggtgtggacggcggcggtggtcggggcggggctggtgtactggttcgtctgggtgatgggcgcggcggaggtgaagggcaagcgggcggtggatctcaagatgggatccatcacgcgggacaaggtgcaggacaagtacacgcagtactggtccttcttccgccgccccaaggagacggccactacggcggcgtcggcggagaaagtgcggccttcgtcgacacttctacaactcgtgacgac

SEQ ID NO: 28690 - DNA, 316 bp, Zea mays
gggaaaaaacaagaacgtagcaactcagcttagatatgattaactcaaatacttccaacaaaacagcataattgtgcaatgcttagctttgaattcttgagctggaatggaacaacacaaatgtcttgggatactaaagaagtagaaaaatctgaatgaacattgccaacggactcttgggatactaaagagccgagtaacagctcatttcagaggaataaaccgcgaggagtgggtggcaccgataccgggcctgccgtgcttgaccggcttgtaggagatggagaactcagcaaggtagtggccgatcatctca

SEQ ID NO: 28691 - DNA, 327 bp, Zea mays
ctacaattgtgatatctgatgtggatggcaccataacaaggtctgacgtgctgggtcaggtcatgcctttggttggacgtgattggagtcactcaggtgttgctcgccttttttctgcaattaaggaaaacggttatcaactactattccttagtgctagagcaattgtccaggcatatctcacgaagaacttcctctttaatctcaaacaggatgggaaagcactacccaatgggcctgttgtaatttcacctgatggcttgtttccttcactctaccgagaagttatacggagagccccacatgaattcaagattgcttgcctgg

SEQ ID NO: 28692 - DNA, 328 bp, Zea mays
tccattccacacaaccaccactgctcttgccccagcccgccgcaggagttgccagatctgctccggtcacaggagctccgactccgagccctctccaatggcggttaaggtctacgtcgtgtactattccatgtatggacatgttggcaaactagctgaagagatccagaaaggtgcctcgtctgttgaaggtgttgaagctaaaacatggcaggtccctgaaaccctccctgaggaagtgcttggaaagatgggcgcaccccctaagcctgacgtgccagtcatcacgccgcaagaactcgcagaggccgacggaatcctcttcggg

SEQ ID NO: 28693 - DNA, 240 bp, Zea mays
attgaaataaaggaaagcaaccggcctaccaaaatgaagcttccacagttggaaccagatgagagaagcgtgacaaacataaaagaaagtgttcgggactttgttgtcggcagtggtgaatatgtgatcaaagattttaagttcactgttaaccaagcagtgcgaccagtggagaagcgcattgataaattgatgaaaaagaatgataagagtaagaaaagccaggacgacaactgggtg

SEQ ID NO: 28694 - DNA, 323 bp, Zea mays
agtcctcctgtatgtatatctttgattttttttattgtaatatgcatattggtaactagtgaataatatttactacactaatttgcagatgggaaatccatggatctacatgtaccctgagggcttgaaggatctccttatgatcatgaagaacaaatacggaaacccacctatctacatcacggagaacggaatcggggatgttgataccaaggagacacctctacccatggaggatgccttaaatgactacaaaaggctagattacatccagcgccacatcgctactcttaaggaatcaatagacttgggatcaaatgtgc

SEQ ID NO: 28695 - DNA, 323 bp, Zea mays
acgcactctcctccgccgccgcccgaggcaagatggttctccagaacgacatcgaccttctgaacccgccggcagagctcgagaaactcaagcacaagaagaagcgcctcgtccaatcccccaactccttcttcatggatgtcaagtgccagggatgcttcagcataaccacggttttcagccactcccagactgttgttgtgtgcccaggctgccaaactgttctctgccagctcacgggaggaaaggcgaggctcacggagggatgctctttccgccggaagggagactagagtggagtctgttattagtactggatcggt

SEQ ID NO: 28696 - DNA, 328 bp, Zea mays
ttcctttttgccaactcgaaatgcaagcgctacttccacaaccgcctgaagcctgcaaagcttacctggacagcaatgtacaggaagcagcacaagaaggacatccatgctgaagctgtcaagaagaggcgccgcgccaccaagaagccatactcgaggtccattgtgggtgcttccttggaagtgatccagaagaagagagctgagaagcctgaagtccgagatgctgctagagaagctgctcttcgtgagatcaaggagcgcatcaagaagaccaaggatgagaagaaggcgaagaaggctgaggtgtccaagtcccagaaggcgc

SEQ ID NO: 28697 - DNA, 163 bp, Zea mays
  unsure (1)..(163): unsure at all n locations
atctaatcaacaagtccaacgactatgttgctttcaaggttanaacaacatctcctagaagatactgtgttcgaccanatactggggttatccttcgaaggaaaacatgtgaattcacagttaccatgcaagcgctccgaactgctccgccagacatgcaact

SEQ ID NO: 28698 - DNA, 167 bp, Zea mays
cgccgcaagaacaaatcgcttgaggggctgcaggccaatgtccagaggcttaagacatacaaggccaagctggttatcttcccaaggcgtgctcgcaaggtcaaggctggtgactctactctggaggagcttaccactgctacccaggtacagggtgactacatgcc

SEQ ID NO: 28699 - DNA, 225 bp, Zea mays
tagaggcgctaccactgtcactggaagtgtctctggcctcaagcctggcctccatgggttccatgtgcatgcacttggtgacaccaccaatggctgcatgtcaactggaccacactacaatcctgcgagcaaggaacatggagcaccagaagatgagaaccgccatgccggtgatcttggaaatgtgacagctggagcagacggtgttgcaaacattaatgttac

SEQ ID NO: 28700 - DNA, 344 bp, Zea mays
catccacccgccgctcctcaagccccaagctccggcgatatgtcacgcttcggtcgatccggtccgccgccgccgatccgcgacacatattcactcctcgtcctcaacatcaccttccgcacgactgctgatgacctcttcccgctcttcgacaagtacggcgagattgtcgacatctacatcccaagggaccgcaggactggcgactcgcgcggattcgcgttcgtgaggtacaagtacgaggacgaggcacagaaggcagttgataggctcgatgggagattggtagacgggagggagatcatggtgcagtttgccaagtacggtccagatgctgaacggat

SEQ ID NO: 28701 - DNA, 217 bp, Zea mays
  unsure (1)..(217): unsure at all n locations
cgtgctctcaggtgatgagagctacacagaagattcccatgttcgacatgcattaactccttaccttgaatacattgcgtacctatatcggaagatggatccgcttcctgagcaggaacgcattgagattaattacagggactttttgcagtctcctctgcagcctctaatggacaatttggaagctcanacttatgagacatttgagaaggatgtt

SEQ ID NO: 28702 - DNA, 213 bp, Zea mays
tgcagaataaggagccatgctcgcttgtgtaatttcataagactacaaccctattattgcttgtttggttgtgtctgtatcgaagggaattgaaggtgattaattttccttctattctaatagaggggttttaatctcctccaatactcttcaatccacacctaaccgaacaagcccttaatatgatatcttacattgccatatctgtgtaat

SEQ ID NO: 28703 - DNA, 197 bp, Zea mays
  unsure (1)..(197): unsure at all n locations
cgggtntcttctggagcacagaagtttattaagcgcattctcgatcctaatcctgatacgaggataacaattgcagaaattttggaagatgaatggttcaaaaaagactataaaccaccacgttttgaacaaggtgaagatgttagccttgacgacattgatgctgcattcaatgattcagaggaccgtcttgtggc

SEQ ID NO: 28704 - DNA, 111 bp, Zea mays
tgtggagtcgcaccacttccacccgaacgcgtcgccgctggtgttccagctgctcgtgaagacgctcctgggcggcgcacccgacgcggcggtggtggagaagcacgcgga

SEQ ID NO: 28705 - DNA, 147 bp, Zea mays
  unsure (1)..(147): unsure at all n locations
cttcaatctncccagcaatcgctagcagaagccttccatcctcactcgctcgatggcccgcacgaagcagacggcgaggaagtccaccggcggcaaggcgccgaggaagcagctggcgactaaggcggcccgcaagtctgcccctgc

SEQ ID NO: 28706 - DNA, 190 bp, Zea mays
cgcacgattctcctcctccgtccgcgtacatctcggtttcggcgatgtcggggcgcggcaagggcggcaaggggctgggcaagggcggcgcaagcgcaccgcaagtgctgcgcgacaacatccagggcatcacgaagccggcgatctcgtagctggccaggaggggcggcgtcaagcgcatttctgggct

SEQ ID NO: 28707 - DNA, 191 bp, Zea mays
aaaaggctccagagtttaagtttggctggaggaccgacgaagagtttgcgagggagacgcttgcaggcgtgaacccagtgctcatcaaacgtctgacggagttcccagctaaaagtaccctggacccaagtcaatacggagaccatacgagcaagatcaccgaagctcacatccagcataacatggaaggc

SEQ ID NO: 28708 - DNA, 183 bp, Zea mays
  unsure (1)..(183): unsure at all n locations
cagacttgacttcgctanaggaagaagtacacaaactcctcgcagcggcaatgatggatctttccagaaggctgctcggggtaacagcagctcaatatttatccggggctttgataaaaatctttcagaggatgagatccggagctctctcgaacaacattttagtgattgtggtgagatgac

SEQ ID NO: 28709 - DNA, 188 bp, Zea mays
  unsure (1)..(188): unsure at all n locations
acagtccagatgtacttatttgggatgttgaagcacaaccaaatagacatgctgtcctaggagcaagcgagtctcgccctgatctgatattaacaggacataagganaatgcggaatttgcgcttgccatgtgtccagcagaaccatatgtcctatcaggaggaaaggacaaatctgttgtcttgtgg

SEQ ID NO: 28710 - DNA, 184 bp, Zea mays
atcaccaagaacctgccgcagccgcttcgcatcgcggacctgtccccggcaccgatgcacgggtcgcagctgcgcgtggcctaccagggcgtgcccggcgcgtacagcgagaaggcggccgggaaggcgtacccgggctgcgacgccatcccctgcgaccagttcgaggtggcgttccaggccg

SEQ ID NO: 28711 - DNA, 181 bp, Zea mays
ctgcgacgccaccaccacacgttcacggtagcgagagcatatcgtcgtcggcggcgaagatggtgtcgctgaagctccagaagcggctcgccgcgagcgtcctcaagtgtgggaaaggcaaagtctggcttgaccccaatgaagtcagcgagatctccatggctaactcccgccagaacat

SEQ ID NO: 28712 - DNA, 179 bp, Zea mays
gtacctcgcaagaagctggctggtgatccgaaccttcactttgttgaagctgttgctcttaagcctccggaagttaccatcgacatggctatgcagcagcagcatgaagctgagcttgctgcagcagctgcacaacctcttcctgatgacgatgatgatctgattgagtagaaaggatc

SEQ ID NO: 28713 - DNA, 180 bp, Zea mays
cgccggcgacgtggccgcggtggtggacgaggaggcgtgcatgtacgcgatgcagctggcgtcgtcgtccatcctgcccatgacgctgaagaacgccatcgagctgggcctgctggaggtgctgcagaaggaggccggcggcggcaaggcggcgctggcgcacgaggaggtggtggcgcg

SEQ ID NO: 28714 - DNA, 154 bp, Zea mays
  unsure (1)..(154): unsure at all n locations
cgccgacaanaccagaccatcaaacaagtgccagcggcctctcgcagtcgccgcaatggagagcaccttcatcatgatcaagcctgacggcgtccagaggggcctcattggtgagatcatcagccgttttgagaagaagggcttctacctcaag

SEQ ID NO: 28715 - DNA, 277 bp, Zea mays
  unsure (1)..(277): unsure at all n locations
tgctcncacacagctggtcaagcccaaggagaggaatgagaggtatgttgatgctgtcatgacaatccccaagggaaccttgttccccatgtgtggcatgaaccttgccttcgacagggatctcattggccctgctatgtactttggtctcatgggtgatggccagcccatcggtcgctacgacgacatgtgggcaggatggtgtgtgaaggtcatctgcgaccacctgagcctgggagtcaagactggcctgccatacatctggcacagcaaggct

SEQ ID NO: 28716 - DNA, 231 bp, Zea mays
ctggtaccagagatggcctttcatctgagagcatctctagatatctgctgcctgcttctgaatgcgagtttgtattgaactcagttatagaagaaatacaaaaggacccttggcctgttccagctgatcagcgtgcatctaggtgcactggagctgccttaagtgttgcagccaatctccttggggtttgtgttcctggatcaggtgctaggataatggcatttgttggtg

SEQ ID NO: 28717 - DNA, 366 bp, Zea mays
  unsure (1)..(366): unsure at all n locations
tgtgaattaccgtggaacatggcgagtccagggctcnctggcagtgtctaggggcattggggatggacacctanagcagtgggttgtggctgacccagacaccacgacgctcctggttgaccagcagtgcgagttcttgatacttgcttctgatggcctctgggataagatcgacaatcaggaggcggtagaccttgcacgacctctctgcatcaacaatgacaagacctctcgcatggctgcctgcaggatgctcaccgagacatcgatttccaggggctcgactgatgatatcagtgtcgtgatcgtgcagttgcagaaattttcaagctcgtacactagttggagaagctggaacaaaactct

SEQ ID NO: 28718 - DNA, 233 bp, Zea mays
ctaccagattggtatgttcgcatacaccggcctcaagcccgaacagatggaggctcttgccaaggatgactccgtttacgctaccaaggatggtcgtatttccgtcgctggtatcaccaccggaaacgtcaagagacttgccgagtctattttcaaggtcactggttaagggttaaattatacggattagaaggtggctgtactctggtctagaccgcgaaaaagattggatg

SEQ ID NO: 28719 - DNA, 160 bp, Zea mays
caagaagaagcgtagtcgtcgccggaaagaaaggcgcggacaagatgtcgtggcaggcgtacgtcgacgagcacctgatgtgcgagatcgaaggacagcatctcagcgccgccgccatcgtcggtcacgacggcagcgtttgggcgcagtccgagagctt

SEQ ID NO: 28720 - DNA, 156 bp, Zea mays
cgtgatggtctaagatctgttaagaacacagttgaggatgaagcagttgtgctgggtgctggtgcttttgaggttgctgcaaagaagcatcttatcgacaatgtgaagaaaaccgtcaaaggacgagcacaacttggggtggaggcgtttgcggaa

SEQ ID NO: 28721 - DNA, 359 bp, Zea mays
cgacttgtttcattgattcttcaagagatcgagcttcttttgcaccacaaggtcgaggatgtcttgcagctgcggatcaagctgcggctgcggctcaagctgcaagtgcggcaagaagtaccctgacctggaggagacgagcaccgccgcgcagccaccgtcgtcctcggggtggccccggagaagaaggccgcgcccgagttcgtcgatgccgcggcggagtccggcgaggccgcccacggctgcagctgcggtagcggctgcaagtgcgacccctgcaactgctgatcacatcgatcgacgaccatggatatgattattatctatctagcttgtggtggtggttgaacaataataag

SEQ ID NO: 28722 - DNA, 193 bp, Zea mays
cggctcgaggctgggttctcggccgcgctcaacagcggctacgagtcctggggcccgtcttcggtaaggagtcttcgccatgtgggtgatcatgcacctgtaccgttcctcaaggttcatgggccgcagatacgacgcgacatcggggctctggtcgtctctcgctcgctttcctctgtggcaaatgccatcg

SEQ ID NO: 28723 - DNA, 228 bp, Zea mays
  unsure (1)..(228): unsure at all n locations
ggataatgatggaaataaataaggaagagaatattcgcttggggttgcaccgatcagattatatgctggattcagaaacaagttctcttcttcaaatagagctcaacaccatttcagcatcatttcctgggcttggttccttagttagtgatcttcacaggtccttaattanacaatatgggacttctttaagtctagaacacaagagggttcctgcaaatgcggcta

SEQ ID NO: 28724 - DNA, 360 bp, Zea mays
  unsure (1)..(360): unsure at all n locations
cgcggacagcgtccttctcgtcgatgatcgccgccggtagcccgtcgctgttcaaggagggcaagggatgcggcgcttgctacgaggttaaatgcgacagcacacgctgcatgctccggcaagccggcgaccgtggtcatcaccgacgagtgccccggtggcgtctgcctcgccgaggcggcccacttcgacatgagcggcacctccatgggcgccatggcgaagcccggcatggccgacaggcttcgcgcctctggtatccctaaagttcagtacaagagggtcccgtgcaagtacagcggcgtgaacatcgccttccgggtggacnagggctccaacccgttctacttcgaggtgctg

SEQ ID NO: 28725 - DNA, 210 bp, Zea mays
ccaagcgcacccgcgagccctccggcgaagtcaatcctgcgctccgcaggcagcatcaagcatggcggacacgaaggcctcacccgcggtgacgctccgcacgcgcaagttcatgaccaaccgcctcctctcccgcaagcagttcgtgctcgaggttctccaccccggccgcgccaacgtctctaaggcggactcaaggagaggctggct

SEQ ID NO: 28726 - DNA, 141 bp, Zea mays
  unsure (1)..(141): unsure at all n locations
atattgcaagaccttttagtgcnaaagctgctggaaatgaggttattgggattgatttggggacaactaactcttgtgttgctgttatggaaggaaagaacccanaagttattgagaatgctgaaggtgcgagaacaacac

SEQ ID NO: 28727 - DNA, 204 bp, Zea mays
gtctaagcattttccaaggtagccatggtgggaaagacactctgaagttggaagaaacgaaggaagttccagacaatgagtttgaaaagcgtatcagaccagaggtcattccggcaagtgagataggagtgacattcgatgacatcggagccctggcagatatcaaagagtctctccaggagctggtcatgcttcctcttcgac

SEQ ID NO: 28728 - DNA, 103 bp, Zea mays
  unsure (1)..(103): unsure at all n locations
tgaagattctcncttgccttggtacttgcccttggatccaagccgattctccctgagtagcttccgtttgacctctgtgggacgcatgattacccgcacaatg

SEQ ID NO: 28729 - DNA, 152 bp, Zea mays
  unsure (1)..(152): unsure at all n locations
tcagccccaacaacacactncccactatcatcaccaagttcaagcgccagggcctcaatgttgttgatgttgtcgccctctcaggtggtcacaccattggtatgtctcggtgcactagtttccggcagaggctatacaaccagacaggcaat

SEQ ID NO: 28730 - DNA, 253 bp, Zea mays
caaataatttatttttgggtattgagcaaggagctggaacagcaatggccagtctgcctttcccaagtttgacaacgggagctcaatggcattaccatctgggcagggaatgtctggtcttatgggaaaaggggcaaaatggcgtgacggggactggttgtgcaacaactgcaacaatcacaactatgcatctcgtgcgttttgcaacaggtgcaaaactcagaaagaatctgcagttcaccctggtgtgtta

SEQ ID NO: 28731 - DNA, 182 bp, Zea mays
cgcccagataagccacttgacattacggtcatcagtagaatgaaacagttcagggcaatgaacaagctcaagacagttgcattgaaggttgtggcagagaacttatcagatgaagagattatgggcctaaaagaaatgttcagatccctggatactgataacagtgggacaattactcttga

SEQ ID NO: 28732 - DNA, 246 bp, Zea mays
gtgttgctgaatgtggactggcagaattgatgccaccaagttcagtcactcagctgtcaggtcggatgcgtgcattactgaactacgaagcacctgagttgcaggattctggggtcgtttcagaaaggggtgatgtatacagctttggtgtagtgatgctggaacttcttactgggcgtaaaccatatgacagttcacgcccgcgtcatgagcaacatcttgttagatgggccattctcagcttca

SEQ ID NO: 28733 - DNA, 370 bp, Zea mays
ctcgctgcagcgaagtaactcggaatcggctcgaattcagggattccagccatccgtccagagttggatctagtggagcaggatgaccagtttacacatgagatatcccttgaagatcacctagaccctgagaccaatctaaatgttttccaggcaaaccccaattttgttgaagatgagaaggcatatgagaatctaaagagaagcatcctgggagcagagtcttctgaagatgaagaaagatcagatgctgcttctgatgatgatgatgaagaagaagaagaatctgatgaagaggatgaggaacaaatggagataagggatagaacagagacaaatcttgtgaatcttagaagaacaatatatttga

SEQ ID NO: 28734 - DNA, 132 bp, Zea mays
  unsure (1)..(132): unsure at all n locations
ctggccaggtctctcncatatcgggttctcgcttcctcttcctgtttccgcgcgcgagatcgccgccccgggtgggctctagatcccgatggcctcgcgccgccgcaccctgctcaaggtcatcatcctcgg

SEQ ID NO: 28735 - DNA, 132 bp, Zea mays
cggcgccaccactccaacacggggtcgctggagcgcgacgaggtgttcgtgcccaagaagaaggaggcgctgccgtggtacaccccgtacgtgtacaacaacccggtcggccgggtggtgcacatcgtggtg

SEQ ID NO: 28736 - DNA, 333 bp, Zea mays
gttctagcatctggaagcaaatgtcagaagctgggatcaagtacattcccagcaacaccttctcgtactatgaccaggtccttgataccacggccatgcttggtgctgtcccagagcgctactcttggactggaggcgagattggcttgagcacctatttctcaatggccaggggaaatgccactgtccctgctatggagatgaccaagtggtttgatacaaactaccactttattgtccctgaacttggcccaagcaccaagttcacatacgcttctcacaaggctgtttctgagtacaaggaggcaaaagcgctcggtattgatactgtcc

SEQ ID NO: 28737 - DNA, 147 bp, Zea mays
ggaggcggacaaggtaagcagcaatcgcaggaaccctagcgccgccgcacccgcaggaatgggtatcgacctcgtcgccggtgggaggaataagaagaccaagcgcactgcgcccaagtctgacgatgtctacctcaagctcctcgt

SEQ ID NO: 28738 - DNA, 142 bp, Zea mays
cgggcaatgttgaggccactggtgaggacttctctgttgagccagctgatgagaggaggcctttccgtgctctcttggatgttggccttattaggactacaactgggaaccgtgtctttggtgccctcaagggagctttgga

SEQ ID NO: 28739 - DNA, 166 bp, Zea mays
tgacggctatcggcggaggaagtacgggcagaatgtggtgaatggaaatccacacccatggagctactacaagtgcacgacggtcgggtgccccgtgcgcaatcactggtcgcgcgcgtcccacgacctgcgcgccgtgatcaccacgtacgagggcaatcacaac

SEQ ID NO: 28740 - DNA, 129 bp, Zea mays
tcctgttcctgcgcggcgacggcacgctcgcgccggtggccatcgagatgagcctccccgagctccgggacggcatcacggccgccaagagcacggtgtacacgccggcgccgcgacggccggcgcgga

SEQ ID NO: 28741 - DNA, 320 bp, Zea mays
actgacctttggacatccgacctcacggaggatggtgctgatgagggcaaagatgccccgaaaggtgatgcaggcgagggacagtaatcttcggagggggtgcatagttgttcgagccccaatgttttagatgctctatgctgtcgaagctgtgctgtgccattattgtagctgatttcgtctccattcacttcttttttcttgttagtaggctggtagtggtcgaattaatttgctttgtgttgccgctagtccatgtggactggtattgttcccctggatttatttggcaagcgtgtccgtgctcgctctagcgtttt

SEQ ID NO: 28742 - DNA, 164 bp, Zea mays
cggctcgaggctatagtagctcccttgagaagcatttgtgggaggagccatgtctgaggagaagcaccaccaccacctgtttcaccaccgcaagccagaggaggagggcgcctccggcgaggtcgactacgagaagaaggagaagcaccacaagcacatggaga

SEQ ID NO: 28743 - DNA, 189 bp, Zea mays
gtggtgaatgccaatgttggtagtgatcctttgtactcgattgaacgtctacgttctgaaaatgatgcggttattttggcttgtggagcaacaaaaccgagagatctcaccatccctggacgcgagctatctggagttcattttgcaatggaatttctccatgcaaatacgaaaagtttactcgacagc

SEQ ID NO: 28744 - DNA, 228 bp, Zea mays
ggctcttctcctcctcgcctcctctccctagcctccacgacgcaagggagggtgacggaaagcgacgcgcgcgacgaggagggccaaggcgaagaggggaagcaccgcaccaggacccttgttcgccgccgccgccgcctctgatctccgcgaggttgtcaggattcaatatgtcgaccagcacattcgctacttcctgcacgctgttgggcaatgttagaacaacgc

SEQ ID NO: 28745 - DNA, 229 bp, Zea mays
agagtgagtagcctagctctatagctcgagtattgcttgctctccacaagacacaaggcagagcaccaacaatggccgccgcgtcctccgtcctcctgctgctcctggccgccgccttggctggcatgagcgccaacgccgccaccttcaccatcaccaacaactgcgggttcaccgtgtggcccgcggccaccccggtgggcgggggcacgcagctgaacccgggcgg

SEQ ID NO: 28746 - DNA, 342 bp, Zea mays
ggaggtgctgggcaagggcggcgaggagtgcctggcttggctggacgcgcacccagggccagcgtggtgttcctctgcttcggcagcatcggccggttcagcgtggagcagatcagggaggtggcggccggcctggaagccagcgggcagcggttcttgtgggtggtccgagccccgcccagcgacgacccggccaagaagttcgagaggccgccggagccggaccttgacgcgctcctcccggaaggttcctagcccggaccaaggataggggtctcgtggtcaggtcgtgggcgccgcagcgggacgtgctggcgcacgcgtccgtaggcggcttcgtga

SEQ ID NO: 28747 - DNA, 262 bp, Zea mays
tgctgaatgaggatgagctgcgtgacgctgtgctgcttgtatttgcaaacaaacaagatcttcccaatgctatgaatgctgctgaaattactgacaagcttggtctgcattccctgcgacacggcactggtacatccagagcacttgtgctacatctggtgaagggttgtatgaggggcttgactggctttccagcaacatctccagcaagtcttgaagcttttcggcagggctcctagcgagaggatgtctgaacaactta

SEQ ID NO: 28748 - DNA, 328 bp, Zea mays
cggctcgagggtcatccggatcctaacctcacctatgcaaaagagttggttgaacggatgggtcttggaaagtcatcctcaaatgttgaacctcctgaatttggtgctgcagctgatggagatgctgaccgcaacatgattctgggtaaaagattctttgtgacaccatcggactctgttgccattatagcggccaatgctgttcaatcaattccttactttgcttctggcctgaagggagttgccaggagcatgccaacatcagctgcccttgatgttgttgcaaagaatttgaatctcaagttctttgaggtgcctactgggtgga

SEQ ID NO: 28749 - DNA, 318 bp, Zea mays
ggccgccgcgactacctccgctacgccctcgacaacgccgaggcgttcggcggcaccggctgggccgtctccgagttcagctgggacatcaagtacgccggcctccaggtcctcgcatcccagctgctggtggaggccaaggaggagcggctgcggctgagcgcggaggaggtggcggtggtggagcagctgcggtccaacgcggagtactacgtgtgctcgtgcatgaaccggaaccccggcggcgcgaagcacaacgccggacgcaccccggcggagctgctcttcatccggccatggaacaacctgcagtacgtc

SEQ ID NO: 28750 - DNA, 317 bp, Zea mays
  unsure (1)..(317): unsure at all n locations
gtttatcattctcncaacgttcttgtgtcgttttcgccaaacttactttcatttgtcctcacttgttgattttggatgaacctaccaatttcttagatttggaaagtgtcgattctttgattggtgcatgcaacaaatacaaaggtgctttattattagtgtcccacaatcgtgatttcttaacccgatgtgccaaagagttcctttccgttgttccaggacaattcttgttgttcgataacttgaaagccgctgaacgtgctacttatactttcattgaagaaatggaagatggtggtagtgtgaacaacgtcgcc

SEQ ID NO: 28751 - DNA, 321 bp, Zea mays
gcagcacaagtgagctagctgttcatctagctacgccactcctgcctccctccctccctcgtcagcacgtcgtgctagtaatcgatcagaggggggcgtgacgtacgtacgtacagcagccatgggcgtggggaagctgatgaacgacgtgaagccgtacctggcgatggtgctgctgcaggtggggttctcggggatgtacatcgtctccgtcgcctccctcaagcgcggcatgaaccacttcgtcctcgtcgtctaccgcaacctcgtcgccaccgtcgtcttggcccccttcgccctcctcttcgagaggagagtgag

SEQ ID NO: 28752 - DNA, 210 bp, Zea mays
tgcgcttcgtgggaggcgacggcaacaagttcctgttccacggccggcgggacgccgacttctgcctggtgtcggacgccaacctgcacatcaacgcgcacttcatcggcaagcgcaacgacgcgcgcgtcgccgcgccggcgcgggtacttcacgtgggtgcaggcgctgggcatccggttcggcgggcacggctgtacctgggcgtcc

SEQ ID NO: 28753 - DNA, 208 bp, Zea mays
cttctcctcgccctccggttcgggttcgggttcgtgaggttctccggggttcggtttcgtgggtgagcggatcgagatggcggcgtcggatgttgagtaccgctgcttcgtcggcagcctcgcctgggccacggacgaccactccctccacaacgccttcagcacctacggcgaggtcctcgagtccaagattatcctcgatcgggag

SEQ ID NO: 28754 - DNA, 322 bp, Zea mays
ctatcatcaacctggtgttgaggctgggaaaaaggcagcaggagaagtgttggcccttcagaaaagggtgctgactgtattaaatgaggcaacctgcaaggacccttgtgagccattgactatagatgaaattgcagatcgctgccattgccctgaagatattgagatgatctacaaaatagtccagcacatggctgctaacgacagagcaatcatagcagaaggcagctgtggctctcctcgcagcgttaaggtgtacctcggtgaatgcaatgtagacgaagacttgcaggccgcgtaggttccgagcctggatccgtgt

SEQ ID NO: 28755 - DNA, 279 bp, Zea mays
gataagcttgacataacactgggtgttgcaattggttcatcaacacagatatcaatgtttgtgattccattttgtgttgttattggttggatgatgggacaaaggatggacttgaattttcagctatttgagacagcaactctcttcataacagtgcttgtggtagcatttatgctacaggatgggactgcgaactacttgaaaggacttatgctgatcctatgttatctaatagttgctgccagtttctttgttcatgttgatccaccatccagtgat

SEQ ID NO: 28756 - DNA, 304 bp, Zea mays
ccagcccatttcgaactctctctagacgcttcctcggtctctctgttcaccgctgccccgtaccgtactcctcttcgcgccgtagaaatggcgctgccgaatcagcagggcgtggattaccccagcttcaagctcgtcatcgttggcgacggtggaactggtaaaaccacatttgtgaaaaggcatcttactggcgagtttgagaagaaatatgagcccaccattggtgttgaagttcaccctctggattttagcactaactgtggcaaaattcgcttttattgctgggacactgctgggcaag

SEQ ID NO: 28757 - DNA, 321 bp, Zea mays
cgcggcggcggtggcgcacgcgttcgcgctgttcgtggcggtgtcggtgggcgcgaacatctcgggcgggcacgtgaacccggccgtgaccttcggcgccttcgtgggcggcaacatcaccctgttccgggggctcctgtactgggtggcgcactgcatggggtccaccgtggcgtgcttcctgctccgcttctcgacgggcgggcaggccacgggcaccttcgggctgacgggcgtgtcggtgtgggaggcgctggtgctggagatcgtgatgaccttcgggctggtgtacacggtgtacgatacggcggtggacccgaa

SEQ ID NO: 28758 - DNA, 342 bp, Zea mays
  unsure (1)..(342): unsure at all n locations
ctcnctcactcncgttccatttcgccatctcccagatccaattcgcgagttctccctcctctgccgccatggcgctctctgtggagaagacctcgtctggacgggagtacaaggtcaaggatctctcgcaggcggacttcggccgcctcgagattgagctggccgaggtcgaaatgcccggcctcatggcgtgccgcgccgagttcggcccgtccaagcccttcgccggcgctaggatctcggggtctctccacatgaccatccagaccgccgtcctcatcgagaccctcaccgcgctcggcgccgaagtccgctggtgctcctgcaacatcttctccacgc

SEQ ID NO: 28759 - DNA, 348 bp, Zea mays
  unsure (1)..(348): unsure at all n locations
tgtcgtgggatccagccaccgccgctagaagaagagctcggcgattcccaggtcncgcgagaagatgccgaagcagatctatgagattaaggacttcctcctcaccgcgaggaggaaggatgcccgctcagtgaagatcaagaggagcaaggatgttgtcaagttcaaggtgcgctgctccaagtacttgtacacgctctgcgtcttcgatgctgagaaggcaaacaagttgaagcaatctcttcccccaggtttgaccgtcgaggaggtctgattggatacatggcaacgccgggttgaactacccaagcttctttatcagtagcagagcatgctactcatgtactt

SEQ ID NO: 28760 - DNA, 346 bp, Zea mays
  unsure (1)..(346): unsure at all n locations
ccggcaagttcatcatgccgtcgattagcacgttcgccagcctcttcttcatcgccctcttcatgtccatcttcgcgacgggcatcctggagatgcggtggagcggggtgagcatcgaggagtggtggaggaacgagcagttctgggtcatcggcggcgtgtccgcgcatctcttcgccgtcgtgcagggcctgctcaaggtcctcgccgggatcgacaccaacttcaccgtcacctccaaggccaccggcgacgaggacgacgagttcgccgagctctacgccttcaagtgtgacacgctcctcatcccgccnaccacgctgctcatcattaacgtcatcggcgt

SEQ ID NO: 28761 - DNA, 306 bp, Zea mays
agtagtaatccgtcactttgtagatcctgaatctcatggacaactttatcttgctccgcacgtaatcctaatgatattcagattatctacacagccagattctctccacagctagattctcggaaaagctagtcagaaaaaagctgaaccaaacacagcccatatcgcctggagcccgaagaatgcgagcagcgcgaggagcgtgccagccggcgcggcggaagctccggcgccggacttcttgacggtgaaggagaagggtgcaggcggcgacgagctcggcgtggacccgatgatcacgtcgat

SEQ ID NO: 28762 - DNA, 253 bp, Zea mays
cgcgagctcgcgccgcaacgccaccatgaagttcaacatcgcgaacccgtctaccgggtgccagaagaagctggaaatcgatgacgaccagaaactacgtgccttttatgaccgaaggatctcccaggaggtcagtggtgatgctctgggtgaggagtttaagggttatgtcttcaagatcatgggtggatgtgacaaacaaggcttcccaatgaagcaaggagttctgacttctggtcgtgtccgcttctgc

SEQ ID NO: 28763 - DNA, 343 bp, Zea mays
cagtctttggctgggattccttgcttgtccttggcaacaaaattgacaagtcagaagcgctttcgaagcaggccttggttgatcaacttggactggaattgataaaggaccgggaggtttgttgctacatgatctcgtgtaaggattctgtgaacatagacgtcgtcatcgactggcttatcaagcactctagaacagcgaagtaggctttctgtgtgtttgtatcgcttgatgcacggtgttttatcttttgtgaatctgcgcttcccagaagcctggtatcttggtccccatgttaaaagcggcaacttgtaatttatggtttctttggtgtcacagacga

SEQ ID NO: 28764 - DNA, 339 bp, Zea mays
  unsure (1)..(339): unsure at all n locations
ccatgtacttgttgatggcaaggtcaggactgacaagacctaccctgctgggttcatggatgtcatttccatccccaagacaatggagaactacaggctgctttatgacaccaagggccgcttccgtcttcacccaatcagggatgaggatgccaagttcaagctctgcaaggtgaggtctgttcagtttggccagaagggcatcccctacctgaacacctacgacggccgcaccatccgctaccccgacccgctcatcaaggccaacgacacnatcaagatcgatctggagaccacaagatcatggacttcatcaagtttgacgtcggcaacgtggtc

SEQ ID NO: 28765 - DNA, 339 bp, Zea mays
caggtctgatgattcgagggaggaaagcgaagtggtttcctcgcacactccaagatgctcaggccggcattggaatcatcgcgtttcggtatgccgatttgcagcgagcaactaggaacttctcagaaaggttagggggaggcagttttggttcggtattcaaggggtgctacctaggtgaccgggacaccctggtggatgaaaagctccacggtgcccacccaagggagaaaccatttcagagcagaagtgaattcagttgggataatcaagcacttcaatctagtcagactgatcggatctgttgcgaggatgataagagctacttgtgtatgaata

SEQ ID NO: 28766 - DNA, 340 bp, Zea mays
aaagaatatgatggcaagattgctgatgtttggtcatgtggtgtaacctctatgtaatggctgttggtgcatatccttttgaagacccagaagagcctaagaacttccgcaagacaattcagcgcatcttgaatgttcagtacgccattccagactacgtgaacatatctccagagtgcaggcatctaatttcgaggatttttgttggtgatcctgctatgcgaataacaatcactgaaatccggaatcatagttggttcctgaagaaccttcctgctgatcttatggatgatgatagcatgagcaaccaatatgaggagcctgatcagccaatgcagac

SEQ ID NO: 28767 - DNA, 251 bp, Zea mays
  unsure (1)..(251): unsure at all n locations
cttctcctcgccctccggttcgggntcgggttcgtgaggttctccggggttcggtttcgtgggtgatcggatcgagatggcggcgtcggatgttgagtaccgctgcttcgtcggcggcctcgcctgggccacggacgaccactccctccacaacgccttcagcacctacggcgaggtcctcgagtccaagattatcctcgatcgtgagacgcagatgtctcgcggcttctgcatcgtcaccttctccacgg

SEQ ID NO: 28768 - DNA, 340 bp, Zea mays
ggctcagatctctgcgtgcgtcgatggcgtcgttctcggaggctccgcccgggaacccgaaagccggcgagaagatctttaagaccaagtgcgcgcagtgccacacggtcgacaagggcgacggccacaagcaaggtccagacttgaacggtctttttgggagacagtcgcgtaccactgcaggctactcctactctgcgggatactactactatgctgtagtctgggacgaagacactttgtatgagtacctgcttaaccctaaaaagtacattcctggaaccaagatggtcttccctgggctgaagaagccgcatgagcgtgctgatctcatcgcgta

SEQ ID NO: 28769 - DNA, 215 bp, Zea mays
ggagcataagcacaaggagcgcctcggcgaggtgggcgccctcgcgggcggcgcctttgctctgtacgaggggcaccgtgcgaagaaggacccggcgaacgcgcagaggcacaagatcgaggccggcgtggcaacggcggcggcgctgggcgccggcggctacgcgtaccacgagcaccgcgagcagaaggaggccactaggagagcaggcagca

SEQ ID NO: 28770 - DNA, 336 bp, Zea mays
  unsure (1)..(336): unsure at all n locations
gtgcaccagcagataaattcatggatttatcagattaccagggtttacaaggagaaggactttttggaaactgaatttatagttgggcccataccagtagatgatggaaatggaaaagaagtagcaactgaaattgttacaaacatggtgacaaacaaaacattctacactgattccagtggacgtgatttcatcanaaggataagagattatcgatcggagtggaagattgaagtgcaccagcctattgctggaaactattatccctgtgatattccgttgctcccatctctacngtttttaaatgagttcataacatcgataagatggttactt

SEQ ID NO: 28771 - DNA, 335 bp, Zea mays
tcaggaaggacctctacggcaacattgtgctcagtggaggttcgactatgttcccgggaatcgctgatcgtatgagcaaggagatcacttcccttgcaccaagcagcatgaagatcaaggtcgttgcaccgcctgagaggaagtatagtgtctggataggagggtccatcctagcctcgctgagcactttccaacagatgtggatatctaaggaggagtacgatgagtctggcccggcaattgttcacaggaagtgcttctaggcttcgcaagttcctcatcgttgcctagtctcaagttatgtcccttccattctcaagatacgtgtggcagat

SEQ ID NO: 28772 - DNA, 328 bp, Zea mays
  unsure (1)..(328): unsure at all n locations
gtcgagatgttgatcggtagatgatgcatgtgtnctgctggtgtgactgacaagcttgcttacatccggaatgatagtataccaaaaagctgcacaaggaatctgacgattacaaaggatatgaagcagccgatttttgtgtattatcagctggatgacttttaccagaatcataggaggtatgtcaagagccgtaatgatgcacagctaagagataaaagtaaggcgagtgactttaccaattgtgatcctgaggccaaaacggtagacggaaaaccaattgtgccttgtggtcttattgcatggagcctgttcaatgatacatata

SEQ ID NO: 28773 - DNA, 357 bp, Zea mays
ctcggacgagctctacggcgacgtgcagaagaattgcgacttcagcttggtggagctgtccccggagtgcagcgaggacgtggaccagtacaccgcgctctacagggtcatcgacatctacagcctgtacaccgaccggtgcgagctcgggtacccggatttcaactactcggtgtcgccgaaaaccgcgcgcggcgccagtcgtcgtcgcggacgcctggactcttctcgaggtgccgatggggtacgacccgtgcacgcagacgtacgcgactgagtacttcaaccgcgtagacgtgcagaaggcgctgcacgcgaatgtcactggcgtgccttaaccctactcgctttgccgta

SEQ ID NO: 28774 - DNA, 327 bp, Zea mays
  unsure (1)..(327): unsure at all n locations
ccagtgtgtcgtccatggcgacatcaaaccgagcaacatcatgctggacgagtccttcaacgccaagctcggcgacttcgggctggcacggctcatcgaccacggaatgagcctgcagaccatgactgccgtcgctggcacgccagggtacctggacccggagtgcgtcatcaccggcaatgcctcncccgagtccgacgtgtacagcttcggcatcgtgctgcttgaggtcgctgcgggcgccggccgatggcgccgcagcgagcacgggcgatggcaangacggtcaagtgttccggttggtggagtgggcatgngacatgcgcg

SEQ ID NO: 28775 - DNA, 355 bp, Zea mays
  unsure (1)..(355): unsure at all n locations
cgaacgtggaagacgccttccagtgtatcgtgaagaatgctctgaagaatgagccagaggaagaactataccgtggacgtggtgggtggcaaccgggcccagagatcatccgggtgctgttaaggcacgaggcatcacgaggcgttgtgaccatcatcgtcggttatgcagtgaccaaacaataccttagcattgctgggtctccgtggttatctacgtatccgtattccatttgttacctttccagtctcactgctatgtacccaagggcgcctgtcaattcggtggactttgtgcagtttcatcagtagcgtcataccttgtgaatacaattggccannaataagagaagtgt

SEQ ID NO: 28776 - DNA, 246 bp, Zea mays
  unsure (1)..(246): unsure at all n locations
cangcggtctggcaaggagcttgagaaggagccaaagttcctgaagaacggtgatgctggtatggtgaagatgataccgaccaagcccatggtggtggagacgttctcagcgtatcctccccttggtaggtttgctgtccgtgacatgaggcagacggttgctgttggagttatcaagagtgtggagaagaaggacccgaccggcgccaaagtgaccaaggcggctgccaagaaagaatgatgcga

SEQ ID NO: 28777 - DNA, 311 bp, Zea mays
  unsure (1)..(311): unsure at all n locations
ctaattcagaggtattgaacatcatcaataccctttgctcagatagtagaaacatcgtttttcttgtcagtggtagagacaaagatatgttaggaaagtggttctcctcatgtccaaaattggggattgcagctgaacatggttacttcttgaggtggtctagcgaagaagagtggcaaacatgcactcaggccatggactttggatggatgcanatggcaaagccagtgatgaatttgtatnacagagcaactgatggatcctacattgagacaaaagaagtgctttgtgtgcacatcagatctgaccag

SEQ ID NO: 28778 - DNA, 354 bp, Zea mays
ggcggccggcctcctcttctcttcacccacacgctggtcatagagatgtcggctgcagaggcgaaggcggcggcggtcccggagtctgtgctgcggaagcgcaagtgggaggagcaatgggcagcggacaagaaggagaaggcgctcgcggacaggaagaaggcgctcgagagccgcaagatcatcttcgcccgcgccaagcagtacgccgaggagtaccacgcccaggagaaggagcttgtgcagctcaagcgtgaggcccggttgaagggtgggttctatgtgagcccagatgccaagcttctgtttgtggttcgcatccgtggtatcaatgccatgcaccccaagacccgc

SEQ ID NO: 28779 - DNA, 349 bp, Zea mays
ccaagaccgtggcggtggcgctggcggggagcctgctgggccacgacgaggcggcggcgttcccggcggggtgcggcgagaccacctgctacctgcggctgaatcggtacccggcgtgcccgttcgcggcgaacaccttcgggctggtgccccacacggacagcgacttcctgacggtgctgtcccaggaccaggtcgggggcctgcagctcatgacggacgccggctgggtggccgtcaagccccgccccgacgcgctcatcgtcaacatcggcgatctgtttcaggcctggagcaacaacctgtacaagagcgtggagcacaaggtggtggccaacgccacggcgga

SEQ ID NO: 28780 - DNA, 352 bp, Zea mays
  unsure (1)..(352): unsure at all n locations
tcganatcgagtcgggtactcgggtcggtcttgccgtgcgtgcgtggctgcgcgaaccagcccacgctcccactccccgcccgccaccgccgggtccctctagggttttgccgcgatgtcgctccggccgagcgagcgggagcagatgcggaagggcaactacaagcagacggtggacgccgaggagagccgccgccgccgcgtaggccagatggtcgacatccgcaatgccaagcgagaggaaagcctccagaagaagcgccgcgatgggttccccgccgccggcgccgtgccgccgatgggacactcaccgcactccagcagaagctcgatggcttgccggcgatggtaa

SEQ ID NO: 28781 - DNA, 281 bp, Zea mays
cgcggacgagctagccgggtggaagctcgtggccggcgacgtgttccgggagcccagccacccggtgctcctctgcgttctcgtcggcgatggcgtgcgcatcctgggtatgggcgtggtcacatcgtcttcgccgcgtcgggttcatgtcgccgcgtgccgcgcgcgctggtcacgcatgctgtgcttgtacctcgcctagcgtggcgcggtaacgtccgggcgtctgaaaggtcggcaggcgacgccggtggagtcgtgcgtgcgcctcgtcgcttccg

SEQ ID NO: 28782 - DNA, 351 bp, Zea mays
  unsure (1)..(351): unsure at all n locations
tgttgacggacgctcagccaaggactggagaggtggcagggctgccagctttaacatcattcctagcagcaccggtgctgccaaggctgttggtaaagttcttcctgatctgaatggcaagctcactggtatgtccttccgtgttcctactgtggatgtctcggttgttgacctcaccgtcagaatcgagaagggggcctcctatgaggatatcaagaaagctattaaggctgcttccgagggtccactcaagggtatcatgggttatgcggaggaggatctggtttctaccgacttccttggtgacagcaggtcgagcatcttcgacgccaaggccgngatcgctctgaa

SEQ ID NO: 28783 - DNA, 347 bp, Zea mays
gctcgagctgcggcaattgtcatgcgtacagtaagaaatacggttaacactgggcgtactgtggtctgcacaatccatcagcccagcatcgacatatttgagtcttttgatgagcttctgcttttgaaacgtggaggtcaggttatttatgctggtgaacttggtcgccactctcacaaactagttgaatattttgaggcgattccaggtgttccaaagatcacagaaggatataatcctgcaacatgggtgctggaagttagttctcctctatctgaggctcgattgaacatgaattttgctgaaatttatgcaagctctgtgctttatagggaaaatcaagaggt

SEQ ID NO: 28784 - DNA, 287 bp, Zea mays
atttgataccccacgtctcctcgcctcgttccccatttgctgcgtctccttgcccgcgccgccgctcgccgtttgcccctcgtctccgcaccgcgcgctgttgtccatccttgtgcagcaaaaatgacggctggctacattgttggctcactggtcggatcctttgccattgcatacctgtgtgacacatttatctctgacaagaaggcatttggaggtagcacccccaagactgtttctgagaaagagtggtggcaagccacagacaccaagttcccagcctggct

SEQ ID NO: 28785 - DNA, 342 bp, Zea mays
  unsure (1)..(342): unsure at all n locations
gtgattttgcatcncatccgcgagcgcgacacgcgctgacctactcgacggcctccacctccgtcttgaggcgaacgtagtgcgaangaccaactctttcgaagggaaattatatctcaggtgcttaggagtctgccatggccagcgagaataaggtatttaggttcgaggaagtcgccaagcacaacgtcaccaaggactgctggatcatcatcgccggcaaggtgtatgatgtcactccttttatggatgagcatcctggtggagatgaggttttgctagctgtaactgggaaagatgctacagctgattttgaagatattggccacagtgattccgcaa

SEQ ID NO: 28786 - DNA, 106 bp, Zea mays
ctcgcgccgccgcctccttcgccacccagcgctcgagctcctcgctccctgcgagcgcgcgcgacacgcaccatgaagttcaacatcgcacacctcaccgggtgca

SEQ ID NO: 28787 - DNA, 282 bp, Zea mays
cggtcttccaaggctgggctccagtatcccgtcggccgcatcgcgcggtacctcaaggccggcaagtacgcggacgcgtaggcgccggggctcccgtgtacctctccgccgtcctcgagtacctcgccgccgaggtgctggagctggccgggaacgctgctcgggacaacaagaagaaccggatcgtgccgcgccacattcagctggcggtgcggaacgacgaggagctgagcaagcttctgggcactgtgacgatcgcggccggcggcgtgatgcctaaca

SEQ ID NO: 28788 - DNA, 340 bp, Zea mays
  unsure (1)..(340): unsure at all n locations
gcaggactgagaagccgatgctcaaggctggtaacgcgtaccacaagtaccgtgtgaagaggaacagctggcccaaggtgcgtggtgtggccatgaaccctgtggagcatccccacggaggaggtaaccaccaacacatcggtcacgcctccacggtccgccgagacgctccccctggccagaaggttggtctcattgctgctaggaggactggaaggctcaggggtcaagctgctgccacagcctccaaggctgacaaggccacctagagttattgtcgttgtttatctgtctactgtgctttagattgctanaggacatgtgtttcagaacggatgtg

SEQ ID NO: 28789 - DNA, 340 bp, Zea mays
gcagactttggagtctcaaggaatccatctcaaggtggagacatgactgctgaaactggtacctacagatggatggcacctgaggtaataaaccataagccgtacgatcacagggcagatatcttcagctttgctgtggttctgtgggagctggtcacttcaaagataccatacagaaatctgacacccttgcaagctgcactgggagtaaggcagggaatgcggttggagatcccgtcatgggtcaatccacaactgtctaaactgattcagcgttgctgggacgaaaatcctaacctgcgcccctctttctcagagatcactgcagagctggaaagca

SEQ ID NO: 28790 - DNA, 349 bp, Zea mays
cggggacgcagagctaccgcagcgtggcgcagtaccgcgaggccgtccgcgtgccgggcttcctcgtcgtcggcgtcgagtccgccgtctacttcgccaactccatgtacctggtggagcgggtcatgcgctacctccgcgacgaggaggagcgcgcgctcaagtccaaccacccctccatccgatgcgtcgtcctcgacatgggcgccgtcgcggcgatcgacaccagcggtctagacgcgctgtccgagctcaagaaagtcctggacaaaagaaacatcgagctggtgcttgccaacccggtggggtcggtagcggagaggatgttcaactcggcggtgggcgagac

SEQ ID NO: 28791 - DNA, 348 bp, Zea mays
ctcatcatctgcggtggcagtgcgtacccgagggactgggattacgccaagctcagggccgtcgccgacaaggtcggggccctgctgctctgcgacatggcgcacatcagcgggctcgtcgccgcgcaggaagctgcaaatccttttgaatattgtgatgtggttaccacaaccacgcacaagtccctcagagggccaagggctggcatgatcttctacaggaaaggccctaagccccccaagaagggccagcctgagggtgctgtttatgattacgaagacaagatcaactttgcagtgttcccatctctccaaggtggccctcacaaccaccagattgctgcactt

SEQ ID NO: 28792 - DNA, 309 bp, Zea mays
  unsure (1)..(309): unsure at all n locations
ctcagctatgctgacttttgagtctctctctgaaactgccgaatttgctagaaagtgggttcccttttgtaagaagcacaatattgaaccaagagctccagaattttactttgctcaaaaaatagattacctgaaggacaaaattcaaccttcatttgttaaggaaagacgagcaatgaagagagagtatgaagaattcaaaataagaatcaatgcccttgttgccanagcacagaaagtgcctgaagaggggtggcccaggctgatggactgcttggctgngaatacccctagtgacatctggcatga

SEQ ID NO: 28793 - DNA, 349 bp, Zea mays
caagaccagcgataacaaagaccttctctcttccgattaccatctatccacatcacttccgcgacagatcaccgccatcatgcagatcttcgtcaagaccctgaccggcaagaccatcaccctcgaggttgagtcttctgacactatcgacaacgtcaaatccaagattcaggacaaggagggtatcccccccgaccagcaacgcttgattttcgccggcaagcagcttgaggacggccgcactctctctgattacaacattcagaaggagtccacccttcatcttgtcctccgcctccgtggtggtatgcaattttcgtcaagaccctcactggcaagaccatcaccc

SEQ ID NO: 28794 - DNA, 359 bp, Zea mays
ccgtcgtctaagttaggctagggttcgaccagctagcggaaatggtggccttcaggttccatcagtaccaggtggtggggcgcgcgctgccgacgcccggcgatgagcaccccaagatctaccgcatgaagctctgggccaccaacgaggtccgcgccaagagcaagttctggtacttcttgaggaagttgaagaaggttaagaagagcaacggccaggtcctggccatcaacgagatctttgagcgtaacccgacgacaatcaagaactacggcatctggctgcgctaccagagcagaaccggctaccacaacatgtacaaggagtaccgcgacacaaccatgaatggcgctgtggag

SEQ ID NO: 28795 - DNA, 349 bp, Zea mays
gaaggacttgcagccttggattgctagagatgacgaacaaggtcagaagatgtggagagtcaaccagcgtatagtgaagcttatagctgagcttatgaggaaccatgacagccctgaagcgttggtgatactcgctagtgcctccgaccttctacttcgtgctaccgatggaatgctcgtcgatggtgaagcttgtactttgccacagcttgagcttctggaagtgaccgctcgggctgtccatcttatcatcgaatggggagattcaggtttatcagttgcagatggtctttcaaatctgctgaagtgccgtctatcaaccaccatccgcttgctttctcacccaagt

SEQ ID NO: 28796 - DNA, 341 bp, Zea mays
  unsure (1)..(341): unsure at all n locations
gcatcatcgacgacggccaaaggcgcactcaatgtgcgtgtgcaccatgctccgcaaccaggcgaggttcctcagggaatggatcatctaccactcgcgcatcggcgtggagcggtggttcatctacgacaacaacagcgacgacggcatcgagcaggtcctcggcaccatggacccgtcgacgcacaacgtgacgcgccacctgtggccgtggacgaagtccaggaggctggcttcgcgcactgcgctctgagggcccgngagagctgcgagtgggtgggggtcatcgacgtcgacgagttcatccacttcgccggcatacagacgaccctgccagacat

SEQ ID NO: 28797 - DNA, 351 bp, Zea mays
cggctcgagggcacctcaggcccgccgcgagcgggaggccccgcgccgcccgccatctccgcaagcgcgtgcgcgcgggggacagcgcggcgtaccaccggaggccggccttcgccgacgacgtcgtcatcatcgctgcttacaggacggcaatttgcaaggccaagagagggggtttcaaggatacctttgctgaggacctcttggttcctgtcttcaaggctttggtagacaagacgaagctggacccaagtgaagttggcgacattgttgttagtactgtcttagctcctggttcccagagggccatcgaatgcagaatggctgcactgtatgctggtttccctgaca

SEQ ID NO: 28798 - DNA, 326 bp, Zea mays
aggctcgagcggctcgaggaccgtatgcggtcacattttctgccagccgtgcatcaaggctgccattaagagtcagaagaagtgccctacctgccggaggaagctcactccaagacagcaacaccgggtgtacctcccatcgccttagtagcccagtgcagagtcattttgctacaagttctgccgtgccgggggctgtatgttggaggcaactgggggggggggggggggagcatagaggtcctgtttggttcgttcatttagtgtcataatcagttaacagggtaatctattaccattgctttatgtttggttagactatactg

SEQ ID NO: 28799 - DNA, 348 bp, Zea mays
  unsure (1)..(348): unsure at all n locations
tggccagcacggcgccatcgccgccggcgcgtacgctctgcacgagaagcacaaggccaagaaggacccggagaacgagcacggccaccgggtcaaggaggaggtggccgccgtcgccgccgtgggctccgccgggttcgccttccacgagcatcacgagaagaaggacgccaagaagcacgcccacaactgatccgtcgcaggctgcctcagccgaagcagcagcacatcgtcgcagttgctgtttcatcagttctcccagcctcgtcttcgtctactgtgtgccgggcaagcccttgattganngcttgagctaccgatatntgcacggacgtaggaactgtgttg

SEQ ID NO: 28800 - DNA, 305 bp, Zea mays
  unsure (1)..(305): unsure at all n locations
aangaatctgatncatccaagccaagccaagagcacataagaagaagaggaggaagaagaagcatcggcagcatgtcggaggggactgccaactgcgtggacatcctgatcgccatcatcctgcctccgctaggggtgttcctcaagtacgggtgcggccacgagttctggatctgcctcctcctcaccttcctcggctacatccccggcatcatctacgccatctacgccatcaccaggaacacctagctagtcatccttgccgacgacgatccatgtctctgtatctgtgtctgttcatatgc

SEQ ID NO: 28801 - DNA, 127 bp, Zea mays
atgctcgagatcaggaacatccatatactgaaagatatgtacaatgagtggacattcttcagggtcaccttgatctgctcgagatggtttcgccaagggagaccgggaaccggctgtgtagacaatt

SEQ ID NO: 28802 - DNA, 322 bp, Zea mays
agacaagtgcggcgtcatcagccctcgctttgatatcggcgtgaaagacattgagggatggactgcaaggctgctcccgtccaggcagttcggatacatcgtcctcacaacttcggcaggcatcatggaccacgaggaggcccgccggaagagcgtcggaggcaaggttctaggtttcttctattgaagaagctgagaatctttgttatggcctgcctgcctgtcttactctctcagactagagtacctgttattttactttaatatgtctctctcagactagagcgccttcttttacttgaatattggtgactgcattggt

SEQ ID NO: 28803 - DNA, 317 bp, Zea mays
acccaactacgccatgagcgtccgcgacgggaaggtggtgctggcgccggcgaaccccaaggacgagtaccagcactggatcaaggacatgcggtggagcacgagcatcaaggacgaggaaggttacccggcgttcgcgctggtgaacaaggcgaccggggaggccatcaagcactcgctggggcagtcccacccggtgcgcctggtgccctacaacccggactttttggacgagtcggtgctgtggacggagagccgcgacgtcggcaacggcttccgctgcgtccgcatggtcaacaacatctacctcaacttcg

SEQ ID NO: 28804 - DNA, 338 bp, Zea mays
  unsure (1)..(338): unsure at all n locations
actcncgcatcgggagatcaaggtgcagaagctggtcctcaacatatccgtacgggagagcggcgaccgcctcacccgcgccgccaaggtgctggagcagctcagcggccagacccccgtcttctccaaggcgaggtacacggtgcgctcgttcggcatccggcgtaacgagaagatcgcctgctacgtcacggtcaggggcgacaaggccatgcagctgcttgagagcggcctcaaggtcaaggagtacgagctgctcaggaggaacttcagcgacaccggctgcttcgggttcggcatcccagagcacatcgaccttggtatcaagtatgatccat

SEQ ID NO: 28805 - DNA, 336 bp, Zea mays
  unsure (1)..(336): unsure at all n locations
gggcttcgtgtccaacctcgtccacggcggcggcggccatggccatggaagcggctacggccatggccatggaaacggctacggccatgggaatggcggctacggcggcggccacgggtaccctcctcccgnagncgccggcgcgtaccctcatccgcacggagcgtaccctcacccgcacggcggccacgggtaccctcctcccgccacctaccccgcgcactcggcgcactacgggcacacggggtcgtaccacaccagccgccgtgggctccgccggcttcactatccacgangcacacgagaagaaggacggcaagaagcacgcccacaact

SEQ ID NO: 28806 - DNA, 332 bp, Zea mays
  unsure (1)..(332): unsure at all n locations
accanacctagctaccaactcgatcgtcgtcatcacgctcgaccgcacaactgcaccaaggggggaggagacctaaaaactactacatcttttagctacacatctagctaaagatcgagaggggtaaataaggacgagcgggcgcgagctagaagagcagctgcaggtactaccatcatcgtcgtcgtcgtcgccaggatgaccgtcgtcgacgccgtcgtctcctccaccgatgccggcgcccctgctgccaccgncancgcggtaccggcggggaacgggcagnacgtgtgcgtgaccggcgcggccgggtacatcgcctcgtggttggt

SEQ ID NO: 28807 - DNA, 249 bp, Zea mays
tctgaacggagttgttgctacaactgatgttgtggaagcctgcactggggtcaatgtggccgtcatggttggtggattccccaggacatgagggaatggaaaggaaagatgttatgtcgaaaaatgtttcaatctacaaatcccaagcatctgcccttgaagcccatgcagctcccaaatgcaaggttctggtggttgccaacccagcaaacaccaatgctcttatcttgaaagaatttgctccatcta

SEQ ID NO: 28808 - DNA, 324 bp, Zea mays
  unsure (1)..(324): unsure at all n locations
ccanacgctcncccaaaacgccagagcggagaagagcgcaagatgttcggcttcgggcaccacggccaccacggccagaacccgccggcgcacggcggcgtgcaccagcccaccttcaagatcttctgcaaggccgacgaggggtactgcctcaccgtccgcgacggcaacgtggtgctggcccccgccaacccgcgcgacgagcaccagcactggtacaaggacatgcgcttcagcacccaggtcaaggacgatgatggcaacactgcgttcgccctcgtcaacaaggccactgggctcgccatcaagcactccctcggccag

SEQ ID NO: 28809 - DNA, 259 bp, Zea mays
  unsure (1)..(259): unsure at all n locations
gaagcggctgaggttggctcgggtgagcaacatggcggagaagctgacgccggagcaggtggacgagtgcaaggaaatcttcgacctgttcgacgccgacgaggacggtcgcatcgccacgggcgagctcgtgacggcgctgcgctccctgggccagaacgtggacgatgcggaggctcggcgcttcctggaggacgcgtgcatcgcggcgggcgccggcgacatcgnactcgcggcgttcctggccgtgtgcggcgcg

SEQ ID NO: 28810 - DNA, 345 bp, Zea mays
agaccggagtacttcatgaagcagcagctgacgcagagctccgacgtgtactcgttcggcgtcgtcctgctggaggtcctctgcgcccggcccgtcatcaacccggccctgccgagggaccaggtcaacctccccgagtgggctctggagcggaagaggcggggcctgctcgagaccgtggtcgaccgtcggctggacggaagctacgacctggagtccgtcaagcagttggctgaggtcgccgagaagtgcgtcgcggatgagggacgggaccggccttccatcggtcaggtcctgtggcacctcgagaccgctctgcagctgcaccaagcgcatctgcagagc

SEQ ID NO: 28811 - DNA, 344 bp, Zea mays
gatcgttcatcgtagcctcctccagtcgtctcccgggatcttctccggctataaatttccgccccaattccccaatccagatgcgcaaacatcgaatcgtctcgctcgtggctgccctgctcatactgcttgccctcgccgtatcgtccacccgcaacgcacaggaggattccatggccgacaacaccgggacgttggcgggcggcatcaaggacgtgccggggaacgagaacgaccttcacctccaggaactcgcccgcttcgccgtcgatgagcacaacaagaaggccaatgctcttctgggggtcgagaacttgtgaatgcaagacacaatggttgctggc

SEQ ID NO: 28812 - DNA, 345 bp, Zea mays
ctactccatcctgtggaacccgcagcacgtgatcttcgcggtggacggcaccccggtgcgggacttcaagaaccacgaggcgcgcggggtggcgttcccgaggatgcagcccatgaggctgtacgccagcctgtggaacgccgacgactgggccacgcagggcgggcgcgtcaaggcggactggaccaaggcccccttcgtcgcctccttccgcggtttcagcgccgacgcctgcgtctgggacggcggcaggcagcgctgccctgagggcaccatggaggccgccgccgtcgcgtgtgccggctccagccgcagctggtggaacaacagctcagcgacatgagc

SEQ ID NO: 28813 - DNA, 334 bp, Zea mays
ggtggagaaacgagcagttttgggtcattggaggcgtgtcttcacatctctttgctgtgttccagggactcctcaaggtcatagctggagtagacacgagcttcactgtgacatccaagggtggagacgacgaggagttctcagagctgtacacattcaaatggacgacccttctgatacctccgacaaccctgctcctactgaacttcattggagtggtagctggcatctccaatgcgatcaacaacggatatgaatcatgggggcccctgttcgggaagctcttctttgcattttggatgatcgtccatctttacccgttcctcaagggtct

SEQ ID NO: 28814 - DNA, 344 bp, Zea mays
aatgcagacacctgttatctgaaggcatggaggaggatgctgcttgcagtgcatttgattctgagaaggtaaccttagaggagttccgtaacatgaagcaatcactgatgcgaaacaacaaactagttgttaggattgctggccgctactttccctgggatgctgctgcacctatagtactcggtatgatttctttcagtgaggaacaagtttttgaacccaaaggaatgataaatgtggagcgagttgagcaaagtgcagctccaggtggcagctggagcatctggccatttagtttcagacgaacaaggactattactgctatccagccagtttgtgaaagt

SEQ ID NO: 28815 - DNA, 348 bp, Zea mays
ataccatgggaatgctgctggaacaatgggtgctactgctcaatccaattggaaattcaatgttgttcagacgggagtacaccatgcgcttaatccagaccccttcagaggtgcttttggttctgacggggagaaatacgccagagatgttcaggaaatcatcgaatttggaactacagggagagttggtgggttcatttcggaagccatacagggggttggtggaatagtggaactggcaccaggatacttgcccgtggcatacagtatggtaaggaaagccggtgggctctgcatcgccgacgaattcaggcaggagtcgcgagaactggaagccacttctgggga

SEQ ID NO: 28816 - DNA, 210 bp, Zea mays
tgcaagccagtgccgcgcccagatctccgcgacagatcagtcgttcgtccagctaactgcactgcacgcaatggccaccacggcgaccgaggcgaccaagacgactgcaccggcgcaggagcagcaggccaacggcaacggcaacggcgagcagaagacgcgccactccgagggtcggcacaagagcctgctcaagagcgacgacctcta

SEQ ID NO: 28817 - DNA, 341 bp, Zea mays
cggctcgaggaggaatttcgcaaggagttcaaggagaagaaccctaagaacaagtctgtcgctgcggtggggaaagctgctggcgacaggtggaaatccctgagcgagtcggacaaggctccctatgtagccaaggctaacaagctcaagctcgagtacaacaaggccatcgctgcctacaacaagggcgagagcactgcagctaagaaggctcctgctcaagaggaagaggaggaagatgaagaggagtctgacaagtccaagtcggaggtcaatgacgaggatgatgaatgaggtagtgaagacgatgaagatgatgacgagtgatggagctcctcgag

SEQ ID NO: 28818 - DNA, 287 bp, Zea mays
cggctcgagcaatcctaaaaccatctgcttcagccttcagctagccccaagtttagtcggccgatcgatcactgaagtagtaatggcctccgccaacagctggaccctcgagatcgcgtcgccggtggctccgcagcgcctgttccgcgccgccgtgatggactggcacaccctggcgcccaaggtcgcctcccacgtcgtcgccagcgcgcacccgtggagggcgacggcggcgttggcagcgtcaggcagttcaacttcacctcagtcatgccgttcagcttcat

SEQ ID NO: 28819 - DNA, 340 bp, Zea mays
cagaggataggcactggagagtccggcttgcaataattgagtacatcccattgttggcgagtcaattaggtgttgggtttttcgatgacaagctgggggcgctctgcatgcaatggttggaagacaaggtcttttcaatcagagatgctgccgctaacaacttgaagcgccttgcagaagagtttggtccagagtgggcaatgcagcatataatccctcaggtgctggagaagatcaacaacccacactatttataccgcatgacgattctgcaggcaatctccttgctagctcctgtcatgggtgcagaaatcacctgtcaaaagctgcttccagtcgt

SEQ ID NO: 28820 - DNA, 329 bp, Zea mays
catcaaacaagtgccagcggcctctcgcagtcgccgcaatggagagcaccttcatcatgatcaagcctgacggcgtccagaggggcctcattggtgagatcatcagccgttttgagaagaagggcttctacctcaaggccttgaagcttgtgaacgtggagaggtcgtttgctgagaagcactacgccgatctcgcctccaagcccttcttccagggcctcgtggactacatcatctctggccctgtggtggccatggtctgggtaggcaagagcgtcgtcacaactggccgcaagatcattggcgccaccaaccccctggcttctgag

SEQ ID NO: 28821 - DNA, 342 bp, Zea mays
ctcctccttcacccgctccgtcgtctcccccagccggccacgccaccatgctgccaccggccgcgcgccttgcggcccgccgcctcctcagcctcgcctccgcatctgcgtcggaagccgccggccgccgggtagcttcctctccgatcgcttccgcagctactccgccgccgcgtccaggggctccgtctccagcaccaggcccttctccacggctcttaactaccaccttgattcgccggagaacaagccggacatgaaatgggagttctcacaggcgaatatgaagaaggtcaatgagattctgtctcactatccaagcaactacagcaatctggtatt

SEQ ID NO: 28822 - DNA, 329 bp, Zea mays
  unsure (1)..(329): unsure at all n locations
cccagctctcggggaccttctctcccagcccgagatccctccccaccgagatcccgcgcagccatggtgtcgtgacggcggcggatgcggcgtcatggagcgggagcccaagtaccccgacgaccgcactgagcccgctgcagcggcggcgcagcagnccgtctggagtagcggtttgcgcaggtcttcggcgagcgcgccagcggagaagatgtgcaagatgtggacataatctctgcaattgagtttgacaaatctgggaatcatcttgctactggagatagaggtggacgtgtgggtttgttcgtaagaacagacattgctgataa

SEQ ID NO: 28823 - DNA, 323 bp, Zea mays
  unsure (1)..(323): unsure at all n locations
gcgccgcttgtcctcaaaggaatcacttgcacttttgctgctgggaacaagattggggttgtagggaggacaggaagtggaaaatcaacacttatcagctcattgttccgtctcgttgatccggcgggtgggaggatacttattgacaagttggatatttgctccattggccttaaggatctaagaactaaactaagtattatccctcaagaacctacacttttcaggggaaccgtgcgcaacaatttggcatcccttggccagcattctgatgnagagatattggaagcctttgagaagtgtcaactgaagacagcaatcag

SEQ ID NO: 28824 - DNA, 320 bp, Zea mays
ccgctcgaggcatctcgacgccatcgttgaccgcaacttgaacagctgttacaacgggcagaaggtggagatgatgatccagatcgcgctgctctgcacgcaggcgtcgcccgaggaccgcccgtccatgtccgaggtggtccggatgctggacggcgagggcctcgccgagaagtgggaggagtggcagcaggtggaggtgacgaggaggcaggactacgagcggatgcagcagcgcttcgactgaggcgaggactccatctacaaccaggacgcgatcgaactgtccgccggccagtgacgacgtcgggtcgtcacac

SEQ ID NO: 28825 - DNA, 309 bp, Zea mays
gtcaccccgggcctgctcttcctctacatcgccgggtggatcgggtgggtcggcaggagctacctcatcgccatcagcggcgagaagaagcccgccatgagggagatcatcatcgacgtcgagctcgccacccgcctcctccccagggggttcatctggcccgtcgcggcctaccgcgagctcatcaacggagacctcgtcgtcgacgacaaggacatcggctactactagctgctgcacctgtgcttgcacatcgctgctggcgaagcaaggcccgatccatggctagcggctgttgaacaactctct

SEQ ID NO: 28826 - DNA, 193 bp, Zea mays
  unsure (1)..(193): unsure at all n locations
canatgggcttggttagtcaagaaccagctttgtttaatgacacaataagggcaaacattgcctatggaaaagatggacaagcaacagaatctgagatcatatctgctgcagaattggcaaatgctcacaagtttatcagttcggcgctgcagggatatgacacagtggttggagagcgtggagcccagttgt

SEQ ID NO: 28827 - DNA, 345 bp, Zea mays
  unsure (1)..(345): unsure at all n locations
tgccgccgcctccgactcctgctccgtccgagcctaccaccacagggcaagggcttcatccagccgcgtgcgagcctgaccgcccagttagacgatgagccgcagcctcggtatcccggtgaagctgctgcatgaggcggcgggccacgtcgtcacggtcgagctcaagaccggcgaggtctaccgcggctccatggtcgagtgcgaggacaactggaactgccagctcgaaaacatcaccttcacggcaaaggacggcatagtgtcgcagctggagcacgtcttcatcagggggagcacggtcaggttcatgattatacccgacatgctcnagaacgcccaatg

SEQ ID NO: 28828 - DNA, 220 bp, Zea mays
atgagattgtgaaggaagtctcttcctacctgaagaaggttggatacaaccctgacaagatccactttgttcccatctctggtttcgaaggtgacaacatgattgagaggtccaccaaccttgactggtacaagggcccaaccctacttgaggctttggacttgatcaatgagccgaagaggccttcagacaagcccctgcgtctccccctacaggatgt

SEQ ID NO: 28829 - DNA, 273 bp, Zea mays
tgttgatgcagttgtcagcgatccagactataaatttgaatttccaaccccagatgaccgccctgggccaccaatcatcagcttcagtgatgcctcatttggttaccctggagggcctacttgtttaaaaatttgaattttggtatcgactggacagccgcatagcaatggtggtcctaatggcattggcaagtcactatactgaactattctgggtctgagcattctgaaagtatcgtctccagtcgatgcgatcacacacagtgaggctga

SEQ ID NO: 28830 - DNA, 215 bp, Zea mays
  unsure (1)..(215): unsure at all n locations
cgacatcgtcccttcgtcnccacgagcaaccgataatccgccggcgttgagatgttggtttatcaggatctcctatctggcgacgagctcctgtcggattcattcacctacaaggagctcgagaacggcgtcctgtgggaggtcgagggaaagtgggtcacccaaggtcctgttgatgtggacattggtgccaatccatccgccgagggtggtga

SEQ ID NO: 28831 - DNA, 204 bp, Zea mays
tggcccgcccgtcggcagcagcggctggctcgtgcgcttcttcgactccgccttcttctgcgagtggattgccgtcagctatctctacaagcacgaccatgctggagtgcgcgactacctctgcaaccgcatgtacacgctcccgctgccgtggctcgatgcctacctcttccaggtctgctacatgctcgtccacaagcccag

SEQ ID NO: 28832 - DNA, 331 bp, Zea mays
cgttattgattgcatgcatatttggtttgctcagttctgctctgacggccttttcttttcccttcagctgatgcgctggtcaacaccggtctggcgaactgggctacgagtatgtcaacatagatgattgctgggcggagtctgacagggactaccaggtaaaccggatcaagtttgcccctgcagacgcagcacgctaacccgctaaccaccgccgcaatcgttttcagcactaataatggggagagaggaacttgtagaaagcaccatcgtaaatggagaggaactcgtcattatctggctcgctagagactctaaaacctttttttta

SEQ ID NO: 28833 - DNA, 211 bp, Zea mays
cgggaggcgctcgagttttcaggtaaaccatagtttagtgacccatggctcgtactaagcaaactgctcgcaagtccactggagggaaggctcctaggaagcaacttgccaccaaggctgcccgtaagtctgcacccacaactgggggagtaaagaagcctcatcgttaccgccctggaactgttgctcttcgtgaaatcggcaagtatca

SEQ ID NO: 28834 - DNA, 204 bp, Zea mays
  unsure (1)..(204): unsure at all n locations
tagnacgccgccgacgccgcaggaggagacgcatcgaggagagcaagcgaggaagcgaccatgagggccaagtggaagaagaagcgcatgaggaggctcaagaggaagcgtagaaagatgaggcagagatccaagtaggcagcagatcgagatggattgtggacgtgatgacatgcgtgggtacatacatttcttcggatgcgt

SEQ ID NO: 28835 - DNA, 299 bp, Zea mays
ggaagattgacaattgctgcaggaatgggacaatcttgcccaagtccatggacgaggcacagtcgaaatctgcgttccagatgcaagttttcaagatgccaccagacctgaaccggactaagctgttcccccctgctaatttcaagatcgtgggtgcatcatcgctgaacccggactatgcctgtggccagccggtgcctgtcagcccaaccgcgttcccagacccgagcgggcttgactcgacgacgcttgctgtggcaacatggcaggtggtgtgcaacattaccacgacaaagggg

SEQ ID NO: 28836 - DNA, 320 bp, Zea mays
  unsure (1)..(320): unsure at all n locations
tcgatttgttcaagctgctctatctgttgacaanaaagttactcttttccactttgaggatgaaccccgctctggtgtttgtgaagttatatccaccttaagagagaaagctagacttcgcattatgatgctaactggagaccatgaatcaagtgcccagagagttgctanagctgtttgtattgaagaagtccacttctctttagagccagaggatagattagatagagtgaaagcagttcacggaangnnagtgaggttaataatgtcggtgatggatanatgatgcacagccttgcagcgcaacagtgaatggtcta

SEQ ID NO: 28837 - DNA, 334 bp, Zea mays
  unsure (1)..(334): unsure at all n locations
ctcctctgctctcgcccacctcgcggtccggcagcagagagcgggggtgcagagagatcgagatccggaggccgcgagtgggagcgccaccaccagcgtctgcggcaatggcgggcacggtgacggtcncggggtcgtcgaccccctccacgccgctgctcaaggacgagctcgacatcgtgatcccgacgatccgcaacctcgacttcctggagatgtggcggcccttcttccagccctaccacctcatcatcgtgcaggacggcgacccgaccaagaccaccaaggtgcccgagggcttcgactacgagctctacaaccgcaacgacatcaa

SEQ ID NO: 28838 - DNA, 332 bp, Zea mays
gtccagcggggcctgatcggggacatcatcagtcgcttcgagaagaaagggttctacctcaaggggatgaagttcatgaacgtggagaggtccttcgcgcacagcactacgctgacctttccgacaagcctttcttcgccgggttggtggagtacatcatttccgagcccgtggtggcgatggtgtgggaggggaagacgtcgtgtgactgccgcagatcattggggccacagcccttaggagcagccccggtaccatcgtgggactagccgtgaagtcgcagaatgcatcatgaagcgatcgtgagacgggagaagagtcgtctctgtcct

SEQ ID NO: 28839 - DNA, 337 bp, Zea mays
  unsure (1)..(337): unsure at all n locations
cggacatcctcgccgcggcggagaacgaccgccggaacgaggagggcgcgttccgccggatcctgcgccgggagtaccggccctacctggtgatggccgtggcgttcccggtgttcctcaacctcacaggggtggacgtcaccgccttcttctcgccgatactngtccggaccgtcggcatcgagagcagacgcgcgctcatgggcgccgtcatcctgggactcatngacatcggcggcatcctcgcgtcgggcttcgcccatgaccgctacggccagaagctgctcttcatgatcggtagcgcgctcatgttcacgtgcctagctagcgatgcgag

SEQ ID NO: 28840 - DNA, 211 bp, Zea mays
tgccgacaactctctctaccgtccgataccccaagcaccagcgcggcggcggcgaccatggctgtcggaaagaacaagaggatctccaagggaaagaacggtggcaagaacaagaccgtcgaccctttctctaagaaggattggtatgacatcaaggcaccgtcggtgttcagtgtgcgcaacatcgggaagactctcgtatccaggacac

SEQ ID NO: 28841 - DNA, 199 bp, Zea mays
  unsure (1)..(199): unsure at all n locations
gatctaccgggacttcanaacgtccaacgttttactggacaaggacttcagagcaaagctatcagacttcggcctagccagggaggggccaactggagcaaacactcacgtctcgactgcggtacgtacgttacatccatcaatacgtgggcaatgcagtgtacctgctcgatctacgcgtactgacggacgacgaagc

SEQ ID NO: 28842 - DNA, 320 bp, Zea mays
  unsure (1)..(320): unsure at all n locations
cgacggcggcgcgggcggacaaggagcaggcggaggaggagttgtgccaagccacaatgggtatctcgcgtgactcgatgcacaagcgccgagccaccggtggaaagcagaaggcctggaggaagaagcgaaagtatgagcttggtcgccagccagccaacaccaagttgtcaagcaataagacagtgaggaaggtccgtgttcgtggangtaatgtgagatgggaggctcttcggcttgatactggtaactactcaatgggaagtgaagctgtttaccgcaagactcgtatcctcgacgtggtctacgatgcatcaaac

SEQ ID NO: 28843 - DNA, 327 bp, Zea mays
  unsure (1)..(327): unsure at all n locations
ctcagacncagcagctattgtggtcgtccctcagccgcgtcgcaccgcatcgcattctacgattcgaagctctctctgctcgcagccatggcgaagaattacccaaccgtgagcgccgagtacagcgaggccgtcgagaaggccaggcgcaagctccgcgccctcatcgccgagaagagctgcgcgcccctcatgctccgcatcgcgtggcactccgcggggacgttcgacgtgtcgtcgaggaccggcgtcccttcggtactatgaagtgcccgcagaactggctcacgcgccacgcggggctggattcgcggtgcgctgctcgag

SEQ ID NO: 28844 - DNA, 349 bp, Zea mays
  unsure (1)..(349): unsure at all n locations
caacagctgtaggattgggtcagtcaacttgtgtaggcattggtggtgacccgttcaacggcacaaattttgttgattgccttgaaaagttcgtcaacgaccctcagacagaaggtattgttctcattggtgaaattggaggtacggctgaagaggatgctgcgacattcatccaggatagcaaaacancatagcctgttgttgcattcattgctggacttacagcacccccgggccgtcgcatgggtcatgctggagctatcgtggcaagaggaaagggtactgctcaggacaaaatcaaggcactcagagaggcaggtgttaccgttgtcgagtcaccagcgaagat

SEQ ID NO: 28845 - DNA, 320 bp, Zea mays
  unsure (1)..(320): unsure at all n locations
cggttcaattgctcttctcgtgcattctctcaatcatccgcaatcatgtctactgctttctttgacattgagtacggccctgctggcaacacccagacaggtcgtgtcgaattcaagctctacgacgacgtcgtccccaagactgccaagaactttgctgagctctgcaagggcttcactgacgagactggcaaggtctttgactaccaaggctcttccttccaccgggtcattccccagttcatgctccagggtggtgacttcaaccgcggcaacggtaccggtggaaagtnatctacggtgagaagttcgccgatgag

SEQ ID NO: 28846 - DNA, 318 bp, Zea mays
ctgtctccttcgagacggcgctctggtactggatgacgccgcagccgcccaagccgtcctgccacgacgtcatcaagggccagtgggcgccctcgcccgccgacgtggccgcacggaggctgccggggtatggcgtcctcaccaacatcatcaacggcggcctcgagtgcgagcacggcgccgacgctcgtgttgccagccagatcggcttctacagacgctactgcgtacatgttggtctcagctacggcgacaacttggactgctatgaccagagcccttcggagacagcatcttaagcacgaccgataataccac

SEQ ID NO: 28847 - DNA, 299 bp, Zea mays
tggagctggtgagcttcatcttgagatttgcctgaaggatctgcaagaggacttcatgggaggtgctgaaattattgtttctcctcctgttgtgtccttccgtgaaaccgttcttgagaagtcctgccgcactgtcatgagcaagtcacctaacaagcacaaccgtctgtacatggaagcgcgcccctggacggaggtcttgctgaagcaattgatgatggccagcatttgccacgtgatgatcctaagtgcgctccagatctctctcagagtttggtggacaagatctgcaagagatt

SEQ ID NO: 28848 - DNA, 293 bp, Zea mays
ttgcaatcacaacgaacagaagctctcgatctcaccgacaccgaggaagaagagatcaatggcgtccgagcagggagtcgtgatcgcgtgccacagcaaggctgagttcgacgcccacatgaccaaggcccaggaagccggcaagctggtggtcatcgacttcactgccgcctggtgcggtccatgccgcgccatcgcaccactgttacgtcgacacgcccagaagtcactcggtcgtcatctgaagtgacgtgacgagtgaagagtcacgcgctacgagcgagcgatcgact

SEQ ID NO: 28849 - DNA, 330 bp, Zea mays
  unsure (1)..(330): unsure at all n locations
attaaggctaacgatgacttgacgaaggaacaccaccagttctttctctatcagatgctgcgtgcattgaaatatattcatactgctaacgtttatcatcgtgatttaaagccanaaaatatattagcaaatgctaactgcaaactcaagatatgtgattttgggctaagcaagggtgcatttaatgactctcataccacagttttctggacggactatgtggctactagatggtacagggctcctgagctgtgtggatctttctttagtaagtattcaccggctatcgatatgtggagcatcgggtgcatttttgcggagattttgact

SEQ ID NO: 28850 - DNA, 342 bp, Zea mays
ctcacattgtccgtgaggttgagaagccaggatccaaactccataagaaggaaacttgtgaggctgttaccatcattgaaacccctcctcttgtcattgttgggctcgtggcatatgtgaagactcctcgtggcctccgcacactcaactctgtttggggccaacatcttagcgaagaagtgaggagaaggttctacaagaactggtgcaagagcaagaagaaggctttcacaaagtatgctctcaaatatgaaaatgatgctggcaagaacgaaattcagctgcagcttgagaagatgaagaaataatgcttctgtatccgtgtcatcgctcatacccaga

SEQ ID NO: 28851 - DNA, 336 bp, Zea mays
  unsure (1)..(336): unsure at all n locations
ttgcactcgaaaaatatcgtgcactttgatttgaagtgtgataacttgcttgtaaatcttaaagatcaatcacgtcccatatgcaaagttggtgactttggtttgtccaaaataaaaagaaataccctggtttcaaggggtgtgagacggacactcncatggatggctccagaattactcaatggaagcagcaataaggtgtcagagcaagttgatgtattttcttttggtattgttatgtgggaaatcctcactggcgaagaaccatatgccaatatgcactatggcgcaatttataggggcatcgtagccacacactgaggccacatgtgccag

SEQ ID NO: 28852 - DNA, 248 bp, Zea mays
  unsure (1)..(248): unsure at all n locations
gctgcatcggtgctggctatgtcggtggcccaaccatggccgtcattgccctcaagtgcccagacattgaggtcgtcgtcgttgacatctccaagccccgcattgaggcctggaacagtgacaccctgccaatctacgagcctggtctcgatgatgttgtgaagcagtgcnagggcaggaacctcttcttcagcactgatgttgagaagcacgtcgctgaggctgacatttatcttgtctcgggtgac

SEQ ID NO: 28853 - DNA, 180 bp, Zea mays
  unsure (1)..(180): unsure at all n locations
cacgtatanaaacaccgcacgcgccgccgccgccgtcctattcctcggagnagagaagccgccgtcgcagcaatcacagcagcccggagaacggccaggtccgacaagatgcagatctttgtgaagacgctgacagggaagaccatcaccctcgaagtcgagagcagcgacaccatcgac

SEQ ID NO: 28854 - DNA, 325 bp, Zea mays
  unsure (1)..(325): unsure at all n locations
actagttctagatcgcgagcgccgctcgcggctcgagtcactatcacaaacttcaacttccgcatgaattacacgcaggaacttagtagcccagcatccaaactttgataatatcactcagttgttcagcttcaactacaaaccacttactccatatggtggtggcataaatgatacggcaatgttctggggtgtanaattctacaatgatctgctgatgcaagccggcaaacttgggaatgtgcaatcagagctgcttctccgcaaggactcccggactttcactttcgaaaagggatgggccttcccaggccgagtttacttc

SEQ ID NO: 28855 - DNA, 330 bp, Zea mays
gtgattgggcgggttcaaatctcaaacaagtcaaagttcttctaaattttttccaatcctatccaatccatgtataatgggaataaccgaacaagacctaacagggatccagccccgcttggtcctagcttgtcgtgcagacaatccgaattcatggcatgaaagcaacctatgtacatgtcgttctagggcttcagtatcatgatgcgcatgttgtttctttccccgccgtttgcttgtttagcatcagtggtccttatttagtcatctggcaaacggtttggttttgtttgctgcaggtgatgcagagtaagcttgtaaaatggagtg

SEQ ID NO: 28856 - DNA, 333 bp, Zea mays
gacgcaaccccgcgggtcgcggatcaaggagccagagagcgggacgcagcgagcgttccgccagagatcgagaccgtagctagggtttgaggcgccgggctgcggtggacgagatgtcgacgccggcgaggaagcggctgatgcgggacttcaggcgcctgcagcaggacccgcccgccgggatcagcggcgcgccgcacgacaacaacatcatgctctggaacgccgtcatattcgggccggatgatacgccgtgggacggtggcacgttcaagcttaccttgcagtttacagaagattacccaaacaagcccacaactgttcgatttgtct

SEQ ID NO: 28857 - DNA, 298 bp, Zea mays
ctcacagatccaattcgcgagttctccctcctctgccgccatggcgctctctgtggagaagacctcgtctggacgggagtacaaggtcaaggatctctcgcaggcggacttcggccgcctcgagattgagctggccgaggtcgaaatgcccggcctcatggcgtgccgcgccgagttcggcccgtccaagcccttcgccggcgctaagatctcggggtctctccacatgaccatccagaccgccgtcctcatcgagaccctcaccgcgctcggcgccgaagatcgctggtgctcctgc

SEQ ID NO: 28858 - DNA, 311 bp, Zea mays
accacggattgtccaccgtgatatcaaggctagcaacattttacttgataagaagctgctgccgaaaattggagattttggattggcgaaactctttcctgatactgtcactcacattagcacgcgtgttgcaggaacaatgggttatttggcaccagagtatgccttgttgggacaattgaccaagaaagcagacatatatagttttggggtgcttcttcttgaaatgataagtggtgaaagcagcagcaagtcgacttggggacctaatatgcatgttctcgtggaatggacatggaagctgcgggaag

SEQ ID NO: 28859 - DNA, 310 bp, Zea mays
ctctgacaccattgacaacgtcaaggccaagatccaggacaaggagggcatccctccagaccagcagcggctcatctttgctgggaagcagcttgaggacgggcgcacgcttgccgactacaacatccagaaggagagcaccctccacttggtgctgcgcctcaggggaggcatgcagatcttcgtgaagaccctgaccggcaagactatcaccctcgaggtggagtcttcagacaccatcgacaacgtcaaggccaagatccaggacaaggagggcattctcccagaccagcagcggctcatctttgct

SEQ ID NO: 28860 - DNA, 334 bp, Zea mays
  unsure (1)..(334): unsure at all n locations
caacttccgggctgatcgcatggttatgcttgctaaagcactagagtatgcagattttaacaattttgaccgtgtacgtgtcnccaaaattcgatatgctgggatgcttcagtatgatggtgagttgaagcttccaagtcgctaccttgtttccccaccagagatagatagaacatctggggagtacttggtgaagaatggcatccgcacctttgcttgcagtgagacagtgaaatttggccatgtcacatttttctggaatggtaaccgctcgggatactttgatgaaactacagaagagtatgtagaagttcctagtgacagtggtattaca

SEQ ID NO: 28861 - DNA, 336 bp, Zea mays
gaggatcttgaggctgctggtattcaggtgatccagattgatgaggcagctctaagggagggtctgccactgcgcaagtcagagcatgcattctacctggactgggctgtccactctttcagaatcaccaactgcggagtccaggacaccacccagatccacacccatatgtgctactccaacttcaacgacatcatccactccatcatcgacatggacgcagatgtgatcaccatcgagaactcccggtccgacgagaagctactgtccgtgttccgcgtaggtgtgaagtacggagctggaatcggtccaggtgtctacgacatccactcgccc

SEQ ID NO: 28862 - DNA, 339 bp, Zea mays
ctggaagttctattaaccccagtgagagaacctatccagaggagatgatccaaactgggatatccaccattgatgtcatgaattccattgctcgtggacaaaagattccactgttttctgctgctgggctccctcacaatgaaattgctgctcagatttgtcgtcaggctggtcttgtgaagacattggagaaaggaaagcatgctgagggtggtgaagatgacaactttgctattgtgtttgctgctatgggagtgaacatggaaacagctcaattcttcaaacgtgattttgaagagaatggttccatggagcgggtcacctttttctgatctggct

SEQ ID NO: 28863 - DNA, 337 bp, Zea mays
cgcgtagccggcggcgcggtggcgggtacggcaagcagtaccggtggaggcgcggacgagggcggagagtacggctcctcccgggacgactcggagaagtacaggaaggaggagaaggagcacaagcacaaggagcacctcggcgatgactacggccgtagcggcggcgacgactacggccgtggcaccggcggtggcgggtacaacaagtccggaaacgacggctacgacagcgggtacaacagatcgggcaccaccaacgacgacgaatacggccgtggcaccggcggcgggtacggcagcaagccctctggcgacgacgccacagccagcacgc

SEQ ID NO: 28864 - DNA, 296 bp, Zea mays
cgatcctaaccctgatactaggataaaaattgcagaaatgttggaagatgaatggttcaaaaaaggctataaaccaccacattttgaacaaggcgaagatgttaaccttgacgacgttgatgctgcattcaatgattcagaggaccgtcttgtggcagagaaaagagaaaagccagaatccatgaatgcatttgctcttatttcgaggtcacagggcttcaaccttggaaatttgtttgagaacgagatgatgggaatggtaaagagggaaacatctttcacgtctcaatgtacag

SEQ ID NO: 28865 - DNA, 335 bp, Zea mays
catcaatccacaacacactgtgccgactattgtcgatgatggattcgctttgtgggaaagtcgtgctatcctcacctatctcgtgaacaaattcgctccaggacattctttgtatccacttgatgtgcaaaagcgtgccaatgtagaacgtgctcttaatttcgatggtactactttgtatccggcttttggcgcagtcgtttatccgattttgcaccaacaaattgctttcaatcctacttcagctctaccattgtaccaaaaattagaaattttagatactttgctcggtcagcacgattatgttgccggtgacgaattgtctattgctgatt

SEQ ID NO: 28866 - DNA, 327 bp, Zea mays
atttctttgcggaggagatctctttttcatctatttttggttattttgttctctggttgtattgtttttgaatacagtttacttagattttattgctccactttttgataaatatgttccacttccggacagcaatttaaaatcgtgtattgaaaaacttacttcatctttgaagtatccattaagtcagatttatattgtggaaggatcaaaacgttcttcacattctaatgcctatttatatggtctttttaaccgtaaaaagattgtcttatacgatacactgatcgatagatccgtagtggatgtatccgacttttctctaat

SEQ ID NO: 28867 - DNA, 290 bp, Zea mays
caggaaccctagcaccgccgcatccgcagccatgggtatcgacctcgttgccggtgggaggaacaagaagaccaagcgcacagcgccgaagtccgacgatgtttatctcaagctccttgtcaagctctaccgtttcttggtcaggaggaccaagagcaacttcaatgctgtcattctcaagaggctcttcatgagcaaaaccaatcgcccaccaatctccatgcgccgccttgtcaagttcatggaaggaaaggagaagaacattgctgtgattgttggcacagtcacag

SEQ ID NO: 28868 - DNA, 326 bp, Zea mays
gacgcgctgccggaaaatggcaaggtcatcgtcgtcgagtgcgtgctgccggtcaacacggaggccacccccaaggcgcagggcgtcttccacgtcgacatgatcatgctcgcgcacaaccccggcggcaaggagcggtacgagcgcgagttccgcgagctcgcaaagggcgccggcttctccgggttcaaggccacctacatctacgccaacgcctgggccatcgagttcatcaagtgaaccaccgtcgccgcgatgagatggcatggctgccacatgctttgcttgcttggtcctcgtatcgtacgtcgccgtcgtcgtcttct

SEQ ID NO: 28869 - DNA, 333 bp, Zea mays
cgcaccttggctgactacaacatccagaaggagagcaccctccatctggtgctccgcctgaggggcggtatgcagatctttgtgaagaccttgactggcaagaccataaccctggaggttgagagctctgacaccatcgacaacgtgaaggctaagatccaggacaaggaggggattcccccagaccagcagcgtctgatattcgccggcaagcagctggaggatggtcgcacccttgcagactacaatatccagaaggagagcaccctccacctggtgctccgtcttcgcggtggttattaagccatcagtcgttgaagctgctgctgtatc

SEQ ID NO: 28870 - DNA, 333 bp, Zea mays
cgagaacaagcgggagtacaaccgcaaagtccgcgagattgtggagcagagctggacagccgactagtgcaggaggatgctcatcgtgcccgaacaggccaataaggaaccatgaaaaaacatccttgtgtttgtggttcgccagacctgtcgaaacattgaagaactctagttcaagtctgtcgttgtcatggttttagtctgatccagagcaccggttgctcatggtggtggctgtcgtaatgtagcggctgttgttgacctatatcttctcaagatttaaaatgatcctgcttgtgtacaaaaactatagcgtgggaatggttgttcgat

SEQ ID NO: 28871 - DNA, 329 bp, Zea mays
gatagcccttgattcaggattatccacaggtggctttactgactgtttacttcagcatggagcatcacatgtttatggtgtagatgttggctatggacaggtggctgaaaaaattcgcacacatgaacgtgtttcagtgatcgaacgcacaaatttaagatatctatctcaactgccagaaccagttgacttggtgacactagacctatcatttatctccattctcttggtcatgcctgctgttatcaaagtaatgaaaacggattctacattgataacacttatcaagcctcaatttgaagcacgtagatcacaggtaggaggtggtg

SEQ ID NO: 28872 - DNA, 339 bp, Zea mays
cgcgaaccacgacacgctgatatgggcgctgaagaagaacgggttcgggaacctgcccgtgatcgtcggcgagatcgggtggccgacggacggcgaccggaacgccaacgcccagatggcgcacgcttcaaccagggcttcatgacccacatcgcctccgggcggggcacgccgatgcggcccggacccgtcgacgcctacctgttcagcctgatcgacgaggacgacaagagcatccagccagggaacttcgagcggcactggggcatcttcacctacgacggcctgcccaagtaccagctgaacctggggacgtcgaacgcgggcggcggtctcgtg

SEQ ID NO: 28873 - DNA, 353 bp, Zea mays
agcacacggagagcaacgaggagatcctcggcgtgctctccttcgtcttctggacgctcacgctcgtcccgctcctcaagtacgtctgcctcgtcctccgcgccgacgaccacggcgaaggaggcaccttcgcgctctactccctcctctgccgccacgcgcgcgccgcgctcctcccgccaggacgaaccgccgccggggacgaggaccagttcttggacggagccgacggtggcaccaagaaggctacggcgcagaacggcaatgcagtgacgctgggcgggggcgctgctgccagcgtcagaaggctgctggagcggcacaaggtgctgcagcgtgtgctgctcgtcctg

SEQ ID NO: 28874 - DNA, 349 bp, Zea mays
cagagcgaggcgacgccgaggcacctcatctccggcgaagggaaatggcgaccgttccaggggatctgatctggcagattgtgaggaagaacaactccttcctggtgaagcagtttggcaacggcaatgccaaggtgcagttcaccaaggagcccaacaacctctacaatgtacactcctacaagtactctggcttagcaaacaagaaaactgtaacgatccagccagctgctggaaaggactcggctgtggtcctctctactaccaagaccaagaagcagaacacacccgcgaactcagccacaagtctgtgatgcgcaaggagttccgcaagatggccaaggctgtg

SEQ ID NO: 28875 - DNA, 352 bp, Zea mays
  unsure (1)..(352): unsure at all n locations
tacacatatcacaaacacaagagatgctaaagcatttgcactcttatctgaggagggtattgcaaaaggagttaggaggataacagccgtgactgctggatgtgccacccaggctatggagttggcgtcatctatcgattctgatatcaataaagcatctcagttggagggagctttgttggaaaagaaaattgcttccatcaagagtgggctggatgcagctgctatccctgctgcgagaaaagctgatttgagaggcaaggtttcaaagttagaggacgaacttaggaanggcaagaagaacatgcgggagcaaaatatacaacaggctgtgaagtccgcaatggatgct

SEQ ID NO: 28876 - DNA, 341 bp, Zea mays
gtgaactattctacgtgcaccggcggtttgttgaggactttggtgaccttgtgggtcttgtcggcaatttggatttgcatcacaagattgcggtcccaatgttcttcttggcaatggactcgactcaaaattttgactctgatgctctggctggaacagtgttcaggccacagttgccagctaatgcgacgttctcgtctatttatacagctcaagcacctgctgttttccctgtgaaagttatgaatgagattgatttcataaaggtgattcggctaatgtccataggagacccacttctgatggagttcggttaacagtgttatgtgtagttgaagtgc

SEQ ID NO: 28877 - DNA, 364 bp, Zea mays
ctcgactgacggtagtagctcggattcacccgacgcctcgagccgaggacgagctcaagctcatcgctaaaatgattgaatgggatccatggggagttcccgatgactacgaatgtgaggcgattgaagacgacaccccaattcctaagcatgttcctcagcaccggcctgttgctcttcctgaggagttcttcaaggcactagatgctgtcaaatctgatcctgctcttcaaggcgatgctcctcctcaagtgaaggcgtaaggatggctgttcctggctaacgtcatttcacattttgccgcggtgggtaaggactggtttcttgtgtcatttgccagcaatgcgcttgctctgagcagaat

SEQ ID NO: 28878 - DNA, 344 bp, Zea mays
gccatatctcacgatccactcgagcaccaagccgagggaaggtgaggagcgatggcgcgcggcgtggtgtcggcgaagggcggcgcggtcgcgggcaagaagaaggggtcggtttccttcacgatcgactgcaccaagccagtggaggacaagatcatggaggtcgcctcgctcgagaagttcctgcaggagcgcatcaaggtcgccggcggcaaggctggcaacctcggcgactccgtcaccatctctcgcgagaagaccaaggtcaccgtcacctctgacggacccttctccaagaggtacctgaagtacttgaccaagaagtacttgaagaagcacaacgt

SEQ ID NO: 28879 - DNA, 337 bp, Zea mays
tgtcgtgtatgatgtgacacgccatgtgacctttgagaatgtggagaggtggttaaaggagctccgggatcacactgatgcaaacattgtcatcatgcttgttggcaacaaagctgatctgcgacaccttagagctgtatccgtggaggatgccaagggcttcgccgagagggaaagcacattcttcatggaaacatccgcactggagtccatgaatgtcgagagcgctttcaccgaggtcctaactcagatctatcgtgtggtcagcaagaaggcccttgacattggcgatgaccccgctgctccaccaagagggcaaaccatcaacgttggtggc

SEQ ID NO: 28880 - DNA, 341 bp, Zea mays
cgtactttgaggacacaaagcttgcaaagacctatatctttgctgatgatggaacaaccacaataaaagcttccgaaattaagtcgcaggaaggaatgggacctgcaaatggaaatggtattaacaagacggggagtaagcggccattagtagaggaaagtttttttagctggtttggtgatacagagctcaagagtcttgctgatggcgtgcaagatgaggtggcggagatcataaaggaagatttgtggcctaatcctttgaagtacttcaacaatgaggttgacgatgaatttgaaggagatgaagatgatgatgatttggatggtgatgatgacgat

SEQ ID NO: 28881 - DNA, 336 bp, Zea mays
agcagaaggtgttgggcgattggattcggtctgaattttagagttattgctctttctcctggcttcagaaagctgtcgtcagagcactttgtttcttcttataacaaggcttctagaagagcaatatttcttgattacgatggcacacttgtgccccagtcatcaatcaacaaagctccaagtgaagaagtcatttccgttcttaacaccttatgtaatgatccaaagaacattgtgtttatagtaagtggacgaggacgtgattcccttgatgagtggttttctccgtgtgagaagcttggtctagcggcagaacatggctattttatcagatgg

SEQ ID NO: 28882 - DNA, 328 bp, Zea mays
cgaaagcgggagatttatgatcaatatggtgaggatgccctcacggagggaatgggaggtggtggagggatgcacgatccctttgacatattccagtcattctttggtggtggaagcccttttggaggtggtggcagcagtaggggcagaaggcagcgaaggggagaggatgtggttcatcctctaaaggtttctctggaggatttgtacaatggcacatcaaagaagctctctctgtcccgcagtgtcctctgctccaagtgcaatggtaaggggtcaaagtctggagcttcatcgaggtgtgctggttgccaaggttctggcttta

SEQ ID NO: 28883 - DNA, 332 bp, Zea mays
gcgaggtgcaccaccgcggcaagcccgtcgggatgaagaagacgctcgtcttccacgccgggacggcgcctaagggcgagaggaccaactgggtcatgcacgagtaccgcctcctcgatgcagacggacctcaggatctgcatgtggtttgtagaatcttccagaagcatgggtctggaccacagaacggtgcgcagtatggtgcaccatacatggaagaggaatgggaagaggatgatgatgctattgagaatggttctacccacgatgcatctggtcaaattgctgcaaccacctgtgctgtagatgaggagtcagatgaggacgatgag

SEQ ID NO: 28884 - DNA, 337 bp, Zea mays
gacttttcctcctcttcctcccctcccacccgcaaccgcacagagaaacgcgaggaggctctctacccagcgcacccgagcacccctccccccccggatcgggacccctgctctgcgcaatccacccatggcggaggaatcaggccgccccttgccaaaatttggcgattgggatgttaatgatccagcttctgcagacggattcactgtcatattcaacaaagccagagatgagaagaagggtgggaacggacaagacactgagtcaccttccaaggacaccaggactgagagggtggaatcttatgctgcaaagccaagcacgaagaaatggttt

SEQ ID NO: 28885 - DNA, 338 bp, Zea mays
caagtatccgagtcgcccagatatccagatattcagcgatttcaccttgcacatcgcctccggcaagactgttgcactcgtgggagagagtggcagtggcaagtcaacggtgatctctttgctggaacggttctacaaccctgactctggcaccatctcactggatggggtcgagatcaagagcctgaaagtcaattggttgagggaccagatgggtctggtggggcaagagccaatcctcttcaacgacacgatccgtgccaacatagcctacgggaagcatggggaggtaaccgaggaggagcttgtcaaggtcgcataggcggccaacgcgcacg

SEQ ID NO: 28886 - DNA, 336 bp, Zea mays
  unsure (1)..(336): unsure at all n locations
gttcttttcacaaataatggtggagaatttgtctgtcctgcgcttctcaaatctcgtttttgaggctctctggtcaagacaatatataagtttcacatttcttatatattgtcttgaccagagaggctcaaaacaatatataagaaatgtgcaacttatattctcattangatttggtactgaaggacgtggaggatactttgatggctacggtattattcgagacataatgcagaatcatctgcttcagatactagctttatttgctatggaaactcctattagtttggaagcagaggatataagaaatgagaaggttaaagttcttcgttccat

SEQ ID NO: 28887 - DNA, 176 bp, Zea mays
agacgacttgtttcattgattcttcaagagatcgagcttcttgtgcaccacaaggtcgaggatgtcttgcagctgcggatcaagctgcggctgcggctcaagctgcgtatgctggcagaagtaccctgacctggatgagacgagcaccgccgcgcagccaccgtcgtcctcggggt

SEQ ID NO: 28888 - DNA, 131 bp, Zea mays
  unsure (1)..(131): unsure at all n locations
gcatcgcgtagtatctcggagatcggctcgaggcntgaccttgccaagagccatcttaagattgcctgaagatgtgacaaagcagcattagtccgttgatcggtggaagaccactcgtcagtgttgagttg

SEQ ID NO: 28889 - DNA, 191 bp, Zea mays
cggctcgagcctgaatctgatgattcagctcaactttcgcagattgagactgaaaagctgctagcccagttagttgagactgagatgaacagtcgtttcaatgagggcacttacaaaggaaagaacgtcaatgcaatctgtcacttctttggctaccaagctaggggagcactgccttcaaagtttgattg

SEQ ID NO: 28890 - DNA, 164 bp, Zea mays
agttcatcaagtgaatacggctaccaccgtcgccgcgatgagatgcatggctgccacatgcatgcttgcttgcttggtcctcgtatcgtacgtcgtcgtcgtcgtcttcttctggttgcgctgctagcttgctgctctcgccctcgcgtatgcatgtacttttg

SEQ ID NO: 28891 - DNA, 182 bp, Zea mays
  unsure (1)..(182): unsure at all n locations
ctagagaagcatttgccggaggagccatgtctgaggagaagcaccaccaccacctgttccaccaccgcaatgcagaggaggaggttggtgcctccggcgaggtcgactacgagaagaangagaagcaccacaagcacatggagcagctcggccagctcggcgccatcgccgccggcgcgtac

SEQ ID NO: 28892 - DNA, 92 bp, Zea mays
ggaacgcacacaccgcccggtctccgatctccgatccccgatcccctcgtcgatccaagatgcagatcttcgtcaagactctcactggaaag

SEQ ID NO: 28893 - DNA, 180 bp, Zea mays
ctggtgctgagaggaaggaatctgcagagagcacaatggtagcttataaggcagctcaggatattgcattggctgaactgccacctattcatcccataaggcttggacttgcacttaacttctcagttttctattacgagattcagaactctccagacaaagcttgcaatcttgccaagg

SEQ ID NO: 28894 - DNA, 263 bp, Zea mays
ttctcctcgcacctcgcctccctccacctgcagagagcgccacaagagcgcttcgttctagcagcagcggacgagggagacaagaggaggaagagatggcaggccgtgatggagccaagtcatcggcgtccatggaggaagaggcatgcggggagaagaagtacggaggaatcgcacccaagaagaagcctttgatatccaaggaccacgagcgcgcctacttcgactctgcagactgggtgctgggcaagcaggctgcgaac

SEQ ID NO: 28895 - DNA, 125 bp, Zea mays
agaagcggcggtggcggatcggaaggcgaaggagtagcagcagcaggcggcgccgagtagcggctccccacctcgagcttgccaccatggctagaggattgaagaagcatttgaagaggctcaat

SEQ ID NO: 28896 - DNA, 105 bp, Zea mays
ccgggccgtgctggtggaccacgccctcgccagcgggatgccgagaaggacgtcagcgcgtccgtgttctccaagatcaacaggttcgaggaggagatgcgcgag

SEQ ID NO: 28897 - DNA, 207 bp, Zea mays
cgcaggaggacatcatcaccttcttccagaacgtgaccatccccaaggactgcgacaccgtccaaaagtgctacatctacctctctggacaagtgaaggagaagctgggcacgattgacccctactttgtcaagctcggtgacgccatggtcacctggatcgaggcctgggatgagctgaacccgtcgacccctgccgtcgcaaatg

SEQ ID NO: 28898 - DNA, 171 bp, Zea mays
ccggcatcaacccggccaggagcttgggcgctgctgtcatctacaacaacgacaaggcctgggatgaccactggatcttctgggtgggtccattcatcggcgccgccatcgccgcggcgtaccaccagtacgtgctgagggccagcgccgccaagctgggatcgtctgcct

SEQ ID NO: 28899 - DNA, 226 bp, Zea mays
gttctccagaacgacatcgaccttctcaacccgccggcagagctcgagaagctcaagcacaagaagaagcgcctcgtccagtcccccaactccttcttcatggatgtcaagtgccagggatgcttcagcataaccacggttttcagccactcccagactgttgttgtgtgcccaggctgccaaactgttctctgccagcccacgggaggatatgcgaggctcacgg

SEQ ID NO: 28900 - DNA, 197 bp, Zea mays
agaacttctaggattgcagatagatgcagctattaattcaggaaattcaggtggtccagcttttaatgatagaggcaaatgtgtcggtatagcatttcaatctcttaaacatgaagatgccgagaatataggctatgtgataccgactccagttattacacatttcatcgaggactacaaaaattctggaggataca

SEQ ID NO: 28901 - DNA, 229 bp, Zea mays
cgctgttgtaggttggtcatcgtggatgagattgactacttaataacaagagaccgtgctgtgctgcatgatcttttcatgctcacaacttgtccattctctagatgcatactcataggaattgcaaatgccatagacttagcagatcgttttcttccaaagctggaatccttaaattgcaagcctcttgttgtgacttttcgagcatattctaaggatcaaatatctg

SEQ ID NO: 28902 - DNA, 226 bp, Zea mays
cgtcgagtcagaaatattttgcttgcatggtggattatcgccatccattgagaccctcgacaacatccgcaactttgaccgcgtccaagaagttcctcacgaaggtccaatgtgtgatcttctgtggtctgatccagatgatcggcgtggctggggtatttctcctcgtggtgctggttataccttcggacaggatatatcagagcagttcaaccataccaatagt

SEQ ID NO: 28903 - DNA, 223 bp, Zea mays
gtcgtcgaagccggccaagtccggtggtggcaagcacaagaagaagaagtggagcaagggaaagctaaaggagaaggtaaacaacgcggtgctgttcgaccaggctacctacgacaagctgctctcggaggtgcccaagtacaagcaaatcaccccttccatcctctccgagcgtctgaggatcaacggctcccttgctcggagggccatcaaggacttgatg

SEQ ID NO: 28904 - DNA, 222 bp, Zea mays
cgcatgacgactacgtgagcgtccacatcaggacgctgggcgactggactcgcgagctcaagaacgtcttctcaagggtgtgccggccgccgacggagggcaagagcgggctgctccgcgccgagtacgaccgcgacggcagcgccgtggccaacccgagcttccccaaggtgctgatcgacgggccgtacggcgcgtcggcgcaggactacaagcagtacg

SEQ ID NO: 28905 - DNA, 220 bp, Zea mays
tgcgcaactacatcagctacttgttcacggagggcgaggtggtgtccaacgcggttgccgatctctgcccgctgcttgccgtcacgctcgttctcaacggcatccagcctgtgctgtcaggtgtcgccgttgggtgcgggtggcagcagttcgtggcctacgtgaacattggctgctactacatagtcggcgtccccctcggcgccgtgctcgggttcgt

SEQ ID NO: 28906 - DNA, 220 bp, Zea mays
ggaattatacttcatgttttgttgctggaagtcggcaaagtgatcaagagtgtcaccaagcataccaactaccaagggatgcaatactacctccattctcgaatatttgccgtccgctagtttatttttgaactagaacatgacaaataaaaaagaacggaggaagtaatacggcaaagtgaagcaacagatgcttgtgtaggagttgtgttactatctt

SEQ ID NO: 28907 - DNA, 221 bp, Zea mays
cgccatcggcgtgccggagccctgtccgtgttcgtcaactcgtacggcaccggcacgatccccgacaaggagatcctcaagatcgtgaaggagaacttcgacttcaggcccgggatgatcagcatcaacctcgacctgaagaagggcggcaacaggttcatcaagaccgtcgcctacggccacttcggccgtgacgacgccgacttcacctgggaggtggt

SEQ ID NO: 28908 - DNA, 224 bp, Zea mays
  unsure (1)..(224): unsure at all n locations
canacgcgtcgcatccgctccacaggatcctctgcgccaccgcaaccgtgtgaccgcccgtgccgccggcgatcccgatccgccgacccgtcccagccccgctcgcagccatgtcgccgtcggagccgacgcgggaggagagcgtgtacatggccaagctggcggagcaggcggagcggtacgaggagatggtcgagttcatggagcgcgtcgcgcgctacgcc

SEQ ID NO: 28909 - DNA, 181 bp, Zea mays
cagagtttgagctgtcacacacatcgaaaactaccagtgtatttttctctggttacaaggttgagcagccaattgagggagatgaaatggatcttgattctgaggatgaacaggaggagctaaacattccagtaatcaaggaaaatggtgatgggaaggaggagcagaaaaatcaagagaa

SEQ ID NO: 28910 - DNA, 285 bp, Zea mays
atattacccgccgccgctgctcatctcacatacctcgagaagacgcgtgctcctcgacgatcgatacgatggccgtcttctccgacctccacagcgccgacggcctcaagtccctcgaggctcagctcgccggcaaaacctatgtgtctagtgactccattactaaggatgacattaaggtcttcgccgcggtgccgtcgaagcctagcgctgagtttcctaatgccgcccgctggtacgagaccgtctctgcggctgtagcctcaagattccctggtaacgctg

SEQ ID NO: 28911 - DNA, 270 bp, Zea mays
  unsure (1)..(270): unsure at all n locations
caagctggaagtctcacccggtgctattgaattcttgggaagcctggggtatgacccgaactatggcgcgaggccggtgaagagagtgattcaacagcacgtggagaacgaactcgcgaagggcatcctcagaggtgatttcaaggacgaggacagcatctttgtggacacccaggtcacggtgccctctaacggccagcttccgcaacagaagctagttttccggaaagtgggtgagcaatcgaagcccgctgctgnaagcgagaagtt

SEQ ID NO: 28912 - DNA, 232 bp, Zea mays
  unsure (1)..(232): unsure at all n locations
cggctcgagctagaagactacaagaactctgttgtccctttaattgaggaatatttcagcaatggggatgcancattagctgcttctgatcttaaagagttgggtcatgatggtttccactgttactttgtcaagaagcttgcttccacagcaatggataggcatgacaaggagacagacatggcatcagtgcttctgtcgtatctttatggcaacgtggtcagttcaactc

SEQ ID NO: 28913 - DNA, 232 bp, Zea mays
cggctcgacgttggtattgatctttccataaacatggtatcatttgcacttgagcgtgccattgggcgcagttgctcagtggagtttgaacttgctgattgcactacgaagacatacccagacaacacatttgatgtcatatacagccgtgatactatccttcacatacatgacaaaccctctttgttcaaaagttttttcaagtggctgaaccctgggggcaaggtcctta

SEQ ID NO: 28914 - DNA, 273 bp, Zea mays
cggctacaaggccaagcagggatatgttgtctaccgtgtccgtgtgaagcgtggtggcaggaagaggcctgtgcccaagggtattgtctatggcaagcccaagcaccagggtatcacccagctcaagttccagaggaacaagaggtctgtcgctgaggagagagctggacgtaagcttggtggactgagggttcttaactcctactgggtgaatgaggatagtacctacaagtacttcgagatcatccttgtggacgttgcccacaaagccat

SEQ ID NO: 28915 - DNA, 228 bp, Zea mays
cgcaaggacccgtctgggtcatgaacgtcgtctcctcctacggcccaaactccctcggcgtcgtctacgacagagggctcatcggcgtcaaccacgactggtgtgaggcgttctcgacatatccacgcacctatgacctgttgcatcttgatggcctgttcacagcagagtctcacaggtgcgagatgaagtacgtgctccttgagatggaccgtatccttcgtccca

SEQ ID NO: 28916 - DNA, 119 bp, Zea mays
cccgagttggtttctatggtgagcgctttggcaagctcaataaaaaggagtatgtatttagagaaccacgggatgtacgtctcggtgatattatggagaagcttagtcatatatatgag

SEQ ID NO: 28917 - DNA, 309 bp, Zea mays
gcgattaaactgcagcgactgacggtagtacgtcggaatcggctcgaggagaactcccggctcgaggagatcgtgacattgagaggacgatcggagggcgcgcgctcctcctcctcctcctggtctcggcgttggtctttcagatccacgcctccgacccgctgctgtacgaaccgttcgatgaggactttgaggggagatgggtcgtctccaagaaggatgaataccaaggtgtgtggaggcatgccaagagtgatggtcatgaggactatggcctccttgttagtgagaaggcaaggaaatacgcca

SEQ ID NO: 28918 - DNA, 281 bp, Zea mays
cttggtacgacaacgagtggggctacagcaaccgcgtcgtcgacatgatccgccacatgttcaagacccagtagagagagatatttctgcctccctatcgtgggtcgccccaatggccttggtcgagacatctttgctgcttgtctatgctgagaataaatgtgaacggtgcccctggacgctggatccatgctggttttggacacgttgtctttttgtgtttaacttatctgctaccgtcctgtaacgaattcactaagttctagttcttttgtgctttg

SEQ ID NO: 28919 - DNA, 239 bp, Zea mays
ataacattgaacctcagattgatcattactcatgtatggtggatcttctctgccgagctggtctgcttgaaagagctgtcaacatgatccattcaatgccctttgagccacatccttctgcctatggcaccttgctgactgcttgtagagtttataagaatttggagtttgctgagtttgctgctagaaagctgattgaacaggatccacagaatgcaggtgcctatgtacagctggca

SEQ ID NO: 28920 - DNA, 222 bp, Zea mays
  unsure (1)..(222): unsure at all n locations
cttcncagcaaagtcnctgagattgtagcattgtgganaaaggatctccagaaggtaaactcaaaagcagcagagtcgctggctgatcctaatgagtacccaaacttatttgaagactggcagattgctctcaacgtagaagctgctgttgcctctaaaaggagtatctatccatcggccgaggagtacatgattcatgctgaaaggtcaaatgagagttta

SEQ ID NO: 28921 - DNA, 221 bp, Zea mays
cggctcgaggcgataccataggctatatcaaatgctggattagagtcatcccatgttgattttactgagattaatgaagcattctctgctgtcgcacttgcaaatcaaaagcttcttgggaatccttcacacatgtggggttgcatgaaaagattaatgtccatggaggagctgtgtctctagggcatcctcttgggtgcagcagtgctcgcattttggtc

SEQ ID NO: 28922 - DNA, 223 bp, Zea mays
gtgtacgaggcacgcctgaccaagtgcaagtaccttgctggagacttcctcagcctcgccgacctgaaccatgtgtctgtcactctctgcctgttcgctacgccctacgcatctgtgctcgacgcctacccgcatgtgaaggcctggtggtctggtctgatggagaggccgtctgtccagaaggtcgctgccctgatgaagccatctgcttgaaacggttgcc

SEQ ID NO: 28923 - DNA, 223 bp, Zea mays
cggcgctgaggcgcaacatcgacgagttcctccaggccaagctcggcgtgtcggccgacgaggccgccgccacgcgcgccgagctcttccgcgcgcacggcagctccctcgccgggctcatcgcgctcggctacgacgtgcacccggacgagtatcacagctacgtgcacggcaggctaccgtacgacaggatctctcgcgacccgcagctggctgcgctgct

SEQ ID NO: 28924 - DNA, 146 bp, Zea mays
  unsure (1)..(146): unsure at all n locations
cgatgcagcgaagtcagtcggattcggctcgaggcgacactccaagacctctcgtgtcncccgccgacccttcgagtctgcccgacttgactccgagttgaagctcgttggcgagtatggcctgcgcaacaagcgtgaggtctggc

SEQ ID NO: 28925 - DNA, 155 bp, Zea mays
  unsure (1)..(155): unsure at all n locations
tgcagcctgaaatatgggaagcgcttcagataaggaaccgtactatgtcagcacaagcggttctttgcgacatagaaccgttgttgtatgattgtatactggcttgtaagacttanaaacactgggcttgatttggacngtaatgtgtgcattgt

SEQ ID NO: 28926 - DNA, 108 bp, Zea mays
tcatggttgaccacatgaggaagatgaagaacaatgccattgtctgcaacattggccactttgacaatgaaattgatatgctcggccttgagacctaccctggcgtca

SEQ ID NO: 28927 - DNA, 96 bp, Zea mays
  unsure (1)..(96): unsure at all n locations
cggcaagcgcgttccgaacgcgcagtactgaggttgttcgattggtagagctacttgatgaggctanatctcggagcaaatcagaactactacaac

SEQ ID NO: 28928 - DNA, 121 bp, Zea mays
  unsure (1)..(121): unsure at all n locations
tctctgctctcgcacacctcncggtccggcagcagagagcgggagtgcagagagatcgagatccggaggccgcgagtcggagcgccaccaccagcatctgcagcaatggcgggcacggtga

SEQ ID NO: 28929 - DNA, 89 bp, Zea mays
cggctcgagcttggacaaattcgacagccagtaccacttctcttgccagttcacagctgaccttattgccatgaaccacaccgatttca

SEQ ID NO: 28930 - DNA, 141 bp, Zea mays
  unsure (1)..(141): unsure at all n locations
tgtatctaatgtgacnctgcgtcaaggagagtcttctggtggaacagcaacttatgagggccgttttgagattctctctttggctgggtcatatcttctgtctgaaagtactggcatgagcagtcgaacgggtggacttag

SEQ ID NO: 28931 - DNA, 140 bp, Zea mays
  unsure (1)..(140): unsure at all n locations
cgcagagacaggcgtcttcgtactcgcctatctccgcgactcaaagctttacccaattcgcccctttctcncatttctcaccaccgccgccgctcnccccgttcaacaacaccatgagggagtgcatctcgatccacatc

SEQ ID NO: 28932 - DNA, 139 bp, Zea mays
  unsure (1)..(139): unsure at all n locations
gaaggagaagctgggcacgattgacncctactttgtcaagctcggtgacgccatggtcacctggatcgaggcctgggatgagctgaacccgtcgacccctgccgccgcaaatggcaatgccaagtagatgtgccatcac

SEQ ID NO: 28933 - DNA, 141 bp, Zea mays
atctaccggtacagccgccacctccttctcccggacttcggggtcgaaggccagcggaagctgtcacagtcgtcgattttagttgttggagctggaggtttgggctctcccctggcattgtatctagcagcttgtggtgtc

SEQ ID NO: 28934 - DNA, 137 bp, Zea mays
gggacagcctcttcaacgagctgctgtccgagtacgcgctctccggcggcaagcagggcgaccacaactctgaagacttcgtgcacctcttgctgtcgctgcagaaagactacggtctcaccacggataacatcaag

SEQ ID NO: 28935 - DNA, 141 bp, Zea mays
gtcagcattgatagatgaaaagattctctgtatgcatggtggtctatctccggagttgaacaagcttgagcaaatactcaacctgaatcgccccacagacgtgcctgatactggattgctctgtgatcttctttggtctga

SEQ ID NO: 28936 - DNA, 171 bp, Zea mays
atcgactgcgcgaagtaactcggaatcggctcgatcggagacgtgatggcagcggcggctacagcggtggcggcggcgactacggtggcggcggtggctacggtggtggtggtggcgactacggcggtggcaaccgtggcggcggctacggcaactccgacgggaactgga

SEQ ID NO: 28937 - DNA, 183 bp, Zea mays
ggagctccaagaatctgatgtgggaacaggagctggcctgtttgaggtcaagaagataggtgatgaattctttgcctttattgttgactgtaaagatcccaaggcatgtacggttctgttcaggggagcaagcaaggatgtattgaatgaagttgagagaaacctgcaggatgccatgtctgt

SEQ ID NO: 28938 - DNA, 240 bp, Zea mays
agaaaagaagaggacaaggagatgactctggaggaatttgagaaaataagagaggagaagaggaaagcactacttgcattgaaggctgaggagaggaaagttgaagttgacaaggatttgcagtctctgcagccactttcaaacaagaaagaaaatgatgaagttttcattaagctgggttctgacaaggataagaagaaggaaaatgctgagcgtgatgagcgtgccaagaagtcggtg

SEQ ID NO: 28939 - DNA, 239 bp, Zea mays
gcaacagaggctgagataaaggaagctgcaaggatagcaaatgctcaccatttcatcagcagcttgccacatggatatgacacccatgtgggaatgagaggggtcgatctaacacctgggcaaaagcaacggattgccattgctagggtggttttgaagaatgcacctatactgttgttggatgaggccagctctgcaatcgagtctgaatcaagtagagtggtacaagaagctctcga

SEQ ID NO: 28940 - DNA, 258 bp, Zea mays
tgtgcaggcctgaaaccctgaaccagagaggccaccacacaggtgtatcaatatgcttcaaggttgcagaagtgttgatgagtttgagaggctcaacagaattaatgagggaacatatggtgttgtatacagagcaagggataagaagacaagtgagattgttgcattgaagaaggtaaagatggagagggagcgagaaggtttcccattaacctctcttagggaaataaatatcctcttgtctttccaccatccttc

SEQ ID NO: 28941 - DNA, 241 bp, Zea mays
  unsure (1)..(241): unsure at all n locations
tggagtacgtgctctgcttggaggaggccgagatggtgcggcctgnggagcacgtgactatactcacatactcgcgcatgaggtaccacgtgatgcaggcagcgaagacgctggtgaacaaacggtacgatcccgaggtcatcgacatcaggtcgttgaagccgtttgatctgcacactattggcaactccatcaagaagacccaccgcgtgctgatcgtggaggagtgcatgcgcacggg

SEQ ID NO: 28942 - DNA, 236 bp, Zea mays
tgtctgtcactctctgcctgttcgctacgccctacgcatctgtgctcgacgcctacccgcatgtgaaggcctggtggtctggtctgatggagaggccgtctgtccagaaggtcgctgccctgatgaagccatctgcttgaaacggttgccctgtcaatcggtgaatggaataagccaagtctgttctgggttgtttgcttgttcagtgatgtgtctttctatgacgaaagttgagt

SEQ ID NO: 28943 - DNA, 146 bp, Zea mays
ggaggttgttgctgagctgaaggcagctggtgcttcatggattcagcttgatgagcctacccttgttaaagaccttgatgctcacgaattggccgcattctcttcagcatatgctgaactggagtcatagttctctggattgaatg

SEQ ID NO: 28944 - DNA, 187 bp, Zea mays
tagcaaggctctgtatgagctctacttcaatatctacgtcaatggtgatcttgcagtcaaggatttcgatctctccagtgcaactggattcttggcctatccttattacattgactttatcgtcgatgtgaaggatgaggggatactgaaattggcgattggtggcttaaagaagagtcgatctgat

SEQ ID NO: 28945 - DNA, 230 bp, Zea mays
gacttctcgtgaagccattaagcggcaccagcattttttggcactacaattggggctcaagaagggtatgaaggttttggatgtgggatgtggaattgggggacctttaatagaaatcgccagattcagctcaacatcgataactggactgaacaacaatgactaccacatctcaaggggcaaggagctcattttttcagcaggtttgagtgagcaatgctgcttcttga

SEQ ID NO: 28946 - DNA, 199 bp, Zea mays
gcctcgtctcgcgatggacaagggcagcgtcgtcgtgcccccggcccctgccgccgccgccgcgaagaaggccaagcgcttcgagatcaagaagtggaacgccgtctctctctgggcctgggacatcgtggtggacaactgcgccatctgcacgaaccacatcatggacctttgcatcgagtgccaggcgaaccaggcg

SEQ ID NO: 28947 - DNA, 161 bp, Zea mays
  unsure (1)..(161): unsure at all n locations
gtggcgctgctcncgtacacggtgccggcgtcgttcgtcctgttcggcgacggcgtcaagaaccccagctacaacgatctggtgcagagggtggctgacggcttcttcgacgcggcggtgggcgacatctccatcgtcacgaaccggacgcgggtggtgga

SEQ ID NO: 28948 - DNA, 227 bp, Zea mays
  unsure (1)..(227): unsure at all n locations
tgtttgcgatttgatgggatcaggcataagtctanaataccttccttgctgttattctcggaggtttcttgtactcaatttagttgtagtctacgatttgcagtgtcctacgactattgtacctttctttggtgaccaacctttctggggcgaccgggtgcatgcaagacggctagggcctccgcctattccagttgatcagtttggtttgcagaagttggtggatg

SEQ ID NO: 28949 - DNA, 225 bp, Zea mays
  unsure (1)..(225): unsure at all n locations
agggcaatcggccgcgacnctggactgtgggacgcgccggaggagttccggccggagcggttcgtcgagagcaagatcgacgtgaggggccatgacttccagctgcagccgttcggctctggccggcgaatgtgccccgggatcaacctcgcgctaaaggtgatggctttgagtcttgccaatctgctacacggcttcgagtggaggcttccggacggcgtgacg

SEQ ID NO: 28950 - DNA, 221 bp, Zea mays
gtagcacagtccattattgccgtctcccttttgcgtgacaaagaaagagagcgagaagagcagtcgccatgtctggcatcatccacaagatcgaggagaagctccacatggggggcgaccacaagaataaggaggaggagcaccacaagaaggccgaggagcaccacaagaaggaggagggggagcaccacaagaaggacggcggggagcacaaggaaggc

SEQ ID NO: 28951 - DNA, 223 bp, Zea mays
  unsure (1)..(223): unsure at all n locations
cgccgccgccgctgccaccgccgcttgctgccgcagccgccatgggggcgtacaagtacgtgtcggaactatggaggaggaagcagtcggacgtgatgcgcttcgtgcagcgcgtgcgctgctngggagtacaggcagcagccgtccatcgtccgcctcaccaggcccacccgccccgacaaggcccgtcgtctcggctacaaggccaagcagggatatgttg

SEQ ID NO: 28952 - DNA, 225 bp, Zea mays
  unsure (1)..(225): unsure at all n locations
tgcgccgcncccagatccggcaccgcccgctgctcgaacccgcaccccacgcccggagccgggaccggtgggcgcgcgccgggcagtaggatgtagatgaagggcggcatggcggcgccgccggctatgtgcccgggccgactactactaccttatcaagcttcttctcattggggatagcggngttggcaagagttgcctcctgttgcggttctctgatggttc

SEQ ID NO: 28953 - DNA, 152 bp, Zea mays
caagcattgaagccgtagccgccgccgccggacgagacaggttgaggcggggcggcaatggccgccggggaccttgaggtgctcaccgcgctcgacaccgcgaagacgcaatggtaccacttcaccgccatcgtggtcgccggcatggggtt

SEQ ID NO: 28954 - DNA, 191 bp, Zea mays
tggtatgtttcatgcactgggtacagtctaccgtgaagaaggctttcgtgctctatacaaagggtggcttccatctgtaatcggagttgttccatatgttggtctcaacttcgctgtatatgagtccctcaaagactggctactccagacaaattcatttggccttgcaaatgacaacgagctgcacgtag

SEQ ID NO: 28955 - DNA, 149 bp, Zea mays
aagaagagcaaggatgacgacgattctgatgaggacgagactgatgattctgatgaggatgagacggacgattctgatgagggtttgtctcctgaagaaggcgatgatgattcaagtgatgaagatgataccagtgacgatgaggagga

SEQ ID NO: 28956 - DNA, 120 bp, Zea mays
  unsure (1)..(120): unsure at all n locations
tgtcgcatctcatcgcactaccacccatctcgtcgtccgccgattcgatccggttcttccaacccaggggcagtgatggcgacgaagaggagcgtgggcaccctcggcgangcggatctg

SEQ ID NO: 28957 - DNA, 85 bp, Zea mays
agagcaatcagagccaagcacccaccgtcctcctttctttccttcgactcatcagagcatgtcttgctgcggcggcaactgcgcg

SEQ ID NO: 28958 - DNA, 169 bp, Zea mays
  unsure (1)..(169): unsure at all n locations
gacaaacctgaatgtggagcaagtggttttctccatcgcacgtgacatcaagcagaggcttgcggagactgattcaaagccagaggacaaggcaatcanaattaacaagccagaccagggttccgaggcaccagctgcccagcgatctgcttgctgcggctcataagca

SEQ ID NO: 28959 - DNA, 165 bp, Zea mays
gccatgttccgtggaaagatgagcaccaaggaggtggacgagcaaatgatcaatgtccagaacaagaactcgtcctacttcgtggagtggatccccaacaatgtgaagtccagtgtttgtgatatcccgccgcgcggcctctccatggcctccaccttcattggc

SEQ ID NO: 28960 - DNA, 166 bp, Zea mays
caagggcgtcgcgtccggcctgctgtacctccacgaggactgggagcaggtggtggtgcaccgggacatcaaggccagcaacgtgatgctcgacaaggagatgaacgcgcggctgggtgacttcgggctggcgcggctgtacgacttggggatgcaagttaccctt

SEQ ID NO: 28961 - DNA, 165 bp, Zea mays
attcaagcagcattgactgaaaccagaagggttctgaatgagcttgttctggaacctctgaaagaagagcagtactatgaggttagggagccgttctccatcatgtcacttttgaagagccccatggggttaatggttggttttatggtcttaatggtctttgtg

SEQ ID NO: 28962 - DNA, 164 bp, Zea mays
cgtttcaaggccttcgtcgtcgtcggcgacggggacggccacgtcgggctcggcgtcaagtgcgccaaggaggtcgccaccgccatccgtggcgccatcatcctggccaagctctcggtcgtgcccgtcaggaggggctactggggaaacaagatcggccagcc

SEQ ID NO: 28963 - DNA, 164 bp, Zea mays
aaggttgtcaggattcaatatgtcgaccagcacattcgctacttcctgcacgctgttgggcaatgttagaacaacgcaggcctcccagacagcggtgaagagcccttcgtctctaagcttcttcagccaagttacgaaggttccaagcctgaagacctccaaga

SEQ ID NO: 28964 - DNA, 165 bp, Zea mays
ggacattcagacttggcttgaagattgcctcaggattttgtgagggtgttcgcattcgtgaggcaaaaacagaagcctttatggttaaggaccatagaggagaattgtacaagaagcactatccacctacactgaaagatgaggtctggaggttggacaaaatag

SEQ ID NO: 28965 - DNA, 164 bp, Zea mays
  unsure (1)..(164): unsure at all n locations
aaagaagtttctgatgccgatattctanactgggccaactgcaaagtgaaggcatccggaagaacatctcgtatagaaagtttcaaggacaagagcttatcgaatggaatgttcttccttgatcttcttagcacagtacagccaagggttgtgaactggaaagt

SEQ ID NO: 28966 - DNA, 162 bp, Zea mays
tgtcctcagtcgctcacacactcactatacactgctctgctgcagcaagaaggaagaagctagcgcctccctagctctcgttgtcagcaatggccaccaccgccgcgtccagcctcctcaagtcgtccttcgcgggctcacggctcccttcggccacgcgca

SEQ ID NO: 28967 - DNA, 226 bp, Zea mays
  unsure (1)..(226): unsure at all n locations
cgcaggagcggcgatccattccacacaaccaccactgctcttgccccagcccgccgcaggagttgccagatctgctccggtcacaggagctccgactccgagccctctccaatggcggttaaggtctacgtcgtgtactattccatgtatggacatgttggcaaactagctgaagagatccagaaaggtgcctcgtctgttgaaggtgttgaagctanaacatggc

SEQ ID NO: 28968 - DNA, 241 bp, Zea mays
tgtcagattgtgtccatgaagtaccatccgagagatgttgattcaattaaggctgttatggccaagtcaaatgtggttattaacctcataggacgagagtatgaaacaaggaactacagcttcgaagaagtaaaccaccatatgcctgaacagcttgcaacaattgctaaggagcatgggggtatcataagatttattcaggtttcttgcctaggggcgtcaccgtcttctgaatctagaa

SEQ ID NO: 28969 - DNA, 249 bp, Zea mays
ggatcatctcatgaatacctgttggactgttgctttagtccatggattttttaagcagtcaaggttctctgtgtctgggaaggatttttggctgacgcttatagctaggcgctcacgccattttgctgggaccagattcttgaaacgtggtgttaatggaaagggcagggtagccaatgatgttgagactgaacagattgtttttgaagacacatctggtggaatcccaactcagatggcttctgttgt

SEQ ID NO: 28970 - DNA, 249 bp, Zea mays
gcagccgctacggatggtttctccatcaacaacaagcttggcgagggtggctttggaccagtatacaagggtaaactcgaggatggaatggagatcgcagtgaaaacactctcgaagacatccgcacaaggtcttgacgagttcaagaacgaggttttgctgatagccaagctccagcaccggaatcttgttcgccttctcggatgcagcattagcggacaggaaaggatgcttgtttacgagtacatg

SEQ ID NO: 28971 - DNA, 248 bp, Zea mays
  unsure (1)..(248): unsure at all n locations
cgncaaggagcatgttgttggctggtacacactggcccaaaactaagggagaatgacttggatgtccatgcattgttcaacagttatgttcctaaccctgtcctagtgattattgatgttcaacccaaggagcttgggatacccaccaaggcgtattacgccgtggaagaagttaaagagaatgctacacagaaaagtcagaaggtatttgtccatgttccttcagaaattgctgctcatgaagttga

SEQ ID NO: 28972 - DNA, 250 bp, Zea mays
  unsure (1)..(250): unsure at all n locations
ggaactactattaggagcanaggagtattcgactgctatcgatatgtggtcattaggttgcataatggcagaactcttgtcaaaagagccactcttcactgggaagtctgagatagatcaacttgataagatatttagaatactcggcacacccaatgaggagcggtggcatggttgttccaaattgcctggcttcaaaggcaacttcgtaaagcgaccgtacaatagattaagggacaaatttccagct

SEQ ID NO: 28973 - DNA, 246 bp, Zea mays
aaggaagtggtggaccagtggagctatggatcctaggtgcaaaatcctgatattaatgggaaagacagatttttctgcacctaagcataagcagcagtccatgattttagtggacatcaacactcctggggtgcagataaggagaccattgttagtctttggttttgatgatgcacctcatggacacgcagagattacatttgaaaacgtgcgtgttccagtaacaaatatcctgcttggagaagg

SEQ ID NO: 28974 - DNA, 248 bp, Zea mays
agcgcacccagtcacgccgctccgccgccgccccctatataaattaatgagccaagcccgagttaaccaaattaaagaaaaaggaaattttcttgggcgttcttcggcttcattgtcacaaggttcgagttcgtcaccgtctagtacgactgtgcgagggaggaagaggcgaggagaagatgcagatcttcgtgaagaccctgacggggaagaccatcaccctcgaggtggagagcagcgacaccgtc

SEQ ID NO: 28975 - DNA, 244 bp, Zea mays
atttccgcgcgtgtaattaacgtgtggcaggaatacagccgcacgtgaccatctatcacttcgaccttccccaggctctccaggatgaatacaacggcctgctcagtccgagaatcatcgatgattttaccgcttacgcagacgtgtgcttccggagcttcggcgacagggtgaagcactggatcacggtgaacgagcccaacatcgagcccatcggcggctacgaccaaggctacctcccgcc

SEQ ID NO: 28976 - DNA, 243 bp, Zea mays
  unsure (1)..(243): unsure at all n locations
cgccttccgagganactcaccagcccaccacagacccgagcggaagaagccatgtccgggcgcggtaagggtggcaaggggctcggcaagggcggcgcgaacgtcaccggaaggtgctgcgcgacaacatccagggcatcaccaagccggcgatccggcggctggcgaggaggggcggcgtcaagcgcatctcggggctcatctacgaggagacccgcggcgtgctcaagatcttcctcgaga

SEQ ID NO: 28977 - DNA, 242 bp, Zea mays
gagcagagagatccaggagcgagcagacgcggggagaagaggatgagcaccacaacggcgtcgtcgctgaaccccaacgcgccgctcttcatcccggcggcgtaccggcacgtggaggacttctcgcccgagtggtgggagctcgtcaacaccaccgcctggttccgggaccactgcttccggcagcgccagctccacgaggccgcctgcgacgacgtcgccgcgctcctccccgacgacct

SEQ ID NO: 28978 - DNA, 229 bp, Zea mays
atcctcttcggcaccatcgtggcgctcgccgtctcggcggcgttccggaacgcgttcccggccccgccctacttcgtggacgcccaggcgtcgctcgtcccggaggccgactatgtctggcgcgtcatcctcatgttcggcaccgtcccggccgcgctcacctactactggcgcatgaagatgcccgagacggcgcggtacacggcgctcatcgcccgcaacacgaagc

SEQ ID NO: 28979 - DNA, 240 bp, Zea mays
cggctcgagggcttctagacgttccgaggcggacgggaggtacccgccgccgcagccatggcgtcgaccaaggtccagcgtattatgacccagcccatcaacctcatcttccggttcctacagagcaaagcgcgcatccagatctggctattcgagcagaaggacctccggattgagggtcgcattatcggattcgatgagtacatgaacttggtcctcgaagacgctgaggaaatcaac

SEQ ID NO: 28980 - DNA, 231 bp, Zea mays
ggagcgcacgcggagagctcggtggtgtacgtgtcgttcgggagcatagcgacgcacaccttgcagcagatggaggaggttgtccaagggctgctgcaggctggacggccgtacttgctggccgcgcgcactggcacgggctcgaggacgacggtgcgcgccgcgtcctggacaacgccgcccagagcagcggcggccgtgggacggtcgtggactggtgcgaccagccgg

SEQ ID NO: 28981 - DNA, 236 bp, Zea mays
caggcgtcttcgtactcgcctatctccgcgacccaaagcgttcccccttctcccattcttctctcatttctcaccaccgccgccgctaccccctttcgacaacaccatgagggagtgcatctcgatccacatcggccaggccggtatccaggtcggaaacgcgtgctgggagctgtactgcctcgagcatggcattcaggctgatggtcagatgcccggtgacaagaccattgggg

SEQ ID NO: 28982 - DNA, 233 bp, Zea mays
cgacatccccgacccgatggcgcccaaggcggagaagaagccagcggagaagaagccggcggccgaggagaaggcggagaagacgaccgcaggaagaagcccaaggccgagaagcggctgcccgcgtccaagtcctccggcaaggagggcggcgagaagaaggggaagaagaaggccaagaagagcgtggagacctacaagatctacatcttcaaggtgctgaagcaggtgca

SEQ ID NO: 28983 - DNA, 196 bp, Zea mays
agtgcgagggaaggtgcaccagccatggtgcacgtcaacttctaccgcaactatggtaagacgttcaagaaaccaaggcgtccttatgagaaggagcgtcttgatgctgaactgaagctggtcggtgagtatgggctgaggtgcaagcgtgagctttggagggtccagtatgcactgagcaggatccgtaatgctg

SEQ ID NO: 28984 - DNA, 197 bp, Zea mays
ttctgcagtgagttactacgcctactacgggaagaagctggacccggagccgtggcggtgccgccgcaccgacggcaagaagtggcggtgctccaaggaggcgcaccccgactccaagtactgcgagcgccacatgcaccgtggccgcaaccgttcaagaaagcctgtggaatccaagaccgcctcctcgccgcccc

SEQ ID NO: 28985 - DNA, 213 bp, Zea mays
gcacagaggaagcttgaggagaagcgtgccaaggcgatggagaaggcgcagaacgaggtggccaaggcgcggcggaaggcggaggagaagcgcgcgtccgcggaggccaagcggggcaccaaggtggcgcgagtgctggagctcgccaacttcatgagggccgtggggagggcgccctccaccaagcgctccttcttctgaacccaccggcct

SEQ ID NO: 28986 - DNA, 257 bp, Zea mays
  unsure (1)..(257): unsure at all n locations
ggcgcagagaatcccaagcaaacaaacagggtagagggagaggagaggagaggagaggagaggttgggtctgggacaccatggctccgatgaagctgtacggggcggtgatgtcgtggaacgtgacgaggtgcgcaacggcgctggaggaggctggctccgactacgagatcgtgcccatcaacttcgccaccgccgagcacaagagccccgagcacctcgtccgcaacccgtttggtcangttccagctctgcagg

SEQ ID NO: 28987 - DNA, 206 bp, Zea mays
tgcgcctctacatttcttctctctctggtcctccgcctccgcctgatccatccaagacagggatcgccatgtcggactcggaggagcaccacttcgaatcgaaggccgacgctggggcgtccaagacctacccgcagcaggctggcaccgtccgtaagaacggcttcatcgtcatcaagaaccgtccctgcaaggttgtggaggtt

SEQ ID NO: 28988 - DNA, 237 bp, Zea mays
  unsure (1)..(237): unsure at all n locations
attanatctggctctgagaacggaaccatgattgagaacatgataaaggagggaaagattgttccatcggaggtgactataaagcttttgcaggaggcaatgataaaaagtgaaaatgacaaattcctgatcgatggatttccaaggaatgaggagaatcgtgcagcctttgagaatgttaccaaaatttctcctgcatttgtgctattctttgactgttctgaagaagatatggag

SEQ ID NO: 28989 - DNA, 179 bp, Zea mays
  unsure (1)..(179): unsure at all n locations
gccactccaaacacttgcgccgccactgcctcacaggtaaggccgccatggtctccggttcgggcgtgtgcgcgaacatncgtaggtggacgcgcgccaccacatgctgggccgtctctcctcgatcatagccaaggagctgctcaatgggcagaaggtggtcgtcgtccgctgcgagg

SEQ ID NO: 28990 - DNA, 186 bp, Zea mays
tgcctcggctcgtttgatacccgcggggagctctagttccgccaagcgtgcgtaccggcgtccggatccgggaccgaagatgacggagtccctggtgcggaacaagccggggatggccagcatcaaggagatgccggtggtgcaggacgggccgccgccgggcggtttcgcgcccgtgcgcttcgc

SEQ ID NO: 28991 - DNA, 239 bp, Zea mays
cgcgcgtgcgtgcgtgcagggcaactgacgaatggcggcgcgctggaccctgcgggtctggtggcgatcgcggtggcgcacgcgctggccctcttcgtgggcgtctccgtggccgcgaacacctccggcggccacctgaaccccgccgtgacgttcggcctggccgtgggcggccacatcaccgtcctcaccggcctcttctactgggtggcccagctgctgggcgcgtccgtggcgtg

SEQ ID NO: 28992 - DNA, 240 bp, Zea mays
ctccaatgctagctgcacaaccaactgccttgctcctcttgctaaggtcatcaatgacaagttcggtatcgttgagggtctgatgaccactgtccatgccatcactgctacccagaagactgttgatgggccctcatctaaggactggcggggtggaagggctgctagtttcaacatcattcccagcagcactggagctgctaaggctgttggcaaagtgcttcctgtccttaacggaaa

SEQ ID NO: 28993 - DNA, 328 bp, Zea mays
gcgccggatgcggagtgatggcaagccacaggagtggcgagacagaggacaccttcattgctgacctctcagttggcctgtctacgggccaaatcaagacgggagctccttgccggtctgagcgcctggccagatacaaccagctgctcaggatcgaggaagagctcggtgatgccgcggtctacgccggagcaaagttcagggcaccagtggagccctactaagaaaggaagaggatggggatgttttcttgtggagctatactagctcgctgctgccttttgttacgatgtttgtacggtcgcaataaatgtatggtcgtgtttgc

SEQ ID NO: 28994 - DNA, 220 bp, Zea mays
tggagatccgcagaccaaggccgaccgggccaagctcgacggcatgtacgagtgcatcctctgcgcctgctgctccacctcctgcccgtcctactggtggaacccggaggagtacctcggcccggccgcgctgctccacgccaacaggtggatacaggacagccgtgaccagttcaccaaggagcgcctggacgccatcaacgacgagttcaagctgtac

SEQ ID NO: 28995 - DNA, 261 bp, Zea mays
cggctcgaggcactgtcaacttgggtctgtgggatacagcaggacaagaagattacaatagactgcgtccgttgagctatcgtggtgctgatgtttttctgctcgccttttctcttatcagcaaagcaagctatgagaatgtctctaagaagtgggttcctgaattaaggcactatgctcctggcgtgcccataatccttgttgggacaaaacttgatctgcgtgatgataagcagttttttgttgatcacactggtgctg

SEQ ID NO: 28996 - DNA, 247 bp, Zea mays
accattcctcgcgcggcgaccacccgattcgaagcgtgcggagagaccgaagaagcgggagacatggctcgtaccaagcagactgctcgcaagtccacgggagggaacgctcccaggaagcagcttgccaccaaggctgcccgtaagtctgcccccaccactggtggagtgaagaagcctcaccgctaccgccctggaactgttgccctccgtgagatccgcaagtatcagaagagcactgagctgc

SEQ ID NO: 28997 - DNA, 234 bp, Zea mays
cgcctccgctctcgccctgctgcgcgctactcgcccgatctcgcgctgctggtagcgatctgacgtcgagcgagctagcttttcatcgagatggcgcttgtactgcatgctggcagtagtaacaagaatgtattcaaaacactaattgccgcggattacagcggcatcaaggttgagttggtagaagactttcaaatgggggtttccaacaaaacaccggagttcctcaagatg

SEQ ID NO: 28998 - DNA, 310 bp, Zea mays
  unsure (1)..(310): unsure at all n locations
ctggtgctgcagggcaccacatccagggcgccgagagccacacgctgcacctgcacggctacaacttcttcgtggacggccaagggttcggcaacttcgacccggtgaacgacccgcccgggtacaacctcgccgaccccgtagagcgcaacaccatcagcgtgcccaccgccggctgggtcgccgtccggttcctcgccgacaacccgggcgtgtggctgatgcattgcgacttcgacgtgcacttgagctgnggcctgtccatggcgtggcttgtcaacgacggcacgctgccgaacgagaagatgtt

SEQ ID NO: 28999 - DNA, 351 bp, Zea mays
tggaggaggtgcacgcgaacgttggtgaagaactttggttcacaataggggggcaacatattccttttggtgcatcaccacaggatgtctggactgacttacgtcgtccttgtggtatccatcagaagcaggtggaccaaatggtcatacactccgcatcagaagccaggcctcggacgaccctttgtggagattacttttacaactacttctcgcgtggaattgatatcttatttaatggacagacacataggataaagaagtttgttttgcatacaaacttccctggccactcagatttcagttcgtataagaaatgcaactttgttatatacgacgctgaagctgaag

SEQ ID NO: 29000 - DNA, 327 bp, Zea mays
ccaaggccaacaccatgagcgcgctggaggaggtgttccgcatctcccgcgcccagacgctcatcgcgctctgcggcaccgtcccgggctactggttcaccgtcgcgctcatcgacgtcgtcggccgcttcgccatccagctgctcggcttcttcatgatgaccgtcttcatgctcggcctcgccatcccctaccaccactggaccacgcccggcaaccacatcggcttcgtcgtcatgtacgccttcaccttcttcttcgcaaactatcggcccaacagcacgaccttcatcgtgccggccgagatcttcgcggcgcggctgcggt

SEQ ID NO: 29001 - DNA, 321 bp, Zea mays
gtctcgctagtggctgccctactcgtgctgcttgccctcgccgccgtttcctccacgcgcacgcacaaaaggagtccgcggctgacaacgccgggatgttggcaggcggcatcaaggacgtgccggcgaacgagaacgacctccagctccaggagctcgcgcgcttcgccgtcaatgagcacaaccaaaaggccaatgctcttctggggttcgagaagcttgtgaaggccaagacacaagtggttgctggcacgatgtactatctcactattgaagtgaacgatggcgaagtcaataagctctatgaagctaaggtctggg

SEQ ID NO: 29002 - DNA, 323 bp, Zea mays
acgagatcaacaccgtggacctctcccacaacaagctgacgggcgacccctcccacctgttcgccgccggccggcccatcggcaaggtggacctgtcgtggaactacctcgacttcgacctgagccagctggtgttcccgccggagatgacgtacctggacctgtcccacaacctcatccggggcaccgtgccgctgtcgctggagcggctgtccacgctgcagaagctggacctgagctacaaccgcctgtgcggcccgctccccaagggacacggcgtcatcaagcacgggtgcaagccgtacgcgcacaactagtgccgc

SEQ ID NO: 29003 - DNA, 352 bp, Zea mays
cgaaggagaaaagcagttcttcagctaggcacgaaggcacaggaacgaggagatggcgtcaaagaggattcagaaggagctcaaggatctgcagaaggaccctcccacctcgtgcagtgcaggtcctgttggtgaagacatgttccactggcaggcaacaataatgggtccatctgatagcccatattctggtggagttttcctagttacaatccattttcctcctgattatcctttcagaccaccaaaggtggcatttcgcactaaggtgttccatccaaacatcaacagcaacgggagcatttgcctcgacatcttgaaggaccagtggagtccggcactaacgatctcc

SEQ ID NO: 29004 - DNA, 338 bp, Zea mays
cacacattgagttgaagcatgtgattgctgctacaattggtcttaagggtcttggaagcctcctttttattttgagcagctctctcggtgcttatctcctgctgctgtaccttgctttgatcactcctatcatccatgacttctacaactacgatatggagaaggcagaatttgcaggcctctttgcgaagttcacccaggatttggcgctgatcggagctctgctcttctttctgggcatgaagaactccatcgcgaagcggcagggcggcaagaagaacgccccaaggcgaagacgaactacggctgcttagatagctgcacgcctcagggggtgt

SEQ ID NO: 29005 - DNA, 311 bp, Zea mays
cggctcgaggcttggtccagctgcgcccactaactatgctcttgaagggccattgcaattgcaggccacagttcagtggctgagggacagccttggaatcattcagacagcagctgagatcgaaaagttggctgaaacagtgccagattctggtggcgtgtactttgtgccagcatttaatgggttgtttgcaccatggtggagagatgacgcaagagggatttgcatcggaatcacaaggttcacaaataaggggcacattgctcgagcagtgctcgagagtgatgtgtttcacgtgaatgatgtcctga

SEQ ID NO: 29006 - DNA, 298 bp, Zea mays
  unsure (1)..(298): unsure at all n locations
ggaattccacattgtttccccagtttggcacaggtcncatgcagcagcatgggtttgcacggaatgtgaattggtctatcacagattcagaagtcacagaaggagatccagctgtaactttggaactgaaagatgacacttatagccgttctatgtgggatttcagcttccatgcactgtacaaggtttccctgcactctaaaagcttgtcaacaactctagcaataatagatacagatgacgagcctttctcattcaactcagccctccacacttatttcagtgcttcgataactgg

SEQ ID NO: 29007 - DNA, 338 bp, Zea mays
cggctcgagtaagcttcaagaagagcttgacattgatgtgcttgtgcatggcgagcctgagagaaacgatatggttgagtacttcggtgagcagctctccggttttgcgttcactgccaatggctgggtgcagtcttatgggtcaaggtgcgtcaagcctccgatcatctacggtgacgtgagccgccccaaccccatgaccgttttctggtcgaagacggcacagagcatgacgtctcgcccaatgaacgggatgctgactggcccagtcacaatcctcaactggtccttcgtccggaatgaccagccgatgtatgagacttgctacgagatcgctc

SEQ ID NO: 29008 - DNA, 329 bp, Zea mays
gtttgacaacctgtatggttgccgccactcgctccctgatggtctgatgagggccactgacgttatgatcgccggaaacgttgccgtggtctgcggatacggtgatgtcggcaagggttgtgctgctgccctcaagcaggctggtgcccgtgtcattgtgaccgagatcgaccccatctgtgccctccaggctctgatggagggtcttcaggtccttcccttggaggacgttgtctctgaagctgacatcttcgtgaccaccactggcaacaaggatatcatcatggttgaccacatgatgaagatgaagaacaatgcaattgtctgca

SEQ ID NO: 29009 - DNA, 337 bp, Zea mays
ggcaggactcgcttcaagctcctcatctcgcgcagtgggggtcgcctgagatcacagagacaatggtgaaggcagttgctgtcgtcgacggcactgatgtcaagggcaccatcttcttttcacaggagggggatggtccgaccaccgtgactggaagtatctctggcctcaagccagggctccatgggttccatgtgcacgcgcttggcgacaccaccaacggctgcatgtcgactgggccacacttcaatcctgttggctaagagcatggcgcaccggaagatgacgaccgctatgccggtgatcttgggaatgtgacagcgggagaagatggtgt

SEQ ID NO: 29010 - DNA, 298 bp, Zea mays
  unsure (1)..(298): unsure at all n locations
gcttatagtgcaacagcagcactgccctttggcactatctgtgtcattgtgctcatctggaccttggtcacgtttcctttgcatgttttgggtggtattgctggtanaaacagcaaaagtgagttccaagctccttgccgtaccacaaaataccccagggagattcctccacttccctggtaccggagaaccattccacagatggctatggctgggttcttgcctttcagcgccatatacattgagctatactacatctttgctagtgtatggcggcacacgatctacacaatctaca

SEQ ID NO: 29011 - DNA, 235 bp, Zea mays
gctacatacgtcctcctccattaatattggcagcaagctaggatcatcagcatctgagcttattattactagatcgatcggttgccatggcggggatgagagtcggcaagctggcgctggctgcggtgctgctgtgcgcggcggcggccatggccacggcgcacaggcctccggcgtgcgcgcacctacaacttctacaacccgcagcagaacaactgggacctcaacgccgtga

SEQ ID NO: 29012 - DNA, 240 bp, Zea mays
aactgatatctgaaggtgtctaagcgcacaagtaatacatatggaccacaattgtgaaagacccactgagcaggttgagattgacaacttcatggtccaacagcttgatggaacctccaatgagtggggctggtgcaaacagaagcttggagcaaatgccatccttgcggtttcacttgctgtgtgcaaagctggagctatggtgaagaagattcctctttaccagcacatcgcaaatct

SEQ ID NO: 29013 - DNA, 183 bp, Zea mays
tgctgcggcgccggagccgaggaaggagtacccgcccgacctcacgctcccagacctcaagagcgggctcttcagcaccgacgagttccgcatgtacagcttcaaggtgaagccctgctcgcgcgcctactcccacgactggaccgagtgccccttcgtgcaccccggcgagaacgcgcgccg

SEQ ID NO: 29014 - DNA, 293 bp, Zea mays
gacgccatggacggtagtaactcggaatcggtcgagcaagaacggcggcggcggacaaaagcaggcgaaggcgagggtgcgagggaaggtgcaccagccatggtgcacgtcaacttctaccgcaactatggtaagacgttcaagaaaccaaggcgtccttatgagaaggagcgtcttgatgctgaactgaagctggtcggtgagtatgggctgaggtgcaagcgtgagctttggagggtccagtatgcactgagcaggatccgtaatgctgcaaggcacttgctcacccttga

SEQ ID NO: 29015 - DNA, 296 bp, Zea mays
gacgccaatggagcgctcgcagctcggagatcggctcgacgcagccgacgagcccgacggctgtgaagcaggtgagctgcgtgtgggacgcgtacgatgccaccaagggcgcccacgggctgtgcatcctgaccgaatgggacgagttcaagaccctggactaccagaagatcttcgacaacatgcagaagcccgccttcgtcttcgacggccgcaacatcgtcgaccccgataagctgagggagatcggcttcatcgtctactccatcggcaagccgctcgacgcctggctcaag

SEQ ID NO: 29016 - DNA, 258 bp, Zea mays
  unsure (1)..(258): unsure at all n locations
ctcagttgctgccattgataagggcactggaaagaaacaggacatcaccatcactggtgctagtacgttacctaaggatgnaggtgagagaatggtagaagaagccgataagtttgccaaggacgacaaagagaagagagatgcaattgacacaanaaatcaggccgattctgtggtctaccagactgagaagcaactgaaggagcttggcgataaagtccccgctcccgtgaaagagaaggtggatgtgaagctcca

SEQ ID NO: 29017 - DNA, 248 bp, Zea mays
  unsure (1)..(248): unsure at all n locations
tcagcaccaagaggcagccattgggtcncaagcccggcttcatggtcgagggcacaccattgagaccgtaactctcatcgcatatgatgtggtcaatgatctcaagggtggatactaggttgtttggtccatctacctgcagtacccagttctacatctgtgttactctagtgcgtgcaactttgctcactctgagcagtagtatgaacctgttgtctgttcctgttgaaagatttccattttaggtg

SEQ ID NO: 29018 - DNA, 176 bp, Zea mays
ctgcactctcggcaacaactgacggccggaggaagaaggcgcagacgacaaagcagatcagcttgtaccatcgatcaatggcggcggtgacaaagatctacgtcgtgtactactcgacgtacggccacgtggcgaggctggcggaggagatcaagaagggcgccgactccgtggac

SEQ ID NO: 29019 - DNA, 177 bp, Zea mays
tgcacgcatcacgcatcactgcagtactgcatatgaagtgtcaaatggccagcagtagtagagtagtagcagcctgtgccgtccttgtagccttttgcgccgccgtcctctcgtctgccacggtgaccgtgaacgagcccatcgtcaacggcctctcctggagcttctacgacgcgt

SEQ ID NO: 29020 - DNA, 225 bp, Zea mays
cgcgacaaggaggtctggggcgaggacgccggcgagttcaggctggagaggttcgagaacggggtgacgagggctgccgagcaccccaacgcgctgctatccttctccagcgggccaaggtcgtgcatcggccagaacttcgccatgatcgaggcaaaggccgtggtcgccatgatcctgcagaggtttgcactcgagctgacaccgaaatacgtccacgcgccc

SEQ ID NO: 29021 - DNA, 220 bp, Zea mays
gaattatcaccctgtggagctgatcaagaagggtgagaaggtgggctcgtccgagtctgctctgctcgccaagctgggcatccgccccttctcgtacggtctccaggtcaccagcgtctacgaggatgggtctgtgttcagccctgaggtgcttgacctttctgaggaggacctaattgagaagttcgccactggtgtctccatggtcgcttctctttcc

SEQ ID NO: 29022 - DNA, 223 bp, Zea mays
cgcgacaaggaggtctggggcgaggacgccggcgagttcaggctggagaggttcgagaacggggtgacgagggcggccgagcaccccgacgcgctgctatccttctccagcgggccaaggtcgtgcatcggccagaacttcgccatgatcgaggcaaaggccgtggtcgccatgatcctgcagaggtttgcactcgagctgtccccgaaatacgtccacgcgc

SEQ ID NO: 29023 - DNA, 174 bp, Zea mays
  unsure (1)..(174): unsure at all n locations
cgcgaaggctcctgctttcgctatgggaanaattgatcaaacacgtatgtcgaaggtgggtgaaagggtccgttcaaccaggccacaaggtgatcttggaccactgcatcgcttcactgctggagtgtatgttgcattaatgatggctcagattgaggtccttaggaagaaggg

SEQ ID NO: 29024 - DNA, 166 bp, Zea mays
cgcgagtactacgacatcggccgccccttcatcgagcgcgccggggtggcgggcaaggtggacttccgggaggtagccgcgctggagcagctggacgagctcctcgccgacacggccaaccacggagccttcgacttcgccttcgtcgacgccgacaagcctaact

SEQ ID NO: 29025 - DNA, 242 bp, Zea mays
gtcgcgagacggctggcgtacctgcacgagggctgccgcgagcgcatcatccactgcgacatcaagccggagaacatactcctcgacgcgtcgctcgtcccaaagatcgcggatttcgggatggcggcgatcgtgccgagggatttcagccgcgtcctgactacgttcagaggaaccataggctaccttgccccggagtggatcggtggagaagccatcacccagaaagtggatgcctacag

SEQ ID NO: 29026 - DNA, 170 bp, Zea mays
  unsure (1)..(170): unsure at all n locations
cggcactgtctcgaggacagttgatgcgaatgtgcccgacgcggaaggtgtatacagcgccttggagaagcttggcattgactgggccgaggtcggaaagcagcttgagctggaaggtgtggactccttcacagagagcattgacangctactcgtgagcctgcaggaga

SEQ ID NO: 29027 - DNA, 324 bp, Zea mays
  unsure (1)..(324): unsure at all n locations
aggctcgagcatacaacaagctcgtgcagaagagtttcgctcgactttattacaatgactttttgcgcaactgcagctctgttgatgatgatgctanagagaagctccagtctttttcaaatttgactggtgaagagagctaccagagtcgcgacttggaaaaggcctcacaacaggtcgcgaacacctccatgacatcaaagttcagccatcgactctgcttccgaaacaaattggtaacatgtatactgcatccctttatgctgcattagcatctgtgctatataacaagcatgatagtctgaatgggcaaagaattgtgat

SEQ ID NO: 29028 - DNA, 302 bp, Zea mays
atggcgacgagctcctgtcggattcattcacctacaaggagctcgagaacggcgtcctgtgggaggtcgagggaaagtgggtcacccaaggtcctgttgatgtggacattggtgccaatccatccgccgagggtggtgaggacgaaagcgttgatgacacagctgtgaaggtggttgatattgttgacacattccgtctacaggagcaacctccttttgacaagaaatcatttgtgtcttacatcaaaaaatacatcaagaatctcactgctgtgttggagccagagaaagcggatgagttc

SEQ ID NO: 29029 - DNA, 246 bp, Zea mays
acggagagccgcgacgtcggccacggcttccgctgcgtccgcatggtcaacaacatctacctcaacttcgacgccttccacggcgacaaggaccacggcggcgtgcgcgacggcaccaacatcgtgctctggaagtggtgcgagggcgacaaccagcgctggaagatcgtcccctggtaaatgtgctgttctgtggctgcactggtcatcaccatgatctggagctttgaaggcatagccacctgt

SEQ ID NO: 29030 - DNA, 331 bp, Zea mays
  unsure (1)..(331): unsure at all n locations
catggtattgctcagtactgtgggataccacaattagcaaagaagctanaccagatcctggtccaacatataaaaacagttttgccggggcttaagtcacgcataagcagtcagttgactgctgttgctaaggagcttgctgtgtatggtgatcctgttgattcaaaggctggccaaggtgctaagcttttgaacatactagctanatactgtgaagctttctcctcaatggtggaaggaaaaatgaagtatatcccaattgaatctctggtgagcaagatccatacatttccagctacattgtcagagttagacgagtgatctgtgagag

SEQ ID NO: 29031 - DNA, 348 bp, Zea mays
ctgggctgtccactctttcaggatcaccaactgcggagtccaggacaccacccagatccacacccacatgtgctactccaacttcaacgacatcatccactccatcatcgacatggatgccgatgtgatcacgatcgagaactcccggtctgacgagaagctactgtccgtcttccgtgagggtgtgaagtacggagctggcattggccctggtgtctacgacatccactctcctaggattccctccaccgaggagatcgcagaccgcgtcgagaagatgctcgccgtgctcgacaccaacatcctctgggtgaacactgactgtggtctcaagacacgcaagtacac

SEQ ID NO: 29032 - DNA, 346 bp, Zea mays
  unsure (1)..(346): unsure at all n locations
tggaaggaggcgcgcgaggtcgggcacgctgacctcaaggacgagcactggtggcccaagatgcagacggtgccggagctcgtgaaggcctgcaccaccatcatctggatcgcgtcggcgctacacgccgccgtcaacttcgggcagtacccgtactgcgggtaccacccgaaccggccgtccgtgagccggcggcccatgccggtgccgggctccgacgcgtacaaggagctggagaagaacccggagaagttcttcgtgcgctccatcaccgcccagttccaggccgtcgtcggcatctcgctgctggagatactgtcnagcnactcctccgacgatgtgtact

SEQ ID NO: 29033 - DNA, 315 bp, Zea mays
tgttcttgggtgtgactgcaactgtgaccaattgggatgttgagggtacaagttgcagcattgtcctcgaagacaaccctcttgttgattttgttgagctccctgacacttgccaaggccttcagtattgcaatttgttaagtggagttattaggggggcattggaaatggtgtctatgaagacggaggtgacatgggtacgtgacatgcttcgcggggatgatgcctatgagatgcgggtgaaacttatcaagcaagtcaccggagaatacccctacaaggatgacgactagttctatcccattgggagataca

SEQ ID NO: 29034 - DNA, 168 bp, Zea mays
tagagatggcggtcacgatcacgtgggtgaaggcgaggcagatcttcgacagccgcggcaaccccaccgtcgatgtggacgtgggccttagcgacggcagctacgctaggggggccgtacccagcggcgcatccactgggatatatgaggccttggagttgagggatg

SEQ ID NO: 29035 - DNA, 170 bp, Zea mays
tacgagacaccgcgtgcgaaccaagcagactccagcagaagaagcgaagtcgtcgccggatcaggaggaagagcgagcagcaagatgtcgtggcaggcgtacgtcgatgaccacctgctgtgcgacatcgaaggccagcacctcagcgccgccgccatcgtcggccacga

SEQ ID NO: 29036 - DNA, 329 bp, Zea mays
tgcgaggacttcagcaacgtcatcggctccctgtcggattacatggtgtataaggggacgctgtccaccggcgtggagatcgccgtggtgtccaccaccaagaactctgccaaggagtggtccaagcactgcgagtcacaattcaggaagaagataacaagcctgtccagagtgaaccacaagaacttcgtcaacctgctgggctactgccaggaagagcagccgtttacgaggatgatggtgttcgagtacgctccaaacggcacgctcttcgagcatctgcacgtcagagaagacggttaactggactggcgcactcgcctgcgcgt

SEQ ID NO: 29037 - DNA, 333 bp, Zea mays
cgatgttttcatcatgccatcggagtcagaaacgctcggccaagtggtcctagagtccatgtcgtcgggggtgcccgtcgtcgcggcccgtgcaggcgggatccccgacataatcccggaggaccaggagggcaggacgagcttcctgttcacccctggtgacctggacgactgcctcggcaaggtccagcagctgctgacgaacagggagtttagagaaaacatggggcggacggccagatccgagatggagaagtgcgactggcgggcagcgtccaagacgatccgcaacgagttctacaatgctgctatctggtactggcgaaagaagca

SEQ ID NO: 29038 - DNA, 330 bp, Zea mays
tgacaaataaaaaagaacggagggaatatttcgttggacaaaagtagcggcaaagcttttttccttcgtctgatgcttttcttttgtcatttttcatggaaaaagttcagtgtcaaaattcttgtttcaatctgcagatcaggatttcagggaactcgtgcagaaggtccctgaaggttgcctattcaccatcgtctctgactcatgccatagtggtggcctgctggacagtgctaaggagcagataggtaatagcaccaagcagaataagacccagtcccgtgaacctgatgagcctcgtcattctggttctggcagcggcttccggtc

SEQ ID NO: 29039 - DNA, 334 bp, Zea mays
ctgtgttgtgccataggggttgatggacagaattggatgtacactgttgcttatggattctttgaggcagaaacaacagaaaactggacatggttctttcagcagttgcgcaaggctgtgggagatcttcctctactagcattgtgttcagatgctcgcaaaggtctaaaaaatgccatgaacactgttttccctcaagctgaaaaaagggagtgtttcagacacctaatgcagaactacgtgaagcaatttgttggatccgagtacatgtatcctgcagctagagcatataggagggaggtgttcgaccattacttttccgatgtccaagaaa

SEQ ID NO: 29040 - DNA, 334 bp, Zea mays
tagctttggcattgttttgtgggaattattgaccaatagaatgccatttgaaggcatgtcgaatctacaagctgcatatgctgctgcttttcagcaaaagcgcccagctctccctgaggagaccccccaggagcttgtgttcatagtacaatcatgctgggtcgaggatcctgccatgcgacccagtttcagccagatcatccgaatgcttgaaactttcattatgacaatacatccacctccgctttcagagccaaacgaaggcgaggaatcggaagaaacgaggtcgtcactgagcagtaggagctcctctggctcctcgctcgtttctcgc

SEQ ID NO: 29041 - DNA, 179 bp, Zea mays
  unsure (1)..(179): unsure at all n locations
tacagcgcacagctgaagcaccacttcctgcactcactgctagctgctcacaccgtgctagtaacagtccatcaccagtcaccaccaatggctcccaaggttgcgctcttccttgccctcggccttctcttcgctgccgccgcgaatggctgcgaaccctactgtcnacggccagtcgt

SEQ ID NO: 29042 - DNA, 178 bp, Zea mays
  unsure (1)..(178): unsure at all n locations
cagcagnggttactcttacatggtttgctaataagtttatttttgggcacttgttgttttgttactctaccttgagtagcaaggtcaatacctattcaaagcttcagactagtatgataagcattttccttatgcaggacatttgtgatgtgtgcccagagaagttgccaaattacga

SEQ ID NO: 29043 - DNA, 222 bp, Zea mays
  unsure (1)..(222): unsure at all n locations
caggtattgattctagcttctgccttccgattgganatgctaagatagagcgacaagggaaagatgtcactatcactgcattctccagaatggtgggatatgcccttcaggccgctgatatactggccaangaaggtatcagtgccgaggtaatcaatcttcgctcaattagaccgctggatagagctactattaatgcatctgtgaggaaaaccaatagat

SEQ ID NO: 29044 - DNA, 241 bp, Zea mays
tcgacatgtgtgaatatggagcgtgtctgacgatccttccggtgcgcgtccgtccgtccgttacgtacgtggtgccgacgagcaggtcgtggagatcaccaaggggagcaaggtgaagtacgagctggacaagaagacggggctcatcaaggtggaccggatcctctactcgtccgtcgtctaccctcacaactacggcttcgtgccccggacgctctgcgaggacaacgaccccatggac

SEQ ID NO: 29045 - DNA, 233 bp, Zea mays
ctcatctcgcagatccaattcgcgagttctccctcctctgccgccatggcgctctctgtggagaagacctcgtctggacgggagtacaaggtcaaggatctctcgcaggcggacttcggccgcctcgagattgagctggccgaggtcgaaatgcccggcctcatggcgtgccgcgccgagttcggcccgtccaagcccttcgccggcgctaggatctcggggtctctccacat

SEQ ID NO: 29046 - DNA, 241 bp, Zea mays
cgacgccgtgcgctccatcgccatcgaggtcggcaacccgcccaccgccggcgctgggaccgcccacgtgcccgtcatctgcggcctgtcgcggtgcaacaggaaggacatcgacgccgcatgggaggccgtcagcacgctcggaggccccggatccacactttcatcgccaccagcgagatccatatgcagcataagctcaggaagacgcccgagcaggtcgtcgctattgccagggaga

SEQ ID NO: 29047 - DNA, 223 bp, Zea mays
ctctgagggacctatcgctccgctatgggcctctcatgttcctcaagctgggcgagctcccagtggtcgtagcatccacgccggagctgcgaaagaggtgatgaagacccacgacgccatcttctcgaccaggccactgagctcaaccattaggacggtctccaaggatggcctaggcatcgtctgggctccgtacggcgaccactggcggcagctccgcaag

SEQ ID NO: 29048 - DNA, 173 bp, Zea mays
  unsure (1)..(173): unsure at all n locations
aagatacttcatgagnagatccataagaaggcttacagtgatgaggagatcattagaattctcaccacacggagcaaagctcagctacttgcaacattcaatagctacaaggatcagttcactcatgcaatcaacggggatctgaaagctgaccccagagatgagtttctttc

SEQ ID NO: 29049 - DNA, 165 bp, Zea mays
ctcaggcactaagatctgggaagaaccaacaatcatcggtccgaagttcaagttcttctgctggcacaccttatgagactaccacggtggttagcccagagtttgatatgggtcaggaatattgggaagaacagcccagttctttcctcagtgaatatgctcatt

SEQ ID NO: 29050 - DNA, 225 bp, Zea mays
  unsure (1)..(225): unsure at all n locations
acttctctgggctgggcgcgcangtcgccgacgcggactgcgacgagcaggacgggtacgacgaggccatctgcccggtggactcgttccagaagggcnccatcctggacgacgaaatcaacgagaccatcgtccggccgctggtgcccggcgccaagctccacgccgtggtcgacgcgtgccacagtgattccgtcctcgacctccccttcctctgcaacatgt

SEQ ID NO: 29051 - DNA, 176 bp, Zea mays
tagccgtggaggtcaccggtgggcctgagattcccttccaccccggtagggaggacaagcctcaacccccacctgagggccgccttcctgacggcactagaggttctgaccacctgaggcaagtttttggcaagcagatgggcttgagcgatcaggacattgttgcccctctgggg

SEQ ID NO: 29052 - DNA, 174 bp, Zea mays
acatccgcacctctctccatctccctgctcctccgcctccttcttgatccagccaagccagggatcgccatgtcggactcggaggagcaccacttcgaatcgaaggccgacgccggagcgtccaagacctacgcgcagcaggctggcaccgtccgtaagaacggcttcatcgtc

SEQ ID NO: 29053 - DNA, 216 bp, Zea mays
  unsure (1)..(216): unsure at all n locations
tgcntgtgctagaagttttctttgcatgcaacaaggacgaagagcttgcagccaactacctccttgatcatggccacgagtttgacgagcagcagcaatagtgggtgatatggtgtggtggatgcaggaaaccgaggcagtagcagaacagcatagtgtcgttctgatgacctccgcctgatgagagatacttggttgtttatgctatgctgctga

SEQ ID NO: 29054 - DNA, 173 bp, Zea mays
actagacaacatggggcattttgtaactgtgttcgaacgtgcagaccgaattggaggtttaatgatgtacggcgttccaaacatgaagactgacaagattggcattgtccagcgccgtgttaacctaatggcagaagagggtgtcacatttgtggtgaatgccaatgttggta

SEQ ID NO: 29055 - DNA, 171 bp, Zea mays
tgtgtgttgctgtgtggtggaggccgaattttgagactgtgatgtatccttactgccctccacatatcaccaagcacaaggagtgcaagaaacttttcatcgttcacctatccgaaagagagtattttgctgttccaaggaatttgaagctgcttgctgttccgctctttg

SEQ ID NO: 29056 - DNA, 171 bp, Zea mays
tagcgcagagaatcgccaagcaaacaaacagggtagatggagaggagatgagacgacacgagatgttgggtctgggacaccatggctccgatgaagctgtacggggcggtgatgtcgtggaacgtgacgaggtgcgcaacggcgctggaggacgctggctccgactacgag

SEQ ID NO: 29057 - DNA, 237 bp, Zea mays
  unsure (1)..(237): unsure at all n locations
tggaaagggntgaaccatgagcgccgtggctgtttcgtcgtcgctgaacccggacgcgccgctcttcatcccggcggcgctgctgcaggtggaggacttctcgccgcagtggtgggacctcatcaccaccactgcctggttccgcgaccactggtcccgcgagcacgcccacctggacgagatggccgagcagatcgacgcggccggcctccccgacgacgaagacctcttctacga

SEQ ID NO: 29058 - DNA, 165 bp, Zea mays
ctggtgtgggatgacaggacttctgtcggcctgcttaagaaggatggcttgatggctacccatgatgaggagactgcaaattacttccatggcacggatgtcaactgtgttctgtgccctcgcaaccctgatgattctggcagctttgtccaggatctgcagata

SEQ ID NO: 29059 - DNA, 156 bp, Zea mays
  unsure (1)..(156): unsure at all n locations
ggcggccatcgtggcgtcncaggacgagttgcgccccggcagcgccgcgcccgcggacccctggaagctctgcagcgtgcagcaggtggacgaggtcaagtagctcatccgcatcgatgccgtctggtccacggggatcatctactacgtcgccgt

SEQ ID NO: 29060 - DNA, 155 bp, Zea mays
agacaacgggaagccatatgagcaagcagcccagattgaagtacccatggtggcccgtcttatgcgttactatgctggttgggctgataagatccatgggctcattgtgccggctgataggccacaccatgtacagatcttgcatgagccaattg

SEQ ID NO: 29061 - DNA, 197 bp, Zea mays
gcggcgtgcacgacggcaccgccgtcgtgctcatgggagtagagcaagggcgagaaccagagctggaagatcctgccgtggggtcccgaggccaactcctccgcggcccacgcgggaggcccgcacgccgtcgcgtcttctgcaaggccggcggcgaggactacagcctcacggtgcgcaacggcacggcgtgctgg

SEQ ID NO: 29062 - DNA, 156 bp, Zea mays
acgcctgatacatccaagacagggatcgccatgtcggactcggaggagcaccacttcgaatcgaaggccgacgctggggcgtccaagacctacccgcagcaggctggcaccgtccgtaagaacggcttcatcgtcatcaagaaccgtccctgcaag

SEQ ID NO: 29063 - DNA, 155 bp, Zea mays
attggaggttccagtataaaggatggacaaatagagctaatgctacacaggaggctactccatgatgatgggaaaggagtcgccgaggcgctaaatgaaacagtctgtctcgataagcaatgtgaaggactcatcatacaaggaggatactatgt

SEQ ID NO: 29064 - DNA, 175 bp, Zea mays
aggcgtggaggtcaccggtgggcctgagattcgcttccaccccggtacggaggacaagcctcaacccccacctgagggccgccttcgtgacgccactaatggttctgaccacctgaggcaagtttttggcaagcagatgggcttgagcgatcaggacattgttgccctctctggt

SEQ ID NO: 29065 - DNA, 327 bp, Zea mays
tagggaagaccatcactttggaggtggagtcctccgacaccattgacaatgtgaaggccaagatccaggacaaggagggcatcgccccggaccagcagcggctcatcttcgccggcaagcagctcgaggacggtcgcaccctcgccgactacaacattcagaaggagtccaccctccacctggtgctccgcctccgcggtggcgccaagaagcgtaagaagaagacgtacaccaagcccaagaagatcgagcacaagcacaagaacgtgaagctctccgtgctgcagttctatagagtcgacgacgccactggcaacgtgacccgct

SEQ ID NO: 29066 - DNA, 54 bp, Zea mays
tatctgaaggagctccagttttttgatggtgagtcatgaaggatgatgcgtctg

SEQ ID NO: 29067 - DNA, 163 bp, Zea mays
gcaataaacacagtggcaaatactttggcactggctgaacagcaccactgctatcagctagaaactgtttgcttagaatttgtggctctgcctgagaatttgaaagctgtcatgcaaaccgatgggtttgattatttgcagcaaagctgtccatccctcctga

SEQ ID NO: 29068 - DNA, 156 bp, Zea mays
acagtacaacacctacaatgacatagaggctgtttatgattgcatgagaacggagtatgggatagaagaagaggatctaatcctgtatgggcaatccgttggaagtggaccaacgttgcatctagcctcacgtctcgagaagttaagaggggttgt

SEQ ID NO: 29069 - DNA, 144 bp, Zea mays
  unsure (1)..(144): unsure at all n locations
agcaactgaaggagcttggcgataaagtcccgctcncgtgaaagagaaggtggatgtgaagctccaggagctcaaagaggcaatatctggtggatcaacacagagtatgaaggatgccatgtctgctttgataccagaggtgat

SEQ ID NO: 29070 - DNA, 185 bp, Zea mays
atcatatgcatgctctgaagaagagggagatgagagacaagaagaaggctgcagatgctgagaaggcaattgagaccgcacccaagaagcagaagaaagcatcttcaaagaaatcttcagggtccaagtcataaggcgctcacagaactcagtgtgtcttctcctttatgttgtttaccgccaga

SEQ ID NO: 29071 - DNA, 249 bp, Zea mays
tggcagcctcgcgcccaacgtgtcggccgccgtgaccggcgtcgccctctgcggcacctggcgggacagctcttcttcggctggctcggcgacaagctcggccgcaagagcgtctacggcttcaccctcatcctcatggtgctctgctccgtcgcgtccggcctctcgttcgggcatacgcccaagggcgtcatcgccacgctctgcttcttccgcttctggctcggcttcggcatcggcggcgactac

SEQ ID NO: 29072 - DNA, 267 bp, Zea mays
  unsure (1)..(267): unsure at all n locations
tgaggaatttagcacggggctactcgaggaaagatcttggtgtgagctatgtcaangagaaacaattgcacagtaatatggagatcaataaactgcgggagactgtgaaggcacatcaggaaaagttgcaaacagtggcaaagactgctggtttgaatcatgaagaatggcttgctaatgcggatcgctgggttgctggtttcctagagaagtttgagcaacactgccacaatatggaaactgcgatcaaggatcggatacaggaga

SEQ ID NO: 29073 - DNA, 349 bp, Zea mays
  unsure (1)..(349): unsure at all n locations
cggcaccatctgagccacctcttagctgggaaccaagaagacggattgcactgggatctgcaagaggactttcttacttgcatgatcactgcgattccanaatcatccatcgggatgtcaaagctgcaaatattcttttggatgaggacttcgaggcagttgtgggtgatttcgggcttgccaagcttatggactacaaggatacccatgtcacaacagctgttcgtggaacaattgggcacattgctcccgagtacctatctaccggcaagtcttctgagaagactgatcgttttggctatgggatcatgcttctggagctgtatactggccagagggcatttgatct

SEQ ID NO: 29074 - DNA, 158 bp, Zea mays
tgaagtttaagatattcaacactaacaacttgtgggtgaaccttaaagctgtcaagagactagtagaggctgaggcacttaagatggaaattattccaaaccccaaggaagttgatggtgtgaaagtccgtcaacttgaaactgcagctggtgcagct

SEQ ID NO: 29075 - DNA, 159 bp, Zea mays
  unsure (1)..(159): unsure at all n locations
ganacatcatgcagaactgccaggacaacgccgcgatactgctggagggcatcgcggcgacgggccggttcggcgtcctgtccaaggacgccggggtgccgctggtggccttctcgctcagggacagcagccggttcagcgtgttcgacgtctccgaga

SEQ ID NO: 29076 - DNA, 340 bp, Zea mays
  unsure (1)..(340): unsure at all n locations
tgttcgtgcgcaccatcaccagccagttccaggcgctcgtcggcatctcgctgctggagatcctgtccagccactcctccgacgaggtgtacctcggccagcgcgacaccaaggagtggacgtcggacgccaaggcgcaggaggcgttcaagcggttcggcgcgcggactgacgagatcgagaaacgcgtcgtcaccatgaacgcggaccctcgcctcaagaaccgcaacggcccggccgagttcgcctacacgctgctctaccccaacacctccgacacgaagggcgacgccgccggcagtcaccgcaagggcattccanacagcatctccatttgagt

SEQ ID NO: 29077 - DNA, 178 bp, Zea mays
  unsure (1)..(178): unsure at all n locations
agccanagcaagttgctaggtcctttgaaccagcaactgaagcttcctcgtctcatcatcgagaccagtaagcaacatggcggctaatctcaagtgggctcctgtactagccctcctcgtcgtcgttgctgccatggttggcaccaccagcgccggcaacatcgcagtgtactggggc

SEQ ID NO: 29078 - DNA, 177 bp, Zea mays
  unsure (1)..(177): unsure at all n locations
cttcgtaagcacgtcgtcctccgtccgctactctgcgcgagaagcgagagtatggacacccaagtgtagcttgctgttgtggtgaaagtgatgggaangaccggctccagnggtcangttactcaggtcagagtgaagttcttggatgaccagaaccgtctcatcatgatgaacgtc

SEQ ID NO: 29079 - DNA, 243 bp, Zea mays
  unsure (1)..(243): unsure at all n locations
tgccatcgtccacgtcncagcctcgccggactctaggggcagaagctgcagcgtcgagatggtgaaggggcgcacggggcagcgcgtgaggctctacgtccggggcaccgtccttggatacaagcggtccaagtcgaaccagtacgagactacgtcgctggtgcagatcgagggggtgaacaccaaggaggacgtcgcgtggtactgcgggaagcggatggcctacatctacaaggccaagac

SEQ ID NO: 29080 - DNA, 171 bp, Zea mays
  unsure (1)..(171): unsure at all n locations
attcactgccaagcttggttcggcctctactgacctggagaaggctgaggcncagatcggagtcgatgttcacagtgcactcaatgctgcattgaccggttaattggtggcattttaaattgtcttgtctttttcatctacagttttagagtgagtttaagtttgcaaacc

SEQ ID NO: 29081 - DNA, 241 bp, Zea mays
  unsure (1)..(241): unsure at all n locations
tatgctcagaagacaaagctgtggcaagactaacaaaaggaattgaagggctctttanaaagaacaaggtgacttatgttaagagctttggaaaattgtcatccccctcagaagtgtcagttgacttgattgatggtggtagcactgttgtcaaaggcaaaacataataattgcaactgggtctgatgtaaaatcacttccgagaataacaattgatgangagaaagtcgttcatctactg

SEQ ID NO: 29082 - DNA, 241 bp, Zea mays
  unsure (1)..(241): unsure at all n locations
tgaagatactgagcgagatttccatcgagaaagatgtggatggcttccatcctctcaacattggcaagcttgcaatgaaaggcagagagccactgttcgtaccatgtacgccaaaggggtgcatggagctcttgtcaaggagcggagtcactgttaaaggtaagcgggcagttgtggttggtcgcagcaacatcgtcgggctacctgtatcnctgctccttctgaaggcagatgcgaccgt

SEQ ID NO: 29083 - DNA, 168 bp, Zea mays
tgcgccaggagcagtgaagagattgcagagattcagcacagatacaaggctgagaccgggtatctgcccattcttttcgacgggtcgtctccaggagctgggaagtttggttacctgaagatccgacgtcgttgtccctagtggctgattgggaaacgaagaacttca

SEQ ID NO: 29084 - DNA, 300 bp, Zea mays
  unsure (1)..(300): unsure at all n locations
agagaatcccaagcanacaaacagggtagatggagaggagatgagaggagaggagaggttgggtctgggacaccatggctccgatgaagctgtacggggcggtgatgtcgtggaacgtgacgaggtgcgcaacggcgctggaggaggctggctccgactacgagatcgtgcccatcaacttcgccaccgccgagcacaagagccccgagcacctcgtccgcaacccgtttggtcnagttccagctctgcaggatggtgacttgtacctcttcgaatcacgagcaatctgcaagtacgctg

SEQ ID NO: 29085 - DNA, 210 bp, Zea mays
  unsure (1)..(210): unsure at all n locations
gcgaccaggtgtcggacgccgtgcttgacgcatgcctcgcgcaggaccccgacagcaaggtggcctgcgagacctgcaccaagaccaacatggtgatggtgttcggcgagatcacgnacaaggcgaccgtggactacgagaagatcgtgcgcgacacctgccgcgagatcgggttcacctccgacgacgtgggcctcgacgccgaccgct

SEQ ID NO: 29086 - DNA, 370 bp, Zea mays
  unsure (1)..(370): unsure at all n locations
gcgcatgcacgtagtagccggaatcggctcgacacaagtccacctgcagctgatccaacagatttactgggaatcaatgaaccaacccctgccacatctgaaatagatcaaaagaatgcgggggccttggccatggttccacaggataatgcgccanaagcacctgcttctactaccagttctggaagtgtggagactagctgggagctggccttggtcactgcacccagttcaaatgggactgctgtcactccaagcaaattggccggtgggctggacctgcttacactcgacagcttgtacaacgaggcgcaccgaagagcgcagcagaacgcaagctacaacccttgggagaccatcgagcgtcagg

SEQ ID NO: 29087 - DNA, 341 bp, Zea mays
caacaccaacagggccaacaggatccacgcccaggtattaggcgtggagctggagcccagggtcagcaacctgtgccaccatttcagcagcagattgttccaagaggacggatgtaccgttacccaactggtcgcaacatgcctgaagctccggcgatgccaggggttgctggaggtatgatgcaggcatacgatatgggcggcttccctgtgagggatgctgccttatccccggctgcccaaattgggactctgacttctgcccttgcaaatgctaatcctgaacagcaaagaacgatccttggtgaaaacctatacccactggttgagcaactggaacc

SEQ ID NO: 29088 - DNA, 341 bp, Zea mays
cgcagggtgtccgagcctctctagtttgtacgcccaacattggcctgatgctgctgccatgtagcgcatatatgcagcgctcccccctcggcttcaccggcggcggcaacgacggtgaaaactacatcgggtgctagctccgacggtggtgcgtgccctgttgacgatagggcgcgcggggcgcgggcagcttgtaggcgttcgatcggccatgtagggcaactatacatctttggcaggtctccatcatcctccgtgggagagaagtgcatggtaatggatgcgtgtgtatgtatgtgtatgccatggcgcgcgcgccggctctgggcgagcacagtaga

SEQ ID NO: 29089 - DNA, 344 bp, Zea mays
gacggatcggactcaccttgcttggttggtggtacgagcctgggacgcagactcccgacgatgtcgcggcagccgcacggatgaacgacttccacatcggatggttcatgcatcctatggtgttcggggactaccctccggtgatgaggaggaacgtcgggtccaggctgccgaccttcacggacgaggaggcggcgcgagtgagggggtctttcgacttcgtcggattcaaccactacatcgtcgtctacgtcaaggctgatcttggccgcgctagacgacaagtgcgagactacatgggcgatgcagccgtgaagtatgacatgccgtttctcaagtcacgc

SEQ ID NO: 29090 - DNA, 351 bp, Zea mays
  unsure (1)..(351): unsure at all n locations
tatcagctggataacttttaccagaatcataggaggtatgtcaagagccgtaacgacgcacaactaagagataaaagtaaggcgagtgacactaacaattgtgatcccganggcanaacagtagatgganagccaattgtgccttgcggtcttattgcatggagcctgttcaatgatacatataccctcatccacaacaataaaaccttgagagtggacaagaaagacatctcttggaagagtgacagagaccacaagtttgggagtgatgtcttccccacgaacttccagaaaggacctcttcgaagtggagaaatacttaatccagnaatcccgttgagtgaacaagag

SEQ ID NO: 29091 - DNA, 345 bp, Zea mays
  unsure (1)..(345): unsure at all n locations
cttctcctcctcgcctcctctcgctagtctccacgacgcaagggagagtgacggaaagcgacgcggcgcgagctaggagggccaaggcgaagaggggaagcaccgcaccaggacccttgttcgccgccgccgcctctgatctccgcgangttgtcaggattcaatatgtcgaccagcacattcgctacttcctgcacgctgttgggcaatgttagaacaacgcaggcctcccagacagcggtgaagagcccttcgtctctaagcttcttcagccaagttacgaaggttccaagcctgaagacctccaagaaactggatgtctccgccatggctgtatacaaggtg

SEQ ID NO: 29092 - DNA, 289 bp, Zea mays
acggcgtccagcggggcctgatcggggacatcatcagtcgcttcgagaagaaagggttctacctcaaggggatgaagttcatgaacgtggagaggtccttcgcgcacagcactacgctgacctttccgacaagcctttcttccccgggttggtggagtacatcatttccggccccgtggtggcgatggtgtgggaggggaaggacgtcgtgttgactggccgcagatcattggggcaccagccttgggaggcaccccggtacattctggggatacgccgtgaatcgcag

SEQ ID NO: 29093 - DNA, 326 bp, Zea mays
cggctcgaggtggttttgaggctggtatctccaaggatggccagacccgtgaacatgctctacttgcgttcagccttggagtgaagcagatgatttgctgctgcaacaagatggatgcatacactcgcagatactccaaggcacgttatgaagagattgtgaaggaagtctcatcctacctcaagaaagttcggtacaaccctgataagattgcctttgttcgcatttctggttttgagggtgacaacatgattgagtagtccacaaccttgactggtacaaaaggccaacatgcttgaggtcttgacagatcacgagcccagagc

SEQ ID NO: 29094 - DNA, 325 bp, Zea mays
  unsure (1)..(325): unsure at all n locations
cacactcgccgagctgagcttagctccgctccagctccaatcacagtcgtgaccagagcgcgagagctagctaganggccgtgaagatgccgatcaataggatcgccctgnggagccaccaggaggtgtaccacccgggcgccctcaaggcggcgttcgctgagttcatctccaccctcatcttcgtcttcgccggccagggctccggcatggccttcagcaagctgaccggcggcggcccgacgaccccggcgggcctgatcgcatgcgcggtggcgcacgcgttcgcgctgttcgtggcggtgtcggtgggcgcgaacatctc

SEQ ID NO: 29095 - DNA, 334 bp, Zea mays
  unsure (1)..(334): unsure at all n locations
gccattgctcaccgcacaagtgcacgctcacctcacacacgcagctaagtagctaacgccgtagganngaacaagaaaaggctcgacatggccgaggagaagaagcagggcctgcagctgctggacttctgggtgagcccattcgggcagcgctgccgcatcgcgctggacgagaagggcctggcctacgagtacctggagcaggacctgaggaacaagagcgagctgctcctccgcgccaacccggtgcacaagaagatccccgtgctgctgcacgacggccgccccgtctgcgagtcactcgtcatcgtgcagtacctcgacgaggcgttcc

SEQ ID NO: 29096 - DNA, 330 bp, Zea mays
  unsure (1)..(330): unsure at all n locations
tggagtacgcaaccaactctgacgggttggtcatccacgatggcacatggacgtacaagatccccacggtcgacaccatcccaaagcagttcaacgttgagctgatcaacagcgcccgtgaccagaagcgcgtcctctcttccaaagcatcgggcgagcctccgcttctcctagcttcctctgtgcactgcgcaatgagggaggccatcagggccgcctagaaggaattctcggtctgcactggtccagcgaactccgccatcacgttccagatggacgtgcccgcaacgatgcctgtcgtcaaggagctctgcggcctgnatgtcgtgg

SEQ ID NO: 29097 - DNA, 338 bp, Zea mays
  unsure (1)..(338): unsure at all n locations
aaacaagtcatatctagctagtagctccctgaanagttcactagagaagcatttgaaggaggagccatgtctgaggagaagcaccaccaccacctgttccaccaccgcatagcagatgaggaggaaggcgcctccggcgaggtcgactacgagaagaaggagaagcaccacaagcacatggagcagctcggccagctcggcgccatcgccgccggcgcgtacgctctgcacgagaagcacaaggccaagaaggacccggagaacgagcacggccaccgggntcaaganngagtggccgccgtcgccgccgtgggctccgccgggttcgccttccacga

SEQ ID NO: 29098 - DNA, 325 bp, Zea mays
tattcttttaacaatatgtcgagggaggagaatgtttacatggccaagttggctgagcaggctgaaaggtatgaggagatggttgagtatatggagaaggtggctaagactgtagatgtggaagagctcactgttgaggagcgtaaccttctgtctgttgcatacaagaatgtgattggggctcgtcgcgcttcatggcgcattgtttcttccattgaacaaaaggaggagcccgtaagaacaagagcatgtgaacttatcaagaatacgtggcagtcgagctgactgacaatatctggatgaatctgagctgctgactccacta

SEQ ID NO: 29099 - DNA, 337 bp, Zea mays
cagagctgaactttaatatggttggatttatgggtgccatgatatccaaccttgcatttgttttccgcaacatcttctcgaagaagggcatgaaggggaagtccgtcagtggcatgaattactacgcttgcctgtcaattatgtccctggtcatactgactccatttgctatagctatggaaggccctcaaatgtgggctgctggttggcaaaaggctcttgcagaagttggacccaatgttgtctggtggattgctgcacagagcgtgttctaccacttatataaccaggtgtcctacatgtctctcgatcagatttctcgattgacattcagcat

SEQ ID NO: 29100 - DNA, 333 bp, Zea mays
tatacgagaaggaagcggacgcgagatgagactaaccgacctcggatccatcgacgcgtgaagatgtcttcgcccgccgagtactacaaatcacttccacctataagcaaggcatatgggacattgtgtttctttaccaccgtgctagttcagctccagattttgcacccattatttctttacttagattaccccttggtgttcaagaagtttgagatatggaggctattgacaagtttctttttcctggcaccattttccatgagatttggtattcgccttctgatgatagcaaggtatggtgtcatgttggaaaagggtgcatttgataag

SEQ ID NO: 29101 - DNA, 288 bp, Zea mays
  unsure (1)..(288): unsure at all n locations
aagagatggctcgctccagaattcatgtaacatgtgcattagtttatgggccttcaccaacaggaaggatccaccaaggagtttgttcaacatggatgaagaatacaattcctctggaatatagcgaagaatgcagctgggctcccatatttgtgaggcagtcagatttcaagttacctgctgacgcatccactccgattatcatgattggtcctgnngacaggctggctccttttagnagtttcttgcaggnaanggtagcactgaaacaatctgnnnagcagactg

SEQ ID NO: 29102 - DNA, 171 bp, Zea mays
agacacatggcagtacttcatgcacagatacatgcacattaacaagtttctgtataaacacatccattctaagcaccatactcttgtagtcccttattcctttggagctctatacaaccatcctcttgagggccttattttggacaccattggtggtgcactctcattcct

SEQ ID NO: 29103 - DNA, 171 bp, Zea mays
agaagaagaagatcaaggaggtttctcatgagtggcaattggtaaacaagcagaagccaatctggatgaggaagcctgaggagattaccaaagaagagtatgctgctttctacaagagcttgaccaacgactgggaggagcatcttgccgtgaagcacttctctgttgagg

SEQ ID NO: 29104 - DNA, 171 bp, Zea mays
  unsure (1)..(171): unsure at all n locations
tatacctcncaggctgactgtgctgtccttatcattgactccaccactggtggttttgaggctggtatctccaaggatggccagacccgtgaacatgctctccttgcgttcacccttggagtgaagcagatgatttgctgctgcaacaagatggatgcaaccactccgaaa

SEQ ID NO: 29105 - DNA, 326 bp, Zea mays
gggaagttcaacatcgtgtccaaggacaacggcgtgccgctggtggccttctccctcaaggacagcagccggcacagcgagttcgagatctccgacttcctgcgccgcttcgggtggatcgtgccggcctacacgatgccccccgacgcgcacacgtgaccgtgctccgcgtggtcatccgcgaggacttcagccgcaccctcgcggacgcctggtgctcgacatcgagaaggttctgcacgagctggacgcgctgccgcccgtgtcgcagcgggacctagcgcgctcgcgcgccgagtcagcgagaggagatgagagcagcgcag

SEQ ID NO: 29106 - DNA, 168 bp, Zea mays
ctcggatcggatgatgttaacattctctgttttcccgtcgcccaaggtgtctgatactgtagtggagccctacaacgcaacgctctctgttcaccagctcgttgagaacgcagacgagtgcatggtgctcgacaacgaggctctctatgacatctgcttccgcacgct

SEQ ID NO: 29107 - DNA, 170 bp, Zea mays
tgttctacactggtttcccggtgtactgcgtcaggattgcaccccatgtcatgatgacctggatattcttgaatcagatccagaagtttgagaagaagatcggcatataggattcccatcggacggatacagggttgacagttctatgctattactgcttgactctgtaa

SEQ ID NO: 29108 - DNA, 314 bp, Zea mays
  unsure (1)..(314): unsure at all n locations
ctcgcagcagccanaacctacctagccgcgccgcaggccccccatcgccgccaagatgcagatctttgtgaagactctgacggggaagaccatcactttggaggtggagtcctcggacaccattgacaatgtgaaggccaagatccaggacaaggagggcatccccccggaccagcagcggctcatcttcgccggcaagcagctcgaggacggtcgcaccctcgccgactacaacattcagaaggagtccacctccagcatgtgctccgcatccgcgggtggcgcaagaagcgtaagaatgagacgtacaccaa

SEQ ID NO: 29109 - DNA, 325 bp, Zea mays
tagcagacgggcgactgcagcggcgcactctcctgcacgctctcggggcagcctcgcatgacgctggccgagttcaccatcggcggcggcggcagcaaggacttctacgacatctcggtgatcgacggctacaacctggccatgctcttctcgtgcagcaccggcgtgaccctcaactgcggcgggcccagctgcccagacgcctagctgtttcccagcgacgaacacaagacccatgcctgcagcggcaacagcaactagcaagtcagcttctagccgtgagttcgcgcgttcgaagcaagcggcagtgttgccggacgacgat

SEQ ID NO: 29110 - DNA, 312 bp, Zea mays
  unsure (1)..(312): unsure at all n locations
ggttcggcccgtgaaggaggaccacagccgcgggctggaccacggcgcctgggtgccgctgatgctcatgtacccggacgccgacatccccgtgtgccagctgtcggtgcagagcgaccgcgacggcgcgtaccactacagcctcggcagggcgctggcgccgctgcgggaggagggcgtcgtcgtcctcggctccggcagcgccacgcacaacctgcgcaagatggggccgttcgacgcgcccgtgccgcagtgggccgccgagttcgacgcctgnctcgaagactcgctcgctcgacggaggtacgagga

SEQ ID NO: 29111 - DNA, 163 bp, Zea mays
tcagagaatccccaagcaaacaaacagggtagatggagatgacatgagaggagaggagaggttgggtctgggacaccatggctccgatgaagctgtacggggcggtgatgtcgtggaacgtgacgaggtgcgcaacggcgctggaggaagctggctccgacta

SEQ ID NO: 29112 - DNA, 160 bp, Zea mays
ctgttacaaatgaccatttcaagactgcgcttggaacaagcaaaccatctgctctccgtgaaactgttgttgaagtccaaatgtctcttgggaggatattggtgggctggagaatgtcaagagggagctccaggagactgttcaatatcctgtggaacat

SEQ ID NO: 29113 - DNA, 304 bp, Zea mays
  unsure (1)..(304): unsure at all n locations
gcaccacacctcttcttcttcttcctcctcctcctagcacagctagcgcctgctccccttcgcctgtgatcatgtcttgcagcagcggcaagtgcgactgtggctccagctgctcctgcggcagctcatgcaactgcatgtcccctaacgtggagaccgccgccgccagcagcatcaagacnacggtcctcgccgcgccgaccacgaaggcagcgccgcggcttcgangcggcaccgaaggctgcggctgcgactgcaacnactgcaactgcggcatcagctgcggctgctcctgctgcagctg

SEQ ID NO: 29114 - DNA, 327 bp, Zea mays
ctcaccgatcctctacgttctccactacttggggcggaagcatggctgtgcttccgggactacgattgcaactggaacgtcgagatcttgcgggaattcgcgagtgacgttgcgcatgcccgctggtggaaggtgcacaacaagatgccgaagaagcttcagagctattgcctcctgaggtcaaggctgaaggctgggctggagtgggagcggcggcaggccgagaaggcgaacttcaccgacgggcattggaaacggaacataaccgatccgaggctgaagacttgcttcgagaagttctgcttctgggagagcagctatggcact

SEQ ID NO: 29115 - DNA, 317 bp, Zea mays
tatgacgtgttggaagataaccctgttgggaggctcaaggtttacgtgtatgatctccccagtaaatacaacaagaagctggtgaagaaggatcctaggtgcctgaatcacatgtttgctgctgagatcttcatgcaccggttcctgttgtcaagtgctgtccgaacatttaatcctgaagaagcagattggttctacactcccgtatacgccacatgtgatctgactccttcgggtcttccccttcccttcaaatctccacgcatgatgcgcacgcagattgagctgattgccacgaactggccttactggaacag

SEQ ID NO: 29116 - DNA, 313 bp, Zea mays
  unsure (1)..(313): unsure at all n locations
atcgncgtcgtctgctccgggctgctgttctgcgcctccacaaggctttggcctctgttgtaagatttaagcttaacctccaaccatgggtaaggagaagtcgcacatcaacattgtggttattggccatgtcgactctggcgagtcaaccaccaccggccacctgatctacaagcttggaggcattgacaagcgtgtgattgagatgttcgagaaggaagccgctgaaatgaacaaacggtccttcaagtacgcttgggtgcttgacaagctcaacgctgagcgtgagagaggtatcaccattgatatcgct

SEQ ID NO: 29117 - DNA, 153 bp, Zea mays
  unsure (1)..(153): unsure at all n locations
ctactacttcgcatcgctggccttccacaatgccgccggcgggttctgcggcatccgcgtgctcagcacgccgcagatccccgtcccgttcccgccgncggccgccgactacaccgtcctcatcggcgactggtacaaggccaaccacaccga

SEQ ID NO: 29118 - DNA, 325 bp, Zea mays
aagaaagcacgaatcgctgcatctcaggtgaatgggcctgtactggtggaggacacctgcctatgttttaatgcgctcaaaggcctaccaggaccctacataaagtggtttcttgagaagattgggcatgaaggtttaaataatctgttaaaagcttatgaagataaatcagcgtttgctatgtgcatcttctctcttgctcttggacctggagaggaaccaatcacatttgttggcaaaactgcgggaaagatcgtgcctgctagaggcgctaattattttgggtgggatcctgtgttccagccagatggttttgaacaaacat

SEQ ID NO: 29119 - DNA, 310 bp, Zea mays
  unsure (1)..(310): unsure at all n locations
acggattggaggggattttgacttaccagtgatttaaaccccctcaatcctcctcaatccatatggattggggtagaaccgaacaagccctgacggggaagaacaaggaggcgtggagcgagggcaagatccgcggcacggtgaggctggtcaagaaggaggtgctggacgtcggcgacatcaacgcctcgctcctcgacggcgtccacaggatcctcggctgggacgacggcgtcgccttccagctcgtcagcgccaccgcggccgaccccagcaacgggggccgtgngcaagtggggaaggcggcgca

SEQ ID NO: 29120 - DNA, 330 bp, Zea mays
acagaccaaagagctatcttaaaaggacattaggttgggatcagtatccccatggacggtggggtgattctcggaacccatcatatggagcacttactgaccaccagttcacaagaccacgaggccgtggtaagaagctccaagaggaatgggctgttccactgaaatctgtggaggacattagtgagcgcttcacaaacttctgtcaagggaaactcacaagcagcccatggtcagaattggacggtcttcaaccagagacaaagattatcgatgaccagttggtgaatattaacccagaaggtttccttacaattaacagccacctgc

SEQ ID NO: 29121 - DNA, 351 bp, Zea mays
ctctgagtagcttccgtttgacctctgtgggacgcatgattacccgcacaatggtcaaggccctggagtacgttggtcttgctccgcaggcagtgagagggtctctaatttcctggagaaggctgcagaagggctggtagagggcggaaagaaggagatcttcacgccaatgtacttctttcttgttcggaagcctcttctggaatgagctcttggatcaccttttcagagagagaaggcaagtggtcatttcgaagaagccgagtgagaggaactggaatcaagaaacttcactctctgtgtaggagaagtaacgaacatgtagtactgtcagcttgtgttatcagtgtt

SEQ ID NO: 29122 - DNA, 174 bp, Zea mays
cgaggacaggatcctcaccaccaacctgtggtctgctgagctctccaagctcgctgccaacgcgttcctggcacagaggatctcctctgtgaacgccatctccgccctctgcgaggccaccggcgcgaatgtgactgaggtggcttacgccgtgggcaaggacacgaggattgg

SEQ ID NO: 29123 - DNA, 175 bp, Zea mays
tactctgctctcacccacctcacggtccggcagcagagagcggaggtgcagagagatcgagatccggaggccgcgagtaggagcgccaccaccagcgactgcggcaatggcgggcacggtgacggtcccggggtcgtcgactccctccacgccgctgctcaaggacgagctcgaa

SEQ ID NO: 29124 - DNA, 172 bp, Zea mays
  unsure (1)..(172): unsure at all n locations
ccgccggcgcccgtggggcaaatgggctgctgagatcagagatcctcgcaaggacgtgcgcgtctggctcggtacattcaactctcccgaagaagctgccagagcttacgacgccgaggcacgcaggatccgcggcaagaacgctanagtcaacttcacggatgaggttcct

SEQ ID NO: 29125 - DNA, 313 bp, Zea mays
  unsure (1)..(313): unsure at all n locations
cggctcgagggatggtcgggttcgcgcgcgagttcggcaggttcgccgacgtcgccaccgtgttgcagcaccaccgccggatcagggagcagctcaggaagatcagccaccggtaccgcaagttcatagtctgcagcctcgtgcttgtctccgccagccagttcgccgcgctactcgccaccactaggccgcacgccatcgtcaatctcngtaccgcagcgagctcgcgttgtgctcggtcagccttgtggcgggtctgctgatgtgcctgtacagcgcggcgaagatcacgcacaagactgcagcgatgacg

SEQ ID NO: 29126 - DNA, 173 bp, Zea mays
atcacgggtctccagcattcctatcctctcgccgcccgcacgtaccgccgccgccgccgccgccgcggcttcccttcctctcccgagccaagatgaatgttgaaaagctcaagaagatggcaggtgctgtgcgcaccggggggaagggtagcgtgcgcaggaagaagaaggca

SEQ ID NO: 29127 - DNA, 172 bp, Zea mays
acgacatcgtctcttcgtgcccacgagcaaccgataatccgccggcgctgagatgttggtttatcaagacctcctatctggcgacgagctcctgtcggattcattcacctacaaggagctcgagaacggcgtcctgtgggaggtcgagggaaagtgggtcacccaaggtcct

SEQ ID NO: 29128 - DNA, 172 bp, Zea mays
  unsure (1)..(172): unsure at all n locations
aagagattggtacaatgcaatgtgaacatcagtaccatgtgcgctgcattcacgaatggcttaagcagaagaattggtgtccaatatgcaaagcttcagctataccttcagagatgaccaagggagacgcatgaatcttggcgcanacttgtanatagcgtggatttattat

SEQ ID NO: 29129 - DNA, 242 bp, Zea mays
  unsure (1)..(242): unsure at all n locations
atcggctgctagctctgcttgtgaccacattcgtgattgggttcttggaacacctgagggtacatttgtttcgatgggtgtgtactctgatggttcatacggtgttccttctggactcatttattcattcgcagtaacatgcagtggtggtgaatggaaaatcgttcaaggcctcccgattgatgagttctcaagganngagatggatgccactgcccaagagctgacgggagagaagacgc

SEQ ID NO: 29130 - DNA, 158 bp, Zea mays
accgcctctctcaatctgataccgcagatccgtcgtccggtgagtggaagccgcacgaacccatggcctccggcgagcttgcctgcacctacgccgctctcatcctcagcgacgatggcatcgccatcaccgccgagaagatcgccacgatcgtgaag

SEQ ID NO: 29131 - DNA, 169 bp, Zea mays
tgattgttccaaattctgccgtgaagttttttagctacgagcaggcgtcaaagggaattctgtgggcctaccgtcaacagactggtgaagaggatgctcagcttactccgctcttgcgccttggagctggagcatgtgctggtatcatagctatgtctgctacttaccc

SEQ ID NO: 29132 - DNA, 167 bp, Zea mays
  unsure (1)..(167): unsure at all n locations
ctcagtgccagcagccgtgcgctcgctctctctgtcnctcaaggccttcgccggcgaagagcgcctagtcacccaccaggatgaagtttgttgctgcttacctgcttgctgtccttgctgggaactccagcccctctgctgaggacttgacggccattctggagtca

SEQ ID NO: 29133 - DNA, 169 bp, Zea mays
gttgtccttgttggtggctccactaggatcaccagggtgcagcagctgctccaggacttcttcaacggcaaggagctgtgcaagaacatcaatcctgatgaggccgttgcctatggtgctgctgtccaggctgctatcctcagtggtgagggcaacgagaaggtgcagg

SEQ ID NO: 29134 - DNA, 161 bp, Zea mays
atagctcgaggtctccggccagggcttcggcgccaccatccgggccatcaacggcgcgctcgaattcgacggcaagaaccccaactccgtcaacaaccgcgtcgcctactacaagcagttctgacaggatttcggcgtcgacccgggcaacaacctcacct

SEQ ID NO: 29135 - DNA, 159 bp, Zea mays
atcctaaggtgcgctcgcagatcctctctcaagagtttgggtgggacaaggatcttgccaagaagatttggtgcttcggacctgagaccaccggcccaaacatggttgttgatatgtgcaagggagtgcagtatctcaatgaaatcaaggattctgttg

SEQ ID NO: 29136 - DNA, 160 bp, Zea mays
gcggcaagatggcacatgggtgggctgccagggatgcctccggcctcctctccccttacagcttctcaagaagggttcagggggacgacgacgtgacgatcaaggtgctcttctgcggcatctgccacaccgacctccacatcatcaagaacgagtgggg

SEQ ID NO: 29137 - DNA, 151 bp, Zea mays
ctcgggtttgtcttcaagttcggtgtaaagggcatttggagtggcatgattggaggaactttcatgcagacggctatcttactgtgggccaccttgagaactgattggaacaaagaggtagaggaagcacagaaaaggctacacaaatggg

SEQ ID NO: 29138 - DNA, 160 bp, Zea mays
  unsure (1)..(160): unsure at all n locations
tgttaagatagagatagatgagaaggctactagcctatcctctgcatctgttgatgatgctgctgtcattgaagagcttattgcaaagctggaagcaatttctanaacattgccaccaggattccatatgaaccctatacagtttgagaacgatgatgat

SEQ ID NO: 29139 - DNA, 160 bp, Zea mays
agcgccgcctcaccgccgccggagaagatgggtcgcgtgatccgcgcgcacgtaagggtgcggggtccgtgttcaagtcccacacccaccaccgcaaagtccccgcccgcttccgctccctcgacttcggcgagcgcaacgggtacctcaagggcgtcgt

SEQ ID NO: 29140 - DNA, 159 bp, Zea mays
  unsure (1)..(159): unsure at all n locations
atcttcttccactaccgagtgatgcatccggtgcctgatgcatttgctttatggctcatatctgtgatctgtgaaatttggtttgccatgtcttggattcttgaccagtttccanagtggattcctatcgagagggaaacctatcttgaccggctgagt

SEQ ID NO: 29141 - DNA, 174 bp, Zea mays
acgctgtagctcggaatcggctcaagttgatcccgcgaggagctctagttccgccaagcgtgcgtaccggcgtccggatccgggaccgaagatgacggagtcactggtgcggaacaagccggggatggccagcatcaaggagatgccggtggtgcaggacgggccgccgccggg

SEQ ID NO: 29142 - DNA, 330 bp, Zea mays
  unsure (1)..(330): unsure at all n locations
cgaagatgcaggacaaggagggcatcnccccggaccagcagcgtctgatcttcgccggcaaacagctggaggatggccgcacgctagcagactacaacatccanaaggagagcaccctccaccttgtgctccgtctccgtggtggtcagtaagtcatgggtcgtttaagctgccgatgtgcctgcgtcgtctggtgccctctctccatatggaggttgtcaaagtatctgctgttcgtgtcatgagtcgtgtcagtgttggtttaataatggaccggttgtgttgtgtgtgcgtactaccgagaactatgacaaatcatgaataagtctg

SEQ ID NO: 29143 - DNA, 185 bp, Zea mays
  unsure (1)..(185): unsure at all n locations
tcgataccaacccatcaagtctggccaggtctctcgcatatcgggttctcccttcctcttcctgtttccgcgcgcgagatcgcagcaccgngtgggccctagatcccgatggcctcgcgccgccgcaccctgctcaaggtcatcatcctcggcgacacgagggttgggaagacgtctttgatgaa

SEQ ID NO: 29144 - DNA, 181 bp, Zea mays
  unsure (1)..(181): unsure at all n locations
agttcccgacgagaagttcgtgcgcaagacaccgcccccggtgtgctctccatggccaacgccgggcccaacaccaacggctcccagttcttcatctgcaacgtcgcgaccccttggctcgaaggtaagcacgtcgtcttcgtgcaggtcgtcganggcatggacgtcgtcaaggccatcg

SEQ ID NO: 29145 - DNA, 180 bp, Zea mays
tcctcatcggcgcactcgagctcgccctctccttcctcatcgaggcccgagtcctgctctgatggcgaccgacgtggctgagactcccgcgccgttggtggatgcggcccctgaagcgcccgcggacactccggcggcgcctgctgttgacgcgaaccggccaatggcaagaaggcacag

SEQ ID NO: 29146 - DNA, 176 bp, Zea mays
ccatcatcttcattcaccatgatcgcaacatctggggagaagacgcaagcgagttcaatccacagaggttcgaggatggcatgtccaatgctgacaagcatcaggccgccttctttccatttggatggggtcccagatctgcataggccagaacttcgcgttgctggaagcaaaga

SEQ ID NO: 29147 - DNA, 173 bp, Zea mays
ccaagtcctcctcgggttagggttccttagggtttgtggaggcgcgatggcggcggctgatgtggagtaccgttgcttcgtcggcgggcttgcctgggccaccagcaacgagtcgctggagaatgccttcgcctcctacggcgagatcctcgactccaaggtcatcaccgacc

SEQ ID NO: 29148 - DNA, 176 bp, Zea mays
tgaacattcttaccgactctatcatgagacaggtgctaaatgatttccaggagaacccaagggcggcccaggagcacctgaagaaccctggagttatgcaaaagattcagaagcttgtaagtgctgggatagtccaaatgagatgatcaggcacacgatgcgattgtacctgcttg

SEQ ID NO: 29149 - DNA, 341 bp, Zea mays
cacgcacacgatgggcctgattcagcaagatccagttattttctcaacgacaataagagagaacattatctatgcaaggcacaatgcaaccgaggctgagatgaaggaagctgcaacgatagcaaatgcgcatcatttcatcagcagcttgccacatggatacgacacccatgtgggaatgagaggggttgatctgacacctggacagaagcaacggattgccatcgctagggtggttttgaagaacgcacctatattgctgttggacgaggccagctctgcgatcgagtctgaatcgagtagagtggtgcaagaactctagacactctgtcatgggtaca

SEQ ID NO: 29150 - DNA, 177 bp, Zea mays
  unsure (1)..(177): unsure at all n locations
acagtgtggtataacatggtgaaacaaggtctcatcagcgaccctgttttctcgttctggtttaaccgacatgctgatgaaggagaaggtggtgaaattgtgtttggtggaatggattctagccactacaagggtgatcacacgtttgtcccagtcactcggaanggatactggcag

SEQ ID NO: 29151 - DNA, 165 bp, Zea mays
gtccggcagcagagagcgggggtgcagagagatcgagatccggatgccgcgagtgggagcgccaccaccagcgactgcggcaatggcgggcacggtgacggtcccggggtcgtcgaccccctccacgccgctgctcaaggacgagctcgacatcgtgatcccgac

SEQ ID NO: 29152 - DNA, 324 bp, Zea mays
  unsure (1)..(324): unsure at all n locations
cgcctccactcnccctcccaggtgctgcccaggtaagtcggcggcggcgatgacaacgcgcttcaagaagaaccgcaagaagcgcggccacgtgtccgccgggcacggccgcatcggcaagcacaggaagcacccgggaggtcgcggtaacgccggtggcatgcaccaccaccgtatcctcttcgacaagtaccatccgggctacttcggcaaggttggcatgcgttacttccataagctccgcaacaagttctactgccccgcggtcaacatcgagcgcctctggtcgatggtgccgccgacaatgcggcggagcggcggcga

SEQ ID NO: 29153 - DNA, 122 bp, Zea mays
  unsure (1)..(122): unsure at all n locations
cttgcttatagagttgtggtccagcttgcattggatttggccagatgattgagctatctgcactccagaaagattgtacatcgggatgtgaaaagcganaacatgctgcttactccacagag

SEQ ID NO: 29154 - DNA, 281 bp, Zea mays
cctacactcgcggcggcggcggcggcggcgcacagcggcagcagcatccgaagatggtgaagttcctcaagcccggcaaggccgttatcctcctccagggccgcttcgccggcaggaaggcagttatcgtgcgcgtgttcgaggagggcacccgcgaccgcccctatggcaactgcctcgtcgcaggcctcgccaagtagcgaaagaaggtgatccgcaaggactccgccaagaagactgcgaagaagtcgcgcgtcaagtgcttcatcgagctcgtcaac

SEQ ID NO: 29155 - DNA, 323 bp, Zea mays
  unsure (1)..(323): unsure at all n locations
aacgagggtggcgccatggttcgcatccgtgtgcacacagtcctcatctctacccagcacgacgagacagtcaccaacgacgagattgctgctgacctgaaggagcacgtcatcaagccagtcatccccgagcagtacctcgacgagaagacaatcttccacctcaacccgtctggccgcttcgtcatcggcggacctcacggcgacgccggcctcactggccggaagatcatcatcgacacctacggtggctggggagcgacggcgggggcgcttctccggcatagaccgaccaagtagacgcagcggngctacgtcgcgag

SEQ ID NO: 29156 - DNA, 176 bp, Zea mays
tgtgacagtggctgattttggcgtactcggttccaggatcaaggaggtatcatgacagctgaaactggaacatacagatggatggcgcctgaggttataaaccaccaaccctatgatagcaaagcagatgtgttcagctttgccattgttctctgggagctgataacgtccaagat

SEQ ID NO: 29157 - DNA, 176 bp, Zea mays
gcggcatcgcgttcaacaaggcgtacgggatgacggcgttcgagtaccacgggacggacccgcgcttcaaccgcgtgttcaacgagggcatgaagaaccactcggtgatcatcaccaagaagctgctggacttctacacgggcttcgagggcgtgtcgacgctggtagacgtgggc

SEQ ID NO: 29158 - DNA, 174 bp, Zea mays
tggggttccggtgccgctgcggcgacctgttctgctgcgcgcaccggtactcggaccgccacggctgccgctacgactacaggggcgccgctcgggacgccatcgcacgggagaacccggtggtgcgcgcggccaagatcgttaggttctgattcgaccggcgggcggaggaag

SEQ ID NO: 29159 - DNA, 355 bp, Zea mays
  unsure (1)..(355): unsure at all n locations
ctctcctccgctctgctcctttgctcnccacggcaaaccgtaaaccctagcctgaggggcaccctgtcgcagcatgggcgcaagcggaagctgcagggcgagatcgaccgcgtcctgaagaaggtccaggagggcgtcgatgtctttgacagcatctggaataaggtctacgacactgagaatgccaaccagaaggagaagttcgaggcggacctcaagaaggagatcaagaagctgcagcggtacagggaccagatcaagacgtggattcagtccagcgagatcaaggacaagatagctctgatggatgctcgaaagcagattgaacgagagatcgaacgatttaaagtatgtg

SEQ ID NO: 29160 - DNA, 310 bp, Zea mays
  unsure (1)..(310): unsure at all n locations
cagtgatggaaatcttgtggcatcgttgctatcttacaagatgggaattacccagtgcaacattgctcatgctctggaaaagactanatatccagattcagacatattttggaagaacttcgatgagaagtaccatttctcctgtcagttcactgctgatataattgctatgaacaatgctgattttatcatcaccagcacataccaagaaattgctggaagcaaaaatactgttggacagtatgagagtcatactgcttttactctgcctggtctgtaccgagttgtccatgggatcgatgtcttcgat

SEQ ID NO: 29161 - DNA, 322 bp, Zea mays
ccccaatagggagctagagctacgagacggggacctccgggacgggaataggcgtcgtcggccatgtcgtcgacgtggaactcggtgggtctggcgatcctgtaccaggtgctgggctgggtcgccttcgccgcgtggtccttcagcttctacccgcacgtcctcctcaactacaagcgcaagagtgttgtgggcctgaatttcgattttctggtgttgaacttgacaaagcactcgtcctacctcatatacaatgctgctctcttcttcagcccattcatccagcaacagtatcatgacaaatatgggtgataagagatga

SEQ ID NO: 29162 - DNA, 171 bp, Zea mays
  unsure (1)..(171): unsure at all n locations
tgaagaatanagatgactctgagtggtcgatgggtgaaatagcgcatactttgactaacaggagatatactgaaaaatgcatcgcatatgctgagagccatgatcagtctattgttggcgacaaaactattgcatttctcctgatggacaaggaaatgtacactggcatgt

SEQ ID NO: 29163 - DNA, 301 bp, Zea mays
  unsure (1)..(301): unsure at all n locations
cggctcgagatctgcttcagccttcagctagccccaagtttagtcggccgatcgatcactgaagtagtaatggcctccgccaacagctggaccctcgagatcgcgtcgccggtggccncgcagcgcctgttccgcgccgccgtgatggactggcacaccctggcgcccaaggtcgcctcccacgtcgtcgccagcgcgcacccgtggatggcgacggcggcgttggcagcgtcaggcagttcaacttcacctcagtcatgccgttcagcttcatgaangagcgtctcgagttcctcgacgc

SEQ ID NO: 29164 - DNA, 335 bp, Zea mays
  unsure (1)..(335): unsure at all n locations
cgcagaagcagcaagcactgcagaggaggactactaccaggttggtcggcaacaagccgaggacaggttcaatagatcagtggtacgtgtccaagctttgttccgttctcatcgggcgcacaggagtaccggaggatgaaggttgctcatgaggaggccaaggtggagttcggtcgaaagtagttaagacgggcatagattcaagatctgaagtgacttgttgttccttgtaggngggttgctagnntctctagttctttgtatatcccgaggaacagcgtacttgcggatgacgtacattctagacatctgacgtcgtatcatctgcaactgcg

SEQ ID NO: 29165 - DNA, 342 bp, Zea mays
  unsure (1)..(342): unsure at all n locations
tgcagcctctcaccctcgcgagtcccgacctcccgcagccgccgcacagatggcacccaaggcggagaagaagccggcggccaagaagcccgctgaggaggagcccgcgacagagaaggtggagaaggctccggcggggaagaagcccaaggccgagaagcgcctcccggcgggcaagtccaaggagggcggcganggcaagaaggggaaaaagaaggcgaagaagtccgtggagacctacaagatctacatcttcaaggctctaaaccaggcacacggcgattcggaatctcgtccaaagccatgtcgatcatgaactccttcatcaacgacatcttcgag

SEQ ID NO: 29166 - DNA, 242 bp, Zea mays
cgttcggcccgtctacaagggcttcgtggacggccgcctccgcccggggctccagccgcagcacgtcgccgtgaagtacctcgacagcgacggcgtagcagggcaccgcgagtgagctggcggagtggtgtagctcgggatgctgagccatccgcaactggtcaagctggtgggcttctgcaagcaggacgaccaaccgatgctcgtgtacgagtacatgcacgggcacagctcgagagcat

SEQ ID NO: 29167 - DNA, 170 bp, Zea mays
cggctcgaggcagcatggcattgaaatccggattgccaggattttcaacacctatgggactaggatgaacattgatgatggccgtgttgttagcaacttcactgctcaggctgtgcgcggtgagcccctgactgtccagaggccaggaacacagactaggagtttctgct

SEQ ID NO: 29168 - DNA, 342 bp, Zea mays
  unsure (1)..(342): unsure at all n locations
accgactctatctagctctcttcgcaagccagtaggtcaccactcaccactcaaaagcttgtgaagcaggtgagatgggcaaggaggtggatgtgtccactctagaggtcggcggcgtccgtgaccgtgactacgcggaccctccgccggcaccgctgatcgacatcgacgagctcggcaagtggtccctgtaccgcgccgtgatcgccgagttcgtgggcacgctgctgttcctgtacatcacggtggccacggtgatcgggtacaagcatcagacggacgcgtcggcgtcggggtccgacgcggcgtgcggcggcgtgggcatcctgngcatcgcgtggg

SEQ ID NO: 29169 - DNA, 338 bp, Zea mays
  unsure (1)..(338): unsure at all n locations
aggggaagctctacattcatttcacggtggagttcnccgactcgctggcaccagagcagtgcaaggctctcgagtcggtacttccgccaaagccttcgtccaagctgacagacatggagatagatgaatgcgaggagacaaccatgcatgatgtgaacaacatcgaggaagagatgcgcaggaagcaggctcatgctgctcaggaggcgtacgaggaggacgacgagatgcctggcggagccaaagagtgcagtgcgctcaacagtaagcagactaccaatgggattcaaggcactttggttgctcttcaattatgcgagtgcgctgtggactgtatg

SEQ ID NO: 29170 - DNA, 339 bp, Zea mays
tgcgcctctacatttcttctctctctggtcctccgcctccgcctgatccatccaagacagggatcgccatgtcggactcggaggagcaccacttcgaatcgaaggccgacgctggggcgtccaagacctacccgcagcaggctggcaccgtccgtaagaacggcttcatcgtcatcaagaaccgtccctgcacagttgtggaggtttctacctccaagactggtaagcatggccacgccaaatgccactttgtcgccatagacatattcaatgggaaaacacttgaagatattgttccttcatcacacaactgtgacattccgcatgtgaaccgtactg

SEQ ID NO: 29171 - DNA, 331 bp, Zea mays
  unsure (1)..(331): unsure at all n locations
catccagccgccaccaggtgcagagtctttcgtcatctcttctccggcgaagaacccccagtcgcccaccagatcacttgttaaactttgttgaggggtgatggcggtttctttcgcaaacctcaactccgaggcagggcttaaaaagcttgatgagtaccttctcactcgcagctacatcactggctaccaagcttccaaggatgacttggctgtctacacttcgttttcggctgctccctcgtccaagtatatcaacgtagcaaggtggtttaaccacattgatgcgctcgtgangctgagcggaattactgcagacggcccaagtgtg

SEQ ID NO: 29172 - DNA, 332 bp, Zea mays
gaagatcctcattgttaccaggctgttgcctgatgctgctgggactacgtgcggtcagcggctggagaaggtcattggtactgagcacacagacatcattcgcgttcccttcagaaatgagaatggcatcctccgcaagtggatctctcgttttgatgtctggccatacctggagacatacactgaggatgtttccagtgaaataatgaaagaaatgcaggccaagcctgaccttatcattggcaactacagcgatggcaacctagtcgccactctgctcgcgcacaagttgggagtcactcagtgtaccatcgctcatgccttggagaaaa

SEQ ID NO: 29173 - DNA, 167 bp, Zea mays
tgacggcagatgtcctacaaggccattatcctgaaaggttgggtgtggcaattctttttaacgctccaaagttttttgagcctttctggaagatggcaagcccccttcttgagaagaagaccagaaacaaggtcaaatttgtatactcagatagacctgacaccatg

SEQ ID NO: 29174 - DNA, 219 bp, Zea mays
cggcaatgttgcaagtacatctgggaaatccattgcaagcttacaggtggaagcatctgatttggcaaacttccttaccatggatcggaatggggggtaccgaggttcacaaactctcctaagatctgtattatcagagaaacaagagctgtgcttctctgttgtctcattgctctggcagaagctcatagcttctcccgagatgcagatgtctgcaga

SEQ ID NO: 29175 - DNA, 314 bp, Zea mays
  unsure (1)..(314): unsure at all n locations
canaagcagatggganagtgccgtcagctctgactcttggtcttgggcgcttggctgacccgttctctctctgcaactgcaacgcaccaagaaactgccggcgatcgatcggagaaggagataaacatggtgcacgggaagctggaggtcctcctcgtctctgccaagggactcgaggacaccgatttcctcaataacatggaccccttcgtgatccttacctgccgcacccaagagcagaaaagcagcgtcgcaaatggagcaggaagcgagcccgagtggaacgagaccttcgtcttcgacgtctccgacga

SEQ ID NO: 29176 - DNA, 334 bp, Zea mays
  unsure (1)..(334): unsure at all n locations
caagatttgagctcatccgccatgatgtcaccgagccacttcttgtggaggctgaccagatctatcaccttgcttgccctgcttcaccaatcttctacaagcacaatcctgttaagaccatcaagacaaatgttattggtaccctgaacatgctgggccttgcaaagagagttggagctaggattttgttgacatcaacatccgaagtttatggtgatccgcttgagcatcctcaaaccgaggcctactggggcaatgttaacccaattggagtcaggagctgttatgatganggtaagcgtgtagcagagacgctgatgttcgactatcacag

SEQ ID NO: 29177 - DNA, 155 bp, Zea mays
tctgggatgataaaggactttgatgaacctggaactcttgcaacaactggtctttttgttggaggtacgaagtacatggtgatccaaggtgaacctggagttgtcatccgaggaaagaagggcactggaggcattactatcaagaaaactggcat

SEQ ID NO: 29178 - DNA, 293 bp, Zea mays
attcgaaatgcaaagattaccctaagtttcaagcagtagctattgccatccaaagatctggcttcaagatcgtgttgctactaaggcttgtacctttacttccgttcaacatgttgaactacctgttatctgtcactcctgttggtgttggagaatacatgctggcttcttggtttggaatgatgccaatcactcttgctttggtgtacgttggaacaacactgaaagatctatcagatgtgacacatgggtggagtgagatctcgactactcgatggattctgataatatct

SEQ ID NO: 29179 - DNA, 329 bp, Zea mays
tgtgaggactgaggccggtatttctttcagcagttgatctgtggagtgagctattgccattacatgcaaatatgccatagagatctgaagctggagaatgttctcttggatggcagcccagctccacggcttaagatctgcgattttggctattccaagtcatcagtgttgcattcaagacccaaatcagcagtaggaacgccagcatatattgcacctgaggtgctatcccgtcgcgagtatgatggaaagcttgcagacgtatggtcctgtggggtgactctttacgtcatgcttgtgggagcataccgatttgaagacccagatga

SEQ ID NO: 29180 - DNA, 301 bp, Zea mays
agccgagcgcatcgtctactacacctacaagctcatgggcatcaggctcgtcgtcaagggcaccccgccgccgccgcccaagaagggccacccgggcgtcctcttcgtctgcaaccaccgcaccgtgctcgaccccgtcgaggtggccgtggcgctgcgccgcaatgtcagctgcgtcacctacagcatctccaagttctccgagctcatctcgcccatcaaggccgtagcagtgtagcagcgtcgcaaatggagcaggaagcgagatcgactggatagagaacttcggcgacctggtcat

SEQ ID NO: 29181 - DNA, 310 bp, Zea mays
  unsure (1)..(310): unsure at all n locations
aaaggagaaaatttcgtagcaataaataaataaataaataaaattaataaaagaaaggtggcgtagaggataggaggagaaccaaggttgcgtctcgaaggttcttgcctcgttgggaagggatggcgtcggaggtggaggacgaggcggcgacgcgntgctcgccaacggtgcagccgacgtccgccggatgagggaccaggcgaaggcaattctgtccacgcaggccgtcnagatcgccaccaaggccgagcagcatgagcgcttcatctttaaggtcacacacttgctgggtgttcttggatttggg

SEQ ID NO: 29182 - DNA, 298 bp, Zea mays
cagctcgaggagcagcccgccggcgagtacgggtactccgagaccgaggtggtcaccgccaacggcgagggcgagtacgagaggtacaagaaggaggagaaggagcacaagcacaagcagcacctcggcgaggccggcgccatcggcgccggcgccttcgcactctacgagaagcacgaggcgaagaaggaccccgagcacgcgcacaggcacaagatcacggaggaggtcgctgccgcagcggccgtcggcgccggcggctacgtattccacgagcatcacgagaagaagaaggacc

SEQ ID NO: 29183 - DNA, 119 bp, Zea mays
  unsure (1)..(119): unsure at all n locations
tgcgcgtcaggctctacgtccgggtgcacatccttggatacaagaggtccaagtcgaaccagtacgagaccacgtctctcgtgcagatcgagggggtgaacaccaaggangatgtcgcg

SEQ ID NO: 29184 - DNA, 276 bp, Zea mays
tgacggatcctgattttgacttggatattagagatgatgtccaagatgaatgttccaagtttggtgcagtgaagcatatttttgttgacaaaaatactgcaggcttcgtgtatctgcagttcgatagtgtaactgcagcagggaaggcccaacaagcacttcatggaagatggttcgccggaaagatgattacagcgacatttatgtccgatcaggaatacagtactaagttcccaaacttgtgagcatatgcggggcagagttgtcagaccgcat

SEQ ID NO: 29185 - DNA, 368 bp, Zea mays
  unsure (1)..(368): unsure at all n locations
ctccgtcgcatgcaggccctagccggaatcggctcgacgagtaccgacgcgctactagttctattgccgcgcaccccagatctccaggagggactcgttcgttcagctaactacactgcacgcaatggccaccacggcgaccgaggcggcgccggcgcaggagcagcaggccaacggcaacggcgagcagaagacgcggcactccgaggtcggccacaagagcctgctcaagagcgacgacctctaccagtacatcctggacacgagcgtgtacccgctggagccggagagcatgaaggagctccgcgagatcaccgccaagcacccatggagactgatgacgactccgccgacgnagggcagttctg

SEQ ID NO: 29186 - DNA, 332 bp, Zea mays
tggaacgtttacaaggcaacactgaggtcaggggatgtttatgctataaagaaacttgtgatttctgcacacaaaggttcatacaaaagcatggttggagaactgaagacactaggtaaaatcaagcacaggaacttgattaagctgaaagaatcttggttgagaaatgacaatggattcatactgtatgattttatggaaaaaggtagccttcatgatgttctacatgtagttcagccagcaccagccttggactggtgtgtgcggtatgacatagccctcggcactgcccatgggttagcatatctacatgatgactgcagcctgcgatc

SEQ ID NO: 29187 - DNA, 318 bp, Zea mays
  unsure (1)..(318): unsure at all n locations
ctcncgagtccaaaccctaaacctaaacctctcacccggcgcagccgccgccaccgccgccgccccgaggccccatcccagcgcaaccgacttccgcctcggattgaagcaatgtcgtcggacgacgaggtcatggaggagaaggagctcgacctctcctccaacgatgtcgtcaccaagtacaagactgccgccgaaatcctgaacaacgctctgaagctggttgtgtctgagtgcaagccanaagcaaagattgttgacctttgtgagaagggtgactctttcataagagagcaactgggaatgtctacaagaatg

SEQ ID NO: 29188 - DNA, 137 bp, Zea mays
cacagatcttgatagggccactaatgagcttgtgatacgtgtgcaaccggatgaagcaatttacctaaagattaacaacaagattcctggtctcggtatgcgactagataggagtaacttgaatctccattatgccg

SEQ ID NO: 29189 - DNA, 328 bp, Zea mays
aacaaaggttatgacggctcgatatctgacgtatggtcctgtggtgttattctatatgtaatgcttacagggaatcttccattcgacgaccaaaatgtggttgtcctttaccagaagattctcaaggggaatgctcacattccaaagtggctctcccaaggtgcccaagatatactgagaaaaatcctggatcctaacccggttacacgcatagatgtggatggaataagggcacatgattggttcaagcaaggctatgctccagctatgccatttagcgatgatgaagaagatatcagcatggatgaagacagctaaacatcacgag

SEQ ID NO: 29190 - DNA, 149 bp, Zea mays
ctcctcgcatttcttcgcatcgcccttcgcaacccaaaccccaactcgccccgcatcgatggcgcccaaggccgagaagaagcccgcggcgaagaagccggctgaggaggagcccgctgccgagaaggcgcccgccgggataaagccga

SEQ ID NO: 29191 - DNA, 328 bp, Zea mays
attgagatctataagcataataaggaagaaagggtagcacggacatgggggacaactgcacctggattaccttatgtcgaggaggcaattaccaatgctggtgactggttggttggtggggacttggaggttatagaaccaatcaagtacaacgatggtctagatcagtatcgcctgtctccagcacagctgcgtgaagagtttgccaggcgcaatgctgatgcagtatttgcctttcagcttcgcaatcctgtacacaatgggcatgctcttcttatgaccgacacacgcaaacgtctccttgagatgggggtataaaaccctgttc

SEQ ID NO: 29192 - DNA, 315 bp, Zea mays
  unsure (1)..(315): unsure at all n locations
gttgggcgcagagaatcnccaagcaaacaaacagggtagatggagaggagatgacaggagaggagaggttgggtctgggacaccatggctccgatgaagctgtacggggcggtgatgtcgtggaacgtgacgaggtgcgcaacggcgctggaggaggctggctccgactacgagatcgtgcccatcaacttcgccaccgccgagcacaagagccccgagcacctcgtccgcaacccgtttggtcangttccagctctgcaggatggtgacttgtacctcttcgaatcacgagcaatctgcaagtacgctgctcgc

SEQ ID NO: 29193 - DNA, 328 bp, Zea mays
cgtccgcgcctggaacgccgagagcctgccggcggcggcctccgccgggttcattgcctggacgctcaccctgctcgccatggggttggcggtgaaggagattgcactgcacggcaggaatgccaggctgatatgcatggagtccttcaccatcatcctgtcagcgacgcagctcttctacctgctcgccatatacggaggcttgagatgacatcatcatactggatgaaggaagagactgcattggagtgaagatttgtcgtttccgtacgtatcgaattgagctggtgtgcatcggtttcacgggacagagtgtggctttcctcgt

SEQ ID NO: 29194 - DNA, 309 bp, Zea mays
ctcaagccctacctggccgaccgagagaagaaggtgcttatggcggtcatccccctgcaggtcgtagccaacatcgcgcaggttgtgattgacgaatctggaccctatgctcgggactgggtcacctggaagcagattttcttgctggttgatgtgatctgctgctgtgctgtgctcttcccgattgtgtggtccatcaagaactcccggaggctgctcgctcggatggggaaagcgctgtgaacctcatgaagctcaccctcttccggcagtactatgtggtcgtcatctgctacatgtacttcacgc

SEQ ID NO: 29195 - DNA, 320 bp, Zea mays
agtttggttccattgcctggatccaacaatgaatcatggtgccaaggtcttgatggtttggcttcaaggtgtgctgagtactataagcagggggcgcgcttcgcaaagtggaggactgttgttagcatcccttgtggtccatctgcattagcagtcaaggaagcagcatggggacttgctcgatatgctgctattgctcaggataatagtttagtgccaattgtggagccagagattcttcttgatggagaccatgggatcgacggagctcttgaggtggcagagaaagtgtggtctgaggtgtttttctacttagccga

SEQ ID NO: 29196 - DNA, 309 bp, Zea mays
cgcttccagccgccgccgcgtccgcctcgccaagcgcacacgccgccgcagcacatctctctctcgatctcagccatggcggaggtggagcagcaacaggacacgccgaagctgttcaaccgctggaccttcgatgatgtccaggtgaacgacatctcgctgaacgactacctcgctgtgaacgcgacgaagcacgcgatgtacctgccgcacaccgcggggcgttactccaagaagcggttccgcacagctgcagtgccgatcgtcgagctgctcacaaactccgtcatgatgcacgggcgcaacaac

SEQ ID NO: 29197 - DNA, 323 bp, Zea mays
gaacgaagagagatcagcgacttaacaacaataatggccaccgccatagttcccacggacgccgagctgctgcaggcgcaggccgacctgtggcgccacagcctctactacctgacatccatggcgctcaagtgcgcggtggagctccacatcccgaccgccatccacaacctaggcgggtctgccacgctgccggacctcgtggccgcgctgtccctgccagcgtgcaagctcccgttcctcgggcgcgtgatgcggctgctggtcacgtcgggcgtcttcgcgtcgtccgacgacgtgcagtactggctgaatccgctgtc

SEQ ID NO: 29198 - DNA, 326 bp, Zea mays
gtaaagcagttcttcagctaggcaggagggcacaggaaggaggagatggcgtcaaagaggattcagaaggagctcaaggatctgcagaaggaccctcccacctcgtgcagtgcaggtcctgttggtgaagacatgttccactggcaggcaacaataatgggtccatctgatagcccatattctggtggagttttcctagttacaatccattttcctcctgattatcctttcaaaccaccaaaggtggcatttcgcactaaggtgttccatccaaacatcaacagcaacgggagcatttgcctcgacatcttgaaggaccagtggag

SEQ ID NO: 29199 - DNA, 323 bp, Zea mays
gaccagtacggcaacccagtcggcggcgtcgagcacggcaccggcggcatgaggcacggcacgggaaccaccggcggcatgggccagctgggtgagcacggcggcgctggcatgggtggcgggcagttccagcctgcgagggaggagcacaagaccggcggcatcctgcatcgctccggcagctccagctccagctcgtcggaggacgacggcatgggcggaaggaggaagaagggaatcaaggagaagatccaagagaagctgcccggtagccacaaggacgaccagcacgccacggcgacgaccggcggcgcctatgggca

SEQ ID NO: 29200 - DNA, 313 bp, Zea mays
  unsure (1)..(313): unsure at all n locations
cgcctcgctgagggattggctaaagaccaatgccagccctgaggttgctgaatctactaggatcatctacggaggctctgtaactgctgcgaactgcaaagagctagcagcacagcctgatgtcgatggttttcttgtcggtggagcttctttgaagcctgagttcatcgacatcatcaacgcggccaccgtgaagtccgcttaagatgctacgctgaagacgaacatactttttttttgctcaactgtgctatgtaagctagtagcttttgcgcaggagcagagactgttttgcctgcccnaacttctagct

SEQ ID NO: 29201 - DNA, 143 bp, Zea mays
tgtaattatgctggaatgttcttcattcttctttttgcctccattttcgcaactggtatattggagctcagatggagtggtgttggcattgaagattggtggagaaatgagcagttttgggttattggtggcacctctgccca

SEQ ID NO: 29202 - DNA, 81 bp, Zea mays
attcggctcgagctcgtctctggtccattcaagatcaatggagtaccgatccgtcgtgtcaaccagacctatgtcattgct

SEQ ID NO: 29203 - DNA, 202 bp, Zea mays
cggtgcttgtatcagatatcaatatacgttatgaagaaatagttaatactcaggttcttgctttcaatggccagcctgtacaacatttaaagaacttagcgaccatggtggaaaattgcaaggatgaatttttgaagtttgatctggagtatgaccagattgttgtcctcgagacgagaactgcaaagtctgctacccagga

SEQ ID NO: 29204 - DNA, 328 bp, Zea mays
ctggaccgagagctcgaatcggctcgagcatgcgcctgtccgctagattcccccaaaccctcccccaaaaccccagagcggagaagagcgcaagatgttcggcttcgggcaccacggccaccacggccagaacccgccggcgcacggcggcgtgcaccagcccaccttcaagatcttctgcaaggccgacgaggggtactgcctcaccgtccgcgacggcaacgtggtgctggcccccgccaacccgcgcgacgagcaccagcactggtacaaggacatgcgcttcagcacccaggtcaaggacgaggagggcaaccctgcgttcgcc

SEQ ID NO: 29205 - DNA, 288 bp, Zea mays
cgcagaacgagtggtacttcttcagccacaaggacaagaagtacccgacgggcacccgcacaaaccgggcgaccaccgccggattctggaaggcgacgggtcgcgacaagcccatctacaccaagagctgcctcgtcggcatgaggaagacgctcgtcttctacaggggccgcgcgcccaacggccacaagtccgactggatcatgcacgagtaccgcctagagaccaccgagaacgtgaccgccgcccctgaggaaggatgggtggtctgcagggtgttcatcaaga

SEQ ID NO: 29206 - DNA, 287 bp, Zea mays
  unsure (1)..(287): unsure at all n locations
caaggaagcctgagaagaatagattcaaatgccgatgaatctgatgggaaggatgaactggatgagcaagacgaggaagactccgacgaggacgatcccaaatttcagcaggatacagcctgtgagtataggaaactcatcaccatccaagctggcaaaccaaaaggccatttgcgggatgcgctaaaagtggatccagacaaagtcaggcggctttctttgagcgagacacagttagctanagcgacaatctctcatggtgctgaagtcataaggttcacacagaa

SEQ ID NO: 29207 - DNA, 254 bp, Zea mays
cacgccggtggccgtgttgcttgtgggatcattggactccagggctgaaaacgatcgccggacttgggggtgcctgagaggtccgtctcctgccgtccccagcagacgagcctgaacattcggagacatcgtgaaataagagcgtcgctgatctgtgatcatcgtatttgtcattatgcacctgtagccaccgatggactaaactgtgctggattatgctgttggatcacctgagtatgtgttacatgtcggtt

SEQ ID NO: 29208 - DNA, 137 bp, Zea mays
cgcggcggcgacaagacacaatggggtgccggtcctgtgacaagcccaagatgaactaccgcaacgggctgtggtctcctgaggaggaccagcggctcagggactacatcctcaagcatggcctcggctgctggagt

SEQ ID NO: 29209 - DNA, 231 bp, Zea mays
cggctcgaggggagaatgatgagaacctcaagaaaattcgtgaagccaggggttactcttacatggacatttgtgatgtgtgcccagagaagttgccaaattacgaggctaagataaagaatttctttgaagaacacttgcatactgatgaagagatacgatattgccttgagggtagcggctactttgatgtgagggaccaagatgatcagtggatccgtgtagcggtaa

SEQ ID NO: 29210 - DNA, 265 bp, Zea mays
tgctaagagagctcaagaaagaagaattcatcgagtacttcaaccagtatataaaagtggacgcgcctcaaaggaggacactaagcgtgcaagtcttcggcggcaaccatttggtagagttcaagaaggcaatcaacgaagccgacccgcccaaaatgtacagaattacagacatattcggcttcaaacgatcgaggccgctgtacagctcactcaagggaggtccgggcaggatcaccatggactgacagccggcaatagcatg

SEQ ID NO: 29211 - DNA, 254 bp, Zea mays
gcagggcatcgcctggtccttcggagggatgatcttcgcgctcgtctactgcaccgccggcatctccggaggacacatcaacccagctgtgaccttcgggctgttcttggccaggaagctgtccctgactagggccatcttctacattatcatgcaatgcctgggtgccatctgtggagctggagtggtgaagggcttccagcaggggctttacatgggcaacggcggtggcgccaatgttgtcgcccctggat

SEQ ID NO: 29212 - DNA, 260 bp, Zea mays
cgtcttgtggacctcatgggcgtggtttgcgtgccctctccagggcccagattgactctgttctggatcttgcacggtgcacaattgtgtctgagctctccaacaaggatttcgactcatatgtcctttctgagtcaagcttgtttatctatcctctgaagattgtcatcaagacctgtggcactaccaagctcctgctcaccattccaagaatccttgagcttgctgaagagctgtctatgccacttgctgctgtgaag

SEQ ID NO: 29213 - DNA, 265 bp, Zea mays
  unsure (1)..(265): unsure at all n locations
agaanacactagcgtttcctcaccagggcgtccatcccagcagccatggcgatggcgtacaagatggcgacggaggggatgaacgtgaaggaggagtgccagcgctggttcatggagatgaagtggaagaaggtgcaccgcttcgtggtgtacaagatcgacgagcggtcgcgcgccgtgctggtggacaaggtgggcggccccggggaagggtacgaggagctcgtggccgcgctgcccggcgacgactgccgctacgccgtct

SEQ ID NO: 29214 - DNA, 98 bp, Zea mays
catggaggttcatggcgactacaaagaggatgttggtgtgaagcttgagaggcctgtcgagggagatgaggctgtgcaggaggttgctgctgccgagt

SEQ ID NO: 29215 - DNA, 282 bp, Zea mays
cgcggatcggcgagcatgaggggcggcggcggcggcgggatgatggacgatgaagagagggtgggccatgcggagatcccgaccagtttcggtcccgagctgcgcgcctgcctccgatgccgcctcgtcaagacctacgaccagttcagggagaacggctgcgaaaactgcccgtttctagagatggacagagagcacgacaacgtcgtcaactgcaccacccccaacttcactggaattatctctctgatggaccccagtaggagctgggcagcccgttgg

SEQ ID NO: 29216 - DNA, 282 bp, Zea mays
cgacgatattcatgtcggctttgatgatattggcggtctggatatgatcattgaggaactgaaagaatccgtcatctatccattgacaatgccccatctctaccagcatgccgcttcattgctgtctgcaccgtctggcgttttgctatatggaccgcctggttgcggcaagacgatgctggccaaagcccttgctaaggagagcggcgcatcatttatcaacctgcatatatcaacgctcacggagaagtggtacggcgattccaacaagatagtcagagc

SEQ ID NO: 29217 - DNA, 277 bp, Zea mays
caggaagtcgggaacgtcccatatgtcgtggacaacggtgccggcgtgttctccaaggacccaggggaggccgcgagacaggtcgcccgctggttcagcagcagcagcacagacggggacgagctcaggagatactcgcgtaacgcgctgaggctagcgcacccgaggcggtgttccacatcgtcagggacatccacaagcagctccagcgacagcctgccgcggtcacccggatcacctcccgctcgctgacctcgtccttcccgtaccatatgtg

SEQ ID NO: 29218 - DNA, 283 bp, Zea mays
gctggccctaagggttcaaagaaggttgcacaacagtctccaagggcccaggttgcaatctttgttgttcttgccatgactttaagaagaaagcctgatgtactggtaaatgttatgccaaagataatgggaaacaataaatatctgggacaggaaaagcttcccatcattgtctgggttattgctcaggcctctcaaggtgacctagtgtctggcatgttttgctgggctcattctctatttcccacattatgtgcgaagtcaagtgggaatccccttgcaa

SEQ ID NO: 29219 - DNA, 283 bp, Zea mays
cctactgtggtggcttcgtgttgaagcacgggcggatagcaagtttcctcaagggtgggtaattgagccacctttggaagtcgtcgtccccgcaaagcgcactccatggcctgaaaccaccaccgagcttccatccgagttgttggatgacaagcaaaagctggaggataggcacttgtcaagaggcaacaaatcgtctcagccccgaggcaccacgaaacggaagggcgaccctcaagggcaagataactgatggagaacgcactggcattgtaatgtatat

SEQ ID NO: 29220 - DNA, 282 bp, Zea mays
cgaggcacgcctgaccaagtgcaagtaccttgctggagacttcctcagcctcgccgacctgaaccatgtgtctgtcactctctgcctgttcgctacgccctacgcatctgtgctcgacgcctacccgcatgtgaaggcctggtggtctggtctgatggagaggccgtctgtccagaaggtcgctgccctgatgaagccatctgcttgaaacggttgccctgtcaatcggtgaatggaataagccaagtctgttctgggttgtttgcttgttcagtgatgtgt

SEQ ID NO: 29221 - DNA, 285 bp, Zea mays
cccgactctctcctcgccggcgacgccgcggagtaggtgcaacagaaactgctcgaggcggaggcggagctgcggctgcacagacatgggtgatcacgaggcgcgcggtgatgacttcgagaagaaggcggagaagaagctctcgggctggggcctcttcggctccaagtacgaggacgccgccgacctcttcgacaaggctgcgaactccttcaagctcgccaagaactggagcagagctgcatcagtttacatcaagattgctaactgtcatttgaagggaga

SEQ ID NO: 29222 - DNA, 285 bp, Zea mays
ggatcaacgactaccagaagagccggttcgtgaaccgcgtcgtggcctccatgttcaacaccgtcgccggcaagaagatcgccgtcctcggcttcgccttcaagaaagacaccggtgacaccatgtagatcccggccattgacgtctgcacaggcctgctgggcgacaaggcccagatcagcatctacgacccccaggtgacggaggaccagatccagcgggacctggccatgaacaagttcgactgggaccacccgatgcacctgcaaccgacgagccccacgg

SEQ ID NO: 29223 - DNA, 277 bp, Zea mays
cgcgccgaccacctatttccttccctgcgtcatgtggctcgcaatctacaagcccaagaggttcagcctctcctggttgaccaactggatgtgcatcattcttggggtgctcctgatgattctgtcgcccatcggagggctccggcaaataataatggacgcgaaaacctaccagttctactcgtgagctaccaccagccatgacttgtaagcacgattggagaaatctgtcaaagccttcaccacgagtttttgcttttggtttttgtcatgccaa

SEQ ID NO: 29224 - DNA, 275 bp, Zea mays
gctaactggagataggtttcctaatgttcttaatctgatgccaggtatgtagcacctgagtacgcaaatagtgggatgctaaatgaaaaaagtgacatatacagttttggagtggtgttgttagaatgtgtgacagctagggatccagttgattacagtaagcctgcagatgaggtgcgagttttccccgtttcagagaattggtgcgattgcatttttcatttacttcttaaacctcttctattgtttgtttcaggtgaatctcatagagtggc

SEQ ID NO: 29225 - DNA, 277 bp, Zea mays
ctcaaatcagcgggagggaactcgcacgcgaaggctgaactcatggctcgcgtctacgttgggaacctggatccgcgtgtcacggcgcgggagatcgaggacgagttccggatgtttggggttctgaggagtgtatgggttgctaggaaaccaccagggtttgccttcattgactttgatgaccgcaggatgcacaagatgccattcgtgaattggatggtaagaatggttggagggttgagctgtcaactaaagttggtggtggccgtggccgaga

SEQ ID NO: 29226 - DNA, 281 bp, Zea mays
  unsure (1)..(281): unsure at all n locations
cccatatccgctcncctacctctccagcatctcccgtctccgtcgtctcgtctctgctcctcacctcgccgccagccatgggcaagatcaagatcggaatcaacggtttcggaaggatcggcaggctcgtggccagggtcgccctgcagagcgaggatgtcgagctcgtcgccgtcaacgaccccttcatcaccacggattacatgacctacatgttcaagtacgacaccgtgcacggccaatggaagcacagcgacatcaccctcaaggactccaagacg

SEQ ID NO: 29227 - DNA, 281 bp, Zea mays
gtttttcatgtggttggtcgctcacaagaaggtgtggacagctgataggttgcaaagaagaggtatggatcatccggagaggtgtccattatgtgatcaggatcaggaaaccttaaatgatatgctgctgggctgcgtttttgctagagaattttggttcaagctgcttcttcttgtaaatctacaacacttggcccatcagtcctataaaagggtttttatggattggtggcaagacttgagcaccaagattcctgggattgcaagaaatggtcttaact

SEQ ID NO: 29228 - DNA, 183 bp, Zea mays
gtccttcttttcgatgacgatgtagctaagatcgctgactttgatctgtcgaaccaagctcctgacatggcagctcggcttcactcaactagggttctcggaacattcggataccatgcgcctgagtatgcgatgacggggcaactcagctctaagagtgatgtatatagttttggggttgtt

SEQ ID NO: 29229 - DNA, 278 bp, Zea mays
cacagaaggtgggggcggacaaacgcaggcgaaggcgagggtgtgagggaaggagcaccagccatggtgcacgtcaacttctaccgcaactatggtaagacgttcaagaaaccaaggcgtccttatgagaaggagcgtcttgatgctgaactgaagctggttggtgagtatgggctgaggtgcaagcgtgagctttggagggtccagtatgcactgagcaggatccgtaatgctgcaaggcacttgctcacccttgacgagaagaacccccgtcgtat

SEQ ID NO: 29230 - DNA, 216 bp, Zea mays
aaatacccacagtccacagcaagaaccgaagatgttcggaaacatcggaaagatcccgatcatcggcgacctgacgggcagcaacaagaatgcgcacctcaagggcaacctggtgctcatgcgcaagaccgtgctcggcttcgacgtcaccagcatcgccggctccctcatggacggcctcggcgagttcctcggccgcggcgtcacctgccaact

SEQ ID NO: 29231 - DNA, 269 bp, Zea mays
cccagcgcgagcaggacatccagatgatgctcgccgccgatgtccacctcggcaccaagaactgcgacttccaggtggagcgctacgtgtacaagcgccgcactgatggtatctacattattaaccttggaaagacctgggacaagcttcagttggccgccagggtcatcgttgccattgagcatccgcagacattatcgtgcagtctgctaggccctatggccagagggctgtcctcaagtttgcgcagtacactggtgcccatgcca

SEQ ID NO: 29232 - DNA, 271 bp, Zea mays
ctgaccgctatcttttaatttttggcggggggtctcatgcaacatgtttcaatgacctacatgtccttgatttgcagacgatggaatggtcaagacccaaacaacaaggcctgactccaagcccaagagctggacatgcaggtgcaactgtcggtgagaactggtacatagttgggggtggcaataataaaagtggtgtttctgaaacactagtgctcaatatgtcaactctgacatggtcagttgttagcactgtggaaggacgtgttcc

SEQ ID NO: 29233 - DNA, 275 bp, Zea mays
ccttcgcgccgctccgccccgtcctcgccaacctgcaggaggtgttcctcggcaccaagctcgccgtgctattccccgccgtgccgctcgccatcgccgcccagtgcgcgcacttcggccaggtgtgggtgtttacgctcagcctactcggcctcatccccctcgccgagcgtgtcagcttcctcaccgagcagatcgcgatatacaccggccccaccgtgggcggcctcctcaacgcgacgtgcggcaacccacggagctcatcatcgcgctct

SEQ ID NO: 29234 - DNA, 198 bp, Zea mays
agcgctgcgctcgcgtctctcgtccccctcagatccaccgactcgctctgagtctctgaccgcaccttccgtcgtccccgttcgaaggcgcggcaagcgagcgattcagccagattcgattcgacatgaatcccgagtacgactaccttttcaaacttctgcttattggtgattctggtgttgggaaatcatgcttgc

SEQ ID NO: 29235 - DNA, 235 bp, Zea mays
cggatatggagcatggctccatggggaggctgtcgcagctggaacagttatggcaactgacatgtctcaccgcctggggtggatagatgactccatcagaaaacgtgtggttgacatactaaagcaagccaaacttcccattgcacctcctgagaccatgaccgtagagaagtttaaaaacatcatggctgttgacaagaaggttgctgatggtctgttgagactcatccttctg

SEQ ID NO: 29236 - DNA, 257 bp, Zea mays
agcgccgccatgtcgaagcgaggcaggggaggttcggcggggaacaagttccgcatgtcgctgggtctgccagtggccgcgacggtgaactgcgcggacaacaccggcgccaagaacctctacatcatctccgtcaagggcatcaagggccgcctcaatcgcctcccgtccgcctgcgttggcgacatggtcatggccaccgtcaagaaggggaagcccgacctcaggaagaaggtgatgcccgccgtcatcgtccg

SEQ ID NO: 29237 - DNA, 227 bp, Zea mays
gtcggcgctccacgcagccgtcaacttcgggcagtacccgtacgccgggtacctcccgaaccgcccgtccgtcagccggaagccgatgccggcgccgggcagcgacgagtacgcggactggagcgcaaccggagaaggtgttcgtgcgcaccatcaccagccagttccaggccctcgtcggcatctcgctgctggagatcctgtccagccactcctccgacgaggtg

SEQ ID NO: 29238 - DNA, 279 bp, Zea mays
cattaacagagacaagtctaacatccatgtccaaaggttccaacgcttacgactttttggctaaagtcctcatcattggtgattcacgtgtcggtaaaacttgtctcctccttcgtttctgtgagaataactttactacctcccacttagccactattggtattgatttcaaaatgaagacaatcgaagttgatggaaagaaggtcaaggttcaaatctgggatactgctggccaagagagattcaagaccattactcagacttactataaaggcgcta

SEQ ID NO: 29239 - DNA, 122 bp, Zea mays
  unsure (1)..(122): unsure at all n locations
caagagcgagctgctcctccgcgccaacccggtgcacaagaagatccccgtgctgctgcacgacggccgccccgtctgcgagtcnctcgtcatcgtgcagtacctcgacgaggcgttcccgg

SEQ ID NO: 29240 - DNA, 362 bp, Zea mays
cactgggcccccccaattgcagcctttgtttcctggtgaaagtggtgttgatcaactggtggaaatcataaagattttgggtactccaacaagagaggaaatcaggtgcatgaatccaaattattctgaattcaagttccctcagataaaagcccatccatggcacaagctttttggtaagcgcatgccacctgaagctgttgatctcgtgtcaaggctacttcagtactcaccaaacctgcgctgcactgctgttgatgcttgtgcccatccattctttgatgagctgcgggaccccaaggtctgcttgccaagtggacgaccgctgccagcgctgttcgacttcacagcagccgaactcg

SEQ ID NO: 29241 - DNA, 273 bp, Zea mays
cgtgacgttcgacacgaagccgatcccgggcgactggacacggcgccggcgcgcacaccaactacagcacggagtcgatgaggaaggagggcgggtacgaggtgatcaaggcggccatcgagaagctgaagctgcggcacagggagcacatcgcggcctacggcgagggcaacgagcgccggctcaccggcaggcacgagaccgccgacatcaacacgttcagctggggcgtggccaaccgcggcgcgtcggtgcgcgtgggccgggagacgg

SEQ ID NO: 29242 - DNA, 240 bp, Zea mays
tgttggccggcttgaggttctccgtattcacactaagaacatgaagctagctgaagatgttaatttggaactcatttcaaaggatacccatggatacgttggtgctgatcttgctgctctttgtactgaggctgctcttcagtgcattcgtgagaagatggacatcatagatcttgaggatgagacaatagatgcagagatattgaactcgatggctgttacaaatgaccatttcaagac

SEQ ID NO: 29243 - DNA, 289 bp, Zea mays
ctggatagttaatgaaatgaagaaatcaggtcttcggggtcgtggaggtgcaggttttccctctggtctgaaatggtcctttatgcccaaggtttctgatggacgcccttcttatcttgttgttaatgctgatgagagtgagcctggaacttgcaaagatagagaaatcatgcgccatgacccccacaagcttctggaaggatgccttattgctggagttggaatgagggcatcagctgcttacatctacattcgaggtgaatacgtgaatgagcgtctcaacctcgag

SEQ ID NO: 29244 - DNA, 256 bp, Zea mays
taggaacagggtagaggttaccgtaagcagcggccaaacgtttgttgcggatgctgctgtggtcactgttccgttgggtgtcctgaaagcgaaaaccattaaattcgagccgaggctgccagagtggaaagaggaagcgatcagagaacttacggttggagttgagaacaagatcgttcttcacttcgggcaggttttctggcctaacgtggagttcctcggcgtcgtttcctctagcacctacggttgcagctat

SEQ ID NO: 29245 - DNA, 239 bp, Zea mays
ctccagagctcgtcgccaccggccaccgccaccctcgatcacgccgtccgtcgaggtaaggtcagcatggtgagggtcagtgtgctcaacgatgcgctcaagtccatgtacaacgctgagaagatcggcaagaggcaggtcatgatcaggccgtcgtccaaggtcatcatcaagttcctgacggtcatgcagcgccacggctacattggagagttcgagtacgttgatgaccaccgatc

SEQ ID NO: 29246 - DNA, 240 bp, Zea mays
tgcttggacaacagtacctacataccctagcggagttattgggttcatgctttgctccaccgaaggcctgctgttgatttccagcaccctgttttcaacatcgaggaggatgaacattctacgaaatcaaaaggaccccttaagttctacaactcggagatccacacggcatcattctgtttgccctcttttgcaaagagggtaattgagtcaaaggcaagctagacgtgaggatacttc

SEQ ID NO: 29247 - DNA, 270 bp, Zea mays
gtcgtcaacggcctcttcctaaggtacgaggcgcccaaagagccgaacggctcgtacgtggtgcactacaaccactacgacggcagcaacggcaaggtcggcggcgagaagcggtcgttcgaggtggacgcgatcgtaggcgcggacggcgccaactctcgcgtggccaaggacatgggcgcgggcgactacgagtacgccatcgcgttccaggagcgcgtcaagatccccgacgacaagatggtgtactacgaggagcgcgcggagatg

SEQ ID NO: 29248 - DNA, 147 bp, Zea mays
ggctacaagcaagagatatgctgcagcacttgtggacaggtccgatctcaaatgcagctgttgatgttgttcaagggagtcgatcagttgaagttcggtctgttggagttaccaagggtgctgcaattgatcgtattttaggggaga

SEQ ID NO: 29249 - DNA, 285 bp, Zea mays
ctaatgctgtggaatgctgtcatatttggacctgatgataccccgtgggatggaggtacgtttaagctgactctccagtttaatgaagaatatccaaacaaaccaccaactgtgcgatttgtttctaggatgttccatcctaacatttatgctgatggaagcatatgcttagatatcctgcagaatcagtggagtccgatatatgatgtagctgcgatactcacgtcaatccagtcattgttgtgcgatccaaacccgaattcgcccgctaactctgaagccgcc

SEQ ID NO: 29250 - DNA, 268 bp, Zea mays
aatctctttccgaccaggccaggccgaatcgggccaccacttgggatgggaatggctcagcccacatgcatcatttgatgaaagcactccagtccagtcgcctccgatcagtggcttgtcaaccaccggaccgtagctcctcaccgaatgcccctgcgttggggcaacacagcacatgactagttcgctcaaggaccacaccctctcgagagcaggatgccggccgagatggagcaccaacctagactttccttgggcttgcaccaat

SEQ ID NO: 29251 - DNA, 262 bp, Zea mays
cgatggcattgacaggaatgatcgatatgccaacaggaacaccgtgtttttcgatattaacttgagaggtcttgatggcatccaaggaccagtttatgtcggaactggctgtgttttcaaccgaacagctctatatggttatgagcccccaattaagcagaagaagggtggtttcttgtcatcactatgtggcggtaggaagaaggcaagcaaatcaaagaagggctcggacaagaagaagtcgcagaagcatgtggacagt

SEQ ID NO: 29252 - DNA, 241 bp, Zea mays
cgggcttcggcggcaccggcatccacctcaagatcccgggcctcacgcaggcgtggatcagcaactgctacatggactacaccagcatcgtcgccgaggtccccgtgctgctccacgtctccggatccttcttcctcggcgacgccaacgtcgtcctcaaggccgtcagcggcgtcgccaggggcgtccaggtcgtcggcaacatcttcagcggcagggacaagggcgtcgacatcgtgca

SEQ ID NO: 29253 - DNA, 149 bp, Zea mays
gccgaggaaggagtacccgcccgacctcacgctcccggacctcaagagcgggctcttcagcaccgacgagttccgcatgtacagcttcaaggtgaagccctgctcgcgcgcctactcccacgactggaccgagtgccccttcgtgcacc

SEQ ID NO: 29254 - DNA, 292 bp, Zea mays
ctacatcacctcggccatcaccctcctcaactctgtcggcactcccaggtctttccacctgcttttcttctgggtcgccttcgagaacgtcatgtccctgcacagaacaaaggccacgctgatcggcttgctggaggccggcacggccaacgagtgggtggtgacggcgaactcggcagcgccatgaagatgaaatcggctaacaaagcggggctcaggaagcagttcatgaggatatgggagaggctgcacgtcacggagctcggggtggcagccttcctcttctcctgcg

SEQ ID NO: 29255 - DNA, 128 bp, Zea mays
ggcaaattgagaagacaattcagtatcttattggctctggaatggatcctaggactgaaaataatccttatcttggtttcatctacacctccttccaagagcgggcgaccttcatctcgcatgggaac

SEQ ID NO: 29256 - DNA, 313 bp, Zea mays
agcgccggcgacttgtgttccctttaaagcttggctgctcgtctgctcctgctgctgtctttcttctgctcttccatcgcgccagtgttttgagaagctggtcggcgctcctagatcccttcgcctctctcgcgttcgaggctaggtagccgccaccatgagccgctcggggcagcctccggatctcaagaagtacatggacaagaagcttcagattaagctgaatgcaaaccgtgttgttattggcacacttcggggattcgaccagttcatgaatctggtgatcgacaacactgtggaggtcaatggaaat

SEQ ID NO: 29257 - DNA, 186 bp, Zea mays
cgtcgacccctgccgccgcaaatggcaaggccaagtagatgtgccatcacttcggcactggagtgaaaaagaaagtatgattggagcctgcctaggccccatagatatagctcttttttgagaaggaagagagattaattcagcagcagcttttataaattctttgttgtcatgaagcaggtggtt

SEQ ID NO: 29258 - DNA, 209 bp, Zea mays
ccgagaagagaccaggccgaaggaaaacaatcctgaaaccaagccatgggtctgcaggaggaatttgaggagcatgctgagaaggcaaagaccttgcctgagagcacgagcaatgagaacaagtttatcctctacgggctctacaagcaagccacggttggagatgtgaataccgatcgtccgggcatattctaccaaaaggacagggc

SEQ ID NO: 29259 - DNA, 214 bp, Zea mays
ctgcccttggcaattgcatagcctgcaatgaccatgttgcacttacgcaccctgaccttgacaaggagactgaggagttcattgcagatgtgcttggggtcgaggtgtttaggcagactattgctggaaatatccttgtggggagttactgcgccttctctaacaggggtggtttggttcatccccatacatccgttgaagaccttgacgagct

SEQ ID NO: 29260 - DNA, 308 bp, Zea mays
tctagaagaaaaggctgtgcagttcaagtagcggctgagaaggggctctttgcattggctataaatctacaagttcctggcactacaaactacagtatggttttctactttgttacgaagaaactgataccaaactccttattgcaacgctttgtggatggtgatgacgaatttcggaatagtaggttcaagttgataccatcagttcctaagggctcatggattgttcgacaaagtgttggcagcactccttgtctattaggaaaagctgttgacattacctatatacgtggctcaaattatttaga

SEQ ID NO: 29261 - DNA, 229 bp, Zea mays
gtggtggccggcgagctgcggcgcgggccttggacggtggaggaggacctcctgctggtcaactacgtcgccgcgcacggcgagggacgctggaactcactcgcccgatcagcagggctgaggcgcactggcaagagctgccgcctccggtggctgaactacctccgccccgacctccggcgcggcaacatcacgccgcggagcagctgctcatcctggagctgcactc

SEQ ID NO: 29262 - DNA, 302 bp, Zea mays
  unsure (1)..(302): unsure at all n locations
tgggagtctactgctgaaggagcctctagagaaacattagaagaagcatgtgcagatgtagagatagtctcgccttttgctcagttggatattccactgattggccaatagagttacattattttccgagcaagattgaagacccccaacttttcacctgggccagagtcgctggaatgtgcactttttgctctggatgatataccattcgattctctagcattttcttcaatcattgtcaccttaaggatgtatactgaagatgtgaggtctggaagcatcnaatttcactattgcacgat

SEQ ID NO: 29263 - DNA, 233 bp, Zea mays
gcagcagctaacatccctcactctcggtacctgacctgaccacgagagcaacatgggcggaggacacgacatgcacgggcagcactacggccacaacggcggcgtgaagggcttcgtgtccaacctcgtccacggcggcggcggccatggccatggaagcggctacggccatggccatggaaacggctacggccatgggaatggcggctacggcggcggccacgggtaccctc

SEQ ID NO: 29264 - DNA, 297 bp, Zea mays
cacatcctgcgatcctcgaagcctccgccgagcatcgatcatgtcggcctactgcggcaagtacgcggatgagctcatcaagaatgctgcctacatcggcacccctggcaagggtatccttgctgctgatgagtcaactggcaccattggcaagcgcctttccagcatcaatgtcgagaacgtggaggagaaccggcgggctctccgtgagctcctgttctgctgccctggtgccctccagtacatcagcggtgtgatcctcttcgaggagacactctaccagaagaccaaggatgg

SEQ ID NO: 29265 - DNA, 297 bp, Zea mays
  unsure (1)..(297): unsure at all n locations
gtnccgttgacaagccccttcgtcttcccctccaggatgtctacaagatcggtggtattggaacggttcccgtcggccgtattgagactggtgtcatcaagcccggtatggtcgttaccttcgctccttccaacgtcaccactgaagtcaagtccgtcgagatgcaccacgagcagctcgctgagggccagcccggtgacaacgttggcttcaacgtgaagaacgtctccgtcaaggacatccgacgtggtaacgtcgctggtgactccaagaacgacccccccatgggtgccgctt

SEQ ID NO: 29266 - DNA, 107 bp, Zea mays
gaagaaggttcttgaagtgtttgtggagaaaggcatgcagaatgggcagaagatcacattccctggtgaagctgatgaagcgcctgacactgtcactggagatatca

SEQ ID NO: 29267 - DNA, 219 bp, Zea mays
gttaaccacacaccgaagcgaaatgacacacttcactcaacaattaagggagagtttccaaataagcttggacaggacaaaagaaatgtctacctatattattgggctctttgacaagtatgttgaggagacctccaaattgcagagtcactcaaataatactcatgaagcacaaatgacaagcattgaagattttcagatggtttacgaggagcaatc

SEQ ID NO: 29268 - DNA, 292 bp, Zea mays
tctctgaagtatgagtacagcctaacttgtccaatttgcttggacactttgttcaacccttatgcgcttagctgtgggcatctgttctgcaaagcctgtgcatgtggtgctgcttctgtctacatcttccagggtgtcaagtcggcacctccggaggccaagtgccctgtctgccgagcggttggtgtgtttgatcgtgctgtgcgtatgactgaactagaattgctcctcaagagaagggacaaagattactttctgcagagactgcgcgaagagcgaagtgtgatggtga

SEQ ID NO: 29269 - DNA, 275 bp, Zea mays
atgccgtagtagctcggaatcggccgagtggtacctcatcgcaacaagtgaaggaaactgcaatagcttgcagcccattcatttaattagggatgagcagaggtcactctttgttggaagccggtcagatcctaatgattcagcttcttccctatcattgtcctctccacagatatcagaaagacatgctactatcacatgcaagaataaagctttctatctgactgatctcggaagcgaacatggtacctggattaccgacaatgaaggtagac

SEQ ID NO: 29270 - DNA, 237 bp, Zea mays
tgctcgcctcgggtcaaaccctaagcagggagttgatttatccgctgcagccatgagtaagttgcagtctgagtctgtcaaggatgccatctcccagattgttggggatgccaaggagaagaataggaagttcactgagactgtggaacttcagattggtctgaagaattatgatccacagaaggacaagcgtttcagtggctctgttaagttgccccatatccctcgtcccaagat

SEQ ID NO: 29271 - DNA, 305 bp, Zea mays
ctacattactgatatcatctgcaagcgtgcagatcttggttacaactatggtgttatccttataccagaaggcctgattgatttcatcccagacgttcaaaaactcatcgcagaattgaatgaaattttggcacatgatgttgttgatgaggcaggggcctggaaaagcaagcttcagcctgaatcaagggagctgtttgagtttttgcccaatactattcaggagcaacttatgcttgaaagggatccccatggcaatgttcaggtcgcaaaaattgaaaccgagaaaatgctcattagcatgg

SEQ ID NO: 29272 - DNA, 132 bp, Zea mays
cagccatggcactcatcaagaagctgcgcaaggcgaaaaaggatgctcctgctggtgagaagccagagccagtcaagacacatctccgtaacatgatcattgtccctgagatgattggaagcattgttgggg

SEQ ID NO: 29273 - DNA, 313 bp, Zea mays
  unsure (1)..(313): unsure at all n locations
cagaaggtgaaggagcggatcgacgcncgcaaccagctggagacgtacgtgtacaacatgaagaacacggtgggcgacaaggacaagctcgcggacaagctgttggcggaggagaaggagaaggtggaggaggccctcaaggaggcgctggagtggctggacgacaaccagtcggccgagaaggaggactacgaggagaagctcaaggaggtggaggccgtgtgcaaccccatcgtgtcggccgtgtaccagcggtcgggcggcgccctggcggtgacgctgacggcggtgttgacgacgaccacgacgagct

SEQ ID NO: 29274 - DNA, 309 bp, Zea mays
cgccgacaaaaccagaccatcaaacaagtgccagcggcctctcgcagtcgccgcaatggagagcaccttcatcatgatcaagcctgacggcgtccagaggggcctcattggtgagatcatcagccgttttgagaagaagggcttctacctcaaggccttgaagcttgtgaacgtggagaggtcgtttgctgagaagcactacgccgatctcgcctccaagcccttcttccagggcctcgtggactacatcatctctggccctgtggtggccatggtctgggagggcaagagcgtcgtcacaactggccg

SEQ ID NO: 29275 - DNA, 282 bp, Zea mays
tctttgcctatggtcagactggatccggaaagacttacacaatgagtgggccaggcacatcaaaagaagattggggtgctaactatcgagctttagatgacttgttcgacatctctctaagtagaaggaatgctttctcatatgaggtgggagtgcagatggttgagatttataacgagcaagtgcgggatcttctctcaaatgatattgcacaaaaaagacttggaatttggagtacatctcagcctaatggacttgttgtcgctgatgcaagtttacatc

SEQ ID NO: 29276 - DNA, 251 bp, Zea mays
ctcgatcagtgctgagcactcagctcagtagacggcttcttagtgggcacgtgacgacggatgtcgctgacgtcctcgtcgtccgcgtccttgccgaagagcttcacggtgtcgtccaggctcttgcccatcgtctccggcaggaagaagtacatgaacacccaccctgcggcggcgatgcaggcgtagaggtagaagctgccggagatggtgatggtgttggagagcgagaggaaggacatggtggtggc

SEQ ID NO: 29277 - DNA, 310 bp, Zea mays
  unsure (1)..(310): unsure at all n locations
atcatttctatacacacaacagtanacatgtcagcaacctcttgtattgttatgttagatggataaattctgttaacatgtggtatatanatggggccaatcacttgtgttctgaccacattcgtgagaaggatggcatctgggctgtgcttgcatggctttcaattattgctttcaagaataaggacaaccttggaggagataagcttgtcactgttgaagatattgtccgtcagcactgggccacatatggtcgccattactacacacgctatgactatgagaatgttgatgcaggggctgctaagga

SEQ ID NO: 29278 - DNA, 257 bp, Zea mays
gacgttccagctgcagaggcgcttgcagaagtgctcggtgtgccagatctatcttgcgacgaaggtaacggtcgacgataagtgggctctgaacaacccctgctacttctgcatcaaatgctactacctcctccactacaaggaggacagcacactgctatatcctcacactgtatatgatttcatccaagagtgatgtttctctgtttttttttcttcgtagaaaagtagtctgtagtttatcctacactgtacat

SEQ ID NO: 29279 - DNA, 319 bp, Zea mays
catcatcaagtcaaggaacacttaacctgaagaaaaccactattgcagcagcagtatagtcaacggtgtagcagtagctgcattgcgttattggggtagtagtgtggcagtgttggactgctggtcatcaggtcatggcttcttcttcttttacttccttgtcagtgatggtgctcttgtgcctagcggcggcggcggtggcctcggcgcaactgtcgccgacattctactccaggtcgtgtcccagagctctggccaccatcaaggccgccgtgacggccgcggttgcgcaggaagctcgcatgggcggctccctgct

SEQ ID NO: 29280 - DNA, 156 bp, Zea mays
tgagaaggtggcttctgttttcaagttggatgaaggagttgttattgctaaccttgacgctgacaaacacagggatttggctgagaagtatggagttagtggatttcctaccttgaagtttttcccaaagggaaacaaagctggtgaagattatga

SEQ ID NO: 29281 - DNA, 227 bp, Zea mays
  unsure (1)..(227): unsure at all n locations
cgtagtntagcggaagatgagccaggaccaggagaacggaggcaccaacgggcagcacgccgccgacgtgatggaggtggagccgaagcgccgggcgccgcggctgaacgagcgcatcctgtcgtcgctgtcgcggaggtccgtcgccgcgcacccctggcacgacctcgagatcggtcctgaagctccggccgtcttcaacgtcgtcgtggagatcaccaagggga

SEQ ID NO: 29282 - DNA, 254 bp, Zea mays
cctcttctcctccctcctgccgggtccttaataaagagcagcagcgcaagacgttggtagagcgagcgagaagaaggcaatggcggcggagagcttcctgttcacctcggagtccgtgaacgaggggcacccagacaagctgtgcgaccaggtgtcggacgcggtgctggacgcctgcctggtcgcagaccccgacagcaaggtggcctgcgagacctgcaccaagacgaacatggtgatggtgttcggcgaga

SEQ ID NO: 29283 - DNA, 307 bp, Zea mays
tggatgacatggaaaagatctggcatcacaccttctataatgagcttcgtgtagcaccagaagagcacccagttcttcttacagaggctcctcttaaccctaaggctaacagggaaaagatgacacaaatcatgtttgaaactttcagtgttcctgctatgtatgttgctattcaagctgtcctttccctttatgctagtggccgtaccactggtattgtcctggattctggagacggtgtcagccacactgtcccaatctatgaaggctatgccctcccgcatgccattcttcgtctcgatcttgc

SEQ ID NO: 29284 - DNA, 143 bp, Zea mays
tgttgaatgctttggcgtgtggatctgtgtgtgtgttttttcctttaagaacagtgtgcatgtgtgtttaataaattggtatatatagttatatactcactaaaaggatggtttatgtatgcatgtatgcaagtgttccaacc

SEQ ID NO: 29285 - DNA, 119 bp, Zea mays
gttcgatggtgctctgaacgttgatgtgaacgagttccagactcaacctggtgccctaccctaggatccacttcatgctttcgtcgtacgctccagtcatttctgctgagaaggcctac

SEQ ID NO: 29286 - DNA, 304 bp, Zea mays
gcttggtggacgatcaagtgtcggcatctcaaataatcaatacaatgtggaattcattgaaaggacggccagttctgggccgtatataccatgggaaggagccaccacaatttgttgctcttttccagcccatggttatcttgaagggtggaatcggatctggatacaagaagctcatagaagaaaaaggtgctatgggtgagacttatactactgaaggcatagctctaattcgagtatctgagacatctatctacaacaacaagactcttcaagtagatgcggtagcaacgtctttaagctc

SEQ ID NO: 29287 - DNA, 307 bp, Zea mays
tcgtgaggttataatgaactgtaaaggctacagtttatcagtggacatatggagtctgggctgtaccattattgaaatggcgacggcaagacctccttggcaccaatacgagggggtagcagctataggtaagatcgcaaacagtaaagatatacctgaaatcccagacagtttctcagaggaagggaaaagtttcttgcagctttgcttgaaacgtaaccctgcatctcgtgcttctgcagtccagctgatggatcatccttttgttcaggatcacctgcagtgagagtgcaaaatccatgtatga

SEQ ID NO: 29288 - DNA, 201 bp, Zea mays
gaaggttctacaagaactggtgcaagagcaagaagaaggctttcacaaagtatgctctcaaatatgaaaatgatgctggcaagaaggaaattcagctgcagcttgagaagatgaagaaatatgcttctgttatccgtgtcattgctcatacccagattaggaagatgaagggtttgaagcagaagaaggctcacctgatgg

SEQ ID NO: 29289 - DNA, 263 bp, Zea mays
cgcaacaagcaattgtcaaccgactctatctagctctcttcgcaagccagtaggtcaccactcaccactcaaaagcttgtgaagcaggtgagatgggcaaggaggtggatgtgtccactctagaggtcggcggcgtccgtgaccgtgactacgcggaccctccgccggcaccgctgatcgacatcgacgagctcggcaagtggtccctgtaccgcgccgtgatcgccgagttcgtggccacgctgctgttcctgtacatcacg

SEQ ID NO: 29290 - DNA, 274 bp, Zea mays
cctccaagccccgcattgaggcctggaacagtgacaccctgccaatctacgagcctggtctcgatgatgttgtgaagcagtgcaggggcacgaacctcttcttcagcactgatgttgagaagcacgtcgctgaggctgacattatctttgtctcggtgaacacccccaccaagacccgtgggcttggagctggcaaggctgccgacctcacctactgggagagcgctgcccgcatgattgcggatgtctccaagtctgacaagattgttgttga

SEQ ID NO: 29291 - DNA, 293 bp, Zea mays
acaccccgagcacctcgtccgcaacccgtttggtcaggttccagctctgcaggatggtgacttgtacctcttcgaatcacgagcaatctgcaagtacgctgctcgcaaaaacaagccagagctgttgagggaaggaaacctcgaggaggcagcaatggtggatgtttggatcgacgtggaggctaaccagtacaccgctgcactgaatcccatcctcttccaggtcctcatcagtcctatgcttgggggaaccaccgaccagaaagttgtggatgagaacttgagaactgaag

SEQ ID NO: 29292 - DNA, 301 bp, Zea mays
tgcggtgctctcactctatgctagtgggcgtactactggtattgtactcgactctggtgatggtgtgagccacactgtgcccatttacgaaggatatgcccttcctcatgccattcttcgtttggatcttgctggtcgggacctcacagactccctcatgaaaattctcactgagaggggttactccttcacaacctcagccgagcgagaaattgtaagggacatcaaggagaagctagcatatatagcccttgactatgagcaagagttggaaactgccaagaacagctcttcagttgaa

SEQ ID NO: 29293 - DNA, 249 bp, Zea mays
gcgcgcctgagaggagctggcgaacctcgtgatcgttgccggtgaccacggcaaggagtccaaggacatggaggagcaggcggagttcaagaagatgtacagcctcatcgacgagtacaagttgaagggccatatccggtggatactcggcgcagatgaaccgcgtccgcatacgggagctgtaccgctacatttgcgatacgaagggcgcattcgtgcagcctgcgttctacgaagcgttcggcctga

SEQ ID NO: 29294 - DNA, 209 bp, Zea mays
gtcgacggaggggttccagtcggtgccgtacgtggtggccctcttcagcgccatgctgtggatctactacgcgctgctcaagtccaacgagctcctgctcatcaccatcaactccgccggctgcgtcatcgagaccctctacatcgccatgtacctcctctacgcgcccaagaaggcaaagctgttcacggccaagatcctcctcctcc

SEQ ID NO: 29295 - DNA, 207 bp, Zea mays
gtatgagcgcacacacacacaaccagatctcccccaaatccacccgtcggcaccttcgcttcaagatgcagatctttgtgtaaatcctgactggcaagactatcattctcgaggtggagtcgtctgacaccattgacaacgttaaggccaagatccaggacaatgagggcatcccctcagaccagcagcggctcatctttgctggca

SEQ ID NO: 29296 - DNA, 295 bp, Zea mays
agcaaatcgagaaccgcagagtagttgagttgggtggaaagtccgttaagaagcaccgcacaccattaagtgttgcgaaccagctctgaagaatcagaagaaacgagaacagaagaaaatggaagaggaaaaactacttgggatctttaggaagagggacaaggacaccaaacctcacaagacaaggccagaggaccgagtgcttatggccacagaagggcgctttaggaacggtatactgaacgtcaagcatcttctggcgccaccgagaccatcaggcaaggacatgtcggaa

SEQ ID NO: 29297 - DNA, 292 bp, Zea mays
cgccgccttccgttttgggaaggcgaggtgaggggaacccggcccagggagagttgtggggaggggatcggcggcggaggagatggaagtgcgggagaagctcgtgtgcctggccaagcttgccgagcaggcggagcggtacgacgatatggtggaattcatgaagaatcttgctaggatggacgtggatatgagtgctgaagaaaggcatttgttctcagttggtttcaagaacactattggagcaaagagggcatcatggagaatcatttgttcacatgagcaaaaggtc

SEQ ID NO: 29298 - DNA, 289 bp, Zea mays
cggctcgaggagcggcggcgcgggcggacaaggagcaggcggaggaggagctgtgccaagccacagtgggtatctcacgcgactcgatgcacaagcgccgtgccaccggtggaaagcagaaggcctggaggaagaagcgaaagtatgagcttggtcgccagccggccaacaccaagttgtcaagcaataagacagtgaggagggtccgtgttcgtggaggtaacgtgaagtggagggctcttcgccttgatactggtaactactcatggggaagtgaactgttacccgc

SEQ ID NO: 29299 - DNA, 293 bp, Zea mays
cagccgccgttgctgctgccgcgtccacagaatggggggtttcgtgaagactcataagaccaatgcgtatttcaaacgtttccaagtgaaattcaagagaaggcgggctggcaagacagactacagggccaggataaggctgattaaccaagacaaaaacaagtacaacatacccaaatacagatttgttgtgcgatttaccaacaaggacatcactgcccaaatcatatctgctagtatagcgggtgatatggttcttgcttctgcctactcgcatgagttgccacgatatg

SEQ ID NO: 29300 - DNA, 106 bp, Zea mays
gtcgagatcatgcacgcgatgtggaagcccgccaagttcaaatacatctacctgctggcgacgctgtacgtgttcacgctgacgctgtcgtcgtcggcgggcatgt

SEQ ID NO: 29301 - DNA, 275 bp, Zea mays
gagaagagctgcgcctgcgcctgcgcctgcgggaaagggagaacatggtgcgggaaaagaggggtgttatctccccgctggaccatctcgctgggctgctggaggtgcgcgtggtgaggggagtggacctcgccatccgcgacctccgatccagcgacccctacgtcgtccttcgcatcggcaaggcgcagaaagtgaagacgcgagtggtcaagaagagcatcaatccggaatggaacgaaaaactcaccctctctattgaagaccctgccgtt

SEQ ID NO: 29302 - DNA, 258 bp, Zea mays
cgaagtgatcacaatacgcgcaaggcttcagatgcccggacgttctcttccagccatccttcattggtatggaagctccaggaatccacgagacgacctacaactccatcatgaagtgtgacgttgatatcaggcaggacctgtatggcaacattgtcctcagtggtggatccaccatgttccctggcatcgccgaccgcatgagcaaggagatcactgcgctcgcgccaagcagcatgaagatcaaggtcgtcgctc

SEQ ID NO: 29303 - DNA, 349 bp, Zea mays
attgccggggatgccaaggagaagaataggaagttcactgagactgtggaacttcagattggtctgaagaattatgatccacagaaggacaagcgtttcagtggctctgttaagttgccccatatccctcgtcccaagatgaaggtgtgcatgcttggtgatgcccagcatgttgaggaggccgagaagatgggacttgactacatggatgttgaggctctcaagaaaatgaacaagaacaagaagcttgttaagaggcttgccaagaagtaccatgctttcttggcatcagaggccatcatcaagcagattcaccgtctcttggtcctggtctcaacaaaggcagcaa

SEQ ID NO: 29304 - DNA, 256 bp, Zea mays
ctcttccgcacccgcttctcgctccggattccggattccctctgctctttccctaacgaaggtagccatggcggggagaggtaaggcgatcggctcaggcgccgccaagaaggccacgtccaggagctccaaggctggcctccagttccctgtgggaaggatcgccaggttcctcaaggccggcaagtatgccgagagagtcggcgccggcgcccctgtctacctcgctgccgtgctcgagtatcttgctgctgag

SEQ ID NO: 29305 - DNA, 295 bp, Zea mays
caggaagtctcctgtggctaaggacgttgacttgcatgctcttgcaagtacacccagggtttcagtggagcagatatcaccgagatctgccagcgtgcgtgcaagtatgccatcagggagaacatcgagacggacatcgagcgggagaggcgcaggaaggacaaccctgaggccatggaggaagacgaggtggacgacattgccgagatcatggctgcccacttcgaggagtccatgaagtacgcccgccgcagtgtcagtgatgccgacatccgcaagtaccaggccttcgccc

SEQ ID NO: 29306 - DNA, 296 bp, Zea mays
cagacgcgacgtcgctcggcatcgcctcagcggctcgacgaacaactgagaagagctgcgcctgcgcctgcgcctgcgggacagggagaacatggtcgggaagaagaggggtgttatctccccgctggaccatctcgctgggctgctggaggtgcgcgtggtgaggggagtggacctcgccatccgcgacctccgatccagcgacccctacgtcgtccttcgcatcggcaaggcgcagaaagtgaagacgcgagtcgtcaagaagagcatcaatccggaatggcacgaaaaactca

SEQ ID NO: 29307 - DNA, 263 bp, Zea mays
cggccgtcaacgccgcggccggccggtgcggagatcgataccatgaagaagtacaacgctggtacgaacaaggcggcatccagcggtacatccctcaacaccaagcgcctcgacgacgacaccgaaaacctcgcccatgagcgagttccaagtgatctgaagaagaatctcatgccagcacggctcgataagaagctgacacaggcacaacttgctcagatgataaatgagaagccacaggtgattcaggagtatgaatcagg

SEQ ID NO: 29308 - DNA, 264 bp, Zea mays
ccctctcccttttttttttttgagtaaattatttttagtactcagaaaaaaagataagcaaatgctcaaacaaaaccagaaacacttcctaacaagattacaagacacacgctcccgattacagcactgtcactgtgacaagattattaccgcatgctgtgccagcggctcagtccgctgcactgcagtacatggacaaaaaaaaaacggggcgagtctgatacatacattttattcattggtgagatgcaacaggaagtagaa

SEQ ID NO: 29309 - DNA, 356 bp, Zea mays
cctcactctactctggacgcgactcgaacttaaaccctagagccgcagccccggtcgctccaccgaccccaaatctcaaatcagcgggagggaactcgcacgcgaaggcaaatacgctttagatcccccattgcttctggctactaggccagcgcgcctcgattttcttctccgttttggtctaattcgctgaactcatggctcgcgtctacgttgggaacctggatccgcgtgtcacggcgcgggagatcgaggacgagttccggatgtttggggttctgaggagtgtatgggttgctaggaaaccaccagggtttgccttcattgactttgatgaccgcaggatgcacaagatg

SEQ ID NO: 29310 - DNA, 264 bp, Zea mays
cgttcaagaaggttgggagcttccttggtcgcttcaagtccatacctagcattgttgagcttgacatcttgaaggtttccggtgatgtttggttcggttctggaattgtactgaaggggaaagtgaccatcactgcaaaacctggcgtcaagctagaaatcccagacggagcagtgattgggaataaggataattttggaaaaggaaagagaaaacaataccagatgccttacaacctgaattagggatgaaactgctaattgc

SEQ ID NO: 29311 - DNA, 88 bp, Zea mays
caactcctgagcactttctcctcgtccgcgacaagccaatcgaagccgagatactgccatggagtctaccggcaccggagcaaggggt

SEQ ID NO: 29312 - DNA, 272 bp, Zea mays
cgggcaggatgtcgcaccgtaagttcgagcacccgtcgcacggctccctcggcttccttcccaggaagcgctcctcccgccaccgcggcaaggtgaagtcattccccagagatgaccccaagaagccttgccatctcactgccttccttggctacacggctggcatgactcacattgtccgtgatgttgagcagccaggatccaaactccataagacggaaacttgtgaggctgttaacatcattgaacaccctcctcttgtcattgttggg

SEQ ID NO: 29313 - DNA, 159 bp, Zea mays
ctttcctattcgcgccgccgccgctgctgcaacgccagctcgccgtcgtccgaatagtacactctaacgccgccatggggcgtatgcacagccgcgggaagggtatctcgtcgtcggcgctgccgtacaagaggacgcctcctacctggctgaagaccg

SEQ ID NO: 29314 - DNA, 266 bp, Zea mays
cgaccgggagtagtcgacgcgccgtcactgaatcctcagatcacggctagccgtaatcacgccactctgctgactcccggcgagcagtgtaacattttccttcagccatgggcaaggagaagactcacatcaacattgtggtcattggacatgtcgactctggcaagtcgaccaccactggccacctgatctacaagctcggcggtattgacaagcgtgtgattgagaggttcgagaaagaggccgcggagatgaacaagcggtca

SEQ ID NO: 29315 - DNA, 185 bp, Zea mays
ctctccttcgcggtctcctccgcccgttgccttcgtcacctccatctccggctgcgtcgccggcgagcccgacaccgcgaatcggatccgccgacaaggtgagagggaagagatggggctcacgttcaccaagctgttcagccggctgttcgccaagaaggagatgcggatcctgatggtgggac

SEQ ID NO: 29316 - DNA, 355 bp, Zea mays
ccggctctcggcttcttctacacgctaccgtctcacagccgtaaacccacctcccggatcccgctagttcgccaccgccgcccgcccgcccgccgttcgcctcatcatggccgcctcgtcgaccgccacctccgtccacgacttcatcgtcaaggatgcgagcggcaaagacgttgacctcagcacctacaaggggaaggttcttctcattgttaacgtcgcatcccagtgtggcttaaccaactccaactacactgagctggcccagctctatgagaagtacaaggaccaaggctttgaaatcctggctttcgcatgcaaccagtttggtgggcaggagctggtacaatgagga

SEQ ID NO: 29317 - DNA, 289 bp, Zea mays
cgcggtgagctgggggcttctgctgcccatgggagccatcttcgcgagatacctcaagacgttcaggtcggctgacccggcgtggttctacctgcacgtcgcttgccagctgctcgggtacggcgtcggggtgtccggctgggcgaccggcatccatctcggaaacctgtccaaggggatcacctactcgctccacaggaacatcgggatcacagtcttcgctctcggcactctgcagatcttcgcgctcttcctgaaggccgagaagtgacacaagtatcgggtgtac

SEQ ID NO: 29318 - DNA, 236 bp, Zea mays
ggaacttcaccgagcaggccctccccgacgacctcatcaagcgaggcatggccgttccagatccgtcgagcccctacaaggtgcggctgctgatcgaggactacccgtacgcctcggacgggctggccgtgtggcacgccatcgagcagtgggtgacggagtacctggccatctactaccccaacgacggcgtgctgcaggccgacgtggagctgcaggcgtggtggaaggaggcg

SEQ ID NO: 29319 - DNA, 238 bp, Zea mays
ggcggacgcacgcgtgctcatcaaccgcgcgcgggtcgagtgccagacccaccgactcaccgtcgaggaccccgtcaccgtcgagtacatcacccgctacatcgctgggctgcagcagaagtatacacagagtggtggagtccgccctttcggcctctccacactcattgtcggcttcgacccctacaccgacaagccagcgctgtaccagaccgatccttctggtaccttctctgct

SEQ ID NO: 29320 - DNA, 237 bp, Zea mays
ggatagcctttcagctcaagggaagcgacgttatgaccgcaaacagtctggatatggtggtcagacaaagcctgttttccacaagaaggcaaaaacaacaaagaagattgtgctgaagctgcagtgccagagctgcaagcactactctcaacacccgatcaagaggtgcaagcactttgagatcggtggtgacaagaaaggcaagggaacctctctgttctaagcgtatcataaact

SEQ ID NO: 29321 - DNA, 236 bp, Zea mays
atcgccatctacctcgccgcgctcgccgggacccgcaagttcgggctcggtcgggagaaggaccagcaccagcacaccaagtggtgcccgacgacgacgacaacccacgcgccatctgcgcacaggagcttcggttccggtgcgcggtctgcgggaaggccttcgccacctaccaggcgctcggcggccacaagtccagccaccgcaagccgacgacgccggagcggtacgccgcc

SEQ ID NO: 29322 - DNA, 236 bp, Zea mays
gtctcaccagactagcggctagcgcgagaatggccaaggacatcgaggccggcgccggggaagaagggcaagaataactcgaacccgcccccggcgccgctggtggacgcggaggagctgaccaagtggtcgctgtaccgcgcggtgatcgccgagttcgtggccacgctgctcttcctctacatcacggtggccacggtgatcgggtacaagcaccagacggacgcggcggcgtc

SEQ ID NO: 29323 - DNA, 237 bp, Zea mays
gggtgatggccagcccattggtcgctacgacgacatgtgggccggatggtgtgtgaaggtcatctgcgaccacttgagcctgggagtcaagactggcttgccatacatctggcacagcaaggctagcaaccccttcgttaacttgaagaaggaatacaagggcatcttctggcaggaggacatcatccccttcttccagaacgtgaccattcccaaggattgcgacaccgtccagaa

SEQ ID NO: 29324 - DNA, 235 bp, Zea mays
ggcaggttctggaattcgactctcctgagaatcttctaagcaacgaggggagtgctttctccaagatggtgcaaagtacaggacctagcaacgcagaatacctcaagagtcttgtatttgcaagtggagaagagaggtcccggagggaagaaatcaagctgcaagatatccaaaggagatgggttgcatctaaccgatgggctgaagctgcccagtttgcgcttgctagaagcct

SEQ ID NO: 29325 - DNA, 230 bp, Zea mays
cttgttctctgggatctccgcccccttggcttgactggaaacaaggtcgaaaagctatgtgatctttgccacatcacattgaacaagaatgctgtcttcggtgacagcagtgcattgtctccgggtggtgtccgcattggcgcgccagccatgacctcgaggggtctactggagaaggatttcgagcagattggggagttcctccaccaggcagtgaccatctgcctgaa

SEQ ID NO: 29326 - DNA, 232 bp, Zea mays
  unsure (1)..(232): unsure at all n locations
gcgccacgtcaagatcgccggctacgacatccccaagggcgccaacgtcgtcgtcaacgtgtgggcggtggcgcgcgaccccgaggtgtgggacagcccgctcgagttccggccggagcggttcctccgggagaacatcgacatcaagggcgccgacttccgcgtgctgccgttcggcgccggccgccgggtgtgccccggcgcgcacntcgggatcaacctcgtggcgtcc

SEQ ID NO: 29327 - DNA, 234 bp, Zea mays
cctgcaaccttgcacaaaattgacaaaggtgcttttgggtacggatcatacttctgtttgtctcttatggacaagttgtaccacccggacatgactgttgaggaagcagtagatcttgttgacaagtgcatcaaggagattcggctgcgattggttgtcgcgcctcagaactttgttatcaagattgttgacaaggacggggcgagggagtacgccaggcgtgaactcgtcggt

SEQ ID NO: 29328 - DNA, 232 bp, Zea mays
cgcatcccaccggaccagcagcgtttgatcttcgctggcaagcagctcgaggatggccgcacccttgcggattacaacatccagaaggagagcaccctccacctggtgctccgtctcaggggtggtatgcagatctttgtgaagacactcactggcaagacaatcacccttgaggtggagtcttcggataccattgacaatgtcaaggccaagatccaggacaaggagggct

SEQ ID NO: 29329 - DNA, 227 bp, Zea mays
gcttgacattgatgtgcttgtgcatggagagccagagagaaatgacatggttgagtacttcggtgagcaattatctggttttgcgttcactgccaacggatgggtgcaatcctatggatcacgctgtgtgaagccacccattatctacggtgatgtcagccggccgaaccccatgactgttttctggtccaagatggcacagagcatgacccctcgtcccatgaagg

SEQ ID NO: 29330 - DNA, 227 bp, Zea mays
cggaaaacctccaaggctccaaccctagccgcgatccgacaacgcctccatccctagccgactgctgcaagcttcagagctcaagagtcagggcgccatggcgacagagacggagaccttcgcctttcaggctgagatcaaccagctgctctcactcatcatcaacaccttctattccaacaaggagatcttcctccgggagctcatttccaactcttccgatgcgt

SEQ ID NO: 29331 - DNA, 380 bp, Zea mays
tcaagggatgttgaagctgacataatcgcgacctgcagggagcttggcattgggatagtagcctacagtccactgggcagagggttcttgtcgagtggtcctacgatggtcgacaagttgtccgctcaagatttccgcaaggagctgcccagattccagccggagaacctggagaagaacgccgtgatattcgagagagtcaacgcgatggcggcgaggaaggggtgcacgccgtcgcagctggcgttggcctgggtacaccaccagggagccgacgtgtgccccatacccgggacgacgacagtcgagaacttcaacagcaacgtggcggcgctttcggtggagctcacgcctcaggacatggctgagctcgagtctta

SEQ ID NO: 29332 - DNA, 163 bp, Zea mays
cattgtgcctgcaccacttatgctgccaaaagcacctgaatctaccatacctggcaaaaatacaactctgtcaattcctggatcatctgacagattttctacatccgcactgatggaaaggatacctagtagatggccacggcctacatggcatgctccttgg

SEQ ID NO: 29333 - DNA, 230 bp, Zea mays
ctcgtgatcgttgccggtgaccacggcaaggagtccaaggacatggaggagcaggcggagttcaagaagatgtacagcctcatcgacgcgtacaagttgaagggccatatccggtggatctcggcgcagatgaaccgcgtccgcaacggggagctgtaccgctacatttgcgatacgaagggcgcattcgtgcagcctgcgttctacgaagcgttcggcctgactgtgat

SEQ ID NO: 29334 - DNA, 379 bp, Zea mays
gttctagatcgcgcacgcgccgcccttttttttttttttttagctaactctctctttttttcactcttcactgtacatagtatacatcttgtccaaagaatcgcatgctgctacattggaagcagcatccgccttggaccattggaaagaattacatttaaccctctccatacatacatggtactacttcgccagcttacgttcttcagtcgacgtacccactcacgctaatcagaggtggaggctggtcaggtcttcaggcacagcccctccccgagaaaaatgaagaacacgctacgctctatactccctgtcaatcggatttttgtgcagaggtgctcgtattcgactcagcttggtagtagacacatctctggta

SEQ ID NO: 29335 - DNA, 154 bp, Zea mays
gcggcagcagtaaccaatgcacagaacacaatccgtgggtcaaagcgtctgatcggtaggacttttgatgacccacagactcagaaggagatgaagatggtgccttacaagattgtcaaggcgccgaatggtgatgcctgcgtcgagatgggtg

SEQ ID NO: 29336 - DNA, 150 bp, Zea mays
ctacaacatccagaaggagagcacccttcaccttgttctccgcctcagaggtggtatgcagatctttgtacagaccctgactggataaaccataaccctggaggttgagagctcggacaccatcgacaatgtgaaggcgaagatccagga

SEQ ID NO: 29337 - DNA, 129 bp, Zea mays
aacatgtctgggaagtccagacaggaatggcagtgtcacaattgttggagctgtctctcctcctggtggtgatttttcagaccctgttacctccgcaaccctcagtattgttcaggtcttctggggttt

SEQ ID NO: 29338 - DNA, 309 bp, Zea mays
gtggagtggcgtggccatcgacgactggtggaggatacgagcagttctgggtcatcggaggcgtttcggcgcatctgttcgcggtgttccagggcctgctgaaggtgttcgccggcatcgacacgagcttcaccgtgacgtcgaaggccggggacgacgaggagttctcggagctgtacacgttcaagtggaccaccctgctgatacccccgaccacgctcctcctgctgaacttcatcggggtggtggccgggatctcgaacgcgatcaacaacgggtacgagtcgtggggctccctgttcgggaagc

SEQ ID NO: 29339 - DNA, 129 bp, Zea mays
gctgcaggacgtctgcccggctgactacgcctccccggtgaagctgaacgggttcgcgtgcaaggcgaacttttcggcggacgagttcttcttcgacgggctgaggaacccgggcaacaccaacaaccc

SEQ ID NO: 29340 - DNA, 129 bp, Zea mays
ccggtgtgctctccatggccaacgccgggcccaacaccaacggctcccagttcttcatctgcaccgtcgcgaccccttggctcgacggcaagcacgtcgtcttcggccaggtcgtcgagggcatggacg

SEQ ID NO: 29341 - DNA, 149 bp, Zea mays
gaagaacccaaggggaatacttatttctccaggacctggtaagtttaatcttattgaatatcgcgagtgtttaagcttctttgggtgtaatcaaatactttcatatgtgttctgtaggtgaaccacaagattcgggaatatcattgcag

SEQ ID NO: 29342 - DNA, 150 bp, Zea mays
atttttaactccatcatgaagcttgtcgggacaaagaactactatgacgtgaggatggaatgcgaggggaagctttgctatgacttctcaaacctggagaggttcttcggtgacaaagcggtcaaggaggcgcctggagtcggtgacatc

SEQ ID NO: 29343 - DNA, 307 bp, Zea mays
atctagggttcgttcgcctcgtctcgcgatggacaagggcagcgtcgtcgtgcccccggcccctgccgccgccgccgcgaagaaggacaagcgcttcgagatcaagaagtggaacgccgtctctctctgggcctgggacatcgtggtggacaactgcgccatctgccgcaaccacatcatggacctttgcatcgagtgccaggcgaaccaggcgagcgccaccagcgaggagtgcaccgtcgcttggggaatttgcaaccatgcattccacttccactgtatcagccgttggctaaagacccgtcaa

SEQ ID NO: 29344 - DNA, 308 bp, Zea mays
agctcgtccgtgagatcgcgcaggacttcaagaccgatctccgcttccagtcctccgccgtcgccgcgctgcatgaggccgccgaggcctacctcgtggggctctttgaggacactaacctctgcgccatccacgccaagcgcgtcaccatcatgcccaaggacatccagctcgcgcgccgcatcaggggcgagatggcctgagcgaggcgagctcctctcaccgcatgcggcgtcgttgttgcttcgggcatgcttgtaggacttgtgcttctcttggtttcgtttctggtggcagtggcatcttgg

SEQ ID NO: 29345 - DNA, 302 bp, Zea mays
agacgatgggcaaggacgacgtgatcgagagcggcgctggcggcggcgagttcgctgccaaggactacacggaccctcccccggcgccgctgatcgacgcggcggagctggggtcctggtcgctgtaccgcgccgtgatcgccgagttcatcgtcacgctgctgttcctgtacatcacggtggccaccgtgatcgggtacaagcaccagacggacgcgtcggcgtcgggcgccgacgcggcgtgcggcggcgtaggcgtgctgggcatcgcctgggccttcggcggcatgatcttcgtcctc

SEQ ID NO: 29346 - DNA, 117 bp, Zea mays
cacatcgagaacacgctcgagcacacaagcacgaagactcgtttaggagaaaccacaaaccaccaagccgtgcaagcatcatggcgtacggtcagcaggggcagcgcggccacggcg

SEQ ID NO: 29347 - DNA, 299 bp, Zea mays
cgagaaggacaaggggaagaaggccccaatctcacgctcctcccgcgccggcctccagttccctgttgggcgtatccaccgtcagctgaagcaaaggactcaggcaaatggtcgcgttggtgccaccgcagccgtctactccgctgccatcctggagtacttgactgccgaggttctggagctggctgggaatgctagcaaggatctgaaggtgaagcgtatcacccctcgccatttgcagctagccattcgtggagacgaggagctggacaccctcatcaagggcaccatcgcaggcg

SEQ ID NO: 29348 - DNA, 103 bp, Zea mays
tgcgagtgttcgggtgtcaaacccgtccgcgcagtgaaagcgaacggaggtgggagcctttcggggcgcaccatcgaccgatcctgaagtcttcggatggatt

SEQ ID NO: 29349 - DNA, 102 bp, Zea mays
tgcacctggattaccttatgtcgaggaggcaattaccaatgctggtgactggttggttggaggggacttggacgttatagaaccaatcaagtacaacgatgg

SEQ ID NO: 29350 - DNA, 215 bp, Zea mays
  unsure (1)..(215): unsure at all n locations
gcctgatggtcaggtcatcaccattgggtcagaaaggtttaggtgccccgaggtgctgttccaaccatcccttgttggcatggaatcgcctggcgtccatgaggccacgtacaactccatcatgaagtgtgatgttgatatcaggaacgatttgtatggtaacgttgtcctcagtgggggatctnacatgttccctgggattgccgatcgtatga

SEQ ID NO: 29351 - DNA, 214 bp, Zea mays
ctccgccatgatgtcaccgagccacttcttgtggaggttgaccagatctatcaccttgcttgccctgcttcaccaatcttctacaagcacaatcctgttaagaccatcaagacaaatgttattggtaccctgaacatgctgggacttgcaaagagagttggagctaggattttgttgacatcaacatctgaacgttatggtgatccgcttgagc

SEQ ID NO: 29352 - DNA, 217 bp, Zea mays
gctgcttgcgcctctctcgcccgcatcgccgcagagttcgcaaagatggcagtgccgctgctgacgcagaagatcgtgaagaagcgggtcaagcagttcaagaggccacacctcgaccgctacaagtgcctcaagccaagctggcgtaaggccaagggtatcgactcccgcgtcaggcggaagttcaagggatgcacctgatgccaacattggatac

SEQ ID NO: 29353 - DNA, 174 bp, Zea mays
  unsure (1)..(174): unsure at all n locations
aatcctanaaccatctgcttcagctagccccaagtttagtcggccgatcattcactgaagtagtaatggcctccgtcaacagctggaccctcgagatagcgtcgccggtggctccgcagcgcctgttccgcgccgccgtgatggactggcacaccctggcgcccaaggtcgcct

SEQ ID NO: 29354 - DNA, 215 bp, Zea mays
cacgatcgagcacacaagcacgaagactcgtttaggagaaaccacaaaccaccaagccgtgcaagcatcatggagtacggtcagcaggggcagcgcggccacggcgccacgggccatgtcgaccagtacgtcaacccagtcggcggcgtcgagcacggcaccggcggcatgatgcacggcacgggaaccaccggcggcatgggccagctgggtga

SEQ ID NO: 29355 - DNA, 212 bp, Zea mays
tctgaaatgttcacaaaattctataccaactgccaggtggttgggtcgccggagcagacgagccggttgttgctttgccaggcgactgctgttgtcatgcgacagtgcttcaacctgctcgggatcacgccagtatacaagctgtgattggctgcatgttcgattaatacattcaacatgtagaaaccccaattcatcatggttgcagtttt

SEQ ID NO: 29356 - DNA, 167 bp, Zea mays
  unsure (1)..(167): unsure at all n locations
caactcgccgtctgccttctgcgcctccatttcggcctctgtcncttgcaagttcaatctcacctccaaccatgggtaaagagaagtcccacatcaacattgtggttattggccacgttgactctggcaagtcgaccaccacaggacacctgatctacaagcttgga

SEQ ID NO: 29357 - DNA, 228 bp, Zea mays
cgtccagcgccaggccacggggctcttcaccgccgagttcttccgcgacttcgccgactccatggtcaagatgtccaccatcgacgtgctcaccggccagcagcagggcgagatcagaaagaaatgcaacctcgtcaactgacaaataatacgtacattaattgctgctggttttgacgatgcctttcacttacgttcatccacttaattcatgcatccatgttggtt

SEQ ID NO: 29358 - DNA, 231 bp, Zea mays
  unsure (1)..(231): unsure at all n locations
cgaatcttgggacttggagatttgggttctcagggaatgggaattcctgtaggcaaacttgctctatacactgctcttggaggagttcgtccatcagcttgtttgcctatcacaatcgatgttggcacgaataatgagaaactgcttaatgatgagttttacattggactccggcaanaacgtgcaactggcgatgagtatcatgagcttatggaagagctcatggctgct

SEQ ID NO: 29359 - DNA, 242 bp, Zea mays
ctctcttggtaccgggatcgctcttgctggagctttcctatactcgcaattgaagagacttaagcccaagctcaagactgcttgatcatatacatttgtaggtccattcaatagaactttggaagttatgctatgtcattggagtgatcagtgagtgccgtagttagaatgataagcctctccgttttgttaccagttgggtggataatttatgatttacttgctagcatttttggacggat

SEQ ID NO: 29360 - DNA, 205 bp, Zea mays
cgctggcgtttcaaatgcgatcaataacggatatgagtcatggggcgccctctttgggaagctattctttgcattttgggtgattgtccatctttatccctttctcaaaggtttggttggaaggcaaaacaggacaccaacgattgtcatcgtctggtccattctgctggcttcaatcttctcgctcctttgggttcggattgat

SEQ ID NO: 29361 - DNA, 208 bp, Zea mays
gccatggacaaagatcttcgctctcacgccaccctagactgcttctgcagtggcagcaccgccgtcaccgtcctcaagctcggctcggatctctacatggccaacattggtgactcgcgcgccgtgctaggctcaagggacggcggcggcatggtggccgtgcaactgactgtcgacctcaaaccagatgttcccagcgaggcagaac

SEQ ID NO: 29362 - DNA, 202 bp, Zea mays
ctgccattgtcgattctcattgtaggcgttggaaacgctgatttcaaacaaatggagatcttagacgcggacaatggtaagcgactggaaagctctacgggtaggatcgcgacacgcgacatcgtccagtttgttcccatgagggaagtccaaggtggcgagatctccgtcgtgcaatcccttctggaggaactgcccggtc

SEQ ID NO: 29363 - DNA, 193 bp, Zea mays
  unsure (1)..(193): unsure at all n locations
ctcagaactcgggaananaatgtcagatgccgccgtgcgtgtgatcggcctatggcgagcccgttcgtgatccgcgtcctgatcgccctgaagctgaagggcgtcgagttcgagttcgtggaggacatggtgggcaggaagagcgagctgctgctgaggtcgaacccggtgcacaagaagatccccgtcctgc

SEQ ID NO: 29364 - DNA, 207 bp, Zea mays
ctagatgatgaagagtatgaggacattatggaagacatgaggctagaagcaggcaaatatggtaatttggtgagagttatcatcccacgccctgaccccagcggacagccagttgtaggagttgggaaggtgttcctggaatatgcagatatcgatggtgctgccaaagcgtagacagcgctgcatggcaggaaatttggtgggaac

SEQ ID NO: 29365 - DNA, 162 bp, Zea mays
ctcaatatgaaggcgcttgaaattgctgagaaagccagggatgctctcctaagtggatagtttgaccaggtacgtgtcaacctgccaaatggtgacatggttggtcacactggtgatattgacgacaccgtagttgcttgcaaggcagctgatgaagctgtt

SEQ ID NO: 29366 - DNA, 146 bp, Zea mays
  unsure (1)..(146): unsure at all n locations
ctcacatctcccaagacctcctcagacccgagaagcgcagtgcgtgccatggacgccaccggcactggagctggagggattgcgaagaagggagctcgcggtcgcaangacggcgggccgatgaagaagtcggtgacgatgtccgt

SEQ ID NO: 29367 - DNA, 154 bp, Zea mays
gaagatttatcctgggaaaggcatccgatttatccgtgctgattctcaggttttcctttttgccaactcaaaatgcaagcgctacttccacaaccgcctgaagcctgcaaagcttacctggacagcaatgtacaggaagcagcacaagaaggat

SEQ ID NO: 29368 - DNA, 150 bp, Zea mays
ctctgagggacctatcgctccgctatgggcctctcatgttcctcaagctgggcgagctcccagtggtcgtagcatccacgccggaggctgcgaaagaggtgatgaagacccacgacgccatcttctcgaccaggccactgagctcaacca

SEQ ID NO: 29369 - DNA, 150 bp, Zea mays
caagaagttgcttggtcgcgtgcgagccttcgatcggcactgcaacatggttcttgagaacgttcgtgagatctggaccgaggtaccaaagaccggtaaaggcaagaagaaggctctcccggtgaacaaggacaggttcataagcaagat

SEQ ID NO: 29370 - DNA, 149 bp, Zea mays
cgccgccgcctcccagaccgtctcctccgccccagccgggatgccgacggtgagcgtcggccgggatcgtctcttggctgccattggtcgaacctacacacaggaggagttcgaggcgctctgcttcgagttcggcatcgagctggacg

SEQ ID NO: 29371 - DNA, 175 bp, Zea mays
tcgctacagtctacattcggctcgaggtctctttcctattcgcgccgccgccgctgctgcaagcgccagcacgccgtcgtccgaatagtacactctaacgccgccatggggcgtatgcacagccgcgggaagggtatctcgtcgtctgcgctgccgtacaagaggacgcctccta

SEQ ID NO: 29372 - DNA, 208 bp, Zea mays
gaacagagccaagaaacaagcccggaagatggcaggcggcggagtggtgaagcacatcctgctggcaagcttcaaggaggaggtgacgcaggagcgcctggacgagctcatccgaggatacgccgcgctcgtcggcgtggtcccctccatgaaggcgttccactggggaactgatgtgagcatagaaaacatgcatcaagggttcacg

SEQ ID NO: 29373 - DNA, 178 bp, Zea mays
ctcgctacgccatcatctgccaggagaacggtctggtgccaattgttgagcctgagatccttgttgatggccctcatgacattgatcgctgcgcttacgtcactgagacagtccttgctgcctgctacaaggctctcaacgagcaccatgtcctcctgcagggtaccctcctgaagcc

SEQ ID NO: 29374 - DNA, 171 bp, Zea mays
atcataagctggctccaagatgagaatatgttcgacatgtggtgggcgagggcaagtaatgcgaactgagcaaacaccatttggtctgttctcgcaggtttctatttgccccacttgcgcaggagacggcgaagtcatctcagagtattgtaggaaatgttctggagaggg

SEQ ID NO: 29375 - DNA, 173 bp, Zea mays
  unsure (1)..(173): unsure at all n locations
cnggggagcaagcagcagccgtccgtggaagaagatgtcgtacctgctgccgcatctgcactcggggtgggcggtggaccaggccatcctcgccgacgaggagcgcctcgtcatcatccgcttcggccatgactgggacgagacctgcatgcagatggatgaagtgctggcag

SEQ ID NO: 29376 - DNA, 170 bp, Zea mays
  unsure (1)..(170): unsure at all n locations
tgttcttcacaaatagtggttcagaagcanatgactcccaggttaaactagtgtggtattataataatgcactgggaaggccagacaagaagagatttattgctcgctcaaaatcgtaccatggatcaaccttgattgcagctagtctatcaggtctgccagcgcttcat

SEQ ID NO: 29377 - DNA, 167 bp, Zea mays
cagagcggcggcgcttgcggacaaggagcatgcggaggaggagttgtgccaagccacaatgggtatctcgcgtgactcgatgcacaagcgccgagccaccggtggaaagcacaaggcctggaggaagaagcgaaagtatgagcttggtcgccagccagccaacacca

SEQ ID NO: 29378 - DNA, 135 bp, Zea mays
tggttctatggggtgctggcatcgcttgggctgtggcagaaggaggctaagatcctcttccttggcctcgacaacgccggcaagaccaccctccttcacatgctgaaggacgagcggctcgtacagcaccagccg

SEQ ID NO: 29379 - DNA, 165 bp, Zea mays
acaatattcagtgtgatacctgccttttgtaagaaaggagatatcatagtcgctgatgagggtgttcactgggcagtgcaaaatggtctccatttatcaagaagcactgtggtgtacttcaagcacaatgatatggcttcacttgcaagcactttggaaaaactt

SEQ ID NO: 29380 - DNA, 166 bp, Zea mays
cggaagacacaggtgacagtggagtaccgcaacgagggtggcgccatggttcacatccgtgtgcacacagtcctcatctctacccagcacgacgagacagtcaccaacgacgagattgctgctgacctgaaggagcacgtcatcaagccagtcatccccgagcagt

SEQ ID NO: 29381 - DNA, 129 bp, Zea mays
ctctgactagggccctcttctacattatcatgcaatgcctgggcgccatctgtggagctggagtggtgaagggcttccagcagggactttacatgggcaacggtggtggcgccaatgttgtcgcacctg

SEQ ID NO: 29382 - DNA, 144 bp, Zea mays
ttcgccggcaagcagctggaggatggccgcacactggcggattacaacatccagaaggagagcactctccacctggtgctccgcctcaggggtggcatgcagatttttgtgaagacattgactggcaagaccatcaccttggag

SEQ ID NO: 29383 - DNA, 163 bp, Zea mays
  unsure (1)..(163): unsure at all n locations
acccaaagcctccgacacccttcctctctcnctccgccgccgctgcgcacgcagggaacaagcgacatgggcgtctacacctttgtgtgccgcaacaacggcggcgagtggaccgccaagcagcactccggcgagatcgaggcttccgccgctaccccatacg

SEQ ID NO: 29384 - DNA, 190 bp, Zea mays
ctcgaccattgccttctgcgacactgactctcccatgcggtatgtcgatatcggcatcccagccaacaacatggggaggaacagcattggatgcctgttctggcttttggccaggatggttctgcagatgaggggcactatcctccctgggcacaagtgggaagtcatggttgatctgttcttctacaga

SEQ ID NO: 29385 - DNA, 309 bp, Zea mays
gttttgaaagataaggacaccacagcatggtttgaagagctccgtgttgacatgaacatagttaagaatatctctatggaaatattagacttctatgacacctacaagattgatcctcaaaggggcatccctgaggataagataagccccgtgatgaacaagttgccggcaaaggcttaactcagatttggcgagcttaggagttgtaaactagtagtaaactacatcatacttccaccatgtgtgtactcagcctgcactgtcgcttgagacgtgttgatgaactacttgatagattcgatgcaaaaa

SEQ ID NO: 29386 - DNA, 304 bp, Zea mays
cgagaactgggtcattggagttggaggctttggaaaggtctacaagggggtgatgagggatgagagcaaggttgcagtgaagcgtggaaacccaaagtctcagcaaggtctcaacgagttccgtacagagattgagctcctctcacgtctgcgccaccgccatttggtgtctctgattgggtactgtgatgaaaggaacgaaatgatcctggtctacgagtacatggagaaaggcactctcaagagccatctctatggctccgataacccctcgctcaattggaagcagaggctggaggtttgc

SEQ ID NO: 29387 - DNA, 308 bp, Zea mays
gctgatgatgttgcaggaatcatctcatcgaaggctggcctcaagtatctgggtcctgatgttgatgctatgaaagctgtggccgatgcctactccaaaaggtctctgaagtacttcgaaactgctctccgtgattacaaagctcagctggaagaagatcctattgtccacaggcacctttcctcgctgtatgacactctcttggagcagaacctctgcaggctgattgagccctactcaagggtggagattgctcacatagcagagatgattgagctgccaatgaaccatgttgagaagaagctgtc

SEQ ID NO: 29388 - DNA, 309 bp, Zea mays
  unsure (1)..(309): unsure at all n locations
aanaaggcaagctatcaagttgttgggagatatgctgctggatagatcaaatgttgcagtgatgatgcgctatgttagttccaaagacaatcttatgattctgatgaatctcttaagggattcgagtaaaaatatccaaatcgaggcatttcacgtgttcaagctgtttgctgcgaataaaaacaaaccacctgaggtcgtgaacatactggtcaccaatagaaacaagctacttcgtttttttgctggattcaagattgacaaagaggatgaacagtttgaagcagacaaggagcatgtcataaaaga

SEQ ID NO: 29389 - DNA, 312 bp, Zea mays
ggctagtgtctgcgtgtggtggcgcgcggtcggcggcggccatggcggcgtggaaggacggctacttggacatggtgctcatcccgctcgccgtcctcttccccgccgtgtaccacctctggctgtaccgcgccgtccgccgcagcccgctcagctccaccgtcggcatcagcgccgccgcgcgccgcatctgggtcttctccatgatgaagaacaacgagaagcaggcgatcatcgtagtgcagtcgatcaggaacgtgctaatggcctccacgctggtgggcacgacgtcgatcctcttctgcacgggcg

SEQ ID NO: 29390 - DNA, 303 bp, Zea mays
tgatgctagaacactagtcgagcatgctcgtgttgaaactcagaatcataggttctcatacggggagccaatgaccgtagaatcttcaacacaagctatttgtgacttagctctgcgctttggcgaaggtgacgaagagtcaatgtcacggccatttggagtctctctcctaattgctggacacgatgagaatggacctagcctgtactacaccgacccatctggtactttttggcaatgcaacgcgaaggcaattggatctggctctgaaggagctgatagctccttgcaggagcagtacaa

SEQ ID NO: 29391 - DNA, 302 bp, Zea mays
gggttgttgagtgatggtggtgtccactcccgccttgaccaactgcagttacttctgaaaggtgtcagtgagagaggagcaaaaaaaattcgtgtgcacatccttaccgatgggcgtgacgttttggatggcagcagtgttggtttcgtggagaccctagagaatgatcttttggagcttcgaggcaagggtattgatgcacagattgcttctggtggtggaaggatgtatgttaccatggaccgttatgagaatgactgggatgtggttaaacgtggctgggatgctcaggtgctcggaga

SEQ ID NO: 29392 - DNA, 298 bp, Zea mays
gcggacacggaggcgaaggaggagcagcagcagcaggcggcgccgaggagcggcatcccactcagtgcttgcaaccatggctaggggattgaagaagcacttgaagaggctcaatgcgcccaagcattggatgctcgacaagcttggcggagcttttgctcccaagccatcttctggacctcacaagtccagggagtgccttcctctgatcctcatcatcaggaacaggctcaagtatgctttgaactaccgtgaggtcatttctatcctgatgcaacgccatgtacttgttgatggc

SEQ ID NO: 29393 - DNA, 207 bp, Zea mays
cgcctccatttcggcctctgtcccttgcaagttcaatctcacctccaaccatgggtaaagagaagtcccacatcaacattgtggttattggccatgtcgactctggcaagtcgaccaccacaggacaccttatctacaagcttggaggcattgacaagcgtgtgatcgagaggtttgagaaggaggctgctgaaatgaacaagcggt

SEQ ID NO: 29394 - DNA, 149 bp, Zea mays
cgagaacacgatcgagcacacaagcacgaagactcgtttaggagaaaccacaaaccaccaagccgtgcaagcatcatggagtacggtcagcaggggcagcgcggccacggcgccacgggccatgtcgaccagtacggcaacccagtcgg

SEQ ID NO: 29395 - DNA, 305 bp, Zea mays
ctcactgccgcgccgccaccccctacaggtaaggaagaggagggcaggatgtcgcaccgtaagttcgagcacccgaggcacggctccctcggcttccttcccaggaagcgctcctcccgtcaccgcggcaaggtgaagtcattccctagggatgaccccaagaagccttgccatctcactgccttccttggctacaaggctggcatgactcacattgtccgtgaggttgagaagccaggatccaaactccataagaaggaaacttgtgaggctgttaccatcattgaaacccctcctcttgtcat

SEQ ID NO: 29396 - DNA, 295 bp, Zea mays
  unsure (1)..(295): unsure at all n locations
ganagaagatgcagcaagtgctgctggaaaggcccctgttaagaaacagtctgctggggagctccgtcttcataaagatattagtgagctcaacctgccgaagaccacatcaatttcttttcccaatggcaaggatgatctgatgaattttgagaccaccatccgacctgatgaaggatattacatgggcggcactttcgttttcacctttcaagtgtccccatcttatcctcatgatcctccgaatgtcaaatgcaagaccaaggtgtaccatccaaatattgatctggaaggc

SEQ ID NO: 29397 - DNA, 294 bp, Zea mays
tgcttatcgagacatacttcgctgatattcctgctgagtcctacaagaccctcacatcattgagtggtgtgactgcttacggtttcgatcttatccgtggagccaagacccttgatcttatcaggagcagcttcccctctgggaagtacctcttcgctggtgttgtagatggacgcaacatttgggctgatgatcttgctgcatctcttagcactcttcattctcttgaggctgttgctggcaaggacaaacttgtggtgtcaacctcctgctcactgatgcacaccgctgttg

SEQ ID NO: 29398 - DNA, 293 bp, Zea mays
ctttggtctcatgggtgatggccagcccatcggtcgctacgacgacatgtgggcaggatggtgtgtgaaggtcatctgcgaccacctgagcctgggagtcaagactggcctgccatacatctggcacagcaaggctagcaaccccttcgttaacttgaagaaggaatacaagggcatcttctggcaggatgacatcatccccttcttccagaacgtgaccatccccaaggactgcgacaccgtccaaaagtgctacatctacctctctggacaagtgaaggagaagctgggca

SEQ ID NO: 29399 - DNA, 208 bp, Zea mays
gcacggacatgggggacaactgcacctggattaccttatgtcgaggaggcaattaccaatgctggtgactggttggttggtggggacttggaggttatagaaccaatcaagtacaacgatggtctagatcagtatcgcctgtctccagcacagctgcgtgaagagtttgccaggcgcaatgctgatgcagtatttgcctttcagcttc

SEQ ID NO: 29400 - DNA, 385 bp, Zea mays
caacttttatcaagcatctgctaagaacaagttatccaggtgcccatatcggaccagagccaacaacagacagatttgtagttgtcatgtcaggatctgatgaaaggactattcctgggaatactattgctgttcaagctgacatgccttttagcggtcttacaacatttggaactgcatttttatccaagtttgagtgctctcagatgcgacatccactgctagagcatatcacatttgttgacacacctggtgttctttctggtgaaaagcaacgcacacagcgcactatgatttcactggtgtgacatcatggtttgctgcgaagtgtgatcttatccttctcctgtttgatcctcataagctcgatatcagtgatgagttc

SEQ ID NO: 29401 - DNA, 124 bp, Zea mays
cggctcgagtaccggagcagggagcacgccacacgagccctttccgccgccgccacaatggtgaacgttcctaagaccaagaagacctactgcaagaacaaggtgtgcaagaagcacactctcc

SEQ ID NO: 29402 - DNA, 166 bp, Zea mays
cgcgccgcgcttgcgtttccttctctccgcttccaagatgtcgaagcgagggcgtggaggttcggctggtaacaagttccggatgtcactgggtctaccagtggcagctactgtgaactgtgccgataacactggagccaagaacctgtacatcatttctgtgaag

SEQ ID NO: 29403 - DNA, 208 bp, Zea mays
acgttatgatgagattgtgaaggaagtctcatcttacctcaagaaagttgggtacaaccctgataagatagcatttgttcccatctctggttttgagggtgacaacatgattgagaggtccaccaaccttgactggtacaaaggcccaaccctgcttgaggctcttgaccagatcaccgagcccaagagaccctcggacaagcccctg

SEQ ID NO: 29404 - DNA, 165 bp, Zea mays
ccacgccgtgatggagccgttcgtgatcgccaccaaccggcagctcagcgtgacgcaccccgtgcacaagctcctcctgccgcactaccgtgacaccatgaacatcaactccaacgcgcgccagatgctcgtcaacgccggcggcatcttcgagaccaccgtctt

SEQ ID NO: 29405 - DNA, 227 bp, Zea mays
  unsure (1)..(227): unsure at all n locations
cgacgttgcagctatttcatgagacaactgccacggcattggcttatggcatttataagactgacctcccggagcatgaccagctanacgttgcatttgttgatgtcggccatgctagcttgcaggtcagcattgtcggttacaagaagggacagctcaagatgctttcgcatgcatatgaccgttctcttggtgggagggacttcgatgaggccctcttcaagcac

SEQ ID NO: 29406 - DNA, 201 bp, Zea mays
cgacatcgtcccttcgtctccacgagcaaccgataatccgccggcgttgagatgttggtttatcaggatctcctatctggcgacgagctcctgtcggattcattcacctacaaggagctcgagaacggcgtcctgtgggaggtcgagggaaagtgggtcacccaaggtcctgttgatgtggacattggtgccaatccatcc

SEQ ID NO: 29407 - DNA, 231 bp, Zea mays
agttgctgtggttaaggttggagcatcgaccgacgcagagctagaggaccgcaagctccgcatagaggacgcgaagaatgcgacttttgcagcaatagaggaaggtattgttccaggaggcggtgcagcatatgttcatctatcgacattcgtaccggctatcaaggagacgttggatgatcctgaggcgcgcctaggtgctgatatcattcagaaggctttggtggcacc

SEQ ID NO: 29408 - DNA, 360 bp, Zea mays
gtcatcgtctcgttcctgccctcggccctccccaactccagcaggcagatcagatacatccattcgcggaccggaacgaaaggaaagggttgaaccatgagcgccgtggctgtttcgtcgtcgctgaacccggacgcgccgctcttcatcccggcggcgctgctgcaggtggaggacttctcgccgcagtggtgggacctcatcaccaccactgcctggttccgcgaccactggtcccgcgagcgcgcccacctggacgagatggccgagcagatcgacgcggccggcctccccgacgacgaagacctcttctacgacgaccagcccgagcagggccccgtcgctgccgcccttaagaca

SEQ ID NO: 29409 - DNA, 377 bp, Zea mays
cggaaacgaagaaaccctcctccaccaacccaatccagctacatccgtctgggtgaactccagggccaggagcagttcgccgccttcgttcgcatcacctacgcggttcaatccaactggcaggaaggaacgtgatggccaagacgagctcgttcaagctggagcacccccttgagaagaggcagtctgaggctaatcggatcagagagaagtaccctgacagaattccagtgattgttgagaaggctgagaggagtgacattcctgacatcgacaagaagaagtacctggtccctgctgatcttacggttggacaattcgtgtatgttgttaggaagagaatcaagctcagtgctgagaaagctatcttcatcttt

SEQ ID NO: 29410 - DNA, 371 bp, Zea mays
ggcgaccatcaaggagacgctgcgcctgcacccgccggcgccgttcctcctcccgcactactccaccgccgactccgagatcgacggctacttcgtcccagccgggacgagcgtcctcgtcaacgcctgggcgctcgggagggaccgcacgacgtgggagaagccggaggagttcatgccggagcggttcgtgcaggaaccgggcgccgtggacgtccacatgaagggcaaggacctcaggttcatcccgttcggctccggccggaggatctgccccgggatgaacttcggattcgcgaccatggagatcatgctggccaatctcatgtaccattttgattgggaggttccgggctctgcagcacgggtgt

SEQ ID NO: 29411 - DNA, 353 bp, Zea mays
  unsure (1)..(353): unsure at all n locations
cacatcctgagtatagaatcagcttggccgtcagcttcttgtttaccttcctatcttcccttgtcaacaatgagtcaacaaaggttaatggtcgcaacgggtcatgtagtaatggagccacaaacggtgcccatgagcactcaccagagaagcatcttaagtttgacagcaacgatttgccgatacggtcaagacaagaaatatttttaactgatgaatacaagccagttggaaaaccaattaagaaagcaggtgcagagatccaagcttcaggggaagctgtgtacgttgatgatatccccgctcccanagattgcctctatggagcatttatctacagcacccaccctcat

SEQ ID NO: 29412 - DNA, 191 bp, Zea mays
tgtgttcgtgtagcccaaggagacggactccgtgctcctggtggacgccgccgtctactacgcctgcaacacctcgtcctacgtctccaggttcgacgacggcagcactgtgttcacgttcgaccgctcttgggccttcttcttcgtcagctagaacgatgccagctgccgtgtcatcgagaagctcatcg

SEQ ID NO: 29413 - DNA, 367 bp, Zea mays
agctagtaccatcgtgcgagtgtgagcaagctactgagagaactcggaacgttgcttgacagcttgagtaggtaaataatctatggcgcgccaacagtggagcagcggcggcctcgcggtcgcggtgctggccgtgctgtcgtccgtgctcatctgctcgggccacccggtgccgggcgggctccccctgctgccgcacttctacggccacgcgtgcccgcagatggaggccatcgtggggtccctcgtggcgaaggcgcacgcggaggacccgcgcatggcggcgtccctgctgcggatgcacttccacgactgcttcgtgcagggctgcgacgcctccgtgctgctggacgccgacggcagcggc

SEQ ID NO: 29414 - DNA, 371 bp, Zea mays
cggcggactggacctgggcctggtgcggcgcgccaggtgttccactacggctccatctcgctcatctccgagccgtgccgctcggcgcacatggccgccatgcgcgcaccaaggccgcgggcgtgctctgctcctacgaccccaacgtgcgcctcccgctctggccgtcgcccgacgccgcacgcgagggcatcctcagcatctggaaggaggccgacttcatcaaggtcagcgacgacgaggtggccttcctcacgcgcggggacgccaacgacgagaagaacgtgctgtccctgtggtttgacgggctcaagctgctcgtcgtcaccgacggggacaagggatgcaggtagcttcaccaagacttcaag

SEQ ID NO: 29415 - DNA, 344 bp, Zea mays
gcaagcacagtgataattggtttgttaaggtactggccaataacaaattgtcagaaggaagtgatgtttctcagcgagatcgaagagatcttggaggctaccagccaggcagaattccagaaatgtatggcaccattgtttcggcgaattgctcattgtatcaccagtgctcacttccaggttgctgaaagagcgcttttcatgtggagacaatggtcacattgtcagcttgatagcacaaaaccgccaagtgatcatgtctcttgttgttccagcgctagagcagaacattcagaatcactggaaccaagcggtcctgaatctggctgtgaatgtcaagaaaa

SEQ ID NO: 29416 - DNA, 229 bp, Zea mays
aatgatggcattcgttgggattcctggggtcgattcgttgagcacagtactgcataccagccatggatttggaatactggaaaccatgaaatagagtacaggcctgatctgggagaaacttctgtattcaagccatatttgcataggtacatgactccatatttagcatcaaagagcagttctcctatgtggtatgctgtcaggcgtgcatctgctcacatcatcgtgt

SEQ ID NO: 29417 - DNA, 226 bp, Zea mays
gacgcggagagcgcttactgggaactcgttataaaggatatccaagatgcgtgcaaactttttgagcccatctacgatgagactgatggggctgatgggtatgtctccgtagaggtgtctcctaggttggcaaatgacactcaaggaactgttgaagcggcaaagtggttacacaaagtggtcaaccgccccaatgtctacataaagatcccagctactgcagaat

SEQ ID NO: 29418 - DNA, 222 bp, Zea mays
gatcagcctgctatcatgtcctactgggattcaaaggagcagagggacatctatgggatcaaggacaacctgatcaggttcagcattggagtggaggattttgaggaccttaagaatgatcttgttcaggccctcgagaagatataagctccaatccatttgcattaataaagttatgaggtgatggttgtctggatcttgtagagatttgtgatgatacat

SEQ ID NO: 29419 - DNA, 223 bp, Zea mays
ctccaggtctccagcgaacaggctcaggcgcaacgcaacaacacaaggcggcggttatggcctctgctgctgcgacggctacgattgggacggggaaggtggtttgcgtcaccggcgcatcagggtacatcgcgtcctggattgtcaggctcctactcgaccgcggctacaccgtccgcgccaccgtgcgagacaccgctgacccaaagaaaacattgcacct

SEQ ID NO: 29420 - DNA, 223 bp, Zea mays
gcgtcggcttgcttttaactgaatccagcccaccgcttctcgcacgtcgccatggacgcggtcgattctgtggtggatcccctccgcgacttcgccaaggacagcgtccgcctcgtcaagcgctgccacaagcctgaccgcaaggagttcaccaaggtggcagcgcggacggcgatagggttcgtcgtcatgggcttcgtcggcttcttcgtcaagctcatct

SEQ ID NO: 29421 - DNA, 220 bp, Zea mays
tgtcactgcagttaagctaaaggatggcacagtacttgaagccgatattgttgttgtcggtgttggaggcagaccattgactactctcttcaagggtcaagttgctgaggagaagggtggaatcaagactgacgcttcctttgaaacaagcgttcctggagtatatgccattggtgatgtggctaccttccctttgaagatgtacaatgagttgaggaga

SEQ ID NO: 29422 - DNA, 221 bp, Zea mays
accatctccgccgtctccgtcaccgttggctacctctccgggatcaagccggggatccggggcccgtcgatggtcacgggcggcctcatcggggtcatgggagggttcatgtacgcctaccagaactccgccgggcgcctaatgggattctttcccaacgacgccgaggttgcgcgctacaagcacaagcttcattgaggatccagctccattccgtctct

SEQ ID NO: 29423 - DNA, 218 bp, Zea mays
atgtcaacgtatccaagtcatttgaaaagctcaacaactggcgtgaggacttcctaattcaagccagcccatcagacccagagaatttcccatttgttgtgcttggtaacaagatcgatgttgatggtggtaacagccggactgtttctgagaagaaggctaaagcatggtgtgcttcaaagggaaacatcccctactttgagacgtcggctaaagag

SEQ ID NO: 29424 - DNA, 217 bp, Zea mays
gatgtgcttgcggtcgagcttttgcagcgtgagtgccatgtaaaacatccactgagagttgttccactttttgagaaacttgcagatcttgaagcagctccagcagctgtagcacggctcttttcaattgactggtacatggataggattaatggcaagcaggaggtcatgattggatattcagactctggcaaagatgccgggcgtctctctgcag

SEQ ID NO: 29425 - DNA, 217 bp, Zea mays
gtttcgctctcgccggcgtcgacggcctagggttcgaggaacgtccgtccgtccgtccggggaaggagcggtagggaggcggagatgatcgaggtggtgctcaacgaccgcctggggaagaaggtgcgggtcaagtgcaacgaggacgacaccatcggcgacctcaagaagctggtggcggcgcagacggggacgcgccccgagaagatccgcatcc

SEQ ID NO: 29426 - DNA, 378 bp, Zea mays
tggcaatcatttgactgggcccatcccaagggaactcgctggaatatctagtctcaaagttgttgatgtttcaagtaatgatttgtgcgggacgattcccacgtctggaccatttgagcatattcctctgagcaactttgagaagaacccgcgcttggaaggtccagagctacaaggcctggccatatacgacaccaactgctagagggcaccacgaagaaaagaactgctagaaagtaacgagcgaacaaggttaccagaaattgggcgatatagatttactaggtctggatctgtaatcctccctgcatagctcttattcgtaactcgctgtcggcacgaaagttggtgtgtgtattagcagaatgctttctgtcc

SEQ ID NO: 29427 - DNA, 216 bp, Zea mays
  unsure (1)..(216): unsure at all n locations
ctacncacagcgttccccttctcgcattcttctctcatttctcaccaccgccgccgctaccccctttcgacaacaccatgagggagtgcatctcgatccacatcggccaggccggtatccaggtcggaaacgcgtgctgggagctgtactgcctcgagcatggcattcaggctgatggtcagatgcccggtgacaagaccattgggggaggtgatg

SEQ ID NO: 29428 - DNA, 203 bp, Zea mays
gttgatttatccgctgcagccatgagtaagttgcagtctgagtctgtcaaggatgccatctcccagattgttggggatgccaaggagaagaataggaagttcactgagactgtggaacttcagattggtctgaagaattatgatccacagaaggacaagcgtttcagtggctctgttaagttgccccatatccctcgtcccaa

SEQ ID NO: 29429 - DNA, 268 bp, Zea mays
cacacagaagcggcggcggcggagcaaaagcaggcgaaggcgagggtgcgagggaaggtgcaccagccatggtgacgtcaacttctaccgcaactatggtaagacgttcaagaaaccaaggcgtccttatgagaaggagcgtcttgatgctgaactgaagctggtcggtgagtatgggctgaggtgcaagcgtgagcattggagggtccagtatgcactgagcaggatccgtaatgctgcaaggcacttgcatcaccttgacgagaag

SEQ ID NO: 29430 - DNA, 131 bp, Zea mays
cgcattggacattgagaagtggaaattagctagtagcagtcctaagaaaccaattgctttaagtgcaattattttgggcttggatatggttggaagagcggcatttgtattccctttgtcgttcttatcca

SEQ ID NO: 29431 - DNA, 273 bp, Zea mays
tgtgaagcacagagaatcaggcaacacaggggcagaatatttgcacttcctgaggagccggacgttgctcgtgtttggcttccaaggtataactcgcctggattggccatggctagggcatttggggacttttgtctgaaggatcatggtgtaatttctatgcctgatgtttcctatcaccacataacggaaaaggatgaatttgttgtgctggctaccgatggggtttgggacgtgctatcaaatgatgaagttgttagtactgtcagccgg

SEQ ID NO: 29432 - DNA, 157 bp, Zea mays
ctcacgcttacttacaacaggacacgccaagcatccatcaccacagagcttactgagattatatctggtgcatcagcccttgaaggataggtgaagagactatgtggattctccctttttccccatttgtgttcctctcacatgaaggcttcttttc

SEQ ID NO: 29433 - DNA, 279 bp, Zea mays
  unsure (1)..(279): unsure at all n locations
acttctccaggtaagganagggatcgtactcatggcgccgccgcagccaaagtcgggccttttcgttggcatcaacaagggtcatgtcgtcaccaagcgcgagtgcctccccgcccgtgccaccgcaacggcaaatcaacgaagacggtgtctatggtcaggggcctgatcagagacgttgctgggtttgctccttatgagaagcgtatcactgagcttctgaacgttggcaacgacaagcgtgccctgaagcttgctaagagaaagcttggaactcac

SEQ ID NO: 29434 - DNA, 199 bp, Zea mays
tgcaacggcacggcgtgcatggcgcccaccaacccgcgggacgagtaccagcactgggtcaaggacatgcgccacagcacccgggtgcgggacgaggagggctacccggccttcgcgctcgtcaacaaggtcaccggcgaggcgctcaagcactccacggggcagggccaccccgtcaagctcgtgccctacaacccgg

SEQ ID NO: 29435 - DNA, 360 bp, Zea mays
gtgagaagtgtcatggacatgagagctgtctatggaggttttgctgcagctctgagggaccaaaaggtctgggtcatgaatatcgtgccgatcgattcaccagacacgctgcccatcatctacgagcgcggtttgtttggcatgtaccatgactggtgcgagtctttcagcacttacccaagaacgtatgaccttctgcacgcggaccatctgttctcaaagctcagaaagagatgcaaactggctgcagttttcgccgaggtcgaccgtgtactgaggccacagggcaagctgatcgtgagggacaccgcggacacgataaatgagctggagagcatggccaactccgtgcagtgggag

SEQ ID NO: 29436 - DNA, 355 bp, Zea mays
cgcgtgcgaaccaagcagaccacaacaagaagaagcgtagtcgtcgccggaaggaaaggcgcggagcaagatgtcgtggcaggcgtacgtcgacgagcacctgatgtgcgagatcgaaggacagcatctcagcgccgccgccatcgtcggtcacgacgcagcgtttgggcgcagtccgagagcttccccgagttaaagcctgaggaggttgctggtatcataaaggactttgatgaacctggtactcttgcaccaactggtcttttcgttggaggtacaaagtacatggtgatccaaggtgaacctggagttgtcatccgaggaaagaacggcactgggggcattactatcaaga

SEQ ID NO: 29437 - DNA, 257 bp, Zea mays
ctgaactggagaagagacaagctgaggggagatactctgcacatttcagaggacaagctcatttctttgggtacgaaggaagatgcggccttcctactaattttgattctaactattgctatgcattaggctatggtgctggtgcccttctccaaagtgggaagacaggacttatttcgtcggttggcaaccttgcggctccagtagaagaatggactgttggtggaacagcattgacatcactgatggatgttgag

SEQ ID NO: 29438 - DNA, 110 bp, Zea mays
gctgtgcagtttgaagattgtacatttgagttgctctactggtcccaagcccgtgagccattcaatgatgaaaccattgaatacatcggatcagtcgatgctggaggaga

SEQ ID NO: 29439 - DNA, 226 bp, Zea mays
cggctcgagtgctagtgtccgtgcaagaggagataagctggcattatggactaggactgccagcaatgaagctgtccaggtaaacattggcaagaagtggaaggatgtcatcgactacaacgacaagatcacgtacactttccatgacgactctaagagagacaagcccagcagaggtgggcggtacaccgtgtaagctggacgtcaagaacgccgttgctttgga

SEQ ID NO: 29440 - DNA, 216 bp, Zea mays
cctgtaccagttccgcaacaccatcccgctgtcaaccgccgctgccgccaacttcacacgcggcgagctcgccacagcccttcgtaagaatccatacatggtcaatgttattctcggtggttacgataaggatgttggcgcctcactgtactacatcgactacattgcgaccttgcacaagatcgacaacggcgcttttgggtacggatcgtattt

SEQ ID NO: 29441 - DNA, 219 bp, Zea mays
  unsure (1)..(219): unsure at all n locations
accagccaccgccgctagaagaagagctcggcgattcgcaggtcncgcgagaagatgccgaagcagatccatgagattaaggagcttcctcctcaccgcgacgacgaaggatgcccgctcagtgaagatcaagaggagcaaggatgttgtcaagttcaacgtgcgctgctccaagtacttgtacacgctctgcgtcttcgatgctgagaacgcaaacaa

SEQ ID NO: 29442 - DNA, 266 bp, Zea mays
ctgctccattctcagccgccgccaatcccttcccgtgctccgcaaccgctgagtgagaagaagagatggccggcaagggcgatggcccggctatcggcatcgatctcggcacgacgtactcttgcgtcggcgtgtggcagcacgaccgcgtcgagatcattgccaacgaccagggtaaccgcaccacgccctcgtacgtcgccttcaccgactccgagcgcctcatcggagatgcggccaagaaccaggtcgcgatgaaccccatc

SEQ ID NO: 29443 - DNA, 210 bp, Zea mays
ggagaaattacaaaagttgttgttccacctgcaaaatctgggcatgaaaatcggtacggatttgttcattttaaggagcggtacatggctatgaaggatctgaagaacactgagagatatgaactcgatggtcagctgctggaatgttcacttgcgaaacctcctgctgataagaaggatagtactgtatcaacacctactgcaaaagga

SEQ ID NO: 29444 - DNA, 210 bp, Zea mays
cacatgggtaagccgatcctaagggacgggggaaacccggcagatagcgcgatcacgcggtcacccgaaacggaatcgggttaagatttcccgagccgggacgtggcggcagacggcgacgttaggaagtccggagacgccggcgggggcctcgggaagagttatcttttctgcttaacggcccgccaaccctggaatcggttcagccgg

SEQ ID NO: 29445 - DNA, 273 bp, Zea mays
agaaccgcagagcgtgctgatctcatcgcgtacctgaaggaagcaactgcatagttcattgacatgccttttgccatgaagagaaaaattgttttgcagtttaataaaaaaacattttagacaatttgggtcaccctgtttgaacagggtgcaaccacgtctcattattttcgttcttatggtgtccgtatggaatgcctaggtgtttagctgtgcacaaataacagttaaactttgacggctcctatttcaactgctggagaaatgccagtg

SEQ ID NO: 29446 - DNA, 254 bp, Zea mays
ggaaaaccaaccaccactcccaccaccctccgcctccgcctgcgccacagctgccgattcgaaagccctcgtcctgacccctcgcaaaaccctagctccaaccaccatgaagggcaaggccaacgcctccaagaaggatgaggccaggctccgggccggcggcggcggcgccggaaagcgcaagaaggccgccgcgagcgtgaagcccaagcgccctccctccgccttcttcgtcttcatgtctgaattcaggc

SEQ ID NO: 29447 - DNA, 202 bp, Zea mays
gggatccttctaacttgcttgcccatgaggctgcatttgcacttggacaaatgcaggatgctgaggctattcctgcactggtggcagttctcaaagatctttcgctacatccaattgtccgctatgaggcagcggaagctcttggagctattggcctggaaaagagcatccctgagttggaggaaagtctaacaactgatcc

SEQ ID NO: 29448 - DNA, 237 bp, Zea mays
gatttcttttctgacactttgattctgaccaatctctctggcctgctgcttcctgataatcgaccagttccccagtcttgctccttgcactcctccctccatctccagcattgtgttctgattcacctgctccaatggctgttctttctgctgctgatgcttccccggtctcagctatcgggattgagggctatgagaagcgccttgagatcacattctctgaggcacctgtctttg

SEQ ID NO: 29449 - DNA, 253 bp, Zea mays
ccagtgtccgccgtcgtgcgctcgctacccctctccctcgacgcctttgccggcgaagagcgcccagtcgcccaccaggatgaagtttgttgctgcctacctgcttgctgtcctcgctgggaactccagcccctctgccgaggacttgacagccattctggagtcagttggctgtgaagttgacaatgaaaagatggaactccttctgtcccaactgagcggtaaggacattaccgagctcattgctgttgga

SEQ ID NO: 29450 - DNA, 250 bp, Zea mays
ccgccgaggaagcagcaagcagcaaggtcgacatgtcgtctccgccgccggtgaagctgatcggcttcttcggcagcccgtacgcgttccgcgcggaggcggcgctgtgcctgaaagcgttccgtacgagctgatcctggaggacctgttcggcagcaagagcgagctcctgctccaccacaaccccgtgcacaagaaggtgcccgtgctcctccacggcgacggccgggccatctccgagtccctcgtc

SEQ ID NO: 29451 - DNA, 139 bp, Zea mays
caccgcctctctcaatctgataccgcagatccgtcgtccggtgagtggaagccgcacgaacccatggcctccggcgagcttgcatgcacctacgccgctctcatcctcagcgacgatggcatcgccataaccgccgaga

SEQ ID NO: 29452 - DNA, 272 bp, Zea mays
cttcggcaagtccgtcttcagccggttcagcgttctcttcaacgtcgccatcgtgtggctgtacgcctacatcctcaccatcggcggcgcttacaagaactctccgcccaagacgcaggtgcattgccgcgttgatcggtcgggccttatttcaggagcaccttggataagtgttccctatccctttcagtggggagctccgacgtttgacgccggagaagctttcgctatgatgatgacttcgttcattgctcttgtagagtcaactggcg

SEQ ID NO: 29453 - DNA, 174 bp, Zea mays
cgtcgtcaaggccatcgagaaggtgggcacccgcaacggctccacctccaaggtggtcaaggtcgctgactgcagacagctctcctagatctctctgatctggtctgttcggccgccctccctccgtcatcgtcgactccccctgcgtccgttcctttggatctgaataagatg

SEQ ID NO: 29454 - DNA, 192 bp, Zea mays
gtcatatctagctagtagctccctgaaaagttcactagagaagcatttcccggaggagccatgtctgacgagaagcaccaccaccacctgttccaccaccgcaaggcagagcgaggaggaaggcgcctccggcgaggtcgactacgagaagaaggagaagcaccacaagcacatggagcagctcggccagct

SEQ ID NO: 29455 - DNA, 199 bp, Zea mays
ctcagaccatggccatgtgcttgaagcctgcaaggacagcctgaacaagctgcagctagactatctcgacctctacctcatccatttcccagtagccactcggcacaccggagtcggcacgacttctagcgctctgggtgacgatggcgtgctggacatcgacaccactatctccctggaaacgacatggcacgcgatg

SEQ ID NO: 29456 - DNA, 172 bp, Zea mays
  unsure (1)..(172): unsure at all n locations
ganaaactctactcgccaaggctgttgccaattcaacatctgcgactttcatgcgtgttgtcggtagtgaacttattcaaaagtaccttggggatggtcccaagctagtcagagaattgtttagggtggctgatgaactttctccctcaatagtcttcattgatgagattga

SEQ ID NO: 29457 - DNA, 173 bp, Zea mays
actctgcgagtccaggagatattttcccacttcttcacgatactctcgacgagagcgtctccatggccggaaaaggagacgggccggcgatcggcatcgacctcggtacgacctactcgtgcgtcggggtgtggcagcatgaccgagtcgagatcatcgccaacgaccagggc

SEQ ID NO: 29458 - DNA, 319 bp, Zea mays
  unsure (1)..(319): unsure at all n locations
cgtacacgaagctgctctgttggctgggcgattanataaagaaatagtgganaaggttgacttcatccgtgcggttgagcgatctatagcagggatagagaaaaagcatgcaaaattgaagggtaatgaaaaagctgttgttgcgcggcatgaagtaggtcatgcactcgtgggaactgctgtagcaaacctccttcctggacagccacgtgtggagaaattgagtatattgccaagatctggaggtgcattaggcttcacgtacacccctcccgtcacagaggatagatatttactctttgttgatgaactacgtggc

SEQ ID NO: 29459 - DNA, 261 bp, Zea mays
cttgcttcctgggacggcaggttgcttggcaccccaaacgaacaggtgtggccaggcgtcggcaagctgcccaactggcacgagtacccccagtggaagccgacgaagctgtctgctcttgtgcccggcctcgacgctgatggctacgatcttcttgagaaattgctggaatacgagccggcgaagcggatccccgcgaagaaggccctggagcacccctacttcaaagatgtgaggaagggagatgcgcactgactgaag

SEQ ID NO: 29460 - DNA, 291 bp, Zea mays
tgcgtctctgcgagctaatcagctctgtgagcgtctccctagccccaatggcgagtcaactattgattgccatcagatctcaaagatgccaaatcttgcattcaccatagcaaataagactttcaccttaacaccagagcagtacatagtgaagctagagcaagcaggacaaactatctgcatcagtgggtttatggcatttgacgtaccgcctcctcgtggtcctctctggatacttggtgatgtttttatgggtgtctaccacactgtttttgacttcggcgagaacat

SEQ ID NO: 29461 - DNA, 320 bp, Zea mays
  unsure (1)..(320): unsure at all n locations
ctccnactcgcctcgtctagaagaggaaggaagaacaaagataagcgactacgcgtcactcctcgccttcctcccgcctcgagctcttcccggagcaaccggagccacagacgtcaggacagcctagcgcgttccacgccggtatgcagaaccagatcatgtgccatgcttgccggacccttctgctctacccgcgtggcgcgtccagcgtctgctgcgcggtttgccaggccatcaccaccgtgccgccaccaggattggagatggctcagcttatatgtggtggctgtcgaactttgctgatgtatactcgcagtgca

SEQ ID NO: 29462 - DNA, 319 bp, Zea mays
  unsure (1)..(319): unsure at all n locations
nanattagatgaagcannaattggtctacaaggccatgtttcagcagtgatggatattgactactcaccaacagggcgtgaatttgtcactggttcatatgatagaacagtaaggatttttaattatcttggagaccacagcagagagatttaccacaccaagaggatgcaaagggtgttttgtgtgaagtacacctatgatgggacctatttagtctctggcagtgatgatacaaatcttcgtctgtggaagtccaaagcttcagaacaacttggagttcttcttccacgggagcgcaagaagcaagagtaccaggat

SEQ ID NO: 29463 - DNA, 380 bp, Zea mays
cggcaatactgtgcatcataatgaaaatgctacaacgggccagtttgcattcaccacttcagaagctggaaactaccttgcatgtttctggatagacagcgtggagaaaggatcaggaacatctctaaatcttgattggaagatagggattgctgcaaaggactgggatactattgctaagaaagagaaaattgagggcgtagaactagagcttaggaaacttgaagctgcagtcgagtccatccatcataacttgctgtatctcaaagcaagggaagcggacatgcgaacagtgagtgagagaacgaattctagagttgcctggttcagcatcctgtcactgggagtctgcgttgccgtctctgtgctgcagctgtggc

SEQ ID NO: 29464 - DNA, 316 bp, Zea mays
ctcgccgtctgccttctgcgcctccatttcggcctctgtcccttgcaagttcaatctcacctccaaccatgggtaaagagaagtcccacatcaacattgtggttattggccacgttgactctggcaagtcgaccaccacaggacacctgatctacaagcttggaggcattgacaagcgtgtgatcgagaggtttgagaaggaggctgctgaaatgaacaagcggtccttcaagtacgcgtgggtgctcgacaagctcaaggctgagcgtgagagaggtatcaccattgatatcgctctgtggaagtctgagaccac

SEQ ID NO: 29465 - DNA, 319 bp, Zea mays
cgtggtgcagctgcctgccttcagccttccctctctttcgcgacccccccggagccggagcagagatcgccagctctaccggcgcggaggcatggcgggggccggagacaaggtggactacgtcttcaaggtggtgctgatcggagactcggcggtgggcaagtcgcagatcctcgcccgcttcgcccgcaacgagttcagcctcgactccaaggccaccatcggcgtcgagttccagacccgcaccctcgtcatcgaccacaggagcgtcaaggcccagatctgggacaccgccggccaggagaggtacagagccgtg

SEQ ID NO: 29466 - DNA, 381 bp, Zea mays
ccaatttcaagaagaagcctgtgattatcatcgtcatcggcatggccgggacggggaagacgaccttgatgcaccggctggtatgcgatacacaagcatcaaataagaggggctacgtcgtcaacctggaccctgcagtgatgaccctgccattcggtgccaacattgatattcgtgacactgtgcggtataaggatgtgatgaaggagtacagccttggtcccaatggcggcatcctcacctcgcttaacttgtttgccaccaagttcgatgaggttgtatctgtcattgaaagacgtgcagaacaattggattatgtactggtggacactcctggtcagattgagatcttcacttggtcagcttcaggagctatcatta

SEQ ID NO: 29467 - DNA, 325 bp, Zea mays
cgttgcaaagtcactggatccagtatttccagctgaatttaattacaagaagatcgaagtacttgatatcccagacactgatctgttaaagcattctgatgaatgctttggtttcatagatgaagctataagctctggaggcaatgttttggtccattgctttgctgggcggtcaaggagtgtgacaatcgttgttgcatatctcatgaagaagcatcaaatgagcctcgaaagtgccttgtcactagttagaagtaaacgacctcaagtggctcctaatggggggtttatttcccagctggagaagtttcagaaatccttgcaa

SEQ ID NO: 29468 - DNA, 309 bp, Zea mays
aagcatggcagtgttgttcttgcagcaatatgtagctccacaaacacatcaaatcccagcgtcatgattggtgctggccttgtggcaaagaaagcctgcgaattgggccttgaggtgaagccatgggccttacccctggatctgtggttgctaccgagtacttgaaacatagtggccttcaagattatctgaaccagcaagggttccatgtcgctgcgcatggctgcgccacttgtgtgggcaactctggtgacctggatggatctgtatccgctgctatcacagaaaatgatatcgttgctgctgcgg

SEQ ID NO: 29469 - DNA, 286 bp, Zea mays
tgttggtgccacttagatctgccacaactgggagcaaggtcttgttgaccactcggatgaaactagtagctgaggttctgaatgcgggttatttggtttcgcttgatggattaagaagcagtgattgttggttgctgttgaaggaagttgctttgggtggagaaaccatggattttccacctgagttgcaagaggttgcaggaactcttgttgcaatggtgaagggttcacctttagctgctaaagctattgggcaaatggcaaggagcaccaggagcacacggaa

SEQ ID NO: 29470 - DNA, 315 bp, Zea mays
gcgcacatggcggaagaaaccaacataagaagggaggaagaggagttcagcaccggtcctctctcggtgctcatgatgagcgtcaagaataatacccaggttcttatcaactgccggaacaacaagaagttgcttggtcgcgtgcgagccttcgatcggcactgcaacatggttcttgagaatgttcgtgagatgtggaccgaggtaccgaagaccggtaaaggcaagaagaaggctctcccggtgaacaaggacaggttcataagcaagatgttcctccgcggggattcggtcatcatcgtcctcaggaacccg

SEQ ID NO: 29471 - DNA, 302 bp, Zea mays
gtgttcccaaggaacagatctggcgcaacaagcctccatggcgcattggcagagcatcatcaagatcttgacaaattctctcgatgttctgaaatcaaattacgtgcctccgttcctgatctgcaagatgttcacgcaagtcttctcgtttatcaatgtgcagctttttaacagccttctgctgcggcgtgagtgctgctcgttcagtaacggagagtacgtgaaggctgggctggatgagctagagcattggtgcttttggctgactgaagagtacgcaagatctgcatgggacgagctga

SEQ ID NO: 29472 - DNA, 307 bp, Zea mays
aaccattcctcccaacaccacctcgcctgcgatcttcgtagcctccgtcgcgtcgagcatcgatcatgtcggcctactgcggaaagtacaaggatgagctcatcaagaatgctgcctacattggcacccccggcaagggtatccttgctgctgatgagtccactggcaccattggcaagcgcctttccagcatcaatgtcgagaacgttgaggagaaccgccgtgccctccgtgagctcctattctgctgccctggtgctctccagtacatcagcggtgtgatcctcttcgaggagaccctgtacca

SEQ ID NO: 29473 - DNA, 299 bp, Zea mays
gacgagactcgcagctagctgacacggccgagaagcagcttgcattgcaggcgtagtacgtacccagcagcagctagcactagcagtccatcggagcgacgatggtgagaaggacggtgctggcggcgctgctggtggccgccgccctcgccggcagcgcgcgggcgcagctcaaggaggggttctacgactactcctgcccacaggcggagaagatcgtcaaggactacgtgaaggcgcacatcccccacgcgcccgacgtcgcctccaccctgctccgcacccacttccacgactgc

SEQ ID NO: 29474 - DNA, 303 bp, Zea mays
cccagatataaacaataagcctaacgatagcgttaggggtcagctgatgaaaatagataccgaacctcttcagcacctctccaatgatcccatgtagggggaatcttaatccagcctttaaaaagctcttgaaaataacaatttcatctttctccggttttggggtagtctcttctcccccgaagcgcaaaagcttcttctgattttcagtgaaaaagcccgattttaccatcttggacagatcagccttcgaaacagtagattttccgaagtccaagtggctcggcttgcttggcatggcaa

SEQ ID NO: 29475 - DNA, 304 bp, Zea mays
ctccattcctcctcctgcaagccgcaaaggaatcaggcggagtggcgcgatgggagagcaggtcgtgacggagcagatccagcggaagctgtaggaggtcaacgctaccgtccaacagcacctcgcgggtgtccaggaccacatcaacttcaccatgcagcaagcatacttcaagtgcgcatatggttgctttgatcggcgccatactcaggaagcgatcagcaactgtgtggagaattgtagtgtgcctgtccttgctgccaacaatatttttgagagtgagatggccaagtttcagggaatg

SEQ ID NO: 29476 - DNA, 304 bp, Zea mays
cgacgggctgtggtcggcgtgcggcggcgagcgcatcatcgtgttcaccaccaaccacaaggacaagctggacccggcgctgatccggcggggcaggatggacatgcacatcgagatgtcctactgctgcttccagggcttcaaggtgctcgccaagaactacctgggcgtgcaggagcatgacggcgggcaccaggagctgttcgttgacatccgtcggctgctggaggaggtggacatgactcccgcggacgtggcagagaacttgatgcccaggtccaagaccaaggacgccgacgcctgc

SEQ ID NO: 29477 - DNA, 301 bp, Zea mays
gcagtccggctcgtcactcgctgcactgcagcaggtcgcctgtgcctgtggctgccatgcctgcctggcctacaactacaagagcgagcggacaagcgccacgccacgggcatgccaagccagttcacgagcccggccaagaacccaagcacggccaagccaaaccgcccttctcctcctggctcctcatgcctcgcttgactcctcgcgccaatttcgggaaacaggccatgccgggagacgggggagcagctggaagcgcgaggtgggtttgcgcggtcctttcggtgttcccgcttct

SEQ ID NO: 29478 - DNA, 301 bp, Zea mays
gacgaggaagggtaccggccttcgcgctcgtcaacagggtcaccggcgaggccatcaagcactcccagggcgagggccacccggtcaagctggtgccctacaaccccggctaccaggacgagtcggtgctgtggacggagagccgcgacgtcggccacggcttccgctgcgtccgcatggtcaacaacatctacctcaacttcgacgccttccacggcgacaaggaccacggcggcgtgcgcgacggcaccaacatcgtgctctggaagtggtgcgagggcgacaaccagcgctggaagat

SEQ ID NO: 29479 - DNA, 304 bp, Zea mays
cgattctcgtccgatgtgtacgtcgggccacccaagggcaacgactggttcgagaagcagacggcaggcacgctcgacatcctgtgccctccttggatggattggttccatggcggcctgcagtttcagattgagcaccatctgttcccccgcctgcctcggtgccaccttcggaaggttgcgccggcggtgcgtgacctttgcaagaagcatgggctgacctattccgcagcctccttctgggacgcaaatgtgcttacatggaagacactcagggctgccgcattgcaggccaggagcgcca

SEQ ID NO: 29480 - DNA, 279 bp, Zea mays
  unsure (1)..(279): unsure at all n locations
aanaaatcatggatctcaaatcaccggcaaatggtaccccacgttcgcacgacaagcgcaccaacaaagaaactcagctcgagttgacgttggtggttgagaccgagatgtcaggcgcttctagtagtagtgcagtggtcgtcacgacgttggtgcatggtgatgacttgtatgcagtccgaggtgaacttcctcgggaggctttcgcatcccaatctggtgaggctgctggggtactgctgggaggacaaggagctcctgctggtgtacgagtacatg

SEQ ID NO: 29481 - DNA, 295 bp, Zea mays
ctggctgctcgacgtgggcaacaacggcacgcaggggccctgcagggcgttcctcgccgacctcacagagaatgacccaaggaggactcggatcgctaatgcatacttttcactcttcatggccctgggaaacatacttggatatgccaccggagcatacagtggatggtattcgatatttcctttcactgttacagagtcctgcggcatcagttgtgccaaccttaagtctgcctttcttcttgacattattgttctggtcatcacaacgtacactactgtaacatccgtgcaa

SEQ ID NO: 29482 - DNA, 293 bp, Zea mays
ccgtgcttcaactaagaacaagggcagaatggctcgttacctggcaaacaaatgctcgattgcttcacgcattgactgctactcggaggctagcacctctgtctttgggcaaaagttgcgtgacaagtcgaggagagactggaattctatgacaagggtgttgcgcctcgtaaaaaccttgatgtgatgaaagccgctattgacagcatggtcaatggcacctcaatggatgatgatgatatcgagaagaccgatgcatctcccaagaaaagcaagaaaaagaagaccaaaac

SEQ ID NO: 29483 - DNA, 291 bp, Zea mays
ccgtggtcctcctgcttggccatttaccgagctgcgcgcgcgcggggctgctggagtccaacccgggcctggcctacaacttctacaagaacagctcccccagcgtggactccatcgtccgcagcgtcacctgggcgcaggtcgccgccaacgctgcactcccggctcgcctcctccggctccacttccatgactgcttcgtcaacggctgccacgcgtcgatcctggtggacaccggcgcagagcgacaagactgcgccggcaacctgtcggtgggccggtactaggtga

SEQ ID NO: 29484 - DNA, 289 bp, Zea mays
cggaacctctccaagctcaccctgttcaggcagttctacgtcgtggtgatcgggtacctgtacttcactaggatcgtcgtgtatgcgctcaaggcagttgccagctacaagtaccggtgggtgagcatcttggcagaagagatggccaccctggcgttctatctgttcatgttctacacgttcaggccggccgagaagagccactacttttctctcgatgacgatgaagaagaggccgcagagatggtgctccgagaagaggaattcgagctatgaagagatgcagcga

SEQ ID NO: 29485 - DNA, 289 bp, Zea mays
ctctcgttgcctactgttgcctgcctgccatttgcctgctcacaggaaagttcattatacctacgctgtccaacgctgcaacgatatggtttcttggcctcttcatgtccatcatcgtgacgagcgtgttggagctgcggtggagtggcatcgggatcgaggactggtggcgcaacgagcagttctgggtcatcggaggcgtgtccgcgcacctgttcgccgtgttccagggtatcctcaagatgattgccgggctggacaccaacttcacggtcacggcaaaggccac

SEQ ID NO: 29486 - DNA, 287 bp, Zea mays
cggctcgagagcttacgctgctggggttatgggcgagcccgttcgtgctccgggcgcgcatcgcgtcagcctcaaaggcctcacctacgcttactccgaggagaacctcgacgacaagagcgagcttctcctcagctccaaccccgtgctcaagaaggtgcccgtgctcatccaccacggcaagcccgtctgcgagtcccagatcatcgtgcagtacgtcgacgaggctttccccgccgccgcacctaatttccttccatccgacccctacgaccgcgccattgctc

SEQ ID NO: 29487 - DNA, 289 bp, Zea mays
gtcggaaggtttcgaggaactcccgggctcgaggagatcgggacgatgatcggagggcgcgctctgctgctgctcctggtctcggcgcagctcgttcagatccgcgcctctgacccgctgcagtacgagccgttcgatgaggacttcgagggaagatggatcgtctccaagaaggatgaataccaaggtgtatggaagcatgccaagagtgatgggcatgaggactatggtctccttgttagtgacaaagcaaggaaatacgccataatcaaggagcttgatgagccag

SEQ ID NO: 29488 - DNA, 242 bp, Zea mays
aaaatcccctgcaacccgacccatggccatgggcaagctcgaggagaggacgcgtgcgttctggacgaaccgatggcttgtgctcgttggggccatgtggatgcagtccatggccggcaccacttacatcttcggcgccatctcgccggtggtcaaggccaggctgggctacgaccagccgcaggtggccgcgctgggtgtcgccaagaacgttggcggctgcctcggcctcctcgccggcg

SEQ ID NO: 29489 - DNA, 290 bp, Zea mays
gtttcggcaaacaatgtgggctgctgagtaagaggacatatctggtgcacataaaaacattggtgcacatggtgcatatattaaattatcaccactcattttagatctaacgtctttagttgatcattcaatttacaaataacaccttccaggcttccaccactacacaccaccacgttggagggtgcttttagcaaaatataccaaacaactagaaacgttagatctaaaatgagtggtgatgatttaatatgtgcagcatgtgcaccaatcttccatgtgcattagat

SEQ ID NO: 29490 - DNA, 288 bp, Zea mays
ctgtttcttctcaaagactgagaaagaggagctttacctcaatttggtgcttgagtatgtaccggagactgctcatcgtgtcatcaaacattacaacaagatgaaccagcgcatgcctttgatttatgcaaaactgtatatgtatcagatttgtagagccttggcatacattcacaacagcattggagtgtgccacagggacattaagccgcaaaatctcctggttaatcctcatacccatcagctaaaattgtgtgactttggcagcgcgaaagttctggtaaaagg

SEQ ID NO: 29491 - DNA, 290 bp, Zea mays
caaaccttggtcttgttgacaaccactccaggccatggttccataacgtttccgcaatggagtggctttctttcaggctaaacatgctatccaactttgtctttgccttttctttgactctgctagtgagcctccctgaaggttttataaatccaagtattgctggacttgcagtgacttatgcattgaacctcaactcacagctggcatccataatttggaacatttgcaacacagaaaacaaaatgatatcagttgaaagaataatgcagtactcgaggatccctagt

SEQ ID NO: 29492 - DNA, 240 bp, Zea mays
  unsure (1)..(240): unsure at all n locations
cgttcncgttacacgcaaaggctactggcagtttgacatgggagatcttattattggtggccactcaactggtttctgtgctggtggctgtgctgctattgtggactcagggacttcattgcttgctggtccaactaccatagtggctcaagtcaatcatgcaattggggctgagggaatcatcagtacagaatgcaaagaagtggtgagcgagtatggagagatgatccttgagttgct

SEQ ID NO: 29493 - DNA, 279 bp, Zea mays
cgagataggttgatgctggtgctgaccttattgttacacaacttttctatgataccgacatctttctcaagtttgtgaatgactgccgccaaattggtattacttgtcccattgttcctggcataatgccaataaataactacaaaggtttcctgcgcatgactgggttctgcaaaactaagataccttctgagatcactgctgcactagatcctatcaaagacaatgaggaggctgttagacaatatggaatccaccttggaactgagatgtgcaaga

SEQ ID NO: 29494 - DNA, 130 bp, Zea mays
cggcgtgtttgtgagtgcctattgtgagaggtgtaaaatttgttggtgatggatatacccattgtgaagcttccggtgttggtaggtgtgagatcagtaatggagggtgctggcaggaaactaaagatgg

SEQ ID NO: 29495 - DNA, 272 bp, Zea mays
  unsure (1)..(272): unsure at all n locations
ggcctgcggaggagcggcaagagctgccggctgcggtggctgaactacctgcgcccggacctcaagaaggagcccatctccaagcgcgaggaggagaccatcatctccctgcagcagtcgctcggcaaccggtggtcgacgatcgcggcgaggatgccaggcaggacggacaacgagatcaagaactactggaactcacgcatcaggaagcgcctcaacgcctngcgctccagagctgcangctgcgacggcggtgacagcgcggccgagcc

SEQ ID NO: 29496 - DNA, 372 bp, Zea mays
cgtccatcgcgcctccctccggtctgcgctcccacagcctcacccctgcgcccccgccgattcgcgtcgccctttgttggaaggaacgatggagcagaccttcatcatgatcaagcccgacggcgtccagcggggcctgatcggggacatcatcagtcgcttcgagaagaaagggttctacctcaaggggatgaagttcatgaacgtggagaggtccttcgcgcacagcactacgctgacctttccgacaagcctttcttccccgggttggtggagtacatcatttccggccccgtggtggcgatggtgtgggaggggaaggacgtcgtgttgactggccgcagatcattggggccacaggcttgggaggca

SEQ ID NO: 29497 - DNA, 378 bp, Zea mays
ctcctcgtctcctcatgggacaagacggtgcggctctacgacgccgacgccaacgtgctcaagggggagttcatgcaccccggggccgtcctcgactgctgcttccacgacgactcctcgggctttagcgccggtgccgaccacaccgtgcggaggttggtatttagctcgtccaaggaagatgttttggggcggcatgatggtccggttcgttgcgtggaatactcttatgctgcaggtcaagtcatcaccggcagctgggataaaactgtaaaatgctgggatccaagaggagttagtggaccagagcgcacccttgttgggacatatgctcaacctgaacgtgtatattctctttcgttagtaggaaataagttg

SEQ ID NO: 29498 - DNA, 377 bp, Zea mays
  unsure (1)..(377): unsure at all n locations
cgtgcttgtccaggtccaaccgtccaaggataaaaaatgagcacgaacctgggaggagcctcttgcttcggcttcggcttgactcagatgcagcccgccgccgttagctccggttgccgcctgctcgcgccgcgacacttcgtcctcccagtcgccggcgcgcctgacggcggtgctggagcaggtggaccagttgctaagccaggggaacgacatggccgcgctctccctcgtgcgcagtacgcaggggggtgacggcgggctccgggcctttggcgccgccaggccaggtatattttggtggtggggtgagaacttggttcttgatacaattggtcactatctcagccagnagtatcacaacagagttatccagc

SEQ ID NO: 29499 - DNA, 295 bp, Zea mays
gcgacttatctcgagttaccagtgtcgcatccttctttgtcagccgagtcgacacccttatcgacaaaatgcttgagaagattggaacacctgaggcacttgccttgagagggaaggctgccgtcgcacaggccaaactagcaaatcggctctaccagaagaaattctctggcccgaggtgggaggcgttggccaagaaaggtgccaagaaacagaggttgttgtgggcatccaccggtgtcaagaacccagcttatcccgacactctttacatcgacagtctcattggacctga

SEQ ID NO: 29500 - DNA, 358 bp, Zea mays
tataaagctcctccattgcgccgccgccactctcctttcggaggaggcggaccaggtaagcagcagcaggaaccctagcaccgccgcatccgcagccatgggtatcgacctcgttgccggtgggaggaacaagaagaccaagcgcacagcgcgaagtccgacgatgtttatctcaagctccttgtcaagctctaccgtttcttggtcaggaggaccaagagcaacttcaatgctgtcattctcaagaggctcttcatgagcaaaaccaatcgcccaccaatctccatgcgccgccttgtcaagttcatggaaggaaaggatgagaacattgctgtgattgttggcacagtcacagatg

SEQ ID NO: 29501 - DNA, 277 bp, Zea mays
cttagcacttcctgataatgccaacgggaaccttcaagggaattcagaaagtggagaactggctgaggccgaggagcttgtcaaggaaaaggtctctaaaaatctcaccagccctcttgaagtcctttggaagtccttcagtcttgttttctttgctgagtggggagatcgctctatgcttgctacaattgctttgggtgctgctcagtctcctttgggcgttgctagtggagccattgctggacacttgattgcaacagcctttgctattcttgga

SEQ ID NO: 29502 - DNA, 352 bp, Zea mays
ccatcatcatggcctcagaatggaaacattgaactgattgatctcaaggtccgctacaaggacgatctaccattagttcttcatggtgtaagttgtatgtttcctggcgggaaaaagattgggattgtagggcgtactggaagcggtaaatctactcttattcaggcccttttccgcctaattgagcccactggagggaagattataattgacaacattgacatctctgcaattggccttcatgatctgcggtcacggttgagcatcattccccaagaccctacattgtttgagggtactatcagaatgaaccttgatcctcttgaggagtgcactgattcagaaatttggg

SEQ ID NO: 29503 - DNA, 306 bp, Zea mays
  unsure (1)..(306): unsure at all n locations
ctcagatccaaagaatactgtcttcgtagtcagtgggcggacaaggatgaactggctcgatggcttgagccctgtgaaaggctggggatctctgcagagcacggctacttcacaaggtggagcaggtattccccatgggagtcacccgacctgaaggtagactatggttggaaaaagatggttgagcctgtgatggacctttacgtggctgtaactgacgggtcatccgttgagactanagaaacagcattggtctggcactacgagggaactgatccagttttcggaccaagtcaggccaaggag

SEQ ID NO: 29504 - DNA, 359 bp, Zea mays
catcacttcttcctagtcgttcttactcaacacattattcgatcttgagtggaagcaagcaggcagacatggcggcggctactgcaccaaagacgatgccgtcgtccgttttcgccgccgcactgctgctcctagccgcggcggcgtgccaggccagcccttactaccctctggagctagggtactaccgttacacttgtccccaggccgaggctatcgtgaaggccagcatggagaaggccatcgcccagaaccctggcaatggcgccgccgtcatccgcatgctcttccatgactgcttcgtcgagggctgcgacgcttccgtgcttctcgacccgacccgttccagccgacgcgga

SEQ ID NO: 29505 - DNA, 289 bp, Zea mays
  unsure (1)..(289): unsure at all n locations
cttccctgaccgcatgcccaccgagtgngccgaccgccacgctgctgagaaccggatgcgcctccacgccctacgcgtgatccgtgagaggaagatggatggtgtagttgttttcgcggacgacagcaatgttcatagcatggagctgttcgatgaggtgcagaaggtccagtggatgggtgctgtgtccattggaatccttgcgcatactggaactgcagaccaacttcggctcagcgaggaggacaagcagaatatgcctctcncagtccagggccctgcttgcaac

SEQ ID NO: 29506 - DNA, 356 bp, Zea mays
aaaattgtcatcccctcagaagtgtcagttgacttgattgatggtggtagcactgttgtcaaaggcaaaaacataataattgcaactgggtctgatgtaaaatcacttccaggaataacaattgagagaagaaagttgtttcatctactggtgcactgtgcttgtcagagatcccgaagaaactggtggtaattggagcaggttatattggccttgagatgggttcagtctggaaccgccttggttcagaggtcactgttgttgaatttgcgccagatatagtaccatcaatggatggcgaagtcaggaagcagttccaacgcatgctagaacaacaaaagttcaagttcatgctc

SEQ ID NO: 29507 - DNA, 180 bp, Zea mays
gcagatctcctcgcgtcgctgccgtggtcgacgcggctcaagatcgccgtcgggcggccaaggggctggcgttcctgcacgaagacgagacgcccgtcatctaccgcgacttcaaggcctccaatattctcctcgactcggtaataaagaagcccgcctcaccaagtccaatctcttctc

SEQ ID NO: 29508 - DNA, 359 bp, Zea mays
  unsure (1)..(359): unsure at all n locations
atttgatttcgcttcttcacggatcggatagatgtttgcattgcatggcgaacanggtgttcgtggtgggtcacgactggggcgccatcatcgcgtggtacctctgcctgttccggccggaccgggtggcggcgcttgtcaacaccagcgtcgccttcatgcgccacatcttcgtccgcgccgccgccgccgccgtcacgcccatcgactacttccaccgcacctacgggcccacctactacatctgccgcttccaggagcctggtgtcgcagagaaggagttctcgccggccaacgccgggtacctgatgaagcggatcctgtgcaaccgcttcacctcctcggcggccggcgacgac

SEQ ID NO: 29509 - DNA, 301 bp, Zea mays
ctgctctcccccacctcccggtccggcagcagagagcgggggtgcagagagatcgagatccggaggccgcgagtgggagcgccaccaccagcgtctgcggcaatggcgggcacggtgacggtcccggggtcgtcgaccccctccacgccgctgctcaaggacgagctcgacatcgtgatcccgacgatccgcaacctcgacttcctggagatgtggcggcccttcttccagccctaccacctcatcatcgtgcaggacggcgacccgaccaagaccatcaaggtgcccgagggcttcgact

SEQ ID NO: 29510 - DNA, 253 bp, Zea mays
aatgcctcgcagcgaagagccggaatggctcgagcggatcaatgggccagtgcctcaagaacccattgtggtctctgttgcagacaagttgcagaaaacgcctgcccagtcgctctacgctggggaatccaaatgggccatagtgtactcccgaaaagcgccaatgagtccaggattaaggagaacattgacatatttggctggtctattcctgaagatttgatggccaagttctctgaaatcaaacaggtca

SEQ ID NO: 29511 - DNA, 303 bp, Zea mays
aggctcgaggatcaagcttctgaagtatgttaacaagcatgatccagctgataaataccaccttttgcgtctgtaatgattacttctactatcgggaacatttgctgatagtactgtgaacttctgaaggcaaatctgtatgagtttcagaaattcaacagagaatcagggggtgaggtttacttcacaatgccaagactccagtcaatagctattcagtgtctggaggcactgcagtttctgcatggtctcggtctaatccactgtgatttaaagccagaaaacatattggtaaagagctac

SEQ ID NO: 29512 - DNA, 294 bp, Zea mays
ctacgattgattgttctaagcatcttcttgcactaccggatcacaaatcctgtgcgtaatgcatacccactgtggcttctatctgttatatgtgagatctggtttgctctttcctggatattggatcagtttccaaagtggtttccaatcaaccgcgagacttaccttgatagactcgcattaaggtatgaccgggaaggtgagccatctcagttggctgctgttgacatttttgtcagtactgtcgacccaatgaaggagcctcctcttgtcactgccaataccgtgctatcc

SEQ ID NO: 29513 - DNA, 299 bp, Zea mays
atgcagcagccttgcaatgagtgcaaggggactggagagagcatcaatgagaaggaccgctgcccagggtgcaagggtgagaaggtcgttcaaacgaagaaggttcttgaggttcatgttgagaaggggatgcaacacaaccagaagatcaccttccctggtgaagctgatgaagcgcctgatactgtcactggagacattgtattcgtcctccagcagaaggatcactccaaattcaaaagaaagggtgaagatctcttctatgagcacaccttgtctctgaccgaagcactatgtgg

SEQ ID NO: 29514 - DNA, 299 bp, Zea mays
cagccagaaccagattcgacccgagttcgcgacgagagcacgagatggcgatgcggaccgcgctgacctccctccccgcgcgcctgcagcccctgcgccccccgcggcgacgggcggccggcgcctcctcagcgacgggaaggggcgcgtgctcagcgaggaggagcgcgccaaggagagcgtctacatccagaagatggagagggagcggcaggagaagctcaagaagaggctcgagcaggagaaggccgactccgacaaggccaagcccgccgacgccgacaaggccgagggatcta

SEQ ID NO: 29515 - DNA, 298 bp, Zea mays
caaagtcccaaaggccgccgccgcccgccagcccaccatggccgcgcagtccttcctcctcgccgccactgccgccgccaggtcccccgcggtcttcgccgctccctattcctccgcacgccctttccactcggtccacttcgtcgccggcccgtggggcgccgccgccgccagggcgctcgtcgtcgcggacgccactaagaaggccgtagccgtcctcaagggcgcgtctgaggtcgagggcgtggtcacgctcacgcaggacgacgatggacctacaactgtgaatgtccgtatc

SEQ ID NO: 29516 - DNA, 296 bp, Zea mays
gctatagtagctcccttgagaagcatttgccggaggagccatgtctgaggagaagcaccaccaccacctgtttcaccaccgcaagccagaggaggagggcgcctacggcgaggtcgactacgagaagaaggagaagcaccacaagcacatggagaagctcggcgagctcggcgccatcgccgccggcgcgtacgccctgcacgagaagcacaaggccaagaaggacccagagaacgagcacgggcaccgggtcaaggaggaggtggccgccgtcgccgccgtgggctccgccggct

SEQ ID NO: 29517 - DNA, 190 bp, Zea mays
  unsure (1)..(190): unsure at all n locations
cgctgtttatgattacgaagacaagatcaactttgcagtgttcccatctctccaaggtggccctcacaaccaccagattgctgcacttgctgttgctctacagcanactatgtcgcctggcttcaaggcctatgcaaagcaagtgaaggccaatgctgttgcaattggaaactatctcatgagcaagggc

SEQ ID NO: 29518 - DNA, 293 bp, Zea mays
ggcggcgcgggcggacaaggagcaggcggaggaggagctgtgccaagccacaatgggtatctcgcgtgactcgatgcacaagcgccgggccaccggtggaaagcagaaggcctggaggaagaagcgaaagtatgagcttggtcgccagccagccaacaccaagttgtcaagcaataagacagtgaggagggtccgtgttcgtggaggtaatgtgaaatggagggctcttcgccttgatactggtaactactcatggggaagtgaagctgttacccgcaagacccgtatcctcg

SEQ ID NO: 29519 - DNA, 263 bp, Zea mays
catccacaagagcgtaaaatacaatgtgtgggcaagcacaaccaacggaaacaagaagcttgatgctgctttaccaagaagctcagtcaaagggatctgcatgccctatattcttgttcttctcagtgaatacaagtgggcagtttgttggtgttgctgaaatgactggcgccgttgattttgagaaaaccctagagtattggcaacaggacaagtggaacggctccttctctgttaagtggcacattgtgaaggacgtgccc

SEQ ID NO: 29520 - DNA, 283 bp, Zea mays
tcgagcgcagagaatccccaagcaaacaaacagggtagagggagaggagaggagaggagaggagaggttgggtctgggacaccatggctccgatgaagctgtacggggcggtgatgtcgtggaacgtgacgaggtgcgcaacggcgctggaggaggctggctccgactacgagatcgtgcccatcaacttcgccaccgccgagcacaagagccccgagcacctcgtccgcaacccgtttggtcaggttccagctctgcaggatggtgacttgtacctcttcga

SEQ ID NO: 29521 - DNA, 280 bp, Zea mays
gtgaaggcggaagggaggagatggcggcacggatgggcgcacggcgacttccgggtcaggggtggcagcgttgggggtcggatcgaccgactggtggtggagaacttcaagtcgtacaagggtgagcagacgattgggcctttcgtcgacttcacagccatcatcggccctaacggcgccggcaagtccaacctgatggacgccatcagcttcgtgctgggcgtgcgctcaacgcaccttcgaggcgcgcagtcaaggacctcatttacgccctcgacga

SEQ ID NO: 29522 - DNA, 300 bp, Zea mays
ggaggttcggctgggaacaagttccgcatgtcactgggtctaccggtggcggccacggtgaactgcgcggacaacacgggcgcgaagaacctctacatcatctccgtcaagggaatcaagggccgcctcaaccgcctcccgtccgcctgcgtcggcgacatggtcatggccaccgtcaagaagggaaagcccgacctcaggaagaaagtgatgcctgccgtcatcgtccgccagcgcaactcgtggcgtcgcaaggacggtgtctacatgtacttcgaagataatgctggagtgattgtg

SEQ ID NO: 29523 - DNA, 379 bp, Zea mays
  unsure (1)..(379): unsure at all n locations
gacgagatcaaggccgcgctggagcacgcctgcccgcgcaccgtctcctgcgccgacatcgtcgccgtcgccgcgnaggactccgtcgtcctggtacgtaccaagcagctaatgcagagcaataatggtttatttatgtatgtataaattactccggtgacgatggctggttgcatgcgctgcaccacagaccggcggacccggctgggaggtgccactggggaggacggactcgctgacggccagcctgagcggctcgaacaacctcatccctgctcccaacgactctctccccaccatcatcggcaagttcgccaaccaaggcctcgacatcgtcgacctcgtcgcactttcaggtacgtacgtatacacacagtag

SEQ ID NO: 29524 - DNA, 376 bp, Zea mays
  unsure (1)..(376): unsure at all n locations
gctctcncctcaccgcctccaggagatccgccgcttcttcgaagactacaagaagaacgagaacaaggaggtggccgtcaacgacttcctgcccgccgccgctgcccgcgaaccatccagtactccatggacctgtacggccagtacatcatgcagaccctgcggcggtagagcgtgtcctaccagatcccatgcgagctgagctgacgcaagagcacagatcgacagaatccttgtggtctcgtctcatgcatggatagccaggtcacatggcttgtcgacgaccatgcatctcttcttcccagcgattttagcctgtatcttcccttatttatagtcttttggggttggtggaatctgtccacagtgtggtttg

SEQ ID NO: 29525 - DNA, 366 bp, Zea mays
  unsure (1)..(366): unsure at all n locations
gccagcgcttcatcgcgctctccaagatcgtcncgggcctcaagaagatggacaaggcatccgtgctcggcgacgcgatcaagtacgtgaagcagctgcaggaccaggtgaaggggctggaggatgacgcccggtagcgcccggtggaggcggcggtgctggtcaagaagtcgcagctgtccgccgacgacgacgagggctcctcctgcgacgacaactccgtgggcgccgaggcctccgccacgcttctgccggagatcgagagcccggctgtcgggccgcacggtgctggtgagggtccactgcgacaaccgcaaggtggtgctcatcgccgccctctccgaggtggagcgcctcggctctccg

SEQ ID NO: 29526 - DNA, 375 bp, Zea mays
ctccgagccaagcgtgcccacgccgggatccagccctcgcctggccatcctctcctcggacggtcgcgcctggagctcctcgccgagcgcccccacgccgggccacctcgggcaccggagcgccactaccaagggccgaccgaaccagcaccgggggcgagccatagtctggtgccaagcgaccgcgccggccgagcgcgctcaccgaggagccgccgggtgggcttcttgcatcgcgccatggctgccatgccgcggtcggcgtccgtgcccgagacagcagtcggtgccatagccacctgccatggtccagtcctgcgccgcaccaagcgccatgggccgactggatcttgcccacaccggagatgctccaag

SEQ ID NO: 29527 - DNA, 345 bp, Zea mays
gtcgtcatcaacggcagggagggcgaccaggtcgagaaggccagcgcgtggctcaagaagtacgagaggaagcttgaggagaagcgtgccaaggcgatggagaaggcgcagaacgaggtggccaaggcgcggcggaaggcggaggagaagcgcgcgtccgcggaggccaagcggggcaccaaggtggcgcgagtgctggagctcgccaacttcatgagggccgtggggagggcgccctccaccaagcgctccttcttctgaacccaccggcctcttcttcaccagttcctctgtcttgccgccgccgcctgtgcagttcagttcagttcagttgtcctgtgggtc

SEQ ID NO: 29528 - DNA, 367 bp, Zea mays
cggctcgaggtggccatccaggccgttctttccctgtacgccagtggtcgaacaacgggtattgtgctcgactctggtgatggtgtgagccacaccgtccctatctacgaagggtacacgcttcctcatgctattcttcgattggaccttgctggtcgtgaccttaccgacaacctgatgaagatccttactgagaggggttactccttcactacgactgccgagcgagaaattgtcagggacatcaaggaaaaacttgcctacgttgcccttgattatgaacaggagctggagactgccaggaccagctctagtgttgagaagagctacgagctgcccgatggccaggttatcacaatcggtgcag

SEQ ID NO: 29529 - DNA, 355 bp, Zea mays
  unsure (1)..(355): unsure at all n locations
gacgccgccggactgccgtgcccagcgcccgtgaccatcccatcccatccggtcggtcgtacatgaaggaccgccgtggcagctcctccgtcggcggcggcgagcgcttcgccgtcttccccttctccatgggctgcatgtcgcagtccgccgtgtccgtcgccgaccccggcgacaagaaggcgcnaggggacccgtcctccactgccgccgccacggtggctcgggcaggagcaggttcatcggaagaaggcgccggcgaggccatgacgaaggagaaggccgtggcgtcgtcggcggcggcggcgacggctacggcgccgggtctcgtggcggccggggtgtcgaggctgat

SEQ ID NO: 29530 - DNA, 372 bp, Zea mays
aacgagcaagggccgcagccggagctccaatggcctccttctcctccctctctgcctcctcctccacctccaccccgtccttcaacctccccgcaaaaacctccgctggcacaggctccctgtcattccacagggcgagggagtcgcagaagtccagggccaggatggtgacggtgcgggcggaggcggttgacacgaccatcagcccgcgggtgaatgcgctcaggccgtccaagaccatggccatcaccgaccaggccacggcgctgcgacaggccggcgtgccagtcatcggactcgccgctggggagcccgacttcgacacgccagccgtgatcgccgaggctgggataaatgccatcagagatgggg

SEQ ID NO: 29531 - DNA, 338 bp, Zea mays
ctacactgttgggaaggagattgtcgatctatgcctggaacgtgtgcgcaactctgcagacaactgcactgggctgcagggattcttggtgttcaatgctgttggtggtgggactggctctggacttgggtcacttttattggagcgcctttcagttgattatggcaagaaatccaagcttggtttcaccatttatccttccccacaggtgtcaacagctgttgtagagccatacaacagtgtcctctccacccactccttgcttgagcacactgatgttgcagtcctcctggacaacgaggctatctatgacatatgccagaggtcgcttgacatcg

SEQ ID NO: 29532 - DNA, 351 bp, Zea mays
agccttggctgtgctcgcatctgcatcttctgttagcaaggagcgtcaagagtttctgagcctcgtcaataaagagatagagctatataactccatgctcaaaaaagagggtactgaaggtgaagaagcagctaaaaaagcatatatagccgctagggaagacccagacaatgatgctgaggctgctgcagaagaaaaggtctcgtcggcgttgattgagaaggttgatgctatgcttcaagaattagaaaaggagattgatgatgtggatgcagcaattggaaaccgtggtccctatcaagcagctgccaaggtgactcctgaggaggtggccgcagctgctgcctatct

SEQ ID NO: 29533 - DNA, 340 bp, Zea mays
acctctcaaaccctagccgcctcctgcaagtttcagagctcaggaatctgcgccatggcgagtgagacggagaccttcgcatttcaggctgagatcaaccagctgctctcactcatcatcaacaccttctactccaacaaggagatcttcctccgcgagcttatctccaactcttccgatgcgctggacaagatcaggttcgagagtctcactgacaagagcaagctcgatgcgcagcctgagcttttcatccaccttgtcccagacaaggccacgaacacgctctccatcatcgacagcggcatcggcatgaccaagtccgaccttgtcaacaacctcg

SEQ ID NO: 29534 - DNA, 364 bp, Zea mays
  unsure (1)..(364): unsure at all n locations
gccaccatacgtggaatcagcaaggttcaggtgaatgaagcgcgtttagctgaagacttggagcaaacttgggaggtccttgctgagccaatacagacagtgatgcgaagatatggaatacctgaaccttatgagaagctgaaggaacttacgagaggccaagctgtcaccaaggacagcatgcagcaattcattgatggtctagacataccggaggaggttcgagcaaagctttcgaagctaacccctcattcttatactgggctagcggaggatttggccagatacatcgagaagtgggttgatcttgaatctggatttcagatcaagtgaccttccattttanaatgataatcttctccac

SEQ ID NO: 29535 - DNA, 266 bp, Zea mays
gcgttttgtgctctatgcaatgatgcgccagaagatcctgttgtcactctatgtggtcatgttttttgcaaccagtgcatactggagcaactcactggtgacgacagtgtatgcccagtgtctaattgcagagtccgactaaacacatcctcactcttctccagaggcactcttgaatgctctctgagtaaattagcctctgatttcaagtctgatgatacatgtatggaaatgatacatgctgaaaagcgccctgggatggattc

SEQ ID NO: 29536 - DNA, 355 bp, Zea mays
  unsure (1)..(355): unsure at all n locations
cggcggtggcgggcgccgtgatggcggcggcggctacggcggtggcggcggcggctacggtggcggcggtggctacggtggtggtggtggcggctacggcggtggcaaccgtggcggcggctacggcaactccgacgggaactggaggaactgagcggtggggcccgcgcggccaagttatcctgttcgctaccgtgatgtttaccctagtccagagggtttatcttcgttcgtctcgtttgttgttgcccatctgtgtttttgattgcaaggtcgctctgtgtcagttgttagtgctgtgttcatcctcggctccagcagacccatgcatcaacgagcatngactgtggatcga

SEQ ID NO: 29537 - DNA, 356 bp, Zea mays
tggacgcgtgtggaagctgctcgccgacgtcgaggacctccacctgctgatggacccggacgagttcctacggctcaagagccagctcgccgtacgagcggcgccggggtctgagtccgcgtccttctgtttccggtccagggcgctcctgcacgtcgctagcgccactagggacctcaagaagcgtgtgccctgggtgctcggtgtcgaggcggaccccagcggcggcccacgggtgcaggaggcggccatgaagctgtaccacagccgtaggacggtgagggcgtagaggcaggcaagtggactgctccagccttccagcggtggagtggcgtgaaggatctcttcggtacgca

SEQ ID NO: 29538 - DNA, 346 bp, Zea mays
ctttgagaaacctttcctgtacctcgcaaggcagctggctggtgatccgaaccttcactttgttgaagctgttgctcttaagcctccggaagttaccatcgacatggctatgcagcagcaacatgaagctgagcttgctgcagcagctgcacaacctcttcctgatgacgatgatgatctgattgagtagaaaggatcatgagtcttgaacttgagcaggagttgtgccttgcgtgttttaagttgttctagggtgaactcttgagttctcattgtctggatcatctttttctccttggatgtgctgcatcttttgagtgtggaaatggatggtactcctcgccat

SEQ ID NO: 29539 - DNA, 363 bp, Zea mays
cgcctggtctgtggcctctgcgctcaccttcctccgcggccctcgcctcgccagaacagcgggagatctcgggatcgggcggccctcctccggcgtccggatcgagaggattggacccgaatccgatcgcctagcagggggcgcggcgcgcgcgcgatggcgccggcggtggtgtcggcgctggccaagtacaaactggtgttcctcggcgaccagtccgtgggcaagaccagcatcatcaccagattcatgtacgacaagttcgacaccacctaccaggcaacgattggcattgactttctgtcaaaaacaatgtatctagaagaccgaactgtacagttacaactctgggatactgcagga

SEQ ID NO: 29540 - DNA, 358 bp, Zea mays
ggcgggcagctgttctcggccatggtggtgcgcaggccggcgcacctgttcctggacgagctgggcgtgggctacgacgaggccgaggactacgtggtggtcaagcacgcggcgctgttcacgtccaccgtgatgagccggctcctggcgcggcccaacgtgaagctgttcaacgccgtggcggtggaggacctgatcgtgcggcgggggcgcgtcggcggcgtggtcaccaactgggcgctcgtgtccatgaaccacgacacgcagtcgtgcatggaccccaacgtgatggaggccaaggtggtggtcagctcctgcggccacgacgggcccttcggcgccaccggcgtcaagaggc

SEQ ID NO: 29541 - DNA, 351 bp, Zea mays
tgggaagaagctgaaaaagaacaatgttgctcttgacattgttgactttggtgaatccgatgatgaaaaacctgagaaactggaagcattgattgctgctgttaacagcagtgatagcagtcacattgttcatatccctcctggtgaaaatgccctctctgatgtcctcctaagcactcctatatttactggtgaagaaggtggaagcggttttgctgcttccgcagcagctgccgcagctactggagcatctggatttgaatttggtgtggacccaaacgtagatccagaattggcacttgccctgcggttgtctatggaagaagagcgggcaaggcaagaggctattgc

SEQ ID NO: 29542 - DNA, 361 bp, Zea mays
aagtaatatggcttggtcttgtgctcgtccgatgagcatcgccctcgctgccgtcctcctgctgtgcggcggcgcgtggctgcagcaggcggcggaggcgcgcccccaccacatggacgacgacagcagcatcgacatggaccgcggcacgacgacttcttctccatcgtggggtactcgccggaggacctggcgcacacgaccggctcgtcaggctgttcgaggagtgggtggccaagtaccgcatagcgtacggcagcttcgaggagaagctgcgccggttcgaggtgttcaaggacaacctgcaccacatcgacgaggccaacaggaaggaggtcaccagctactggctgggcctcaa

SEQ ID NO: 29543 - DNA, 356 bp, Zea mays
  unsure (1)..(356): unsure at all n locations
cgatccctgcaccactaccgcctcctccgcttcacccctctcgtcgcctcttgcggcgaccggcggcggatcgtccgcggcngcaacgcaaccatggggctcttcaccgtgacgaagaaggccaccacccccttcgaaggccagaagcccggtacctccggcctccgcaagaaggttactgtattccagcagcctcattatctgcagaactttgtccagtcaacattcaatgcccttcctgcagaccaagtaaaaggtgcaaccattgttgtctctggtgatggccgctatttctcaaaagatgctgttcagatcataacaanaatggctgctgccaatggagtaagacgtgtttg

SEQ ID NO: 29544 - DNA, 235 bp, Zea mays
gaagaagcagaacaacatcaagctctatgtgcgacgtgtcttcatcatggacaactgtgaggagctgatcccagagtggctgagctttgtcaagggtattgttgactctgaggatcttcccctcaacatctctcgtgagactctccagcagaacaagatcctcaaggtcatccgcaagaatcttgtcaagaagtgcgttgagctgttttttgagattgcggagaacaaggaggac

SEQ ID NO: 29545 - DNA, 348 bp, Zea mays
  unsure (1)..(348): unsure at all n locations
gtntgctgagctcattaccaagatcgacaggcgttctggcaaggagcttgagaaagagcccaagttcttgaagaacggtgatgctggtatggtgaagatgattcccaccaagcccatggtggtggagacattctcgcagtatcctcccctgggtaggtttgctgtccgtgacatgagacagacggttgctgttggagtcatcaagagtgtggagaagaaggacccgaccggtgccaaggtgaccaaggctgctgccaagaagaaatgatgcgacctgtcgttgatgcagcgtctgcttttccaatacgtagctgagatgttccattttgacataagtttgtatgctgt

SEQ ID NO: 29546 - DNA, 293 bp, Zea mays
tcgacgccaaggccgggattgccctgaacgaccacttcatcaagctcgtctcgtggtacgacaacgagtggggctacagcaaccgcgtcgtcgacctgatccgccacatgttcaagacccagtaggctagtagagagatagatttctgcctccctatcgagggtcgtcccaatggcctttggtcgcagacaactttgctgcttgtctatgctgagaataaatgtgaacggtgcccctggacgctggatccatgctggttttggaaaaaaaaaaaaaaagggcggccgccgact

SEQ ID NO: 29547 - DNA, 294 bp, Zea mays
aagaagttcgccgagacagccgagaagtgtgtttctgatcagggaatcgaccgcccttcgatgggtgatgtgctctggaacctggagttcgcccttcagatgcaggaaggcgcagaagagagcggaagccttggctgcgggatgtcagacgagggcgccccattgatggtcgggaagaaggacccgaacgacccatcgatcgagtcaagcaccaccaccacaaccaccacttctataagcatgggcgaccaaagcgtcgcgagtatagactcggatgggctgacgcctagcgcc

SEQ ID NO: 29548 - DNA, 284 bp, Zea mays
gattcatcacaacaatcttatcaacaatattctggcaaagatagaaggtaatcttgcccaggctgaggatgccattatgctagataaggatggctttgtatcagaaacaaacgcaacaaatatttttatggtcaaaaagggaattgtattgacacctcatgctgactattgccttccaggcattacgcgagcaactgtcatggatcttgtggtgaaagaaaactttgtgttacatgaacgacgcattagtctgtcagaattccatgctgcagatgaggtatgga

SEQ ID NO: 29549 - DNA, 287 bp, Zea mays
ggaatgggagaattgtcagcacaaggaatagctgcagaattgatgtttggtgagacaagaatggcatggacagtgatttccagacatcgccacgcgctccatacagtggatttgatggaacagcttgcaaggcatttcataaggccccttactaaggatcaaatggaggcaattatggagttggcaattcagggaaaggacaaggaagggaccaagaagaagggcagaaaggtggcacctctcaaggctcctttcatagaggctgctgagaagatctgagtgatgtt

SEQ ID NO: 29550 - DNA, 286 bp, Zea mays
acgatatggtcttgaagttggtctgaccaactatgcagctgcctactgcactggccttctgttggctcgccgtgtgctcaagatccgtggtttggatcaggagtacgagggcaatgttgaggccactggtgaggacttctctgttgagccagctgatgagaggaggcctttccgtgctctcttggatgttggccttatcaggactacaacagggaaccgtgtctttggtgccctcaagggagcattggatggaggcctggatattcctcacagcgagaagaggttt

SEQ ID NO: 29551 - DNA, 287 bp, Zea mays
ggctggatggagcgctacggcctccccgccggcgcgccctgcaccgccaggaagtacctcgcgtaccagtggaccctcctcgccgtcgccatgatcatcctcgtagccggattcgcggccggcatggcgatgctcttccgcggcgccaacgccaacgacagctgccactggtgtcactacctcagctgcgtgcccaccgccagatggaactgcaccaactgatgatccatgcaccaactgcttaattgtcatgcattccgtccctagtctctcgttactgtagatag

SEQ ID NO: 29552 - DNA, 289 bp, Zea mays
agggagaacccgccgccgcagcaatcacagcagcccggagaaagcccaggtccgacaagatgcagatcttcgtgaagacgctgacagggaagaccatcaccctcgaggtcgagagcagcgacaccatcgacaatgtcaaggccaagatccaggacaaggaagggatcccgccggaccagcagcggctgatctttgccgggaagcagctggaggatggccgcacccttgcggactataacatccaaaaggagtctacgcttcacctcgtgcttaggctccgcggtggcat

SEQ ID NO: 29553 - DNA, 281 bp, Zea mays
ctctccttgacttgagagattttgacagagcaaagtttgatgttgaggagccgtcagactcagctgatcaagttcttctcagggaacaagctgcgattggcaggagtactggacagatggataatgtgatatcacaagctcaggcaacacttggttctctcatgacccaacggtcaacattcggtggcatcactacaaagataagcaacgtcagcagccagcttccaacaattaaccacgtcctctcatcgatcagaaggaagaaatccatggataccatc

SEQ ID NO: 29554 - DNA, 215 bp, Zea mays
agccgcccgagatcggctgcatacctgttctgcttctgggcgccggagttcgcgtcgtcggctcgtcgttcggtaaacttgggggagcaatgggaggagggaaagacaagcatgacgagagcgacaaggggctcttctcaaacttgatgcacggcgttgccggtggccatgggtaccccccgcacggataccctccgcacggctacccaccgcaa

SEQ ID NO: 29555 - DNA, 288 bp, Zea mays
cattcgactcgaataggatccaaaaatactcacggcaatatcactggccacacaaagcagacatagagctatggataaattaggctggtgcattgcccagccaccaccatcgccagcaccccaggggaaggactgatcgaaagtcacgcctagatcttgttgaaggcaactatgtcgcaactctgtacgtactcgttaactggctcagcgcacagatagtcctcaatgagagtgtcgacagagacaaggtcgtcgacgatggtcatcatgatttgcagcttcttgata

SEQ ID NO: 29556 - DNA, 285 bp, Zea mays
gttatggtcagtcgagacgctatttgtgcttcgataaaggatatgtttgaggagaaaagaagtatccttgaacctgccggtgcccttgcattggctggggctgaagcctactgcaaatactataacttgaaaggagatactgtggttgcaataactagtggggcgaatatgaactttgaccgacttagacttgtaactgagctagcagatgttggccgaaaacgggaagcagtgttagctacatttctgcccgaggagcacggaagcttcaaaaaattcacagaa

SEQ ID NO: 29557 - DNA, 285 bp, Zea mays
gctccacatcgtcggggaggtgcagctccccgtgcaccactgcctgctggcgctgcccggggtgcgcaaggagtgcctgacccgcgtgatcagccacccgcacgcgctggcgcagtgcgagcacacgctgacaggcatgggcctgaacgtggtccgcgaggccttcgacgacacggccggcgccgccgagcacgtggccgccaacggcctccgcgacacggccgccatcgcgtcctcccgcgccgccgagctgtacgggatggaagtgctggcggacggcatcca

SEQ ID NO: 29558 - DNA, 286 bp, Zea mays
cggccggaggaaccaagcgtagggcctccgaccccacgtcgtcgtccgcgcgcgccgcccgccgccgcagggagatgggggccgattactacaaggtcctcggcgtcgaccgcggcgccagcgacgacgacctcaagaaggcctatcggaagctcgccatgcgatggcaccccgacaagaactccaccaataagaaggaggcagaaaccaagttcaaggagatctctgtggcatacgaggtccttagcgatcccaagaaacgtgcaatctatgatcagctagggga

SEQ ID NO: 29559 - DNA, 279 bp, Zea mays
cgagatggccccgaagaaggacaaggccccgccgccgtcgtcgaagccggccaagtccggtggtggcaagcaaaagaagaagaagtggagcaagggaaagctaaaggagaaggtaaacaacgcggtgctgttcgaccaggctacctacgacaagctgctctcggaggtgcccaagtacaagcaaatcaccccttccatcctctccgagcgtctgaggatcaacggctcccttgctcggagggccatcaaggacttgatggcgcgtggcctcattcggat

SEQ ID NO: 29560 - DNA, 281 bp, Zea mays
ggtgggtgaattagttggtgctcgccttattgcacatggtggaagtttgttaaatttggccaagcagcctggtagcacaattcagatacttggtgcagagaaggctttattcagagctctaaagacaaagcattctacacctaagtatggcctcatctaccatgcatccttaattggcaaggcttctcaaaagcacaagggaaaaatctctcgttctcttgctgcaaaaacagctcttgctatccggtatgatgcccttggtgatggtgaggacaactcca

SEQ ID NO: 29561 - DNA, 280 bp, Zea mays
tgtgaagcctacatcaagaggtgaccagcaccccgtgtatgaactctatgcagtgataaatcattatggcggtctcggtggtggacactactctgcatatgcgaagctagttgaagaggacaattggtatcattttgatgacagtcatgtttcctctgttaatgaggatgagatcaggcgatctgcagcatatgttcttttctaccgacgagttggaggttcaagtacagcggcaaacggtggtccagttgacattgaaatggttgattcgctagagaca

SEQ ID NO: 29562 - DNA, 284 bp, Zea mays
gcgcaccgtaccctagccctcgtcagcggcggcttcgagctcatccagccatgacgttcaagcggaggaatggcggacgcaacaagcacgggcgcggccacgtcaagtacatccgctgctccaactgcgccaagtgctgccccaaggataaggctatcaagcggttcttggtgaggaacattgttgagcaggctgccgtgagagatgtgcaggaggcctgtgtacatgatggatatgttctacccaaattgtatgcaaaggttcatcactgtgtctcatgtgca

SEQ ID NO: 29563 - DNA, 281 bp, Zea mays
tgtcgccatttcccgaatcttgcagggatcacctcggaatggcccttcacttgatccatcagaaattttaattgcaattcatgtaatagctcctgataaggaaggaataccactcaaaaaggttatggatgcatgctcttcttgctttgagcaaagaacaatatttacccagcaagttctggcaaaagcactaaatcaactggttgaacagattcctcttcctttgctattcatgaggactgtcatgcaagcaataggtgtttttcctgcattggtggatt

SEQ ID NO: 29564 - DNA, 275 bp, Zea mays
ctcaggctctgaagatggcatgaccgttgaagaatatgaagcaagatttactgatgttgcccaggctgaggaatttattgatgagacaagcattgatgctctagcagtttgcattggaaatgttcatggaaaatatccacctagtggaccaaaccttaaattcgacttgctaaaggaccttcgtgcattaacattaaagaaaggagttagcttggttctccatggagcatctggtctatctcatgagctcgtaaaggagtgcatagacttgggcg

SEQ ID NO: 29565 - DNA, 275 bp, Zea mays
cttgaggagaagcgtgccaaggcgatggagaaggcgcagaacgaggtggccaaggcgcggcggaaggcggaggagaagcgcgcgtccgcggaggccaagcggggcaccaaggtggcgcgagtgctggagctcgccaacttcatgagggccgtggggagggcgccctccaccaagcgctccttcttctgaacccaccggcctcttcttcaccagttcctctgtcttgccgccgccgcctgtgcagttcagttcagttcagttgtcctgtgggtcgg

SEQ ID NO: 29566 - DNA, 271 bp, Zea mays
gctatctgtatttttgatgatgttgcagagcaatgccgtgaatcagctctgaagtattatgacacataccttcctttccttttggaggcatcaaacgatgaaaattcagatgttcggcaggctgctgtctatggtgtgggtgtatgtgccgagtttggtggtcatgtttttcgccctctagtaggagaggccttatcaaaattaaacaatgttataaggcatcctgatgcacgacttcctgataatatcatggcatatgacaatgctgttt

SEQ ID NO: 29567 - DNA, 276 bp, Zea mays
ccgcgccacctgccgctgctccgacggccgcctcgtcgtcgacttcctggccgagaagttcgggctgccgctgctgaagccgtcgaagcagggcggctcagacttcaagcagggcgccaacatggcgatcattggcgcgaccaccatggactcgggcttcttccagtcgctgggcatcgccgacaagatctggaacaacgggcccctcaacacccagatccagtggttccagcagctgatgccgtccatctgcggctcgacgcaggcctgcaagtc

SEQ ID NO: 29568 - DNA, 305 bp, Zea mays
ctctctcctccactccacctctcctctcctgcgctacagcgagggggaaggggagcgtcgaccgattcgtcccggcctcccgtccggccgctggcctcgcctgccccgatggcggcggtggcgatccaccagttcgccgagtgcatcacctgccacgcctggagcccggaccagtcgatgattgccttttgtccaaacaaccatgaagtacatatctataaattcttcacagacaagtgggagaaacttcatgttctgtcaaagcatgatcagatggtttcggggatagactggagtaaatcatc

SEQ ID NO: 29569 - DNA, 295 bp, Zea mays
tccagattctaacctcgcatacccttcagccggtgccggttgccattggaggccctggtcttcaccccggagtgaaattccggaacgacattcaaatccctgggctcgccaatgtagccgcaactgtgatgaacctccatggatttgaggcccctgctgactacgagcaaaccctaattgaagtggctgacaactaaatactggccagctatgtccaattttggttctatagttttgagaagggatatggccatgccattcaataatttctgtttgcaagcacgttgctcaaact

SEQ ID NO: 29570 - DNA, 189 bp, Zea mays
agctggtttccctgctggaaagtacctctttgctggtgttgtggatggacgcaacatctgggctgatgatcttgctacatctctcagcactctccagtctcttgaggctgttgttgggaaggacaagcttgtcgtatcaacttcctgctcgctcatgcacaccgctgtggatcttgtgaacgagactaa

SEQ ID NO: 29571 - DNA, 309 bp, Zea mays
cggcatctctaactacatttcatcaaaggattctcagcaagagttatcatcttcaatgatctcacatccatttggcgttgctgatatcgcgttcaattccatagattcgtcgatcaatgatatccaattcttaaacagaaattcccgggctccaggtcctgttcaacaacgtatgcgaacatacaccaaggtgcacaagcgtggcgctgttggaagatctatcgacatcaacagatattctggttacgatgaactgaagcatgacgttgcccgtatgtttggaattgaggggcagctcagcgaccaaaa

SEQ ID NO: 29572 - DNA, 188 bp, Zea mays
tggcgagctgtcagagtcggtgaggggcgtgctgcgggggtaccgaggctgcggctgacgcacgggcggatggtgctggaggtgcggcccaccatcaagtgggacaagggcaaggccctggagttcctgctcgagtcgctcggcttcgcggactgcagcagcgtgctgcccgtgtacatcggcgacga

SEQ ID NO: 29573 - DNA, 181 bp, Zea mays
ctagctcttcccaccagtgagatcgatcgagcttccacctcctgtcatcctcctcttgcaggtcgcagctgagcagcaacaaggccggaaaggatgtcgtggcagacctacgtcgacgagcacctcatgtgcgaggtcgagggccaccaccacctcacctccgccgccatcatcggccacg

SEQ ID NO: 29574 - DNA, 304 bp, Zea mays
ctcctccctcctgccgggtccttaataaagagcagcagcgcaagatgttggtagagcgagcgagaagaaggcaatggcggcggagagcttcctgttcacctcggagtccgtgaacgaggggcacccagacaagctgtgcgaccaggtgtcggacgcggtgctggacgcctgcctggcgcaggaccccgacagcaaggtggcctgcgagacctgcaccaagacgaacatggtgatggtgttcggcgagatcaccaccaaggcgagcgtggactacgagaagatcgtgcgcgacacctgccgcgag

SEQ ID NO: 29575 - DNA, 291 bp, Zea mays
  unsure (1)..(291): unsure at all n locations
ctcgagcgcgcaggtggaggcggcgtgcccgggcgtcgtctcctgcgccgacatcctcgccgtcgccgcccgcgacgagttgtcgcgctcggcgggccttcgtggaccgtgcttctgggcagaagggactcgaccggttcgttccctagccagacaagcgacctcccacctcagacgtcgagcctccaagcactgttagccgcgtacagcaagaagaacctcgacgcgaccgacatggtcgctctctcaggcgctcacacaatcgggcnagcccagtgctcgagcttcaac

SEQ ID NO: 29576 - DNA, 186 bp, Zea mays
cagatttttgcagttctcacagacacattccacaaacctggtttcaagcttcatgttttggtgctccaacacttattttatgtggttgatagtctaactgagcctctatgggattcttcatcagtaccatatcaatatacggataatgccacgtttgttcgagattacaccataaaactcttagga

SEQ ID NO: 29577 - DNA, 179 bp, Zea mays
gccatcagcagctagcgcgctcctcgagcccagcagagaaaggccggcagcgctaatcgtaatagccatgggctccaccgacggcgacgtggccgcggtggtggacgaggaggcgtgcatgtacgcgatgcagctggcgtcgtcgtccatcctgcccatgacgctgaagaacgccatcg

SEQ ID NO: 29578 - DNA, 296 bp, Zea mays
gatcgacgggccgtacggcgcgccggcgcaggactacaagcagtacgacatcgtgctgctggtggggctgggcatcggcgccacgcccatgatctccatcatcaaggacatcatcaacaacatgaggcagctggacggcggcggcggcggcgacctggaggctagctcggacgcgtcgtcgtcgtcgtcgtcgatggcctcgttccgcacccggcgtgcctacttctactgggtgacccgggagcaggggtccttcgagtggttccgcggcgtgatggacgaggtggcggagacgg

SEQ ID NO: 29579 - DNA, 294 bp, Zea mays
cggctcgaggatcaaactacaaggcctggtgctcaggttttgcgcccctgtgtgttggcggagacatggaatcagtggcagttcaggagtttagcaggacgctcttcaatatacgtccggacattgcgcttagtgttgcccagacgatcttccagagcgacgtgcgcagctcctcccgcacgtcactgtcccatgccacattgttcagagcaccaaggatctcgcggtgccggtcgtggtgtctgagtacctgcacaggcaccttggtggcgactcccatcgtggagtgatgcc

SEQ ID NO: 29580 - DNA, 181 bp, Zea mays
gcgatgcaggcgccggagcagcagccgcagcagcagcagcagcggaggaagggttcgtcagagatggacttcttcagtgaatacggcgatgcgaacagatacaaaatccaagaggtcattggcaaaggaagttatggcgttgtttgctcagctgttgaccaacatactggtgacaaggtgg

SEQ ID NO: 29581 - DNA, 220 bp, Zea mays
caaccccgtccagccgccggctgtctcggccgccgccgccgccgccgccgccctatcccggtccttcaggcgaaccaggttggtcatggccttcaacaagatcaaggtctccaaccccgtcgtcgagatggacggcgatgagatgaccagggtgttctggaaatctatcaaggacaagcttatattccctttcgtagacctcgacatcaaatattttgac

SEQ ID NO: 29582 - DNA, 322 bp, Zea mays
tgttgaggctgaggagtacttctcaaagtggggagaaagtggcactgttgatttgaagtacgagttggagcacctcatcatactgacagctagccggtgcttgctgggaagggaggtgcgagaaaagctgttcgacgatgtttctgctctcttccatgaccttgacaacgggatgcagccaatcagtgtcctcttcccgtacctcccaatccctgcgcataagcgccgtgacagggcacgggcacgtttggcagaaatctttgccaccatcatcaagtcccgcatagcctctggacagtctgaggaagacatgctgcagtgc

SEQ ID NO: 29583 - DNA, 321 bp, Zea mays
gtgagccgccccaaccccatgaccgttttctggtcgaagacggcgcagagcatgacgtctcgcccaatgaaggggatgctgactggcccagtcacaatcctcaactggtccttcgtccggaacgaccagccgaggtttgagacttgctaccagatcgctcttgcgatcaagaaggaagtcgaggatcttgaggctggtggtattcaggttatccaaatcgacgaggctgcactgagagaagggctgccgctccgcaaggctgagcatgcattctacttggactgggctgtccactccttcagaattaccaactgcgagatc

SEQ ID NO: 29584 - DNA, 322 bp, Zea mays
gcgagacgggacaggacggatcttcgacggagcgttgcccgattcgtcgcagttcccggacaagggaggaaaggcgtgggaagagggaggacgcgcgttggtctccgatccaagagctttgttaacaccagagattaaaagatagcgccgtagcgcaatgaaggcaccatcgctactggttcggtgtttccctggcttgcttcccagcaaggacactagttgtgtgccaattgtgtccgagaaggatctgcagctaccatcactagccgttgaaataattccctcaaagagtgctcacccgtacaaatatgctggagagaag

SEQ ID NO: 29585 - DNA, 220 bp, Zea mays
gcacaaggagggtcttgcgatggtgaacggcacggccgtgggctctggccttgcctccactgtgctcttcgaggctaatatctttgccatcctcgccgaggtcctgtccgccgtgttctgcgaggtcatgaacggcaagccggagtacaccgaccacctgacccacaagctcaagcaccacccgggacagatcgaggctgctgctatcatggagcacatc

SEQ ID NO: 29586 - DNA, 296 bp, Zea mays
atgcgcttcagcacccaggtcaaggacgaggagggcaaccctgcgttcgccctcgtcaacaaggccactgggctcgccatcaagcactccctcggccagtcccacccggtgaagctggtgccgttcaacccggagtaccaggacgagtcggtgctgtggacggagagcggcgacgtgggcaagggcttccgctgcatccgcatggtgaacaacatccgcctcaacttcgacgccttccacggcgacaagggccacggcggcgtgcacgacggcaccaccgtggtgctgtgggattg

SEQ ID NO: 29587 - DNA, 321 bp, Zea mays
cgcacgagcgcaacaccatccacccaccagttcgaagcggaggcgaccggcaacctgcggcggagatgtcaggcaggggcaagggcggcaaggggctcgggaagggcggcgcgaacgtcaccggaaggtgctgcgcgacaacatccaggggatcacgaagccggcgatccggaggctggcgaggaggggtggcgtgaagcgcatctccgggctgatctacgaggagacccgcggcgtgctcaagatctttctcgagaatgtcatccgcgacgctgtgacctacacggagcacgcccgtcgcaaaacccgtcacgctatggg

SEQ ID NO: 29588 - DNA, 320 bp, Zea mays
tgcgccccgccactggatgctcagcaaactcggcggcgtctgggcgccgcgcccgtctacgggcccgcacaagctgcgcgagtgcctgccgctgtcgctcatcttgcgcaaccgtctgcgctatgcgctgacgcgccgcgaggtgctgcagatcgtgatgcgcaagagcgtgcaggtcgacggaaacgtgcgcaccgacctcaactaccccgccggattccaagatgtgatcacgattccgaagacgtctgagcagttccgtctgctgtacgacgtgaagggccgcttcgtgctgcaccgcatcacgccggaggaggcga

SEQ ID NO: 29589 - DNA, 251 bp, Zea mays
  unsure (1)..(251): unsure at all n locations
aacnaacgggagcatctgccttgacatcctgaaggaccagtggagcccggcgctaaccatctccaaggtgctgctgtccatctgctccctgctgaccgatccgaaccccgacgatcctctggtccccgagatagcgcacatgtacaagacggaccggaacaagtacgagaacaccgcgaggacctggacccagaggtacgccatgtagggacggggtacctacctggccctttgggggtccgccggaattg

SEQ ID NO: 29590 - DNA, 209 bp, Zea mays
caagcaccggcgcggcggcggctaccatggcagtcgggaagaacaagaggatctccaagggaaagaacggtggtaagaaaaagaccgtcgatcccttctctaagaaggactggtatgacatcaaggccccatcggtgttcagtgtgcgcaacattgggaagactctcgtgtccaggacacagggtaccaggattgcctctgatggtctg

SEQ ID NO: 29591 - DNA, 235 bp, Zea mays
  unsure (1)..(235): unsure at all n locations
aagaaacaagacacctttgcacgtgtatcaggatactgtgaacaaaatgatatccactcgccacaggtgacagtctatgagtccctgcttttctcagcatggctccggcttcccaaggacgtcgattcaaacaaaagaaagatcttcattgaggaggtgatggagcttgtggagctgaaaccactgagaaatgctttggttggacttcctgnagtgaatggtctgtcaactgagc

SEQ ID NO: 29592 - DNA, 313 bp, Zea mays
agaacgaagagagatcagcgacttaacaacaataatggccaccgccatagttcccacggacgccgagctgctgcaggcgcaggccgacctgtggcgccacagcctctactacctgacatccatggcgctcaagtgcgcggtggagctccacatcccgaccgccatccacaacctaggcgggtctgccacgctgccggacctcgtggccgcgctgtccctgccagcgtgcaagctcccgttcctcgggcgcgtgatgcggctgctggtcacgtcgggcgtcttcgcgtcgtccgacgacgtgcagtaccggctg

SEQ ID NO: 29593 - DNA, 277 bp, Zea mays
ggtttctcctcaccctccggttcgggttcgggttcgtgaggttctccggggttcggtttcgtgggtgagcggatcgagatggcggcgtcggatgttgagtaccgctgcttcgtcggcggcctcgcctgtgccacggacgaccactccctccacaacgccttcagcacctacggcgaggtcctcgagtccgagattatcctcgatcgggagacgcagaggtcccgcggcgtagggttcgtcaccttctccacggaggagtcgatgctgaacgccatcg

SEQ ID NO: 29594 - DNA, 311 bp, Zea mays
cggcggccggtgccggcagccgggggacggtgagatggaagggggcctgcttctacgagaacgaggcgtggctgatgttccacaacgagaccgggtccaagtacggcggcggcacgctccatatcaagacatccaaagcgcacagctggacttgcatagatctgtatgtatttgcaacaccatacagagttacatgggattactactttttggggcgagagcacactcttgatatcaaagaatgggaaagcgatgctgagtatgagtatgtgaaacgtaatggtgtgtccattttcctcatgccatctgga

SEQ ID NO: 29595 - DNA, 313 bp, Zea mays
atactatcgagatcttctttgtgaatttggtgctatatttgccattgcaaacagagtcgatactgtacataagttaccatggataggtttccagtcatggcgggctgctggaagaaaggtatccttgtctgaaagagctgaagaaaccttagaggaaattacatctggagaaagtaacgaggatgttatatactactggtcaccaatggatatggaccaaacttctgacttttggttgacatgtgattctctaaatgctggcaattgcagatctcttttcgaagatgcatttagggctatgtatggattacca

SEQ ID NO: 29596 - DNA, 307 bp, Zea mays
ctgagctctgcagagatgtatgactctgagacacatacctggacgcccctcccaagcatgaatagggcaaggaagatgtgttctggggttttcatggatggcaagttctatgtgataggtggtgtggctaacaacaacaaattgctgacttgtggggaggagtatgacttgaagaggcgttcctggaggataatcgagaacatgtctgaaggcctcaatggagtgactggtgctcctccccttattgcagttgtcagcaacgagctatacgccgctgattacagcgagaatgacctcaagaagtatg

SEQ ID NO: 29597 - DNA, 306 bp, Zea mays
cggtgctgatggaggagaggtacgaggcgctgaaggagctgggggccggcaacttcggcgtggcgaggctggtcagggacaagcggaccaaggagctggtagccgtcaagtacatcgagaggggcaagaagattgatgagaacgtgcagagggagatcatcaatcaccagtcgctccggcaccctaacatcgtacggttcaaggaggtttgtctaacacccacacatcttgctattgtcatggaatatgctgctggtggagagctatttgagaaaatctgctcagcagggcgattcagtgaagatg

SEQ ID NO: 29598 - DNA, 304 bp, Zea mays
gacgcaggtacacatgtgtaacaagcttgctagtcggcatgtgagagctggacttgcagaccctaataaacttgtccggtgtgatatatgtgaaaattcacccgctttcttctactgtgagatagacggcacctcactttgcctgagctgtgatatgactgttcatgttggtggcaagcgaacccatggaagatacctgctcctaaggcaaagggttgaatttccaggagataaaccgggccatatggatgacgtgcctatggaaatccaagatcctgaaaaccagagagaccagaaaaagcca

SEQ ID NO: 29599 - DNA, 247 bp, Zea mays
cggcgggagaggttgaggttgaggaagagcagaggaatccattccaggagtgtttaatggcgggaggcaaggaagcgcacgggtgggcagccagggatgtctctggtcacctctccccttaccacttctcacggagggttcagagagacgacgacgtcaccatcaaggtgctcttctgcgaggtttgccacactgacctccacgtcatcaagaacgagtttggcaacgccaagtaccccgtcgttcc

SEQ ID NO: 29600 - DNA, 299 bp, Zea mays
ggaggtttgatggactatgcgtttgagttcatcatcaacaacggcggaatcgacaccgaggaggattacccttacaagggcacggacggacggtgtgatgtcaacaggaaaaacgccaaggttgttactatcgacagctatgaagatgtaccagcgaacagtgagaaaagtctgcagaaggcagttgcgaaccagcccatcagtgttgcaattgaggctggtggcagagcatttcagctctacaactcgggtatcttcacaggaacctgtggaacagcgttggaccatggtgtcacggc

SEQ ID NO: 29601 - DNA, 306 bp, Zea mays
cggcgttccgggcgacgcagcagtgccggtcgcagtgcatcaaccgcggcaggtactgcgcgcccgacccggagggggacttcggcgccggctacgagggcaaggacgtggtggtggagaacctgcgccagctctgcgtgcaccgcgtcgccaacgaaacgggccgcccctgggcctggtgggactacgtcatggactacaagatccggtgctccatgaaggagaagaagtacaccaagacctgcgccgaggacgtcgtcaccgcgctcggtctggatctcaagaaggtgctggagtgcatgggcg

SEQ ID NO: 29602 - DNA, 307 bp, Zea mays
ggcaatttcgccctcgattcgaccccgattcgtccgcccgcgaccgggattccctccgccaagcgcggatatgaacgctgcgctccgtgtcgccgctcgaatccgccatgaagggggccaaatccaagggcgccgccaaggccgatgccaagctggcggtgaagagcaagggggcggagaagcccgccaagggcaggaaagggaaggccggcaaggaccccaacaagcctaagagggctcccagcgctttcttcgtgttcatggaggaatttcgcaaggagttcaaggagaagaaccctaagaacaa

SEQ ID NO: 29603 - DNA, 306 bp, Zea mays
ccgtgtgctgtattcatcagttgtttaccctcacaactatggattcattcctcgcacgctttgtgaagacagtgatcctttggatgtactggttataatgcaggagcctgttatcccaggctgtttcctacgtgcgaaggccatcggccttatgccgatgattgatcagggagaggcagatgacaagatcattgcagtgtgcgctgatgatcccgagtacaggcattacaatgatatcaaggagctcccacctcaccgcttggctgaaatcaggcgcttcttcgaggactacaagaagaatgagaa

SEQ ID NO: 29604 - DNA, 304 bp, Zea mays
ccggtagcaggagcgcaccagcaagctcagccccccagccctactgccaccgcgccgaacgccatggccgagccggcagagcaccgtccagcggaggaggaggaggccgcggcggccggcgaggatgaggacaccggcgcccaggtcgcgcccatcgtgaagctggaggaggtcgccgttaccaccggagaggaggacgaggacgcgctcctggacatgaaggcgaactctaccggttcgacaaggaggggaaccagtggaaagagcgcggcacaggcactgtgaagctgctcaagcacaaaga

SEQ ID NO: 29605 - DNA, 284 bp, Zea mays
gccttctgcgcctccatttcggcctctgtcccttgcaagttcaatctcacctccaaccatgggtaaagagaagtcccacatcaacattgtggttattggccacgttgactctggcaagtcgaccaccacaggacacctgatctacaagcttggaggcattgacaagcgtgtgatcgagaggtttgagaaggaggctgctgaaatgaacaagcggtccttcaagtacgcatgggtgctcgacaagctcaaggctgagcgtgagagaggtatcaccattgatatcg

SEQ ID NO: 29606 - DNA, 307 bp, Zea mays
ctcgcagttggtagggttctagccatggcgtggaccgcgccgccgtctccaggttcgccgccgcctccccacccgcggcacccatctccgtcaggcttggagccgccgcttctcgctcctccctgtccttctccagtgggcgccgacgccccgtggccgcgtccctctcgacctctgccaccgctgtaaaggaggctgttcagacagagaaggcaccaccagcactaggcccttattctcaggccatcaaagcaaataatcttgtgtttgtttctggagttcttggcttgaatcccgagaccaggaa

SEQ ID NO: 29607 - DNA, 296 bp, Zea mays
gtttttgattttagccgccgccgctgctcatctcacatccctcgagaagacgcctgctcctcgccgatcgatacgatggccgtcttctccgacctccacaccgccgacggcctcaagtccctcgaggctcacctcgccggcaaaacctatgtgtctggtgactccattactaaggatgacattaaggtcttcgccgcggtgccgtcgaagcctggcgctgagtttcctaatgccgcccgctggtacgagaccgtctctgcggctgtagctcaagattccctggtaagctgtggtgt

SEQ ID NO: 29608 - DNA, 309 bp, Zea mays
  unsure (1)..(309): unsure at all n locations
gcagcagccaaaacctacctagccgccgccgcagccanccaccatcgccgccaagatgcagatctttgtgaagactctgacggggaagaccatcactttggaggtggagtcctcggacaccattgacaatgtgaaggccaagatccaggacaaggagggcatccccccggaccagcagcggctcatcttcgccggcaagcagctcgaggacggtcgcaccctcgccgactacaacattcagaaggagtccaccctccacctggtgctccgcctccgcggtggcgccaagaagcgtaagaagaagacgta

SEQ ID NO: 29609 - DNA, 301 bp, Zea mays
cgacccgtggagggcgacggcggcgttggcagcgtcaggcagttcaacttcacctcagtcatgccgttcagcttcatgaaggagaggctcgagttcctggacgcggacaagtgcgagtgcaagaacacgctcatcgagggcggcggcatcggcgtcgccatcgaaacggcgacgtcgcacatcaaggtggagcccgcggccggcggcgggagcgtggtgaaggtcgaatccacttacaagctgctgccgggcgtggaggtgaaggacgagatcgccaaggccaaggagtccgtcaccgcca

SEQ ID NO: 29610 - DNA, 301 bp, Zea mays
caccgggcacaccccccgagctcagcttagctccactccagctccaatcacagtcgtgaccagagcgcgagagctagctagagggccgtgaaaatgccgatcaataggatcgccctggggagccaccaggaggtgtaccacccgggcgccctcaaggcggcgttcgctgagttcatctccaccctcatcttcgtcttcgccggccagggctccggcatggccttcagcaagctgaccggcggcggcccgacgaccccggcgggcctgatcgcagcggcggttgcgcacgcgttcgcgctgt

SEQ ID NO: 29611 - DNA, 300 bp, Zea mays
agacgctgtaccagcagttggtcttcaggcacaagctgtatcagctgcgcgaggagagggacatgaagcctgagacctttgccagccttgtctctgcgctcctctacgagaagagatttgggccatatttctgccagccagtcattgctggacttggagatgacaacgtaccattcatttgtaccatggactgcctcggtgcaaaggagctggccaaggattttgttgtttctggaacagcatcagaatctttgtatggtgcttgtgaatccatgtacaagccggacatgcaacctgatg

SEQ ID NO: 29612 - DNA, 298 bp, Zea mays
gcctcttgttagtgcgtaccgctatgatggcccagaggtgaacacatctttggctcattctgaagccaaaatacttcatgagaagatccataagaaggcttacagtgatgaggagatcattagaattctcaccacacggagcaaagctcagctacttgcaacattcaatagctacaaggatcagttcactcatgcaatcaacaaggatctgaaagctgaccccaaggatgagtttctttcaacactgcgggcgatcatccggtgcttcacctgccctgacagatacttcgagaaagtc

SEQ ID NO: 29613 - DNA, 299 bp, Zea mays
ggaacaaaaagaaaaaaaacacgagaaaaatcaaatcaggagacggggattccagagagccccgttcgggtagggaagggaaggagaggcgaagcggaggcgagatgggggcggccgaatccgtgccggagacctccatacacgaattcaccgtcaaggattgcaacggcaaggaagtgagcctggaaacctacaaggggaaggtcctccttgttgttaacgtcgcctccaaatgtgggttcacggagaccaattacacgcagctgacggagctttatcagaagtacagggacaaagac

SEQ ID NO: 29614 - DNA, 291 bp, Zea mays
tgacgtccttggcctcgacccctctcgcgcactcgcgcttgcctgcacgctccagggctccaggctcccctcccacctcgccgcggcagccatggcgatcacggcgccaactcccgacatccgcggcgagcgtcagtccggccaggacgtccgcacgcagaacgtgatggcgtgcggcgcgttgtccaacatcgtaaaatcctcgctcggccccgtcggtctcgacaagatgctagtggacgatatcggtgatgttaccatcactaatgatggtgcaacatacttaagatg

SEQ ID NO: 29615 - DNA, 298 bp, Zea mays
caagggtgttcctcgtccctccgttccaagacaaaacaaacctcgccgtgtggacttgtactactctagctggtgcatccgtccagttgagtcgagaaaaggcgacggtgcaatgagtgcatgcgaggtgctcttgttccaccacgaagacaaggggattccatgggagatcgcgaagcttggcgtcacggcagggatgtggggctgcgtcaagaggatagagcctggccttcgggcgtaccaggtcggggagaccgccggatgagctgtttccaagtgtgctgccatggcacagtca

SEQ ID NO: 29616 - DNA, 303 bp, Zea mays
agcgagcaaggtgataggtaccgtgaattggcccatagggtggatgaggctcttgggttcatgactgcagcagggcttacagttgaccacccgataatgacgactactgacttctggacctcgcacgagtgccttctcttaccctacgagcagtctcttacccgtaaagactccaccagtggccttttctacgattgttcggcccacatgttgtgggttggtgagcgcactcgtcaactcgatggagcgcatgttgaattccttcgtggtgttgccaatcctcttggcataaaggtgagcgac

SEQ ID NO: 29617 - DNA, 295 bp, Zea mays
agccaattcgctcgagttcagatcgagcgcgcgccaagcaagtcttccggccggccgcgaagagcgcaatcaagcaagacaagatggtgaagctcgccttcggaagcgtcggcgactccttcagcgccacctccatcaaggcctacgtggccgagttcatcgccaccctcctcttcgtcttcgccggcgtcggttccgccatcgcctacgggcaactgacgaatggcggcgcgctggacccggcgggcctggtggcgatcgcgatcgcgcacgcgctggcgctgttcgtgggcgt

SEQ ID NO: 29618 - DNA, 292 bp, Zea mays
aacagcttcctgcaagatcttgagcggatttgcctcgaccataacaggaggcgttgctggggcatagggtttgggctgaagttcagggttgtggccctcgacccaaacttcaagaagcttgcggtggagcacttggtcttggcctaccggaggacgaagaagcgtgtcattctcttagactacgatgggacgctgatgccgcagacttcgctcggtaagagtcctacctcaaggacgatagacatgttgaacagcctttgccgcgacaggaacaacatggtcttccttgtga

SEQ ID NO: 29619 - DNA, 276 bp, Zea mays
gtggagacaagataattgtgtttgctgataatctgtttgcactaactacttatgcgatgaaactgcgcaagccaatgatttttggtgccacaagccatgctgagaggacaagaattctctaccaattcaagaacagtccagaagtcaatacaatttttctttcaaaggtcggtgataactcgattgatatcccagaagctaatgttatcatacaaatatcatctcacgctggttcgagacgtcaagaagctcagcgtctgggccgtattctcagag

SEQ ID NO: 29620 - DNA, 293 bp, Zea mays
ctcctcttcgcacgagcgcaacaccatccacccaccagttcgaagcggaggcgaccggcaacctgcggcggagatgtcaggcaggggcaagggcggcaaggggctcgggaagggcggcgcgatgcgtcaccggaaggtgctgcgcgacaacatccaggggatcacgaagccggcgatccggaagctggcgaggacgggtggcgtgaaggcatctccgggctgatctacgaggagacccgcggcgtgctcaagatctttctcgagaatgtcatccgcgacgctgtgacctacac

SEQ ID NO: 29621 - DNA, 293 bp, Zea mays
gctgtttggtcactgcagtgagggacgggatgaacctgatcccatacgagtacgtaattgctcgacaagggaatgagaggatagatagtattctaggccttggtccggcttcaaggaagaagagcatgcttgtcgtgtcagagttcatcggctgctcgccctccctgagcggcgctatccgtgtgaacccttggaacatcgattcagtagccgacgcaatggactacgcgctggagatgccggatagggagaaggtgttgagacatgagaaacaccacagatacgtgagcacg

SEQ ID NO: 29622 - DNA, 289 bp, Zea mays
cggcgccggcgcgcaactgggaggaagcagctgccaccgagccctctggccatcccgttcctcggccacctccacctcgtcaagacgccgttccactcggcgctgcgccgcctcgggaggccacggcccggtgttctccctgcgcatggggtggcgccgcgcggtggtcgtgtcctcgccggagtgcgccagggcgtgtttcacggagcacgaccagagcttcgccaaccgcccgcgcttcgagtccatgcgcctcgtgtccttcgacggcgccatgctctcggtgtcc

SEQ ID NO: 29623 - DNA, 276 bp, Zea mays
cgcgcagctctcatcgtctcgctcgcctagagaagcagccgccgttgctgcatccgcgtccacagaatggggggattcgtgatgactcatatgaccagtgcgtatttcaaacgtatcctagtgatattcaagagaatgcgggctgtcaagacagactacagggccaggataaggctgattaaccaagacaagaacaagtacaacatactcatatacagatttgttgtgcgatttaccaacaaggacatcactgctcgaatcatatctggtagtata

SEQ ID NO: 29624 - DNA, 248 bp, Zea mays
gagactcctaagacatccagatattgttgagatcaaacatattatgttgcctccatcaagacgggaattcaaagatatttatgttgtttttgaacttatggagtctgatcttcaccaagttatcaaggctaatgatgacctgacaaaggaacattatcagttctttctctaccaactgatccgtgctctgaaatacatccacacagctaacgtttatcaccgggacctgaaccaaagaatatattagc

SEQ ID NO: 29625 - DNA, 308 bp, Zea mays
ccccccgatccatttcagccgccgccgcgcgtacatagcaggagcagcaaggatgccggctggccacgggctgcgctcgcggacgcgcgacctgttcgcgcgccccttccgcaagaagggctacatcccgctcaccacctacctccgcacctacaagatcggcgactacgtcgacgtcaaggtgaacggcgccgtccacaaggggatgccgcacaagttctaccacggccgcaccggtcgcgtctggaacgtcaccaagcgcgccatcggcgtcgagataaacaagcaggtgaatggtcgcatcatca

SEQ ID NO: 29626 - DNA, 308 bp, Zea mays
acggaagcaaacactgcccgagacatagacagcgggacgtcgagatggccgacggggaggacgccgccgccgcgcgccgccgggccgccatcacagactaccgcaagaagctgctcaactgcagggagctagagtcgcgcgtcggcaccgtgagagaaagccttaaaactgcaaagaaggattttaccaagactgaggacgacttaaagtctctgcagagtgtggggcaaataattggagaagtactccgacctcttgataatgaacgctttatcgtgaaggccagcagtggtccccgatacgtggtc

SEQ ID NO: 29627 - DNA, 310 bp, Zea mays
cgccaccacacgcggatcgaattaggctctccgagtctccggttccctcctctcggcggcggctcaggtccctctccatctccggcgtggcgcttggcgtctgacctcaacaagcaagaaagcaaatggcaggcggcagggttgcgcatgccaccctcaagggcccgagtgtggtgaaggagatcttcattggactgaccctgggtctgatcgcgggaggcatgtggaagatgcaccactggaacgagcagaggaagactaggtccttctatgacatgcttgacaagggccagatcagcgttgtcgtcga

SEQ ID NO: 29628 - DNA, 294 bp, Zea mays
  unsure (1)..(294): unsure at all n locations
canaatttctcctctcgaagaaccctagcggcaaaacctttgctccgtcccgccgtcgcctgctcccatcccgccgccggcgctgccacccgcatctgccaaggggctcgccgccggggaggctgctcgcggtgccgcgctctctcccgcgcccgaccttggccctcccctcctccatgatctgcgcgatctccggcgaggtgccggacgagccggtcgtgtcgaagaagtcggggctactcttcgagcggcggctcatcgagcgctacattgaggaccatggcaagtgtcccg

SEQ ID NO: 29629 - DNA, 297 bp, Zea mays
taggaatattaagctggcgcctaaatgctgatgattgggagaatgatgagaacctcaagaaaattcgtgaagccaggggttactcttacatggacatttgtgatgtgtgcccagagaagttgccaaattacgaggctaagataaagaatttctttgaagaacacttgcatactgatgaagagatacgatattgccttgagggtagcggctactttgatgtgagggaccaagatgatcagtggatccgtgtagcggtaaagaaagggggcatgatcgttttgcctgcaggaatgtatc

SEQ ID NO: 29630 - DNA, 299 bp, Zea mays
agctgagatctcacgtgtcatgaaccatatgaaagatatgggagtgttggttggtaagggtggtttctacgggaacgtttttaggataacaccaccgttgtgcttcaccaaagaggattccgacttcttcattgaggtgatggacattgcgctctcgaagctgtgaggcaagcagggcgaagatgatgtgcaaaccctggtccgtcgccatgggatttttgcccatgaataatattaagattaatgagacagcacctcgttgtctcttaatctaagacgatgccatgtcatccggtggc

SEQ ID NO: 29631 - DNA, 303 bp, Zea mays
ggcggcggtggcggacggaaggcgaaggagtagcagcagcaggcggcgccgagtagcggctccccacctcgagcttgccaccatggctagaggattgaagaagcatttgaagaggctcaatgcgcccaagcattggatgctggacaagcttggcggagcttttgctcccaagccatcttctggacctcacaagtctagggagtgcctgccactgatcctcatcatcaggaacaggctcaagtatgctcttacataccgtgaggtcatttccatcctgatgcaacgccatgtacttgttgatgg

SEQ ID NO: 29632 - DNA, 289 bp, Zea mays
cggttggcttctcctccccctccggttcgggttcgggttcgtgaggttctccggggttcgggttcgtgggtgagcggatcgagatggcggcgtcggatgttgagtaccgctgcttcgtcggcggcctcgcctgggccacggacgaccactccctccacaacgccttcagcacctacggcgaggtcctcgagtccaagatcatcctcgatcgggagacgcagaggtcccgctgcttcggcttcgtcaccttctccacggaggaagcgattctgaacgcatcgagggcatg

SEQ ID NO: 29633 - DNA, 301 bp, Zea mays
gtggcgctgcaggctgagaagtccgagctgcgagacgagaagacgaggctcaaggctgagaaggagaggatggagcagatgctcaagggcgtcgtcagccacgccgcggtggctgctccggggcccttcgtcccgcaccctgctgcggtcgctccatctttccaccaccacccggcggcgtttgctcaggctggaaagttcgtcccgtaccccagctacccgccgccggctgcgttctggcagtggataccgccgacgtccctcgacacgaccaaggaccccgcacactggccgccggtcg

SEQ ID NO: 29634 - DNA, 302 bp, Zea mays
tccatctattgtctcccttccaattcgatgcctttgtagcgctgctgcctcgccgcgtcgtcgcgggtccccgatttccgcttgctgctgcgcttccaacaccatggacggcgggggatccggcaatgcctccggcggcagcggcggcgcatcgacgtgctgctactacgcgctcctcggcatccgcaagaacgcctccgccaccgacatacgcgccgcttaccggatgctcgcgatgaagtggcacccggaccggtgggccagcgaccccggcgcggccggcgaggccaatcagcggttcc

SEQ ID NO: 29635 - DNA, 293 bp, Zea mays
aaagcactacatctgtatgactgcttgagagctaacaaagcaacttctgcctggggtgttgaggctcgtgttccattccttgacaaaagtttcatcagtgtagcaatggacattgatcctgaatggaagatgataaaacgtgacctcggtcgaattgagaaatgggttatccgtaatgcatttgatgatgatgagaggccctatttacctaagcacattctctacaggcaaaaggaacagttcagtgatggtgttgggtatagttggatcgatggattgaaggaccatgccag

SEQ ID NO: 29636 - DNA, 292 bp, Zea mays
cagggtttcagcggtgcagatatcacagagatctgccagcgcgcgtgcaagtatgccatcagggagaacatcgagaaggatatcgagagggagaggcgcaggaaagacaaccccgaggccatggaggaagacgaggtagacgacatcgctgagatcaaggctgctcacttcgaggagtccatgaagtacgcccgtcgcagcgtgagtgacgccgacatccgcaagtaccaggccttcgcccagacactccagcagtcccgcgggtttggcagcgagttccggttccccgacc

SEQ ID NO: 29637 - DNA, 294 bp, Zea mays
ccccagtccccgatccgaagctgtgcctcgtaccatttcgatccaatggcgccgacgtcgaagctgtcgacgggcatcaagcgcgcttcgcggtcgcacacgtaccatcgccgtgggctgtgggccatcaaggccaagaacggcggcgccttccccaaggccgacaaggccgccgccgccgtggaacccaagttctaccctgccgacgacgtcaagccccgcgttcccagcacccgcaagcctaagcctaccaagctcaggtcgagcatcacgcctgggacggtgctgatcctc

SEQ ID NO: 29638 - DNA, 295 bp, Zea mays
cgtttcgaggccgatcgaccgagcagctggtggcaatggcggcggcggcggaggtcgtgctgctggacttctgggtgagccccttcgggcagcgctgccggatcgcgctggcggagaagggcgtggcctacgagtaccgcgagcaggacctcctgaacaagggcgagctgctcctccgctccaaccccatccacaagaagatccccgtcctgctccacgccggcaggcccgtctgcgagtcgctcgtcatcctccagtacatcgacgaggcctggccggacgtcgcgccgctcct

SEQ ID NO: 29639 - DNA, 296 bp, Zea mays
actcaacacagcacaggcagctcgagagagagagagagagaaagatgtcgtggttcgggcaccaccaccacaaccagccggctcccccggcgtcgggccccaaccaggtgttcaagatcttctgccgcgccaacgagaactactgcctggccgtccgcgacggcgccgtcgtgctggccccggtcaaccccaaggacgaccaccagcactggtacaaggacatgcgcttcagcacccgggtcaaggacgaggaaggcatgccggcgttcgcgctcgtcaacaaggccacggggctc

SEQ ID NO: 29640 - DNA, 296 bp, Zea mays
tgtgagggtgtgaagtacggagctggcattggccctggtgtctacgacatccactctcctaggattccctccaccgaggagatcgcagaccgcgtcgagaagatgctcgccgtgctcgacaccaacatcctctgggtgaaccctgactgtggtctcaagacacgcaagtacacggaggtcaagcccgccctgaccaacatggtctcggccaccaagctcatccgcacccagcttgccagcgcgaaatgagtcgtttgatagctccatggtctgatagcgcggaatgagccagtttg

SEQ ID NO: 29641 - DNA, 294 bp, Zea mays
ctatcccaaaaccgtagcgccctcgcctgctcgccgccgccgtcgttgcgagctccccatcttcctccgtcaaccatggcgacccagatcagcaagaagaagaagttcgtcagcgacggcgtgttctacgccgagctcaatgagatgctgacgcgggagctcgcggaggacggctactccggcgtggaggtgcgcgtcacaccgatgcgcacggagatcatcatccgcgccacggcacgcagaacgtgctcggcgagaagggccgcaggatcagggagctcacgtctgtcgtcc

SEQ ID NO: 29642 - DNA, 296 bp, Zea mays
cggctcgagatccgctattagctcagcacttatcacattttggtatcgatttttcttcactccaaaagactgagatgactactgctgagagggaacttgatgctaacacaaattatgactggaatagaatacaagaaagtggaaaagacgctgagcttctgtttggacccggctatactggtcttgcgaatcttgggaatagttgctatatggcttcaataatgcaagtcatgttttcaatccatcctttcatatcaaggtacttcgagaaacagagtttgaaagctgcatttgca

SEQ ID NO: 29643 - DNA, 297 bp, Zea mays
  unsure (1)..(297): unsure at all n locations
ctaaaccagcggaaacctaaccagctagcagcattagcttttcaacaagcctcgctcgcncgccgtgaccgatagatggccatcacccacgacgactacgtctccctgtgcctcatggngctcgcagccgcngnangaggaggagggcacgctgcggctgccagtnnnnnnnnnnnnnnnnnnnnnnnncaagantncgagctccgcttccggtgctccgtctgcngcaaggncttcncgtcgcaccangngctgggcgggcacaaggccagccaccggaagccgccnncnangctc

SEQ ID NO: 29644 - DNA, 294 bp, Zea mays
cgctgcgctccgtgtcgccgctcgaatccgccatgaagggggccaaatccaagggcgccgccaaggccgatgccaagctggcggtgaagagcaagggggcggagaagcccgccaagggcaggaaagggaaggccggcaaggaccccaacaagcctaagagggctcccagcgctttcttcgtgttcatggaggaatttcgcaaggagttcaaggagaagaaccctaagaacaagtctgtcgctgcggtggggaaagctgctggcgacaggtggaaatccctgagcgagtcggaca

SEQ ID NO: 29645 - DNA, 292 bp, Zea mays
ggcaaagggggtttctcttttgcttcccactgatattgtagtagcggacaagtttgcagccgatgctgagagcaagattgtccctgccactgctatccctgatgactggatgggtcttgatgttggccctgatgccaccaaaacattcgacgaagcattggacaccaccaagactgttatttggaacggccccatgggagtgtttgagttccagaagtttgcagctggcaccgaggcgattgccaagaagctagctgagcttacaaccacgaagggtgtcactaccatcatc

SEQ ID NO: 29646 - DNA, 263 bp, Zea mays
  unsure (1)..(263): unsure at all n locations
cgtgctccttgttttacagcttcaactttcacggactggtcgtcagttctagcgcttcatacacctgtcctgtggacttggaccttggaaactacgaacgatttctggacatcaagctgactcgtgacaacaacataaccacggggaagatctaccagtctgttattgacaaggaacgtagaggggattacctangaaaaactgttcaagttgtgccgcacatcacagatgaaataccagagtggattgaacgtgtggcaatg

SEQ ID NO: 29647 - DNA, 310 bp, Zea mays
  unsure (1)..(310): unsure at all n locations
gttcttactggtggacatggactgatggtaaatgggtactatcctgttattgaagctcttgctcaaggtcttgacatcaggcttaaccanagggtcaccgaaattacccgccagcacaatggagtcaaggtcactactgaagatggcacaagctacttggccgacgcctgcataatctcagtgccactcggcgtgctcaaggcgaacgtaataaagttcgagcctgagctgccccagtggaagagctccgccatcgccgacctcggcgtgggcaccgagaacaagatcgccatgcacttcgacagggtct

SEQ ID NO: 29648 - DNA, 307 bp, Zea mays
atgcaatcgcaagcgagcagaatggcgaggtccagtggtagtagaccagtggccctcgtgctgctggcgctgtgcgccgccgccctctcgtcggccacggtgaccgtgaatgagcccatcgccaatggcctctcctggagcttctacgacgtttcctgcccgtcggtggagggcatcgtgcgctggcacgtcgccgaggccctccgccgcgacatcggcatcgccgcggggctcatccgcatcttcttccacgactgcttcccgcagactgcgacgcgtccgtcctcctgtctggttccaacagcga

SEQ ID NO: 29649 - DNA, 301 bp, Zea mays
  unsure (1)..(301): unsure at all n locations
tgcagactctgctagaagacattcctgtgagtcctgcaatttccggcactgcatcatcaaccggtgactcagacggaaaaagtanatcagctggagataaaagctcaactaggaaactgaagcatgatgtcatcgcagccattggtgaccttattgatgagattgactcatgctatgagccgatctctgagcaagctgtggaacttattcaccaaaatgaggtaatcctaactctaggtcgttcgagaactgtcaaggagtttctgtatgctgcgaaagagaagaagcgatctttccgtgt

SEQ ID NO: 29650 - DNA, 307 bp, Zea mays
ctccattctcagccgccgccaatcccttcccgtgctccgcaaccgctgagtgagaagaagagatggccggcaagggcgatggcccggctatcggcatcgatctcggcacgacgtactcttgcgtcggcgtgtggcagcacgaccgcgtcgagatcattgccaacgaccagggtaaccgcaccacgccctcgtacgtcgccttcaccgactccgagcgcctcatcggagatgcggccaagaaccaggtcgccatgaaccccatcaacaccgtctttgatgccaagcgtctcatcggcaggaggttcag

SEQ ID NO: 29651 - DNA, 305 bp, Zea mays
ggagttggtcagcagctgttttatggtcagccacctccagccttcatcaaccctcaggctggatttgctttccagcaacctatgatgcctggtatgaggcctggtggtccaatgccgaactttatgatgcctatggttcagcagggacagcaaccgcaacgtcctgctggtaggcgtgctgggtctggtggaatgcagcagcccatgccaatgggtagtcagcaacagatattccctagaggtggtcgtggctaccgctatgctactggacgtggaatgcctgatcctggcatgcataatgttgg

SEQ ID NO: 29652 - DNA, 307 bp, Zea mays
acccaaggacgaccaccagcactggtacaaggacatgcgcttcagcacccgggtcaaggacgaggaaggcatgccggcgttcgcgctcgtcaacaaggccacggggctcgcaatcaagcactccctcggccagtcccacccggtcaagctcgcgcctttcagcccggaccaggaggacgcgtcggtgctgtggacggagagcaaggacgtgggcaagggcttccgctgcatccgcatggtcaacaacacccgcctcaacttcgacgccttccacggcgacaaggaccacggcggcgtgcacgacggc

SEQ ID NO: 29653 - DNA, 283 bp, Zea mays
cttctcctccccctccggttcgggttcgggttcgtgaggttctccggggttcgggttcgtgggtgagcggatcgagatggcggcgtcggatgttgagtaccgctgcttcgtcggcgggctcgcctgggccacggacgaccactccctccacaacgccttcagcacctacggcgaggtcctcgagtccaagatcatcctcgatcgggagacgcagaggtcccgctgcttcggcttcgtcaccttctccacggatgaagagatgctgaacgccatcgagggcatg

SEQ ID NO: 29654 - DNA, 299 bp, Zea mays
cgagcggtgacttgcctgatgtagagaccctcaaagagaacatcgttgcttatttcaacatcctacagggatttcttttggtttgccacggaagcatggtcggtgctgggcctactctacacaagtccatctttgggtctgcaaaagacgtggttgactctagcttctcattgttcaagcatgctgtctctgcttatgaatctcgcagctctgaccgcaacacaactataccccaggtcacaggaactgtatgggaagcttgtgctgctctcaagaaggtgcctgcatcaaactgcatt

SEQ ID NO: 29655 - DNA, 300 bp, Zea mays
ttccattcctcttctctctctctctctctctcccgtgctccgttagctatagctcttcgacctccaagaatcacacggccgggtcggtcgagcaggatgtggatgcgctgttgggcgagctgaacttcatccctggcacggtgttcacgacggacctgccgtacgtggatttcctggaccgcgtgcacaaggcggagctgaagctgcgcgccaaggggatgtgggaggtgccgcacccgtggctgaacctcttcgtgccggcgtcccgcatcgccgacttcgaccgcggcgtcttccgcg

SEQ ID NO: 29656 - DNA, 203 bp, Zea mays
tggagacgggatgattcatgccatgcgtattaaggatggaaaagctacctatgtatcaagatatgtgaagactgcccgcctcaaacaagaggagtattttggtggagcaaagtttatgaagattggagaccttaagggattttttggattgtttatggtccaaatgcagcaacttcggaaaaaattcaaagtcttggatttta

SEQ ID NO: 29657 - DNA, 294 bp, Zea mays
gttttctctctcttgtaggttggcggctggactgtggtgtacgacggcctgacattcgtcaccgtgagatctgccgggcacatggtcccgtccacgcagccgcagcaagcgctcgagctgttcaagcacttcctggccaacacgaaactgccctccgagcccttctagatatataatagtgtgcaacaaagctctccactcctggataaacaagcaggagcgatcgtccgtgcaccacatttattagacctgttgtacctgcgttcttggaaggtgtaatggaacagtgctgtg

SEQ ID NO: 29658 - DNA, 295 bp, Zea mays
ctcgctgctcgttgccggctgcccccgcccactccaccgctgatatttgtcatcgtctcgttcctgccctcggccctccccaactccagcaggcagatcagatacatccattcgcggaccggaagtaatcatcaggaaaggaaagggttgaaccatgagcgccgtggctgtttcgtcgtcgctgaacccggacgcgccgctcttcatcccggcggcgctgctgcaggtggaggacttctcgccgcagtggtgggacctcatcaccaccactgcctggttccgcgaccactggtcc

SEQ ID NO: 29659 - DNA, 279 bp, Zea mays
gacgccgacaaggtattttcggattcagaattatggatatggagcacgaccaggacgaaagctgagccagacgaaggtcgggggcagccgaagctgtacgcagggaagcttcggcgcgatggcacaagggggaaccgaccttaagatgaaaagacttcgggggtctcaatagatttccataaaccgttaacaaatgtaatggacatggatgtaattttacgtgggctgcgtcccgcgtctataaatagatgaacagtactcccgtactgttcacgctga

SEQ ID NO: 29660 - DNA, 292 bp, Zea mays
cagaaactaaaaagccacgggtgaagatttatactgataaggaaaccggcaggaagaagggtgatgccttggtaacatatttcaaggaaccttctgtagctttagcggttcaattgttggatgggacatcattccgttctggtggtaagactcctatgtctgtaagtccagccaaatttgagcagaaaggcgatgttttcatttcaaagaaaagtgacaagcaaaagaaaaggaagataaaaaaggttgaagacaaaatgcttggatggggtgggcatgatgataagaagct

SEQ ID NO: 29661 - DNA, 293 bp, Zea mays
tcgagcgacaacacctcatgtccaagtgctatagttattcatgaaagtgtccaccgacgaaggagaagccaaagcacaggagcatggtgctatgttcatggagaccagtgcaaaagctgggttcaacgtcaagcccctattccgcaagatcgctggatcccttctaggactagacgcactttcgtcaggaaagcaggaagacatggtcgacataaacctcagacctgccagcggttcgtcggcttcaggtgcagccgcgcagctggagcagaaatcaggcggttgctcctgtt

SEQ ID NO: 29662 - DNA, 308 bp, Zea mays
gggtgatccgggatggctacaaggctggaaacctgaaatcagccatgaactgcagttacgtgaaagactatgagttcgttgtcatcttcgatgctgatttccaaccacaggcggacttcctgaagcgcaccgtgccccatttcaagggaaaggatgacgtcgggttggttcaggcgagatggtcgttcgtaaacaaggatgagaacttgctgaccaggcttcagaacataaatctttgcttccacttcgaggtggagcagcaggtgaacggggcgtttctcaacttcttcgggttcaatggcaccgcg

SEQ ID NO: 29663 - DNA, 306 bp, Zea mays
cggctcgaggcctggcggagagacccaccgagtggtccaccacagtaccgcagcagcacaatcttcgaggacgcgtcaccggaggttgtgagagatttcttctgggacgatgagttccggatgaagaacagctgggacgacatgcttcttcagcacgagacgctggaggagtgcaccgagactggaaccatggtggtccggtgggtcaggaagttcccgttcttctgcagcgacagggagtacatcataggccgcagatatgggcgtctgggaagacattttactgtgtgaccaagggtgttcctc

SEQ ID NO: 29664 - DNA, 269 bp, Zea mays
ggcgtccttatgagaaggagcgtcttgatgctgaactgaagctggttggtgagtatgggctgaggtgcaagcgtgactttggagggtccagtatgcactgagcaggatccgtaatgctgcaaggcacttgctcacccttgacgagaagaacccccgtcgtatctttgagggtgaggcacttcttcgccgcatgaaccgctatgggctgcttgctgagggtcagaacaagcttgattatgttcttgccctcaccgctgagaacttcctcg

SEQ ID NO: 29665 - DNA, 304 bp, Zea mays
cactccgctcggccaccagctttgaccgcctcccctcgccaccgctcctgtcgcctccataccccacccccccgcaggagcggcgcggcggcggcggcggcaaagccaaaggcaagatgttcgggcgcgcgccgaagaagagcgacaacaccaagtactacgagatcctcggggtgcccaagtcggcgtcccaggacgacctcaagaaggcctaccgcatagcagctatcaagaaccaccccgacaaaggcggtgaccccgagaagttcaaggagctcgcacaagcctatgcaggtttgagtga

SEQ ID NO: 29666 - DNA, 307 bp, Zea mays
caggaaaaaaaccgcccagctggaacccccaaaaccataacgagggtgcccgtcctgctagccggtgtgcttgctgtgcgatcgtttggcatgtgcttgttgaggggttgctaggggattggagaggattgaagggattaaatctcctcctattcaattttgaataggaggggatttaatccccttcaatccccctcaaaccactagtaaccgaacgtggcctgagggggcgggcgagtctttatattgaatgaaactacataaaatagcatgccgtctctgtcactggcaatggacggtggtgcct

SEQ ID NO: 29667 - DNA, 307 bp, Zea mays
cgcgctcctcgatccccaacaggcaacagcccagccgctgtcgccctcgttccgtagtacggcgccgccagatcgtcagtcaccatgatcatctccaagaagaaccgccgcgagatctgcaaatacctcttccatgagggggtcttgtacgccaagaaggactacaacctggccaagcaccccaagcttgatgtgcccaacttggaggtgattaagctcatgcagagcttcaagtcgaaggagtatgtgagggaaacttctcatggcagtactactactggtacctcaccaacgatggcattgagca

SEQ ID NO: 29668 - DNA, 310 bp, Zea mays
atcaggcagcacctagctagcagcagccaatgacgaagccttcgcaggtgctgttggcggcgctcgccgcctgggcggtggtcctgctgctgctgtgcgccgccgcgccgcggagcgccgacgcggcgacggcgtgcgacgccacgcagctgacgccgtgcgccggcgccatcatcatcgggaggtcgcccagcgcggcgtgatgcagtaggctcaaggagcagcagccgtgcctgtacacgtacgcgcgcgaccccaatcttcagcgctacgtcaactcgccaaacggcaagaaggccatggccgcgtg

SEQ ID NO: 29669 - DNA, 276 bp, Zea mays
cgagtggcgatggcagtactgcacttgcacgtggcggcggtggcggtgctgctgatggcgacggggctgcgcgcgcagtgcgggtgggcttctacgacagctcgtgcccagcggcggcgatcattcggcagcaagaggtgagcacggcggtggcggccaacccgggcctcgccgccggcctgctccggctccacttccacgactgtttcgttgggggctgcgacgcgtccgtgctcatcgactccacaagggcaacaccgcggagaaggacgccgg

SEQ ID NO: 29670 - DNA, 184 bp, Zea mays
tgtggggcgggagatgcggttccacctctggttcgaccccacggcggcctaccacacctacgccatcctgtggaaccccgacgccatcaccttcttcgtggacgacgtgcccgtccgccgctacgagcgccgcaccgagctcaccttcccggaccgccccatgtgggtctacggctccatctgg

SEQ ID NO: 29671 - DNA, 301 bp, Zea mays
gtcggacgaaggcggcaccggcgagccgctcagcgacaccagaagcgggagatcgccgtctggttcctctccaacgcacccgccggcgagatccactacgtcgccaaagatgtgcgcgcgctgctaggggacgacgcggtgtacgaggccgccgccgcggaggccttcccggagtacaacaaggcccgcctcgtgtccctcgagctccccgaccgcagtggcgacataatcatcacaacttatggggagattgactagaacaattatctggaccccaggactgcgcaagttgctactatag

SEQ ID NO: 29672 - DNA, 289 bp, Zea mays
cgccctccaacggcttcatcggcaagcagttcttcgggctcaagcagctgcccaggaccggcttcgactacgacttcttcctctaccagtgggccttcgccatcgccgccgcgggcatcacgtcgggctccatcgccgagcggacccagttcgtcgcctacctcatctactccgcgttcctgacggggttcgtctacaccgtggtgtcgcactggttctagtccgcagacggctgggccggcgccagcggacgtccggcccgctgctcttcgggtccgtcgtcatcgac

SEQ ID NO: 29673 - DNA, 303 bp, Zea mays
caacggtgaagtccgtcctcgtgtaccccatcaagtcctgcaggggaatctccgtgccccaagcccccatcaccgccacggggttcaggtgggatcgccagtggatgctcgtcaactccaaagggagagcatgcacccagagggtggagcccaagcttgctctggttgaggtccagatgccgccggaggcctttgccgaggactggcaccctacgcccgacgaccacatggttatcagagcacctggaatggaacccttgaaggtcctctatctgtggaatgtgccacaatcagtgatgtctc

SEQ ID NO: 29674 - DNA, 304 bp, Zea mays
gctggagatgatgataatgatgatgatgatgatgaacctcctcttaatgaagacgacgacgaggagttagatgaccttgagcaaggggaggatgaacctaacacacaacatcttgtacttgcacaatttgataaagtgtcaaggaccaagaatcgttggaagtgcaccttgaaggatggaatcatgcatttgaatggcagggatgtcctttttaacaaggcgacaggtgagtttgatttttgattttttggatgaagatgagctattttagaagcagctgtatggacatatctttgtcttgaca

SEQ ID NO: 29675 - DNA, 301 bp, Zea mays
  unsure (1)..(301): unsure at all n locations
agcctcgcgtcncgtccgcgtccgcgccgccttttcgtccccgcgtccgcgtcgcggctccactgggcgtgcgcgtcaccggcgggaggcgagggcaggcggtggtcgcgatggcgtccgccgacgcgcgcttggcggggattgcctcctccatccgcgtcatccccgacttccccaagccagggatcatgttccaggacatcacgacactgctgctcgaccccaaggcgttccgtgacaccatcgacctcttcgttgagcggtacaaggaccaagggatcaccggtagtgctggtgtgga

SEQ ID NO: 29676 - DNA, 294 bp, Zea mays
  unsure (1)..(294): unsure at all n locations
ctcgcctccactcncccctcccaggtgctgcccaggtaagtcggcggcggcgatgacaacgcgcttcaagaagaaccgcaagaagcgcggccacgtgtccgccgggcacggccgcatcggcaagcacaggaagcacccgggaggtcgcggtaacgccggtggcatgcaccaccaccgtatcctcttcgacaagtaccatccgggctacttcggcaaggttggcatgcgttacttccataagctccgcaacaagttctactgccccgcggtcaacatcgagcgcctctggtcgat

SEQ ID NO: 29677 - DNA, 290 bp, Zea mays
ggagcgagcagccaaggaaaggagccaagcaatggagaaggccgtcgacaggcagcgggtcctgctgcggcacctcaaccccgccgcggcgggagccccgccccgcccgccatctccgcaagcgcgtgcgcgcgggggacagcgcggcgtaccaccggaggccggccttcgccgacgacgtcgtcatcgtcgctgcttacaggacggcaatttgcacggccaagagagggggtttcaaggatacctttgctgaggaactcttggttcctgtcttcaaggctttggtagac

SEQ ID NO: 29678 - DNA, 293 bp, Zea mays
cgaggaacaacgggaaaacggttttacactcagcagcaagaatgggccacgtggaagttgtaagatcgttgctgaataaggatcccaggattggtttgaggacagacaagaaggggcaaactgcgctgcatatggcttcgaaagcgcgaatgctgagatcgtggtcgagttgttgaagccagatgtctcggtcatccatatcgaagacaacaagggaaacaggcccttgcatgttgctactcggaaggggaatatcattatagtgcagactctgttatcagttgaggggatcg

SEQ ID NO: 29679 - DNA, 295 bp, Zea mays
aacgagttcaacttttgcaggaagaagctcgtcttgttcaacaacagaaagatttagagattgaggctgagtttgggcagagctctgacaagggcaaggatggttttgacaaagattctatcagcaagaggcttgaggagatatataaacggcttgagctcattgatgcggatgcagcagaggctcgcgcacatcaattttggcgggtcttagttttactccagaaatgcaacgcaagcgtacaaaacaattttctggtggatggcgcatgagcatagctctagcacgtgctctg

SEQ ID NO: 29680 - DNA, 294 bp, Zea mays
ggccaagacacaagtggttgctggcacgatgtactatctcactattgaagtgaaggatggcgaagtcaataagctctatgaagctaaggtctgggagaagccatgggagaacttcaagcagctgcaggaattcaagcctgttgaagagggtgctagcgcctaaggatctgtcgtctccctgtgcaatttgctgcctgaagcgcaaaactaagttgcagaataaggagctgcttcggaacatgccagagcatgcaccctcgcgtattttcataaaatcagtgctcttaatgtaat

SEQ ID NO: 29681 - DNA, 294 bp, Zea mays
accacaacaaccgcctcctcgccatgtcggaggacgacctcccctaccacgtgcgcgtcaccgccgacggggacctcgagaccgccgggcgctacgacttcggcggccagctcgacaccgccatgatcgcgcaccccaagcttgacccggccaccggcgagctcttcgcgctcagctacaatgtcgtgtccaagccgttcctcaagtacttctacttcaccgccgacggccgcaagtcccccgacgtcgagatccccgtggacgcgcccaccatgatgcacgacttcgccgtca

SEQ ID NO: 29682 - DNA, 298 bp, Zea mays
ggatgatcttagactcccaactgatgagactcttgtggcccagattaaggaagggttcgacagcgggaaggatcttgttgtgactgtccagtctgcgatgggggaggagcagatctgcgcgttgaaggatgttggccccaagtaacttccttggctttggagacggaaccctactgtatctcaacttaaatcggaaaagaagtgtatcaccaaaggattgctaccgagacattcacctggcttgagctggcttttgctatagcgtgcaaggggttgctgggtgtcgtactacctgact

SEQ ID NO: 29683 - DNA, 311 bp, Zea mays
ccatcacccgcctccactcccccctcccaggtgctgcccaggtaagtcggcggcggcgatgacaacgcgcttcaagaagaaccgcaagaagcgcggccacgtgtccgccgggcacggccgcatcggcaagcacaggaagcacccgggaggtcgcggtaacgccggtggcatgcaccaccaccgtatcctcttcgacaagtaccatccgggctacttcggcaaggttggcatgcgttacttccataagctccgcaacaagttctactgccccgcggtcaacatcgagcgcctctggtcgatggtgcccaccg

SEQ ID NO: 29684 - DNA, 307 bp, Zea mays
cagaggctaagaagcctgaggactgggatgacaaggagtacattcctgaccctgaggacaagaagccagagggctatgatgatattcccaaggaaattcctgaccctgatgctaagaagcctgaggactgggacgatgaggaagatggtgaatggactgcccctaccattcccaacccagaatacaagggaccatggaaacaaaagaaaatcaagaacccgaactaccagggtaaatggaaggcacctatgattgacaacccagattttaaggatgatccatacatttacgccttcgacagcttgaa

SEQ ID NO: 29685 - DNA, 306 bp, Zea mays
ggcgagggtgtcggagctcctgaccaaagggaccgccgcagccgcagccgcgctgggggcggagccgtcctcggttaccgcctgagcggtccagcgaaccgcgaggagaaagagaaccgatcaagcaatcacgtctgccgcacttgcgtgctcctgctccgaacagatgccacgacggacggtgacgctgtcgcgtctgtttgcgctgtggcgttggcgtcgtgtctctgcctttctggccgcatgtgttcgctgtggtaacatttgaataaaagaaaacgcagatttgtttgcactgcaccccct

SEQ ID NO: 29686 - DNA, 303 bp, Zea mays
gtggagctcccaaggaggaggaggttctgcagtatgctagagtgcttttggattgcgctacctctgatcctgatggtcgtaagagagcccttctaatcggaggaggaatcgctaacttcacagatgttgcttctacatttagtggcatcattcgggctttaagagagaaggagtccaaattaaaggctgcaaggatgaacatttatgtccggagaggtggtccgaactaccaaactggactcgccaaaatgcgcaccctaggcgccgaacttggcgttccaattgaggtctatggaccagagg

SEQ ID NO: 29687 - DNA, 310 bp, Zea mays
gtattatgaagagaacagaatcttcagctcccatctttaacatggaagacatcgaggagggtattgaaggttatgaggatgaaaggtcagtgcttatgtcccagaggaaattggagaaacgctttggtcagtctccaatcttcattgcatccacctttatgactcaaggtggcataccaccttcaacaaacccagcttctctactgaaggaagctatccatgttatcagctgtgggtacgaggacaaaactgaatggggaaaagagattggctggatctatggttcagttacagaggatattctgactgg

SEQ ID NO: 29688 - DNA, 295 bp, Zea mays
catcccccgaccgaaagtgccgatctggtggaggtggtactgctggatatgccccgtggcgtggacgctgtacgggctggttgtgtcacagttcggtgacgtcatgactccgatggacgacggaagggccgtgaaggtgttcgtcgaggactacttcgacttcaagcacagctggcttgggtgggtggccgccgtggtggtggcgttcgccgtgctctttgcgaccctgtttggctttgccatcatgaagcttaacttccagaagagataatgacgataggagttgggaaatcac

SEQ ID NO: 29689 - DNA, 242 bp, Zea mays
gtgccgtttcagagagctaactggaagatacccacagaacataactggtgttagctacgatttcaaggaggaacgttttgcacaactgcacagaaccggactcggattcccggaaagaaaggtcttcttctcaggtacaccagctacgccttccgcaaaggaagctgctctgaaaagcgaacacgctgtccattctcagttccttgaagacccgtatggatgtctaggatctcctcatgtaa

SEQ ID NO: 29690 - DNA, 297 bp, Zea mays
tggagagctcatctattttgagatggatatgactggtcagctcatggaggtagagaagcaggacatgtctggtgatgttgcgtgcctggccattgcaccggtccctgaggggaggcaaaggtccagatttcttgccgtaggatcctatgataacaccattcgtatcctctcattggatcctgatgattgcctgcagcctctaagcgtccagagtgtatcatcggcaccagagtcactcctattcttggaggtccaggcatcagttggtggtgaggatggtgcagattatccagccaa

SEQ ID NO: 29691 - DNA, 241 bp, Zea mays
  unsure (1)..(241): unsure at all n locations
cacggttctcatcttctagttagtcttggtattgatgttttcagaattgatcgagtaataagcacctttggcatgccaatgggaccttttcaactccaagatgtggctgggtatggagttgccttggcagtaaaggatatctacgctgatgcctttggagaaagaaatttggactctgaccttgtggatttgatggtaaaggatggacgacaaggaaaggtgaancggcaaggttactaca

SEQ ID NO: 29692 - DNA, 294 bp, Zea mays
tacacatttaattggaatctacgtcaagcaacctcgggccggcgcgtgatcgagatggcaaccagtggaccgagcgccgccgccgccgctcccaaggactcgtggccggaggttgtgggcatgtcatcggaggaggccaagaagaagatcaaggaggacaagccgggcgccgacgtgcaggtggtcccagccgacgccttcgtcaccatggactacagcaccggccgagtcagggtcttcgtcgactccaacgacaaggtcgccaaagctccccggatcggctagctggatagg

SEQ ID NO: 29693 - DNA, 300 bp, Zea mays
agcgcagggtgcaagaagctgtccctccctccctcccctgtgcttctgctagctaggtgcctgcggaggagagatagggatacgatggccggcggtggcatcgtgaacacgggcggtggcaaggactaccccggcaagctcacccgtggcggaacatcctgcgccgccggtaccgcgcgcagctcaccatggccgtcgcgatccccttcttccagcagctcacggggatcaacgtcatcatgttctacgcgcccgtgctgttcgacacgctgggattcaagaacgacgcctccctcatgt

SEQ ID NO: 29694 - DNA, 294 bp, Zea mays
gtgtctgtgtgccacttcataactttgattatatatatagttatctcatggagacaaacgtcattttgttgactgttttgatgatcctggtccacatggagcaggtagatattctgaccatatgttacctgaaattgtgaagaaagattggagaaagggtgcacagtggtttacagtgaaacgtcagcatgcagttcttattcttgctgacaccctttactatgggaagttcaagcgttactgtaagccaggaaatgagtggcataactgctattcagatgagcactacttgcc

SEQ ID NO: 29695 - DNA, 292 bp, Zea mays
caattattcctttccaatttgcagttatgttcctaaccctgtcctagtgattattgatgttcaacccaaggagcttgggatacccaccaaggcgtattacgccgtggaagaagttaaagagaatgctacacagaaaagtcagaaggtatttgtccatgttccttcagaaattgctgctcatgaagttgaggaaattggagttgaacaccttttaagggacgtaaaggacacaaccataagcacacttgctacagaggtcactagcaagcttgcagccttgaagggactagat

SEQ ID NO: 29696 - DNA, 292 bp, Zea mays
tctccctccgagcctcagttcgcatccacgcgcgccgccgccgcctcgccggtcgacgctcaccgcgcaccatggcggaacagactgagaaggctttcctcaagcagccaaaggttttcctcagctcaaagaaatctggcaagggtaagaagcctggcaagggcggcaaccgattctggaagagcattggccttggcttcaagactcccagggaagcaatcgaagggacctacattgacaagaaatgcccattcactggaactgtttctatcagaggcagaattattgctgg

SEQ ID NO: 29697 - DNA, 291 bp, Zea mays
tttaatcctgtgaagggagagatagtcctcgcacaatttagcgttgacaactcctggaacagagctatgattgttaatggacctcgttctgttgaatctccggacgacaagtttgaagtattctatattgactatggcaaccaagaggtggttacctacagtcgtttacgacctgtagacccatctgtttcctcgtctcctgctcttgctcagctatgcagccttgctttcataaaagtgcccagtcttgaggatgactttggtcaggaagcagcagagtatctaagtgaa

SEQ ID NO: 29698 - DNA, 140 bp, Zea mays
attttaccccgacgggtaaacggggatacgtctggggaagcattccccatccccgttccccgcggggacccgttaaacttacatgtgacgatgttttcatataatagttaatgataaaaaataaataattatcatgccac

SEQ ID NO: 29699 - DNA, 288 bp, Zea mays
accgcgccatatatagccgcagtaagcaggcgagaacgacgaagaggtcacgcaccacaccgatcaatccagctcgagcgaccgatcacgtgcagcacagcacagcacagcggtgctcgatcggcgaagagagatgacggggttcgggtcaccgtgcggggcgtgcaagttcctgcgccgcaagtgcgtgcgcggctgcgtcttcgcgccctacttctgccacgagcagggcgcggcgcacttcgccgccatccacaaggtgttcggcgccacaacgtgtccaagctg

SEQ ID NO: 29700 - DNA, 290 bp, Zea mays
tcgggcccaaggcctcctgcatctccttcaaggactccgcctgccgctgcttcggctacatggtctccaagaagaagtacatctacaccatcgacgacgactgcttcgttgccaaggacccatctggcaaggatatcaatgctcttgagcagcacatcaagaacctcctcagcccatccaccccgttcttcttcaacaccctgtacgacccctaccgtgagggtgctgactttgtgcgtggataccccttcagcctcagggagggtgctcacaccgccgtctcccacggc

SEQ ID NO: 29701 - DNA, 293 bp, Zea mays
tgcgcctccatttcggcctctgtcccttgcaagttcaatctcacctccaaccatgggtaaagagaagtcccacatcaacattgtggttattggccatgtcgactctggcaagtcgaccaccacaggacaccttatctacaagcttggaggcattgacaagcgtgtgatcgagaggtttgagaaggaggctgctgaaatgaacaagcggtccttcaagtacgcgtgggtgctcgacaagctcaaggctgagcgtgagagaggtatcaccattgatattgctctgtggaagtttg

SEQ ID NO: 29702 - DNA, 293 bp, Zea mays
cgtgttgtgcttccagtgagatcaaagaatgctcgtggccagcaaggctcatatccaattaagctgttctacacttcaaacatgcccatcatccttcactctgcgctgattaccaacctctattttatatcccagcttctctacaggaagtacagtggaaacttccttgttaaccttcttgggaagtggaaggagtctgaatactctggccattctattcctgttggtggtcttgcttactatgtaactgccccatcaagtttggctgatgtccttgcaaatccattccatgc

SEQ ID NO: 29703 - DNA, 312 bp, Zea mays
  unsure (1)..(312): unsure at all n locations
tanaagaccagcgtgtcatcttcactcttacaaatggtccagaggagccatttgttcgaattttaccaagacataagacatttgagggtgctggaaagaaggctacaacctttgccaacagaatttggctcgaatatgctgatgcggcactattaacaagggtgaggaagtaacccttatggattgggggaatgctattgttaaagagatcaaggtggagagtggagtaattactgaactagttggagaactgcatcttgaggggtctgtgaaaacaacaaaattgaagatcacatggctagcagatataga

SEQ ID NO: 29704 - DNA, 310 bp, Zea mays
gttgcatgtacacaatttctcgcgctcctaccgccgccgcttcgttctctaaccttggctcccgctccctccgcagagcatctcaacaccgccttgaggaccccccaactcgccggctgcagccatggtgaaatattcgacggagccaaccaaccccaccaagtcaaccaaggccatgggccgtgacctacgtgttcacttcaagaacacccgtgagacagcttttgcccttaggaagttgtcactcaccaaggccaaaaggtaccttgaggatgtgattgcccacaagcaggccatcccgttccgcagt

SEQ ID NO: 29705 - DNA, 311 bp, Zea mays
cggctcgagcttctctctctgctcctccgcctccgcctgatccatccaagacagggatcgccatgtcggactcggaggagcaccacttcgaatcgaaggccgacgctggggcgtccaagacctacccgcagcaggctggcaccgtccgtaagaacggcttcatcgtcatcaagaaccgtccctgcaacgttgtggaggtttctacctccaagactggtaagcatggccacgccaaatgccactttgtcgccatagacatattcaatgggaaaaagcttgaagatattgttccttcatcacacaactgtgac

SEQ ID NO: 29706 - DNA, 344 bp, Zea mays
  unsure (1)..(344): unsure at all n locations
ttcgatgcacggtagtaactcggaatcgtcccnagtactcgactgctgagagagtctgatgaaaccaactcgaactgcaaaacgctgcaagaccgtggaggaggtgatccagaaagcgaacaacacccggtacggcctggccgccggcatcgtgaccaagaacatcgacgtcgccaacaccgtgtcgcggtccatccgcgccggcgccatctggatcaactgctacttcgcgttcgacccggacgcgccgttcggcgggtacaagatgagcgggttcggcaaggacatgggcatggacgcgctcgacaagtacctgcagaccaagaccgtggtcactccgctgt

SEQ ID NO: 29707 - DNA, 309 bp, Zea mays
caagggtccaaccctgcttgaggctcttgaccagatcacggagcccaagaggccttcagacaagcccctgcatctgcccctccaggatgtgtacaagattggtggtattggaactgttccggttggtcgtgtggagactggtgtcatcaagcctggaatggttgtcaccttcggtccaactggcctgaccactgaggtgaagtctgttgagatgcaccacgaggctctccaggaggcccttcctggtgacaatgttggcttcaatgtgaagaacgttgctgtgaaggatctcaaacgtgggtacgtggc

SEQ ID NO: 29708 - DNA, 312 bp, Zea mays
gtggtggacctggacagttgcctcacctagctacgacttatgctgctgtaaatacacttgtgacaatagggagcgaaagagcattgtcatcaatcaataggggcaacctgtacaattttatgctgcagatgaaagatgtatcaggtgctttcagaatgcatgatggtggcgaaattgatgtccgtgcttcctacaccgctatatcggttgccagccttgtgaatattcttgattttaaactggcaaaaggtgtaggcgactacatagcaagatgtcaaacttatgaaggtggtattgctggggagccttatg

SEQ ID NO: 29709 - DNA, 308 bp, Zea mays
gtccctgctccattctcagccgccgccaatcccttcccgtgctccgcaaccgctgagtgagaagaagagatggccggcaagggcgatggcccggctatcggcatcgatctcggcacgacgtactcttgcgtcggcgtgtggcagcacgaccgcgtcgagatcattgccaacgaccagggtaaccgcaccacgccctcgtacgtcgccttcaccgactccgagcgcctcatcggagatgcggccaagaaccaggtcgccatgaaccccatcaacaccgtctttgatgccaagcgtctcatcggcaggag

SEQ ID NO: 29710 - DNA, 301 bp, Zea mays
cacagatgttgatgacaaggttgcttcctggtgggactatggttaccaaacaactgcaatggccaacagaactgtgattgtagacaataacacctggaacaacactcatatagcaacagttggtacagcaatgtcgtccccagaaaaagcagcttgggaaatcttcaattctttagatgtcaaatatgtgcttgttgtctttggaggacttgttggataccctagcgatgatatcaataagttcctttggatggtacgaataggaggtggtgtgttccctcacattaaggagccagattat

SEQ ID NO: 29711 - DNA, 304 bp, Zea mays
ccgctcgagagaactctctcgacctcatcggcgttggcggacgcgtgttgaccggagatggcgccgagcgggtggaggaggagcgcggcggcgcgggtcgcctggcgcccggccacggtttgcctgtggctcgcgctcgccgccgccgcactgacgctcgcccaggctaagaaggacctgacggaggttacccacaaggtctacttcgacatcgagatcgacggcaagcccgcaggccggattgtcatggggctttttgggaagactgttcctaagacggcagagaacttccgagctctttgca

SEQ ID NO: 29712 - DNA, 303 bp, Zea mays
ccaagttctccggtgggctcttggttctgtcgagatcttcttcagtcggcactgcccgctgtggtacggttacggtggcggccgtctgaaatggctccagaggctctcctacatcaacaccatcgtgtacccgttcacttctcttcctctcgttgcctactgttgcctgcctgccatttgactgctcacaggaaagttcattatacctacgctgtccaacgctgcaacgatatggtttcttggcctcttcatgtccatcatcgtgacgagcgtgttggagctgcggtggagtggcatcgggat

SEQ ID NO: 29713 - DNA, 184 bp, Zea mays
gctggcttctcctcaccctcttaccaagtcctcctcgggttagggttccttagggttttgtggacgggcgatggcggcggctgatgtggagtaccgttgcttcgtcggcgggcttgcctggggcaccagcaacgagtcgctggagaatgccttcgcctcctacggcgagatgctcgactccaag

SEQ ID NO: 29714 - DNA, 297 bp, Zea mays
ccgacatggttccaccacggcgtgacgaggtgctactgcccctcggccgaggtggcgagccgggccctgctccggggcctcagcccgtcccaggtccgcgtcttcgggctgcccatccggccctccttctgccgcgccgtgctcgacaaggatgaggtgaggaaagagctggggctggaccctcagctgcccgctgttctgctgatgggaggcggcgaggggatcggcccggtggaggagaccgcgtaggcgctcggcgaggagctctacgaccgccggagacggcgccgggtggga

SEQ ID NO: 29715 - DNA, 296 bp, Zea mays
gcgcacctggtgaacatccagttccagaagaaggtgcagctgcagctcgttgtgctctacgtggatttcaagctcgacgagagttacacgccgagcaagatctccatccgggccggggatggcttccacaacctaaaggagattagaacggtggagcttgcaaagccagttggatgggtccacatatcattatccgggattgatccacgagaaacattcattcacacatttatgctccaaattgctgttttatccaatcatctgaatgggagggatactcatgtccgacagatcaa

SEQ ID NO: 29716 - DNA, 299 bp, Zea mays
cgccgcgcacctatctggcaagcgacgccgcggcctcgatcggagtcggaggcgaacacccccatggcggcggctggcggcggcgcaggaggaacggtatccttcaagatcatcctcacctccgaccccaagctccctttcaaagtgttcagcgtgcccgaagcggcgcccttcaccgcggtgctcaagtacgccgcggaggagttcaaggtcccgccccagaccagtgccatcatcaccaacgatggaattggcatcaacccccagcaaagtgcaggcaacgtgtttctgaaacatgg

SEQ ID NO: 29717 - DNA, 296 bp, Zea mays
  unsure (1)..(296): unsure at all n locations
tcgccncctccctccggtctgcgctcccacagcctcacccctgcgcccccgccgattcgcgtcgccctttgttggaaggaacgatggagcagaccttcatcatgatcaagcccgacggcgtccagcggggcctgatcggggacatcatcagtcgcttcgagaagaaagggttctacctcaaggggatgaagttcatgaacgtggagaggtccttcgcgcacagcactacgctgacctttccgacaagcctttcttccccgggttggtggagtacatcaattccggccccgtggtgg

SEQ ID NO: 29718 - DNA, 294 bp, Zea mays
ggtggctccatgtttggaggaattgggtccaccattgctcaaggtatggcgtttggcacgggtagtgccatggcacacagggctgttgactctgtattaggtccccggaccatccagcatgagactcttgccacagaagctcctgctgctgcccctgctgctccagcgatgaatgctgatgcttgcagcttccattctaaggctttccaagattgtctgaacaactatggcagcgagatcagcaagtgccagttctacctagacatgctgaacgagtgccgccgtggtggtgtg

SEQ ID NO: 29719 - DNA, 298 bp, Zea mays
gaggacgtccttctcgtgggcgacgacccttggcaggaattcgtgagcacggtgtcctgcataaagatcctctccccgcacggaggtgcagcagatggggaagcagggcctggagctcctgagctcggcccccgcgcggaggctcggtagcagctgtgacgactacgtcagcaggcaggagtcgagaagcctgagcaccgggatcgcgtccgtcggttcggtcgagttgggatgagtagcaagatagcgcgcacgcagcagcagcagcaggttacgcatcctcagcctcagggtaggt

SEQ ID NO: 29720 - DNA, 297 bp, Zea mays
aaggaatccggcgggggtggggtgcgagccgggggagggagaagagcagccgcccgccccgcgaggggcaacagctgcccaagaacctgaccggaagagttgtgggagcggcggcggaaagatggggcaggccctgcgcaggctcttcgactccttcttctccaccagggagatgagggttgtgatgcttggtctggatgcagctggtaaaacaacaatactgtacaggcttcacatgggagaggttctttcaacagtccctacagtcggttttaatgtcgagaaggttcagtataa

SEQ ID NO: 29721 - DNA, 154 bp, Zea mays
atcgcgaacccgtctaccgggtgccagaagaagctggaaatcgatgacgaccagaaactacgtgccttttatgaccgaagatctcccaggaggtcagtggtgatgctctgggtgaggagtttaagggttatgtcttcaagatcatgggtggatg

SEQ ID NO: 29722 - DNA, 257 bp, Zea mays
gcgaagttctgaatctggtaatatgcctgaacagcgtgcgttactcgctgaatcaatgagacaagaggtgctgcaattggacaatgaaattgtttacaatgaagccataattgaggaaagggagcaagccattcaagatatccaacagcagattggtgaagtacatgaagtgttcaaagatcttgctacccttgtgcattcccaaggaatcataatcgaggaaatcgacatgaacattgaaaattctgcagcagtga

SEQ ID NO: 29723 - DNA, 232 bp, Zea mays
cgtagctcgcgatcctcgcttcgggatccggaagagatggccaagtcgaagaaccacacggcgcacaaccagtcgtacaaggcgcacaagaacggcatcaagaagcccaagcgccaccggcagacctccaccaaggggatggaccccaagttcctgaggaacctgaggtattcaaggaagggcaacaagaagagtggtgaggctgaggagtaggaaggaaagcatggttgtg

SEQ ID NO: 29724 - DNA, 232 bp, Zea mays
caaccatccggttcttattcactgcaagcgaggataggtaagcagcttgactatgtcatgcagtcagtctgttccccatgtagtatgtatgagcctgacgtttgaaacatgaaccaagatttgcagcatcgaaccgggtgtgtggttggatgctttaggcaattgcaacgctggtgtcgaacttcaatatttgacgaataccagcgtgttgctgcatgccagaacaagagtt

SEQ ID NO: 29725 - DNA, 233 bp, Zea mays
cggctcgagcgagaaggggaagccaaatcgatggcggcggcggcggccggcggcgagaacagcggctgcggcgcgggcgcgggtgagttctacctgcggtactacgtggggcacaagggcaagttcgggcacgagttcctcgagttcgagttccgccccgacggcaagctccgctacgccaacaactccaagtacaagaacgacaccatgatccgcaaggaggtcttcgtatc

SEQ ID NO: 29726 - DNA, 226 bp, Zea mays
gcagcagccaattcgctcgagttcagatcgagcgcgcgccaagcaagtcttccggccggccgtgaagagagcaatcaagcaagacaagatggtgaagctcgcattcggaagcgtcggtgagtccttcagcgtcacctccatcaatgcctacgtggccgagttcatcgccagcctcctcttcgtcttcgccggtgtcggttccgccatcgcctacgggcaactgacg

SEQ ID NO: 29727 - DNA, 224 bp, Zea mays
caacggtaccggcgcgtggagcagttccagaacgaggcggccatcctgtcggggctgcgccaccccaacctcgtcatgttctacggctgcacgtccagccacagccgcgagctccttctggtgtacgagttcgtggccaacggcactgtcgccgaccacctgcacgggcagcgggcccccgagcgtgccctctcgtggccgctccgcctcagcgtcgccgtgga

SEQ ID NO: 29728 - DNA, 222 bp, Zea mays
gatttatgcttacttccatcctaatgttgaaagatggatggagaagctggaagaatctgagactaaggttagattatcaatcaagggaaccattgtcactctttcattgacggttggctttctgtggtatgaatatatatacaagctagacaaagttacatacaacaagtaccatccctacacatcatggatccctataactgtttatatctgcctgcgcaa

SEQ ID NO: 29729 - DNA, 223 bp, Zea mays
aactttcttctccgtcacctgactcacacctccactcacctccggtccaccaacctctgccggccatggcggctgcggcggcgcagaagctcctcgaggcgagcacgaagatcatcggcgtcgggcgcaactacatcgcccacgccgaggagctcggcaacccgatccccaaggagcccgtactattcctgaagccgacctcgtcgttcctccacgctggcgt

SEQ ID NO: 29730 - DNA, 221 bp, Zea mays
gtccagaccagcaaagagtgggaagactatagaacttgatgatgtcacattccaccagtgtgtcaacttaacaagatttaactcagaaaagacagtcagtttcgtgccacctgacggtgaatttgagttgatgaagtatcgaatcacagagggtgtaaaccttccattccgtgttctgccgacaatcaaggaattgggccgaacacgcatggagatcaacg

SEQ ID NO: 29731 - DNA, 218 bp, Zea mays
atctcaatagctgagaaactcgggaaaacttctgcacaagtggctctgcgctggaacattcagatgggtcacagtgttcttccaaagagcacgaatgaagaaaggataaagcaaaaccttgatgtttatgattggtcaattccagatgacttgcttgcaaagttctctgagattaagcaggctaggctacttagaggcaacttcattgtgaatccaga

SEQ ID NO: 29732 - DNA, 218 bp, Zea mays
cgcagtgggccgccgagttcgacacctggctcaaggactcgcttctcaacggaaggtacgaggacgtgaagcggtacgaggagaaggcgccgcacgcgatggtggcgcacccgtggccggaccacttctacccgctgcacgtcgcgctcggcgccgccggggacggcgcgaaagcgagcagatccaccagtgctggtccaacggcacgctatcctacg

SEQ ID NO: 29733 - DNA, 219 bp, Zea mays
atctggtggagttttcctagttacaatccattttcctcccgattatcctttcaaaccaccaaaggtggcattccgcaccaaggtgttccatccaaacatcaacagcaacgggagcatctgccttgacatcctgaaggaccagtggagcccggcgctaaccatctccaaggtgctgctgtccatctgctccctgctgaccgatccgaaccccgacgatcc

SEQ ID NO: 29734 - DNA, 220 bp, Zea mays
caagaccataaccctggaggttgagaactccgacaccatcgacaacgtgaaggcgaagatccaggacaaagagggcatccccccagaccagcagcgtctgatcttcgccggcaagcagctggaggatggccgcaccctagcagactacaacatccagaaggagagcactctccacctggtgctccgcctccgcggtggtcagtaagccatggttcattta

SEQ ID NO: 29735 - DNA, 218 bp, Zea mays
cgagtcgccgtcgtctgctccgggctgctgttctgcgcctccacaaggctttggcctctgttgtaagttttaagcttcacctccagccatgggtaaggagaagtcccacatcaacattgtggttattggccatgtcgactctggcaagtcaaccaccaccggccacctgatctacaagcttggaggcattgacaagcgtgtgattgagaggttcgaga

SEQ ID NO: 29736 - DNA, 217 bp, Zea mays
ctccgctccccagtcccacccgcaccctagccctcagcaaaccctaaccgctcgtcgccatgaaggacacctcgttcaaggccaccggcgccaagcgcaagaaggtcggcggcgccaagcgcgggctcacccccttcttcgcgtttttggctgagtttaggccgcagtacctggagaagcaccctgagctcaagggcgtaaaggaggtgagcaaggc

SEQ ID NO: 29737 - DNA, 214 bp, Zea mays
aaggacttcttgccacttccaagcaaagggaaatctgggaaggatggctggtatcctccaggccatggtgatgtgttcccctctttgaataacagtggaaaactcgacatcttattggctcagggcaaggagtatgtcttcgttgctaactcagacaacttgggtgctatagtcgacatcaagatcctgaaccatctgatcaataaccagaatg

SEQ ID NO: 29738 - DNA, 210 bp, Zea mays
atttttaattttttttttctttttttttttgagcaaatagtgttcagacactgagcgttgagaatttaacataacatcggttccaagaaacaaccaaagcgcaacagggtattgcagttcctatccccccttgtgttgtgcccgcagcagcagcagctactactaatcctgattaatgatagaaacgaaacacacccacgacagatgatt

SEQ ID NO: 29739 - DNA, 209 bp, Zea mays
tcgacatgaccgtcggcagcgccccggcgggccggatcgtgatggagctgtacgccaacgaggtgcccaagaccgcggagaacttccgcgcgctgtgcacgggcgagaagggcgtgggcaagtccgggaagccgctccactacaagggctccaccttccaccgcgtcatccccgagttcatgtgccagggcggcgacttcacccgcggc

SEQ ID NO: 29740 - DNA, 219 bp, Zea mays
attgttctactgcagattgctgtgccaacaagaactgacgtccctgaatatcaaaagctaacgagccaagtgcatgaaattgttgggcgcataaacggtcgatttggaacgttgactgctgtccctattcatcatctggaccgatctcttgatttccatgccttgtgtgctctttatgcagtcactgatgttgctcttgtaacatcactgagagatggg

SEQ ID NO: 29741 - DNA, 271 bp, Zea mays
ggagtgacatcccagacatcgacaagaaaaagtaccttgtccccgccgacctcacagtgggacagtttgtgtacgtggtgcggaagcgcatcaagctcagcgccgagaaggcgatcttcatcttcgtgaagaacaccctcccaccaacagctgccctgatgtctgccatctacgaggagaacaaggacgaggacgggttcctctacatgacctacagcggcgagaacacctttgggctgctatgagtggcgccgcgccgccgtggatcgac

SEQ ID NO: 29742 - DNA, 293 bp, Zea mays
ctagccctcgcgccgccgccgccgtgcccagcgctcgagcacctcgcctgccgcgagctcgcgacgcaacgccaccatgaagttcaacatcgcgaacccgtctaccgggtgccagaagaagctggaaatcgatgacgaccagaaactacgtgccttttatgaccgaagatctcccaggaggtcagtggtgatgctctgggtgaggagtttaagggttatgtcttcaagatcatgggtggatgtgacaaacaaggcttcccaatgaagcaaggagttctgacttctggtcgtgt

SEQ ID NO: 29743 - DNA, 146 bp, Zea mays
acttgatgagtaagacgggcttctggtgtcgatttgcttctgagttgtttattttatatcgtcgcaatttcgtggttgtcgtttggttattctgtgaagcagccaagccaggctattgttatgaaaatttgtcgtctgtaagcatg

SEQ ID NO: 29744 - DNA, 298 bp, Zea mays
aacgaacagaagctctcgatctcaccgacaccgaggaagaagagatcaatggcgtccgagcagggagtcgtgatcgcgtgccacagcaaggctgagttcgacgcccacatgaccaaggcccaggaagccggcaagctggtggtcatcgacttcactgccgcctggtgcggtccatgccgcgccatcgccccactgttcgtcgaacacgccaagaagttcactcaggtcgtcttcctgaaggtggacgtggacgaagtgaaggaagtcaccgcggcctacgaggtcgaggcgatgccga

SEQ ID NO: 29745 - DNA, 291 bp, Zea mays
acttcgtcaacctgctcggcttctgcgaggaggaagaaccgttcaccaggatgatggtgctcgagtacgcgccgaacgggacgctccacgagagccttcatgccgaggatttcgagcgcatcgcttggcgaggtaggatgaggatcgtcatgggactagcgtactgcgtccagcacatgcacgagctcagccctcccgtggcgcaccctgacatgcagtcgagctccgtactgctatctgaagacggcgctgcgaagatagcggacatgagcgtttggcacgaatgatttc

SEQ ID NO: 29746 - DNA, 289 bp, Zea mays
tatcaccggcgacttccgaaagcttttagtgcctcttgttagtgcgtaccgctatgatggcccagaggtgaacacatctttggctcattctgaagccaaaatacttcatgagaagatccataagaaggcttacagtgatgaggagatcattagaattctcaccacacggagcaaagctcagctacttgcaacattcaatagctacaaggatcagttcactcatgcaatcaacaaggatctgaaagctgaccccaaggatgagtttctttcaacactgcgggcgatcatc

SEQ ID NO: 29747 - DNA, 189 bp, Zea mays
atcgcgtcctttcctttctgaggctcgcgaaccccgacaatggccgcaaccgcggtgtcggtcgacgagaagctcgacaagcttcgcgccgaggtcgccaaactcagccagatcagcgagaacgagaaggccgggttcatcagcctcgtgtcacgctacctcagtggggaggcggacagatcgagtgga

SEQ ID NO: 29748 - DNA, 287 bp, Zea mays
aagcggcgaccgctgctccgtcttcagcggcctcgcctacgagatcggtcccatcagattcgtcctggaaccctacaacggcaccctgccgcgcctgcgatacaaccacaactcgtggtcaaaggtgtcacatatcctcttcgtcgattcaccggttggagctggattttccttctcgagagatcccaaaggctacgatgtcggagacatctcggcctcactgcagctacaggaattcctcatcaagtggttcagtgatcatcccgagtacctcgcgaatcctttct

SEQ ID NO: 29749 - DNA, 279 bp, Zea mays
agctaacccaatcccaaatcaatcttccatggcgccggcgaccttgctactggcgagactggccgtggcgtgcgcgtaggcgctcggcgccatggcgcagctgttcgccgacgttctacgacgcgatctgccccagcctgcaggccatcgtgtcggccgtgatggccgccgccgtgcagcaagagccgcggatgggggcctccatccgccgcctctgcttccacgagcgcttcgtccaggggtgcgacacgtccgtgctcctcgacgactctccgacgc

SEQ ID NO: 29750 - DNA, 253 bp, Zea mays
ctcgtgaggttctccggggttcgggttcgtgggtgagcggatcgagatggcggcgtcggatgttgagtaccgctgcttcgtcggcggcctcgcctggggcacggacgaccactcgctccacaacgccttcagcacctacggcgaggtcctcgagtccaagatcatcctcgatcgggagacgcagaggtcccgcggcttcggacttcgtcaccttctccacggaggaggcgatgctgaacgcatcgagggcatg

SEQ ID NO: 29751 - DNA, 273 bp, Zea mays
cgggaagaagggcctcctgtctcctctcacttcctcagtcctcgtccgtctctgctccctcctctctctacctagctagctagccagccttcctgtagcgcggcagagatggctgcccctgcatccaccacggcggcggcggcggcggcgctgctgcttctgctcgtgtcgctcgccgcggcggcggacatgtcgatcgtgtcctacggggagcgcaagccgaggaggcgcggcggatgtacgcggagtggatggcggcgcacggccggacct

SEQ ID NO: 29752 - DNA, 312 bp, Zea mays
atcaaatcaaggattccggggatccaatctcttataacaaagacaattgcagagctggaaactgaacttaatcgtcttggaaaacccattgctaatgatgctggggggaagctgtacacgatcatggaaatatgccgtatgtttgatggtatttacaaagagcatctggatggagtgcgccctggcggagagaaagtttaccatgtcttcgacaatcaatttcctgtagctattaaacgattgcagtttgataaacaactctctatggaaaatgtgaggaagcttataacagaggctgatggataccagcct

SEQ ID NO: 29753 - DNA, 313 bp, Zea mays
  unsure (1)..(313): unsure at all n locations
agacacncaaaggtaccatgatggtgtgagaatgggttcttttggtctaatgctcaactctgtcgtccttggattcacctctgttgtgctagaaaagttatgtaggaagtggggagctggacttgtatggggtgtctccaatattctaatgactttgtgcttcttggcaatgcttgtaataacatatgttgcaaagaacatggattatccatccagtggtgcacctccgactggcattgtcgttgcttctttggtggtttttacaattttaggggcaccctggcgatcacatacagtataccatatgcaatgg

SEQ ID NO: 29754 - DNA, 318 bp, Zea mays
  unsure (1)..(318): unsure at all n locations
tatggccgtggaggtcaccggtgggcctgagattcccttccaccccggtagggaggacaagcctcaacccccacctgagggccgccttcctgacgccactaagggttctgaccacctgaggcaagtttttggcaagcagatgggcttgagcgatcaggacattgttgccctctctggtggccacaccttgggaaggtgccacaaagagcggtctggtttcgagggggcctggactacaaaccctttggtctttgacaactcttacttcaaggaacttctgagtggtgataaggagggccttcttcagctcncaagtga

SEQ ID NO: 29755 - DNA, 206 bp, Zea mays
cctggcttctcctccccctccggttcgggttcgggttcgtgaggttctccggggttcgggttcgtgggtgagcggatcgagatggcggcgtcggatgttgagtaccgctgcttcgtcggctgcctcgcctgggccacggacgaccactcgctccacaacgccttcagcacctacggcgaggtcctcgagtccaagatcatcctcga

SEQ ID NO: 29756 - DNA, 281 bp, Zea mays
taaacgtcagtggcaggatactagtcgggctgcggtggtggaatgagatcgatgatgacggaaacagtgtgtggaatttgaatgccttgatggggagtctctcgctcggatgaacaagaaggattcatggctgttctggtggactctttacttgactgctgctgcatggatcgttcttggtatattttcactcatcaggcttgaggctgattaccttcttgttgttggagtttgcttgagtctaagcattgcaaacattgttggattcaccaagtgcaaca

SEQ ID NO: 29757 - DNA, 308 bp, Zea mays
atgggattgttcaaactgcaaatgatattcatcgttatgtgcggtgtacgctgcttaattccacaagaccttttgatgatgtcgtgaagtcagctcaagactcccttcgttggttatgccataaaagctttcttgagtggaaccatgagaccaagatatactccgctactccccttggtagagctgcttttggaagttcactcaaccctgaggaatcattggttgttcttgatgatctttcgagggcaagagaaggctttgttctggcatctgatttacatttagtttacttggtcacacccataaat

SEQ ID NO: 29758 - DNA, 309 bp, Zea mays
gctgattgttttgccacattagagattatccatcacctatggcctagaattcctggcaagttcaaagattatatcaacagccccaaacccaacaggtatcagtccctgcacacggttgttctcactgaacaaacgctgccactcgagatccaaattcgtacgagggacatgcatttgcaggcggagttcggaattgctgctcattggagatataaggaaggtgaacggagttgctgcacctctgtttctgaaattgttgagtgggtcagatgggttacatggcactgtcgaactctgaacacaggctat

SEQ ID NO: 29759 - DNA, 311 bp, Zea mays
aacaagtcatatctagctagtagctccctgaaaagttcactagagaagcatttcaaggaggagccatgtctgaggagaagcaccaccaccacctgttccaccaccgcaaggcagaggaggaggaaggcgcctccggcgaggtcgactacgagaagaaggagaagcaccacaagcacatggagcagctcggccagctcggcgccatcgccgccggcgcgtacgctctgcacgagaagcacaaggccaagaaggacccggagaacgagcacggccaccgggtcaaggaggaggtggccgccgtcgccgccgtg

SEQ ID NO: 29760 - DNA, 271 bp, Zea mays
cggcggcggcccgacgaccccggcgggcctgatcgcggcggcggtggcgcacgcgttcgcgctgttcgtggcggtgtcggtgggcgcgaacatctccggcgggcacgtgaacccggccgtgaccttcggcgccttcgtgggcggcaacatcaccctgttccgagggctcctgtactgggtggcgcactgctggggtccccgtggcgtgttcctgctccgttctcgacgggcggcaggcacggcacttcgggtgacggcggtcgtgtggagc

SEQ ID NO: 29761 - DNA, 300 bp, Zea mays
gcacggtcattgatgcacctggacaccgtgacttcatcaagaacatgatcactggtacctcccaggctgactgtgctgtccttatcattgactccaccactggtggttttgaggctggtatctccaaggatggccagacccgtgaacatgctctccttgcgttcacccttggagtgaagcagatgatttgctgctgcaacaagatggatgcaaccactcccaaatactccaaggcacgttatgaagagattgtgaaggaagtctcatcctacctcaagaaagttgggtacaaccctgata

SEQ ID NO: 29762 - DNA, 304 bp, Zea mays
  unsure (1)..(304): unsure at all n locations
aanagcccttgcccacgccatgacgctcagcaagaagcaaggcgcaggcactgatcagcaggccttgctggatgctcagctgcagctctggcaccacaccatcgcttttgtcaagtccatggcgctcaaggccgccgtagacctccgcatagcggacgccatccacctgcacggcggctcagccaccctctcgcagatagtcaccaaggtcacactccacccgtccaagataccatgcctgcgacgcctcatgcgcgtgctcactctcaccggcgtcttcagcgtcaactccggcgccgttgtc

SEQ ID NO: 29763 - DNA, 303 bp, Zea mays; identical to SEQ ID NO: 29631

SEQ ID NO: 29764 - DNA, 299 bp, Zea mays
aatattgtttccctcccgtcgtctccttccgtgaaaggttcttgagaagtcctgccgtactgtcatgagcaagtctcccaacaagcacaaccgtctgtacatggaagcgcgccccttggaggagggtctcgctgaggccatcgatgacggccgtattggcccacgtgatgatccgaagtgcgctcccagatcctctctcaggagtttgggtgggacaaggacctggccaagaagatttggtgttttggacctgagaccactggcccgaacatggttgtagatatgtgcaagggagtgca

SEQ ID NO: 29765 - DNA, 287 bp, Zea mays
gcaggttgcggtgttcgcgcagaacatcccggccttctgcgagctccacttcggcattcccatggcgggcgccgtgatctgcgcgctcaactcgcggctcgacgccggcatggcgaccgtgctgctgcagcactcggaggccaaggtcgtgttcgtggacgccgcgctactgggcgtcgccgggaggcgctccgctcatctcccagcaggccggcggacgagcagggtgcccgcgtggactaatcacgaggcgtcgacgaccgccgtcacgggacaggaacgacaag

SEQ ID NO: 29766 - DNA, 307 bp, Zea mays
caagtcatatctagctagtagctccctgaaaagttcactagagaagcatttcacggaggacgcatgtctgacgagaagcaccaccaccacctgttccaccaccgcaaggcagacgaggaggaaggcgcctccggcgaggtcgactacgagaagaaggagaagcaccacaagcacatggagcagctcggccagctcggcgccatcgccgccggcgcgtacgctctgcacgagaagcacaaggccaagaaggacccggagaacgagcacggccaccgggtcaaggaggaggtggccgccgtcgccgccg

SEQ ID NO: 29767 - DNA, 304 bp, Zea mays
gttcctgcggaggatcctgaccggcgggggcggcctggcggccctgagggcggcgcgcgccgtgaaggagacgacggggatcgtgggccttgaggtggtgcctaacgcgcgagaggttctggtagggctctacgagcgcacgctcaaagagatcaaggccgtccccgaagacgagggttaccgcaaggccgttgaatccttcaccggtcaccgcctccagatctgccaggaggaggaggactggaagcgcatcgaggaccgaatcggatgcgggcaggtcgaggagctcatcgaggaggccgag

SEQ ID NO: 29768 - DNA, 233 bp, Zea mays
cggctcgaggggttcgtgaggttctccggggttcggtttcgtgggtgagcggatcgagatggcggcgtcggatgttgagtaccgctgcttcgtcggctgcctctcctgggccacggacgacgactccctccacaacgccttcagcacctacggcgaggtcctcgagtccaagattatcctcgatcgggagacgcagaggtcccgcggcttcggcttcggcagcttctccacgg

SEQ ID NO: 29769 - DNA, 223 bp, Zea mays
gcagtcagttgccttggttttgtgaaaggattgtagagacaaaccctggaagtgtggcaactgtagtggccttggaagattcaaagtttcgtttttttgttgcattccatgcatcgctccatggttttgagcatgggtgcaggccgctcctttttcttgaagcgataactgcaaagccgaataagcactggaagctactggctgctgcttcagttgatggtga

SEQ ID NO: 29770 - DNA, 304 bp, Zea mays
aggcgcttcacaaattgacatctggtccagaaaaagaaaccaagtatgttatattaggagaaaagggcaaagttcagctgttgcgtgactcaaaggacagcattgaaatgactgcaactgaactgcagaagaaccctatcaactacacacaggttgccgtgctcgcggatgacatattgaaaaatgtggaatatgatgctctgagggttattttcaacaagttccaatctgtcatatcgtttaagcccacaatggtaacaatactttcccccgaggttgcagaaaaagaatcagaagctggtgg

SEQ ID NO: 29771 - DNA, 179 bp, Zea mays
gttatttggcacattgagggagtacgccggatttgatcccacagagcccacttcacgcagtgggggtaaagcaaaagcagtgcagcaaataaaataggaccatggctacaagacaattgttacaattggtgatggcgcaactgatctggaggctcggcaacctggcggagcagactgtg

SEQ ID NO: 29772 - DNA, 178 bp, Zea mays
  unsure (1)..(178): unsure at all n locations
atcctatcgagggtcgtcncaatggcctttggtcgcagacaactttgctgcttgtctatgctgagaataaatgtgaacggtgcccctggacgctggatccatgctggttttggacacggttgtctttttgtgttttaacttatatgctgccgtcctgtaacgaattcgcaagttttag

SEQ ID NO: 29773 - DNA, 124 bp, Zea mays
  unsure (1)..(124): unsure at all n locations
cgaggtggagcctagcatgtctggcccaaagaggcctcatgatcgtgtcnctttgaaggaaatgaaatcagattggcatgcttgcctggacaacaaagttgggttcaagggttttgcagtgcca

SEQ ID NO: 29774 - DNA, 175 bp, Zea mays
gtctccacttcttccagcaggcttctggcagcgactccgtcgtccagtacagcgcccgcctgttcaagagcgcggggatcaccgacgacaacaagctcctgggcgtcacctgcgcggtgggcgtgaccaagacgttcttcatcctggtggccacgttcctgctggaccgcgcggg

SEQ ID NO: 29775 - DNA, 301 bp, Zea mays
agcccgaagcgaggtggcagggcaccggtgccggccaagaagaagacggataaagtgacgaaccctctgttcgagaaaaggccgaagcagttcggcatcggcggcgcgttgcctcccaagaaggacctgcaccgattcgtcaagtggcccaaggtcgtgcgcatccagcgccacagtcgcatcctcaagcagcgcctcaaggtgcctccggcgctcaaccagttcacccgcaccctcgacaagaacctcgctaccaacctgttcaagatgcttcttaagtaccggcccgaagacaaggctg

SEQ ID NO: 29776 - DNA, 151 bp, Zea mays
aatttctaaagttctttatcctgaggttggtggaggaacattggactcccatcacgcttttattgttgaatatgggaaagacagggatgttgaactaggttttcatgttgatgattcagaagttacattaaatgtttgccttggaaaacaa

SEQ ID NO: 29777 - DNA, 224 bp, Zea mays
cggctcgagccgaccaaggtggaccgcagcggggcctacgtcgcgaggcaggctgccaagagcatcgtcgccgccggcctcgcccgccgcgccatcgtccaggtctcctacgccatcggcgtgcccgagcccctatcggtgttcgtggacacgtacggcaccggcgcgatccccgacaaggagatcctgaagatcgtgaaggagaacttcgacttcaagcccgg

SEQ ID NO: 29778 - DNA, 224 bp, Zea mays
ctcctatccactgcggcctggacgcgtgcgagacacttgaccaagcagcagcagcagggatggcgcctctgaagctgtacgggatgccgctgtcccccaacgtggtgcgcgtggccaccgtgctcaacgagaagggcctcgacttcgagatcgtccccgtcgacctcaccaccggcgcccacaagcagcccgacttcctcgccctcaaccctttcggccagatt

SEQ ID NO: 29779 - DNA, 223 bp, Zea mays
aaacaatgccacagtgagggaggctcttgggattcacaagggaacagttcccctatggttaagatgcaacacggacataccgtatttgaaagatattaagagttcagtgaagtaccatttggatgtgaccaccaaaggatacaaaagtctagtttacagtggtgatcatgacatgggtgtaccttatattggcacacaatcctggattaagtcacttaatttc

SEQ ID NO: 29780 - DNA, 222 bp, Zea mays
cttcaacgcgtccgcctactgcaacagcaagctcatcggtgccaagttcttctaccaggggtacgaagctgctctcggccaccccatcgatgagaccaaggagtcgaagtcgccactggacactgagggccatggcacgcacaccgcctccacggcggctggctcgccggtggccggagccgggttcttcgactacgccgaggggcaggccgtgggtatgga

SEQ ID NO: 29781 - DNA, 228 bp, Zea mays
agaacaagttagtagagaccatccagttcatggaaattcttaatttgaaagacacctttgagaaagacagtttttttcgtaaactccccaatatagctgaacagcttcctcgtgaaatagttctgaaaaagctgctccctgtattggcttcttctcttgaatttggttcagctgccgctccagccttaactgttttgttaaagatgggttcctggcttcctgctgacc

SEQ ID NO: 29782 - DNA, 225 bp, Zea mays
actcgtcgcagcccccaaggccccaactacccccagtctcggaagagaactatccagaagcgcaagactccaaagccgtcgccttcctatccatcccttcctcgccgcgggggtcgcctgagatcacataaacaatggtgaaggctgttgctgtgcttggtagcagcgatggtgtcaagggcaccatcttcttcacccaagagggagatggccctaccactgtca

SEQ ID NO: 29783 - DNA, 225 bp, Zea mays
acagcgatcaccacacacgaatcgcaaatatgggtaaaggaaagcctcgtggtcttaacgcagcgcgcaagctccggaacaaccgccgtgagcagcgttggtccgatcttgcctacaagaagcgtgccctgggtaccgctttcaagtcgtctcccttcggtggctcttcccacgccaagggcattgttctggagaaggtcggtgttgaggccaagcagcccaact

SEQ ID NO: 29784 - DNA, 221 bp, Zea mays
gccttggattgctagagatgacgaacaaggtcagaagatgtggagagtcaaccagcgtatagtgaagcttatagctgagcttatgaggaaccatgacagccctgaagcgttggtgatactcgctagtgcctccgaccttctacttcgtgctaccgatggaatgctcgtcgatggtgaagcttgtactttgccacagcttgagcttctggaagtgaccgctc

SEQ ID NO: 29785 - DNA, 221 bp, Zea mays
caaagttggctatcccagctgagaattttcctttctgtaccatcgaaccaaatgaagcacgggtgaatgttccagatgaacggtttgattggctctgcaaactttacaagccaaagagtgaggtgcctgcatatcttgaagtaactgacatagctgggcttattagaggtgctcatgctggggatggtctgggcaatgcattcctctcacatatacgtgct

SEQ ID NO: 29786 - DNA, 223 bp, Zea mays
aggtccagctggcgcccagtagctactctgccgattggcaggttcaatatgtttttgcacgcaatggcaaaccgattggaccacaggcgaattctaagtggctctacatcgccccgacggggatgtacgggtgcgtgaactacctcaaggagaagtatgggaatccaacgatctacataacggagaacggaatggaccagcctggaaacttgacccgagacca

SEQ ID NO: 29787 - DNA, 223 bp, Zea mays
agttcagggaagagaaagcctgaccaagtcatcatcttcagggacggtgttagtgaaagtcagtttaatcaggtgctgaacattgagttgcaacaaatcattgaggcatgcaaatttcttgatgagaaatggaatcccaagttcacattgattattgcccagaagaatcaccacactaaatttttcattcctggaaagccagataatgttccagccggcactg

SEQ ID NO: 29788 - DNA, 219 bp, Zea mays
caagaactgctacgacgcgctgccggaaaatggcaaggtcatcgtcgtcgagtgcgtgctgccggtcaacacggaggccacccccaaggcgcagggcgtgttccacgtcgacatgatcatgctcgcgcacaacccaggcggcaaggagcggtacgagcgcgagttccgcgagctcgccaagggcgccggcttctccgggttcaaggccacctacatcta

SEQ ID NO: 29789 - DNA, 218 bp, Zea mays
gaaatattcttcccgtcgaaagacgacgagaggaaaagggacaagggcaaggcaagagagaggcgtcgtcgtttgatctgctgccggagtgcgaagaggaagaggagcgccggagttgtaaagatgttcctggtggactggttctatggggtgctggcatcgcttgggctgtggcagaaggaggctaagatcctcttccttggcctcgacaacgccgg

SEQ ID NO: 29790 - DNA, 218 bp, Zea mays
aaatatctccgtgctgtcgtgcagggcatcagcaaaggcgtggtagtggacagcctcctgtcgtcgatggtgaggacggggaagccgccggacttcgtgctgtgcatcggcgacgaccggtcggacgaggacatgttcgagagcatcgtgtgcccggcctccaacagcggcgtgaagctgccggccagcagcgaggtgttcgcgtgcacggtgggcaa

SEQ ID NO: 29791 - DNA, 211 bp, Zea mays
caagaacacggtgacccaggtggccaagaaggtgctgaccatgaacccctcgggggacctctccagcgcgcgcttcagcgagaaggagctcatcaccgccatcgaccgcgatgccgtgttcacgtacgcggaggacgcggccagcgccagcctgccgctgatgcagaagctgcgcgccgtgctggtggaccacgccctcagcagcggcgac

SEQ ID NO: 29792 - DNA, 219 bp, Zea mays
agcgagacgcacccgtggcacctgcacggccacgacttctgggtgctgggctacggcatcggccgcttcgacccggcggtgcacccggcgtcctacaacctcagggaccccattctcaagaacaccgtcgcggtgcacccctacggctggacggcgctgcggttcagggccgacaaccccggcgtctgggggttccattgccacatcgagtcccatttc

SEQ ID NO: 29793 - DNA, 304 bp, Zea mays
gcgggtctggtggcgatcgcggtggcgcacgcgctggccctcttcgtgggcgtctccgtggccgcgaacacctccggcggccacctgaaccccgccgtgacgttcggcctggccgtgggcggccacatcaccgtcctcaccggcctcttctactgggtggcccagctgctgggcgcgtccgtggagtgcctgctcctcaggttcgtgacccacggcaaggccatcccgacccacggcgtctccggcggcaccaccgagctggagggcgtcgtgttcgagatcgtcatcaccttcgcgctcgtgt

SEQ ID NO: 29794 - DNA, 310 bp, Zea mays
  unsure (1)..(310): unsure at all n locations
ccgcaaccgcaagcaagcgaagcnagagcctgcctgaccagagctagctgagctacagccaacagcagctggtctgactgacatggcgaaggacatcgaggcatcggggcccgaggcgggcgagttctcggccaaggactacaccgaccctccgccggcgccgctggccgacgcggaggagctcacccagtggtccctgtaccgcgcggtcatcgccgagttcatcgccacgctgctcttcctctacatcaccgtggccaccgtgatcgggtacaagcaccagacggacgcgtcggcgtcgggccccgac

SEQ ID NO: 29795 - DNA, 309 bp, Zea mays
aacacaagcatggtcttcatctcattcatggtctactccagttgaaaacatgcagattgctgagatttcagcagctggccgtgttgagataccaacagatggtgctagtgaatgggaaattgatgtaaaactgctcaagtttgggaataaagtagcatcaggatcatatggtgatctttaccggggtacatattgcagtcaagatgttgctattaaagtgctgaaacctgagagaataaatgcagacatgcagcgtgaatttgcccaggaagtatatatcatgaggaaggtacgtcacaagaatgttgt

SEQ ID NO: 29796 - DNA, 306 bp, Zea mays
gttagggtttacctgtgaggcctgctcccctgccgccgccgccatgggacactccaacgtgtggaactcgcaccccaagaactacggccctggatctagggtttgccgtgtgtgcgctaacccccacggcttgatccgaaagtacgggctcatgtgctgcagacagtgcttccgcagcaacgccaaggacattggcttcatcaagtaccgctgaaacttggggagctccaaagcatggcaataatggaagcatggatggggacctaaaagatagcctgtactcttattcttatgataaaaccatgt

SEQ ID NO: 29797 - DNA, 310 bp, Zea mays
taacaaaagcccttgcccacgccatgacgctcagcaagaagcaaggcgcaggcactgatcagcaggccttgctggatgctcagctgcagctctggcaccacaccatcgcttttgtcaagtccatggcgctcaaggccgccgtagacctccgcatagcggacgacatccacctgcacggcggctcagccaccctctcgcagatagtcaccaaggtcacactccacccgtccaagataccatgcctgcgacgcctcatgcgcgtgctcactctcaccggcgtcttcagcgtcaacaccggcgccgttgtcga

SEQ ID NO: 29798 - DNA, 300 bp, Zea mays
  unsure (1)..(300): unsure at all n locations
cgcaaccgcaagcaagcgaagcnagagcctgcctgaccagagctagctgagctacagccaacagcagctggtctgactgacatggcgaaggacatcgaggcatcggggcccgaggcgggcgatttctcggccaaggactacaccgaccctccgccggcgccgctgatcgacgcggaggagctcacccagtggtcactgtaccgcgcggtcatcgccgagttcatcgccacgctgctcttcctctacatcaccgtnggcaccgtgatcgggtacaagcatcagacggacgcgtcggcgtcg

SEQ ID NO: 29799 - DNA, 309 bp, Zea mays
  unsure (1)..(309): unsure at all n locations
acggaacattgaacaacacgcctctgataatgtcaacaagattttggttggcaacaaggccgatatggacgaaagcaagagggctgtacctactgcaaaaggacaagcacttgctgatgagtacgggatcaagttttttgaaacgagtgcgaagacaaacctgaatgtggagcaagtgtttttctccatcgcacgtgacatcaagcagaggcttgcggagactgattcaaagccagaggacaaggcaatcaaaattaacaagccagaccagggttccgaggcacnagctgcccagcgatctgcttgctg

SEQ ID NO: 29800 - DNA, 306 bp, Zea mays
acacactaagcccatggtggtggagaccttttctcagtatcctcctcttggtcgatttgctgtccgtgacatgaggcaaacggtggctgtcggagtcatcaagagtgtggagaagaaggacccaactggagccaaggtgacgaaggctgctgccaagaagaaatgatctatctggctggtgacgaaggctgctgccaagaagaaatgatctatctggctggtgctgtgcttgcttgttggttacctcgtggaagcttaaaatatctcgtcttgttgacatccttgcagttgtcgcgtgaacaagta

SEQ ID NO: 29801 - DNA, 303 bp, Zea mays
  unsure (1)..(303): unsure at all n locations
aanatacaagagcagcagaacttgttgaagacctacgaggtcatggtaaagaagttccagtcccagatccagtccagagacactgagataacccatctacagcagcaaattgatgaagctaaacttcggaaatcaaagctagagaagaaactgaaacagaggggcctacttaacagggagtcggaggaatctgacgaagaagagaactacttttccattgaattgacaccaagtttgtttacatctgccgttgataatgcctaccagtcgatacatgacttctcgaagcctttgatcaacatg

SEQ ID NO: 29802 - DNA, 302 bp, Zea mays
ccggcctcggcgccgagatcatcggcaccttcgtgctcgtctacaccgtcttctccgccaccgaccccaagcgcaacgcccgcgactcccacgtcccggttctggctcccctccccatcggcttcgccgtgttcatggtgcacctggccaccatccccgtcaccggcaccggcatcaacccggccaggagcctgggcgccgccgtcatctacaacaaggacaagccctgggacgaccactggatcttctgggtgggccccctcgtgggcgctgccatcgcggccttctaccaccagtacatc

SEQ ID NO: 29803 - DNA, 302 bp, Zea mays
  unsure (1)..(302): unsure at all n locations
gcncgatcccgatccagcgaggcggcgaccctccctcctccccttgcttcgctcgtccagccctgaccacccgcatccccgtcagtcatggcagcggcagcaggcggaggcgcggtgcgtgcgctgtcccagaaggagcaggacatacagatgatgctcgccgccgacgtccaccttggcaccaagaactgcgatttccagatggagcgctatgcctttaagcgccgcaccgacggcatctacatcatcaaccttggcaagacatgggagaaactgcagcttgcagcgagggttatcgttgc

SEQ ID NO: 29804 - DNA, 296 bp, Zea mays
aatcggtcaacatatcagctgcagaggacaagacgctacaggtgaagaagtaatcaagccttatacccctactacattggattctgatcttggatattttgagcttgtcataaagatgtatccccaagggagaatgtcccatcatttccgcgagatgaaagttggtgattatttgtctgtgaagggacctaagggccgattcaagtaccacgttggccaagtgagggcatttggaatgctggctggtggatcaggcattactccaatgtttcaagttgccagagcaattcttgaga

SEQ ID NO: 29805 - DNA, 292 bp, Zea mays
gtgccgtccaccgaccaccggtgacacggcgccgatagcaagagttcaggaggagcgcggagccgtttctggtggtagcggtgtccgagaggcgcggcgagatgtctgtgcggataaaggcggtggtggacaggttcgtgatggagctcaaggaggcactggacgcggacatccaggaccgcgtcatgaaggagcgggagatgcagagctacatcgcggacacgagcgcgaggttgccgagagggaggccgcgtggaatgccgagctctcccgccgcgaggctgagatcgcg

SEQ ID NO: 29806 - DNA, 294 bp, Zea mays
gcgacttcatccccgtgctccgacccttcctccgcgggtacctcaaccgctgccacgacctcaagacccgccgcatgaaggtcttcgaggatagcttcgtccaggagcgcaagaaggtgatggctgagacgggtgagatccggtgcgccatggaccacatcctcgaggcggagaggaagggcgagatcaaccacgacaacgtcctctacatcgtcgagaacatcaacgtcgcagcgatcgagacgacgctgtggtcgatcgagtggggcatcgcggagctggtgaaccaccggc

SEQ ID NO: 29807 - DNA, 300 bp, Zea mays
caaagatgcgcactcttgccaagaaccgcgagagtctcccggatggttttatgtgcccgggtggctggaaagtgctcgttgaatactatgacagcttggtgccaatcgagggcagcagcaagctgcgcgagccagttgcagcctgaaatatgggaagcgcttcagataaggaaccgtactatgtcagcacaagcggttctttgcgacatagaaccgttgttgtatgattgtatactggcttgtaagacttaaaaacactgggcttgatttggacgttaatgtgtgcattgtaactggtgt

SEQ ID NO: 29808 - DNA, 299 bp, Zea mays
caagagggaagggcagcatgcgcaggaagaagaaggcagttcacaagaccacgaccaccgatgacaagcggcttcagagcaccttgaaaaggatcggggggaacaccattcctggtatcgaggaggtcaacatcttcaaggacgatgttgttatccagtttcagaaccctaaagtgcaagcatccattcctgcaaatacatgggtggttagtggagtaccccagacaaaaagtctgcaagaccttctgccatcaattatcaaccaactgggccctgataacctggacaaccttaagaag

SEQ ID NO: 29809 - DNA, 295 bp, Zea mays
ggcaagcaccaatcagccagcagtccagcacaatatcatgaacaagcgtcaggtcgccgcggcggtggctgccctcctggcgctgctagccgcatcatcgacggccggcgccgtgacgttcgacgcgacgaacacggcgtccgatacccccggcgggcagcggttcgaccaggccgtcggcctcgactacgccaagcaggtcctgtccgacgcgtccacgttcatctggaacaccttcgaccagcccagcaccgccgaccgctaacccgtcgacgcggtgaccctcgtcgtcgag

SEQ ID NO: 29810 - DNA, 294 bp, Zea mays
gaactggagagcaatatttgagaggtttgatcgtgatcgaagtggcaggatcgacatgtcagaactgcgcgatgctcttctcagtctcggatattctgtgtctccaactgtccttgatctgcttgtgtctaaatttgacaagactgggggcaagagcaaagcaatcgaatatgacaacttcattgaatgctgcctcactgttaaggggctgacagagaagttcaaggagaaggacaccgcctactctgggtcggcgactttcacctacgaggccttcatgctgaccgtgctgcc

SEQ ID NO: 29811 - DNA, 295 bp, Zea mays
gcaacggaacattcagcacttcctacaaagctgtcatgccgtctggcatggtggtgtgtgtcaagaaactgaagtctgtcgaccgtgcggtcatccaccagcagacgaagatgatccgagagctcgagcgtcttgcccacatcaaccacaagaacctggtccggcccgttgggtatgtcatctatgacgacgtcgcgctgctgctgcaccaacatatgctgaatggaaccctgcttcagttgctgcacagcagcggcggcgatactgacggcaagaagcagaaacctgactggcc

SEQ ID NO: 29812 - DNA, 291 bp, Zea mays
gtggtgttagaggtggtggcgaacagcctcgcaggcgatgttttggcgacccagaaatgacctcagcttggtgctagccttcgagagcactcgagaacgcaacacggccatcatgctcgctcggcgtttcgctgtagactgcaatatcatccttgctgggccaggcgacaaaactccctggtgatggcacctgtgctgctctgccaatccccaccactcttaacaatccgcgattcgcacagcttgcttgcaccagttcctctgattttccttcctcgtcagtctgggctg

SEQ ID NO: 29813 - DNA, 294 bp, Zea mays
atttgatcctggagactgtaatattttgattacgtcgggcagtgatcggagtctgacactctatgacttgcgtatgtcatctccagctagaaagctaataatgaagacaaggtgcaattcagtatgctggaaccctagagagcctatgaacttcactgctgcaaatgaagacacaaactgttactcctttgatgctagaaaattagatgaagcaaaaattgttcacaaaggccatgtttcagcagtgatggatattgactactcaccaacagggcgtgaatttgtcactggttc

SEQ ID NO: 29814 - DNA, 295 bp, Zea mays
cttaaccctcgttcctctagccgtctcgcgcaccacagcctccatttctcctccgacggcggtgcggctagctcaaccatggcggactccaaggccacctcggcggtcaccctccgcactcgcaagttcatgaccaaccgcctgctggcccgcaaacaatttgtgcttgaggttatccaccccggccgcgccaacgtctccaaggcggagttgaaggagaggcttgccaagatgtacgaggtgaaggaccccaacaccatcttcgtcttcaagttccgcacccacttcggtggag

SEQ ID NO: 29815 - DNA, 298 bp, Zea mays
  unsure (1)..(298): unsure at all n locations
acattcccgatttccgattcccaatccagcaaaccctaccagccttttgcaaactcagagagggacccgatggcacccaaggcggagaagaagccggcggcgaagaagcccgcagaggaggagcccgcggccccggcggagaaggcccccgctgggaagaagccgaaggcnagaagcggctcccggcgggaaaatccgccggcaaggaaggcggtgttgacaagaaggggcggaagaaggccaagaagagcgtggagacgtacaagatctacatcttcaaggtgctgaagcaggtgca

SEQ ID NO: 29816 - DNA, 300 bp, Zea mays
ctgtacatcagtcgctgctttggataaaatagaagacgccctcgggaaattcaacgagggtccattctcccttggtcagttcagtctggtatgtcactggacactaggaatcctcctctctgcagcatggttcaaaataaaatctctattagaaagagttcatattatgaatgtgggcttcggttgtcatgtggctttgtcgtccgtgatgtgtaatttcactacaggtggacattgcgtatgtaccattcatcgagaggtttcagatattctattccaacataaagaactatgatatta

SEQ ID NO: 29817 - DNA, 301 bp, Zea mays
cgagctgctcgccaagacgggggtcaagcccaaggacatcgggatcctcgtggtgaactgcagcctgttcaacccgacgccgtcgctgtcggccatggtggtcaaccactacaagctgcgcgggaacgtggtgagctacaacctcggtgggatggggtgtagcgccgggctgctgtccgtcgacctcgccaaggacctgctgcagacgcacccggggtcgtacgcgctggtcatcagcacggagaacatcacgctcaactggtactcgggcaacgaccgctccaagctggtgtccaactgc

SEQ ID NO: 29818 - DNA, 304 bp, Zea mays
caggctttcagccaaaagggtagctgttctccgaaatctttgccaaaaggtaggaataacaattgctgcacgtaaatatgatcttgatgcttcaactccatttgaagcctcagatattttaaatctccaaccagtcgtcaagcattctgttccaacctgtacggaagcaaaaaatcttatggaagcagggaaagtcaggatggctgagggaacattgaatgaggcatatgcattgttttctgaagccttttcactgcttcaacagataactggtcccatgcacaaggatgctgcaaattgttgc

SEQ ID NO: 29819 - DNA, 221 bp, Zea mays
atttttgatggtgtaattgaaaatatgcacttgcattggaagcacagggaagttgttaaactaatttcaaagcagaagaccttgtcattcgttgaagagacggcacggcttcttgcatatgagagtggtggtatactagttgcaattgaaagagttccaaagggttatgcactcattttttaccgtgggaagaactataggagacctattaacataaggcc

SEQ ID NO: 29820 - DNA, 295 bp, Zea mays
aaatatgtctgtctaccaagcaatcagatgcatgtcatcatccaagctttttgttggagggctttcttatggaaccgatgatcacagtctcagagacgagtttgccaaatatggacaagttattgaagctaagattatccttgatcgtgagtctgggaggtccagaggttttggctttataacttacacgtcttctgaggaggcttcggctgccatcactgccatggatggaaagactctggatggacggaacatacgggttaatcatgctaacgagaggacaggtggcttccgc

SEQ ID NO: 29821 - DNA, 299 bp, Zea mays
cttgcaatcacaacgaacagaagctctcgatctcaccgacaccgaggaagaagagatcaatggcgtccgagcagggagtcgtgatcgcgtgccacagcaaggctgagttcgacgcccacatgaccaaggcccaggaagccggcaagctggtggtcatcgacttcactgccgcctggtgcggtccatgccgcgccatcgccccactgttcgtcgaacacgccaagaagttcactcaggtcgtcttcctgaaggtggacgtggacgaagtgaaggaagtcaccgcggcctacgaggtcgag

SEQ ID NO: 29822 - DNA, 297 bp, Zea mays
atcagcggtgtgatcctcttcgaggagaccctgtaccagaagaccaaggatggcaagccttttgttgatgtcctcaaggagggaggcgtcctccctggcatcaaggttgacaagggcaccattgaggttgttggcactgataaggagaccaccacccaaggccatgacgaccttggcaagcgttgcgccaagtactacgaggcaggtgcccgctttgccaagtggcgcgctgttctcaagattggccctaatgagccatcacagcttgccatcgacctgaacgctcagggtctggct

SEQ ID NO: 29823 - DNA, 297 bp, Zea mays
gagattattgacaggaaaaaagatatagtaaagcttcagcacggagaatatgtgtctcttggcaaggttgaatcggctctagcaacaagtagttatgtggagagcatcatggtctacgccgatccgttccataactactgtgttgccctggttgttccagtacgccaggccctggagaagtgggctcaaaattctgggataaactgtgaaggctttgaagagctttgccaaaatggccaggcggttaaggaggttcagcaatcactatcgaaggccgcgaaagcagcgaggctggag

SEQ ID NO: 29824 - DNA, 296 bp, Zea mays
caaagaattccctcccctagccgccgccgccgccgctcgtctccctgagaggtgccgggaccgaggaactggccgagtactaggtagagaatcggtttttcttgtctcagcccggggtctgctgcgtctggtggtggtgaaggggagaaattcgtgagatctgttccggatcaggcgtgcgagctcgggaatcaggggtttcacacatagcttcgtcgatttgaatttgatgtactaatggagtctaagggtggcaaaaagtctagcagtagtcgttctatgatgtatgaagctcc

SEQ ID NO: 29825 - DNA, 293 bp, Zea mays
aggatatcaggaaggacctctacggcaacattgtgctcagtggaggttcgactatgttccccggtatcgctgatcggatgagcaaggagatcacttcccttgcaccaagcagcatgaagatcaaggtcgtcgcgccacctgagaggaagtacagtgtctggataggagggtcgatcctagcctcgctcagcactttccaacagatgtggatatcaaaggaggagtacgatgagtctggcccggcaattgttcacaggaagtgcttctaggtttctgccaagttcgtcaagtgc

SEQ ID NO: 29826 - DNA, 291 bp, Zea mays
atggtgtcaaggctgaagcacgaaaatgttgttgagttgcttggttactgtgctgatgggacactccgcgtccttgcctacgagtttgctactatgggttcccttcatgatatgcttcatggaaggaaaggtgttaaaggggctcaacccggcccggtcttatcatggttgcagcgtgtgaagatagctgttggggcagcaaaaggcctcgagtatcttcacgagaaggcgcagctcatatcatgcaccgagacatcaagtctagcaacgttcttcttttcgatgacgacg

SEQ ID NO: 29827 - DNA, 292 bp, Zea mays
agctgatctatgtatcacatttgtctacattttttactggcgctgaatggtgggcacaggattttcggaaatcactacccttttttggttggattccacttccatttctttctgaaattgaaattcctttatatgttcttgtgctgattcttatgatcgtatgtgctgttatacctactgttagatccaatgtcagcaatgtccaagaggtagttgaggcacgaaaaggaagcatggcattagcattagccatgatccttccttttattgtactgatagctggagtagctat

SEQ ID NO: 29828 - DNA, 288 bp, Zea mays
gttctgcttctgctacataaaattagaggatccatgggtattggttctatgaagtgaaaggaaaatgtgcccttggaccatttctataatgttttggtgattaagtgtccaacacatagtgagtgagttattatgtactaaacaaccaagaagtgcaaatcatataacaaggtatgtttctagacttagtaaattggtttttgtatactaatgtgtttgtctaagtgctagaaacagtgaccaaagaaaaggaaaaagagttggctatgtgcagccaacaccaacttt

SEQ ID NO: 29829 - DNA, 290 bp, Zea mays
acctgatggcacgcaagatgaaggacaccgactctgaggaggagctcaaggaggccttccgtgtgttcgacaaggaccagaacggcttcatctccgctgctgagcttcgccatgtcatgaccaacctaggcgagaagctgacggacgaggaggtggacgagatgatccgtgaagccgacgtggacggtgatggccagatcaactacgacgagttcgtgaaggtgatgatggccaagtgagatatgcccgccgtttttaagctagttcctctcctgatggtagtaactagt

SEQ ID NO: 29830 - DNA, 292 bp, Zea mays
agaacggcggcggggcgagcagcaccagcaccaacccgccgagcggggtgaaggtgacgaccggggaggcgtggtgcgtggcgaacgcgatggccggggagcatcggctccaggcggcgctggactacgcgtgcggccccggcggcgcggactgcaaggccatccaacccggcgcggcgtgcttcgagcccaacaccatggtcgcgcacgcatcctacgccttcaacgactactaccagcgcaagggccggtccatcggaacctgcgacttcgccggcgccgcctacgtcgt

SEQ ID NO: 29831 - DNA, 291 bp, Zea mays
aggagggctttggtgtcaatacctacaccttgatcaacagggatggaaagcctcaccttgtgaaattccattggaagcctacttgtggtgtgaaatgcttgctcgacaatgaagctgtgactgttggaggcacctgccacagccatgcgacgaaggatctatatgattccatcgcagctgggaattaccctgaatggaagctctacatccagactattgatcttgaccatgaggataagtttgactttgacccgctcgatgtcaccaagacctggcctgaggatatcatcc

SEQ ID NO: 29832 - DNA, 292 bp, Zea mays
atagaaagtgtcaaagatactctgaaggagttagtgatgcttcctttgcaaagacctgaactttttaaccgaggacaacttatgaagccgtgtaaaggaattttactttttggcccacctggtactggaaagacaatgcttgctaaggctgtggcaactgaggctggtgctaatttcataaacatatcgatgtcaagcatctcttcaaagtggcttggtgaaggagaaaaattcgtgaaagctgttttttcactggcaagtaaaattgctccaagtgtaatttttgtggacg

SEQ ID NO: 29833 - DNA, 290 bp, Zea mays
ctgataaggagaccaccacccaaggccatgacgaccttggcaagcgttgcgccaagtactacgaggcaggtgcccgctttgccaagtggcgcgctgttctcaagattggccctaatgagccatcacagcttgccatcgacctgaacgctcagggtctggctcgctatgccatcatctgccaggagaatggtctggtgccaattgttgagcctgagatccttgttgatggccctcatgacattgatcgctgcgcttacgtcactgagaccgtccttgctgcctgctacaag

SEQ ID NO: 29834 - DNA, 291 bp, Zea mays
  unsure (1)..(291): unsure at all n locations
agaanaactacttttcttttataaaaaaacttatagaaaacatttcagaaggggagtttggctggggcggcacatctgttaaatgataacacaggtgtccaaagatgagctcaacaagaacagaaatcttgtgttgaacaaaagggtaaaagctacatttgattttgttgattttcaagtaggaatacaaactgtgaaagcatggcctatcgatcctttatttattttcttttaaaaaaaaatgtgtagaaaagccactacttggcgatagaggtgtcagaatagttacca

SEQ ID NO: 29835 - DNA, 283 bp, Zea mays
gcagttttcaaggccatgatcaggtccgcgcctcttccaatgagccctctggagtcccttgcatcatctgctgtgaggactgccaacaaggccaaggctgcactgattgtcgtcctgactcgcggtggcaccacggccaaactggtcgccaagtaccgccccagggtccccatcctctccgttgtcgtacccgtgcttacgaccgactctttcgactggaccatcagctccgagggcccagctaggcacagcctgatctacagaggcctcattcccctcctcg

SEQ ID NO: 29836 - DNA, 310 bp, Zea mays
  unsure (1)..(310): unsure at all n locations
gcttgaagctccagccgtgctcgtgtagggctgcagggcatccgggctccggcttccggcatccaccagacgtncttagaatacggtgcagcgagcagcaagtcgccgagcagccgagccaccgccgagcacagggcgccgccgagcagccgagccgccgccgagcgccgagtcttctctgataaagcggagaaattggtagcagaagcagctgggtatggttcacagttggttttgtttcctgaagtctttgttggtggctacccacatggatctacctttggacttgttgtcggcaatcgcactgcca

SEQ ID NO: 29837 - DNA, 311 bp, Zea mays
gctctcgtccctagaaataaagcagctcctccgcggggcggcgaactactacccatcgccaaaaccctagccccgatccggtcgaggagcactacttcttggcatggcgggcacccctagccaggcaagcctcctgctccagaagcagctcaaggatcttgcgaagaaccccgtggatgggttctccgcacggcttgtagacgatagcaacgtcttcgagtggcaggtcaccatcatcggcccgcccgacaccctatatgatggaggctacttcaatgcaataatgaccttcccccagaactatcccaaca

SEQ ID NO: 29838 - DNA, 258 bp, Zea mays
cacgccgccgccgcgtctcctcctgtacaggtaacgagaggaagagggcgaaatggtgaagcacaacaacgtcatccccaacgggcacttcaagaagcactggcagaactatgtcaagacatggttcaaccagcccgcccgcaagcagaggcgccgcatcgctcgtcaaaagaaggctgtgaagatattcccccgcccgactgctggtcctctacgccccattgttcaatgccagactttaaagtacaacatgaagtc

SEQ ID NO: 29839 - DNA, 309 bp, Zea mays
  unsure (1)..(309): unsure at all n locations
ggagaagtcncacatcaacattgtggtcattggccacgtcgactctggcaagtcgaccaccaccggccacctgatctacaagcttggaggcattgacaagcgtgtaatagagaggtttgagaaggaggctgctgagatgaacaagcggtccttcaagtatgcttgggtgctcgacaagctcaaggctgagcgtgagaggggtatcaccattgatattgctctgtggaagtttgagaccaccaagtattactgcaccgtcattgatgcccctggacaccgtgacttcatcaagaacatgatcactggtac

SEQ ID NO: 29840 - DNA, 250 bp, Zea mays
gttggcttctcctcgccctccggttcgggttcgggttcgtgaggttctccggggttcgggttcgtgggtgagcggatcgagatggcggcgtcggatgttgagtaccgctgcttcgtcggcggcctcgcctgggccacggacgaccactccctccacaacgccttcagcacctacggcgaggtcctcgagtccaagatcatcctcgatcgggagacgcagaggtcccgcggcttcggcttcgtcaccttct

SEQ ID NO: 29841 - DNA, 241 bp, Zea mays
gcagaatgtgttccttccatccaggaagttatcgctaatggcattagcgtcaacgtcacgcttattttctcaattgcaagatatgaggctgtgattgatgcttacctcgatgggctagaggcttctggcttgagtgaattatcccgagttactagcgttgcatccttctttgtcagccgagtggacacccttattgacaaaatgcttgacaagattggaacacctgaggcccttgccttga

SEQ ID NO: 29842 - DNA, 210 bp, Zea mays
agccaaatgccactttgtcgccatagacatattcaatgggaaaaagcttgaagatattgttccttcatcacacaactgtgacattccgcatgtgaaccgtactgagtatcagctgattgatatttctgaggatggatttgtgagccttcttacttcagatggcaacactaaggatgatcttagactcccaactgatgagactcttgtggc

SEQ ID NO: 29843 - DNA, 211 bp, Zea mays
ctacacccaagtattcaaaggcccgttatgatgagattgtgaaggaagtctcttcctacctgaagaaggttggatacaaccctgataagatccacttcgttccaatctctggttttgaaggtgacaacatgattgagaggtccaccaaccttgactggtacaagggcccaaccctacttgaggctctggacttgatcaatgagccaaagag

SEQ ID NO: 29844 - DNA, 210 bp, Zea mays
ggccatcgtgctgggcacgctgctgatcctggccgtcctggaggtgaagtgggcgggcgtgacggtgttcgagtggttcaggaacgggcagttctggatgacggccagctgctccgcgtacctggccgcggtgtgccaggtgctggtgaaggtggtgttcaggcgggacatctcgttcaagctgacgtcgaagcagcccgcaggggacga

SEQ ID NO: 29845 - DNA, 208 bp, Zea mays
agtggggctggtgagaaacgtggagacgatggttcagattatactatatttgttggggacttggcctcggatgttacagatttcattctacaagatacgttcaagagtcgttatccatcagttaagggtgcaaaagttgtctttgacagaactactggccgttcgaaaggctatggttttgtaaagtttgcagattcggatgaacaga

SEQ ID NO: 29846 - DNA, 210 bp, Zea mays
ccagaagatagcagaaatcccggacgatcttaaagcaatctacaaaactgtttgggagatcaagcagaaaactttagttgacatggcggtcgaccgcggatgctacatcgaccaaagccagagcctcaatgtccacatggagcaagcaaactttgggaagctgacgtctcttcacttccatgcttggtccaagggcctgaaaactggaat

SEQ ID NO: 29847 - DNA, 209 bp, Zea mays
gcgtgaaggtgttggggatgtgggcgagccccatggtgatcagggtggagtgggcgctgcggctgaagggcgtcgagtacgagtacgtcgacgaggacctcgccaacaagagcgccgacctgctccgccacaacccggtgaccaagaaggtgcccgtgctcgtccacgacggcaagccggtcgcggagtccaccatcatcgtggagtac

SEQ ID NO: 29848 - DNA, 210 bp, Zea mays
aggtttgtcgccgccatggcgatcctctcggcgctcgccaccgaggtgttcatccccgtcgccgccgtcatcggcatcgccttcgccgtcgtgcagtgggtgctcgtgtcgcgggtgaagctctccccggctgcagccgcgtccggcggcagcaagaacggctacggcgactacctcatcgaggaggaggaggggctcaacgaccacaac

SEQ ID NO: 29849 - DNA, 207 bp, Zea mays
gttattcatggtgatatcaagccagacaatctcttggttaccagtaccggcaacgtgaagatcggggatttcagtgttagccaggtttttgaggatgatgatgatatgctttggagatctcctggcactcctgttttcactgccccggagtgctgtcaaggttcagcctaccatggtagagcatctgatacatgggcagttggtgta

SEQ ID NO: 29850 - DNA, 202 bp, Zea mays
gcgcccccacccacccacccactcgcttcagccgcctccgccgcgcgtacaagcaggtggagacaggatgccggctggccacggcctgcgctcgcggacgcgcgacctcttcgcgcgccccttccgcaagaagggctacatcccgctcaccacctacctccgcacctacaagatcggcgattacgtcgatgtcaaggtgaac

SEQ ID NO: 29851 - DNA, 141 bp, Zea mays
tgccagctatagccaaccagaagagcttgcagttactgagagtgtgtgagagagataggatgatgggtggcagctgcagggctgctctgctgctggccctgttggccgtgagcctggccgtggagatccaggccgacgccg

SEQ ID NO: 29852 - DNA, 203 bp, Zea mays
acctcctcgccgttgctgtcggacgaggcaaccatggccgcggggggcaccgccgacttcttctaccgcgagtcgcagcgtctgggctacgtcgcccgctctgcgtttaagctgatccagatgcagaagcagcacaagctcatcgcgccgggcgccgctgtgctcgaactcggctgcgcccccggcgcatggcttcaggtggc

SEQ ID NO: 29853 - DNA, 205 bp, Zea mays
gacggacccgcgcttcaaccgcgtgttcaacgagggcatgaagaaccactcggtgatcatcaccaagaagctgctggacttctacacgggcttcgagggcgtgtcgacgctggtggacgtgggcggcggcgtgggcgccacgctgcacgccatcacgtcccgccacccgcacatctccggggtcaacttcgacctgccgcacgtc

SEQ ID NO: 29854 - DNA, 109 bp, Zea mays
tatcctgcatcgagggcatattcttctcggggtccttctgcgccatcttctggctcaagaagcgcggtgtcatgccgggcgtcaccttctccaacgagctcatctcccg

SEQ ID NO: 29855 - DNA, 307 bp, Zea mays
caaggaggcagctgatgagcgtgccgccgctgccaaggcctcttctggaaagaaagaaagtggtaaatcctccgtccttatggatgtcaaaccatgggacgatgagactgatatgaagaagctggaggaggctgtccgcagtgatcagatggagggtctgacttggggagcatcaaagcttgtgcctgttggatacggcatcaagaagatgactatcatgttgacagatgtcgacgatcttgtgtccatcgacgctctaattgaggaccaccttacgcaagagcccatcaatgagtacgtccagagt

SEQ ID NO: 29856 - DNA, 173 bp, Zea mays
gcgctggcaggtagtaactcggaatcggctcgaatggcccaagaatgcccgtgacgcagtgaggcactttggcaacgctcctggagtgccgcacagccacaccaagccgtatgtgcgctccaagggaaggaagttcgagaaggctcgtggcaggaggaacagccgtggattca

SEQ ID NO: 29857 - DNA, 114 bp, Zea mays
aagaggccttcagacaagcccctgcgtctcgcccttcaggatgtgtacaagattggtggtattggaactgtccctgttggacgtgttgagactggtgtcattaagcctggtatg

SEQ ID NO: 29858 - DNA, 309 bp, Zea mays
taaaacaaaggacaatgtttttgtgaatgtggtggcatctattcagtaccgcgctctggctgacaaagcaagtgacgctttctacaaactgagcaacacaaggtcccagatccaagcctacgtctttgacgtgatcagagcaagcgttcccaagctccatttggacgatgctttcgagcagaaggacgagatcgcaaggtcggtggaggaagagcttgagaaggccatgtcggcttatggctttgagatcgtgcagactctcatcgtggacatcgagccagacgagcatgtgaagcgcgcaatgaacga

SEQ ID NO: 29859 - DNA, 349 bp, Zea mays
acgcgcttgtagcgctgtaggctcggagatcggctcgacaccaaggataaggacacaaaggagaacaaggggttcgcctttgtcaccttcatggacaaggaggcatgccacgcgccatcgaggatgtgcaagacagggagttcaacgggaggactttgcggtgctctctgtcgcaggcaaagcacaggctgtttgttgggaatgtgcccaaagggctgagctaggaggagcttaccaacactatcaaggggaagggtccaggtgttatcaacattgagatgtttaaggatcagcatgacccaaaccgtaaccgtggcttcctctttgttgagtattacgaccatgcctg

SEQ ID NO: 29860 - DNA, 308 bp, Zea mays
aggccgactacaacattcagaaggagagcaccctccacttggtgttgcgtctcaggggcggcatgcagatcttcgtgaagagtctgactggcaagactatcacccttgaggtcgagtcttctgataccattgacaatgtcaaggccaagatccaggacaaggagggcatccctccggaccagcagcggctcatttttgccggcaagcagctcgaggacgggcgcacgcttgccgactacaacattcagaaggagagcaccctccacttggtgctgcgtctcaggggtggcatgcagatcttcgtgaag

SEQ ID NO: 29861 - DNA, 303 bp, Zea mays
caaggaccttcggcgcccgttcaggatccacatcttcccgagcgagttcttggttggcgtcttcctcttcggaccacctccaacgctcttggtgtagcttgccactctcaccaatcaagttttcatgtctgatctcgacattcagatcccaactgccttcgatcccttcgctgaggccaatgctggggactctggtgcagcagcagggtcaaaggactacgttcacgtgcgcatccagcagcgtaatggtcgcaagatcctgaccaccgtccagggattgaagaaggagttcagctacagcaa

SEQ ID NO: 29862 - DNA, 299 bp, Zea mays
aagtttgcgcagtacactggtgcccatgccattgctggcaggcacactcctggtacattcaccaaccagttgcaaacctcgttcagtgagccacgccttcttatcctgactgacccgaggactgatcatcagcccattaaggagtctgcccttggaaacattcccaccatcgccttctgtgatactgattcccctatgcgctatgttgatatcggcgatcccgccaataacaaggggaaacagagcattggttgtctgttctggctggtcgcccgaatggtcctccagatgcgcggtac

SEQ ID NO: 29863 - DNA, 296 bp, Zea mays
tagcagcagcccggtgctccctctctgcaggtctcccttcgcagccgccgaggaaccccatcacagcgcggaagatggctgaacaggaggccccagtcgcggttgacgcaccaaccccagttcttggggagcctatggacttgatgactgctctgcagctcgtgatgaagaagtcaagtgctcatgacggtcttgtgaagggtctccgtgacgctgccaaggccatcgagaagcacgccgctcagctttgcgtgcttgctgaggagtgtgaccagccagattacgtcaagttggtg

SEQ ID NO: 29864 - DNA, 302 bp, Zea mays
tgtgaatattaaccagaagggtttccttacaattaacagccaacctgctgtaaatggagagaaatccgactcgcctactgttggttggggtggtcctggaggctacgtttatcagaaggcctacctcgaattcttctgcgcaaaggagaagttggaccaactaattgagaagatcaaagcattcccttctctcacttacattgctgtgaacaaggatggagaaacattctccgatatttcaccgaacgccgtgaatgctgtcacgtggggtgttttccctggcaaggagattatccagccta

SEQ ID NO: 29865 - DNA, 291 bp, Zea mays
atcttcgccgccggcgagttgtcgcccggcagccagccatggattaggagtacgacgtgatcgtactacgcacggggctcaaggagtgcatcctcagctgtctcctctctgtagacggcctcaaggttttgcatatggacagaaatgactactatggaggagattccacctcactcaaccttaatcagctctggaagaggtttagaggggaagacaagcccccagcacgatctaggtgcaagcagagactacaatgtggacatggtgccagagtttatgatggcaaatggg

SEQ ID NO: 29866 - DNA, 297 bp, Zea mays
ctcattaacaacgagtggttcaagaaggggtatcagcctcccagatttgaaacagcagatgttaatctggatgacgtgaagtccatcttcgatgaatccggggagccagcacagcttgttgttgagaggacacaacaaagaccatcagtgatgaacgctttcgagttaatctctacgtctcagggcctcaatctcgggacgctcttcgagaagcaaacgggttctgttaagcgagaaacaaggtttgcgtcaaggcttcctgcaaatgagatactgtcgaagatcgaagcagcagca

SEQ ID NO: 29867 - DNA, 295 bp, Zea mays
ctgttatgaaaaggtttatggagaacccatttctgtggaggaattggctggtcgtgtggcaagttatgttcatctttgcacgctgtactggtggctcaggccttttggttgcggtgttattctaggacgttatgatagggatgggccacagctctacatgatagaaccctcaggagtttcctacgaatacttcggtgctgcattggtcgaacgggagacacgctgcaaagactgagatagaaaagttgaaactttcggagcttacctgccgggaaggcattgttgaagttgcaaa

SEQ ID NO: 29868 - DNA, 311 bp, Zea mays
tgtgtggtgttggctgggaggagattttatgagaaggaagggctccctgctttccctatgggaaaaattgatcaaacacgtatgtggaaggtgggtgaaagggtccgttcaaccaggccacaaggtgatcttggcccactgcatcccttcactgctggagtgtatgttgcattaatgatggctcagattgaggtccttaggaagaagggccactcttactcagagataattaacgagagcctgatcgagtccgtggactcgttgaacccgttcatgcatgctcgcggtgtggccttcatggtcgataactg

SEQ ID NO: 29869 - DNA, 307 bp, Zea mays
atcaagatggacgacaagttcaaggagatcgttgtggaccaggtcggggatcgcgctaccagctacgaggacttcacaaacagcctccccgagaatgactgccgatacgcgatctatgatttcgactttgtcactgcagaagatgtccagaagagcaggatcttctatatcctatggtccccatcctccgccaaggtgaagagcaagatgctttatgcaagctcaaaccaaaaattcaagagtgggctcaatggcattcaggtggaactgcaggctactgatgcaagtgaaatcagccttgatgaga

SEQ ID NO: 29870 - DNA, 202 bp, Zea mays
tcttctcattgttaacgtcgcatcccagtgtggcttaaccaactccaactacactgagctggcccagctctatgagaagtacaaggaccaaggctttgaaatcctggctttcccatgcaaccagtttggtgggcaggagcctggtaccaatgaggagattgtccagtttgcctgcacacgcttcaaggctgagtaccccatc

SEQ ID NO: 29871 - DNA, 307 bp, Zea mays
ctgcggaggctctcaagttctccaacgcctgcaggccatctgcaccaccaagaagggcgccatcccggcgctgcccacggtcgccaccgcccaggacctcatcgccaaggccaactagatggccgcacgcccgccgttccaccacgtcactgtccccctcgtcgtcgacgtcctcggtttcggttcattaggtagatcgagtcttagcgtccgtctctgcgcctctacgctgagacggtttgtttgggttaattaagttagctttcgtggagatttcgccccggggcatcaaataaaatgttggcat

SEQ ID NO: 29872 - DNA, 311 bp, Zea mays
caccgctcacctcggtttggctttctcccctcttccgcacccgcttctcgctccggattccggattccctctgctctttccctaacgaaggtagccatggcggggagaggtaaggcgatcggctcaggcgccgccaagaaggccacgtccaggagctccaaggctggcctccagttccctgtgggaaggatcgccaggttcctcaaggccggcaagtatgccgagagagtcggcgccggcgcccctgtctacctcgctgccgtgctcgagtatcttgctgctgaggttcttgagcctggcggcaatgcggc

SEQ ID NO: 29873 - DNA, 215 bp, Zea mays
cgcgctggcgcggcagatcctcatcaacggcgacggcgtcatcgagtccgggttcagccctggccgctactgcatggagatgagctcgttcgcgtaccgggagctctggcggcttgaccaggagggcctccctgccgatctcatcagaagaggaatggccgtggaggacccgacgcagccgcacggtctccggctgctcatcgaggactacccct

SEQ ID NO: 29874 - DNA, 303 bp, Zea mays
tatacagcagagaaatggagaagatcaacgtgttccgcggcatggtcaccaactggatcttcatcgcgatcatagccgcgacggtcctgttccaagtggtgatcgtagagctgctcggcacctttgccagcaccgtcccactcgactggcggctttggctgctcagcgtcggcctcgggtcggtcagcttggtcgtcggtgccgtcctcaagtgcataccagttgccaaatcgaacggagctcctgcgagtcccaacggctacgccccgctccccagcggtcctgacgacatttagctgaaga

SEQ ID NO: 29875 - DNA, 277 bp, Zea mays
tatgaaggaggagcagaaaaatcaagagaaggcagtagctgctacagcttcaaaatcaagtcttggacttgaaaagaaaagcaaggatgactctgatgattctgatgaggatgagtctgatgattctgatgaggatgattctgatgattctgatgagggcgagggattatctcctgacgaaggcgatgatgattcaagtgatgaggatgataccagtgatgatgacgaggaagaaaccccaactcctaaaaagccagaggcaggcaagaagagaggt

SEQ ID NO: 29876 - DNA, 274 bp, Zea mays
cgccgcgccgcccaaatcacagccaccgccgccatggccgcctccagccgccctctcgtctccgtgaaagccctggagggcgacatggtcacggacgcccccggcatcgccttaccgcccgtcttcggggcaccgatccgcccggacgtggtccgcttcacccacaagctgctgtcctgcaacaagcgccagccttacgcagtctcccgccgcgctggccaccagacgtcggccgagtcctggggtacgggccgcgctgtgtcccgtatccccc

SEQ ID NO: 29877 - DNA, 207 bp, Zea mays
gcgaattttgaccgcaaaccctgacataaacattgtcgagctatgtgacgacgacgaattcattgttttggcatgtgatggcatttgggtatgcatgtcaagccagcagttggttgatttcatccgtgaacatataaacacagaggaaagcctttctgcagtatgtgaaagagtgcttgatagatgcctggctccatcgacggctgg

SEQ ID NO: 29878 - DNA, 304 bp, Zea mays
gcaggttaggtttctgaccaagatttatcatcccaacattgacaagcttggtaggatatgcctcgacattctcaaggacaaatggagcccagcacttcagattcgaacagttcttttgagtatacaggctctactgagtgcaccaaatccagatgaccctctctccgataacattgcaaagcactggaaatccaatgaggtagaagctgttgaaacagccaaggagtggactcgcctgtatgcgagcggtgcatgatagcgcagtgctgttcttggtgtaataaccccatcatacttcagtcct

SEQ ID NO: 29879 - DNA, 300 bp, Zea mays
tgtcggtcctcgtctccgccgtcatcctgctgtgccgggactacatcagctacatcttcaccgagggtgaggacgtgtcgcaggcggtctcccggctcaccccgctgctggcgttcacgctcatcctcaacggcatccagcccgtcctctctggggtcgctgtggggtgtggatggcacgcgttcgtcgcgtacgtcaacgtcggctgctactacatcgtcggcatcccgctcgggtgcctcctaggcttctactttgacctcggagcagcgggtatttggagcggtatgatcggcggca

SEQ ID NO: 29880 - DNA, 183 bp, Zea mays
cccaagatgaaggcgcctcaaattgctgagaaagctagggacgctctcctaagtggaaagtttgaccaggtacgtgtcaacctgccaaatggtgacatggttggtcacactggggatattgaggctaccgttgttgcttgcaaggcagctgatgaagctgttaagatcattctgaatgctgtc

SEQ ID NO: 29881 - DNA, 290 bp, Zea mays
caaggacccgcaaggacatggacgtcacgtacatggagtacaacgtgtcgctggaggagagctcgctcagggacctctacccggacgaccacttctacctgaagcacccctacgacgtgcacaagaaggggtgggacgccatcaagacggtgtacctggacaagcagaacgtcaggctcaacctcaccaggttcaccaggacgctggagcaggcgcgagatctcttgccgacgccatgactgatgatgacctccccctctttcctctgctctgctgcaggtttcattcac

SEQ ID NO: 29882 - DNA, 286 bp, Zea mays
ggcaaggtcatcgtcgtcgagtgcgtgctgccggtcaacacggaggccacccccaaggcgcagggcgtgttccacgtcgacatgatcatgctcgcgcacaacccaggcggcaaggagcggtacgagcgcgagttccgcgagctcgccaagggcgccggcttctccgggttcaaggccacctacatctacgccaacgcctgggccatcgagttcatcaagtgaatacggctaccaccgtcgccgcgatgagatgcatggctgccacatgcatgcttgcttgcttggt

SEQ ID NO: 29883 - DNA, 298 bp, Zea mays
tctggtatgccgtgaaggccaacaacaacctccccgtgctacgcgtcctgcgtgagcttggctgcggcgccgtcctcgtcagcggcaacgagctccgactcgccctccaggcgggattcgaccccgccaggtgcatatttaacggaaatgggaagacactagtacatcttaaattagctgctgagagtggagtatttgtaaatgtggatagcgaatttgatttggagaatattgtcagagctgcaagagctactggaaagaaagtgcctgttttgcttcgaatagatccagatgtgga

SEQ ID NO: 29884 - DNA, 293 bp, Zea mays
gcaggtcgaggcgtggaagcccatcgtcgacgccgtccgccgcaaaggcgccatcttcgtctgccagatctggcatgtgggcagggtctccaccaacgagctccagccgaacggcgatgcgcctatctcgagcacggacaagcagatctccccggacgccgagtccggaacggcgtactcgaagccgcgccggctgcggaccgaccgagtctccgggatcgtcgacgacttcaggcgggccgcacggaacgcgatccaggctggcttcgacgccgtcgagatccacggcgcgc

SEQ ID NO: 29885 - DNA, 295 bp, Zea mays
ggatgctctcctaagtggaaagtttgaccaggtacgtgtcaacctgccaaatggtgacatggttggtcacactggtgatattgaggccaccgtagttgcttgcaaggcagctgatgaagctgttaagattattttggatgctgtcgagcaagttggtggtatttaccttgttaccgccgatcatggcaatgctgaggatatggtgaaaaggaacaagtctggcaagccgttgctcgacaagaatgaccgtatccagattcttacctcgcatacccttcagccggtcccggttgca

SEQ ID NO: 29886 - DNA, 309 bp, Zea mays
gatcggatcactactcctcctcacgccaactactcttactcaattgaggctggtgttggtgctggaattgacatgatcatggttccattcagatacacagaattcatcgacgatctgacgacacaagttcagaacaaggtcatccccatgagcagaatcgacgacgccgtctacaggatccttcgtgtcaagttcaccatgggtctgttcgagaacccttaccccgactctagcctcgccggcgagctcgggaagcaagaacaccgggaactggcgcgcgaaccgtcaggaaatcccttgttctcctga

SEQ ID NO: 29887 - DNA, 301 bp, Zea mays
acactcgaggtgcgagaaactcagcgtgagggcgataccacgcaggcgccccctgccatgccacaatattcgagtggagtgaagacaaagattggcatcaacgggtttgggcggattggcaggttggtcctgcgaattgcaaccagcagagatgatattgaagttgtggctgtgaatgaccctttcattgatgctaagtacatggcctatatgttcaagtatgattccactcatggcccgtttaaaggttctattcgtgtcgtggatgattcaaccctcgagatcaatgggaagaaggtca

SEQ ID NO: 29888 - DNA, 308 bp, Zea mays
aaacacccatcttggcattgaacaaagccgaagagatgacttggaatctcttggatatgtactcatgtacttcctgaggggcagccttccttggcaaggtcttaaagcaggaacaaagaagcaaaagtatgagaaaattagcgagaagaaagttgcaacatcaattgaggctctatgccgtgggtatcctactgagtttgcatcatatttccattattgccgttcactgcgatttgatgacaagcctgactattcctatctcaagcgattattccgtgacctttttatccgcgaaggttttcagtttg

SEQ ID NO: 29889 - DNA, 308 bp, Zea mays
aatgggcatgctcttcttatgaccgacacacgcaaacgtctccttgagatgggttataaaaaccctgttcttctgctccatccactgggaggattcacaaaagcagatgatgtgcctcttagttggagaatgaagcaacatgagaaggttcttgaggaaggtgtcctcaacccagaatcaactgttgttgcgatctttccctctccaatgcattatgctgggccaactgaggtgcagtggcatgctaaggctcgtattaatgctggtgcaaatttctatattgttggaagggatcctgctggtatgag

SEQ ID NO: 29890 - DNA, 305 bp, Zea mays
gcgtggagctcagctgtcaggagggcagaagcagcgcgtggccatcgcccgtgcgatcgtgaaggaccctcggatcctgcttctggacgaagcgaccagcgcactggatgccgagtccgagcggatcgtccaggacgcgctggacagggtgatggtgaaccggacaacagtggtcgtcgcccaccgtctgtcgacgatacagaatgcggatctgatcgccgtcgtcaggaacggggttatcatcgagaagggaaagcacgacgccttggtcaacgtcaaggatggcgcgtacgcgtccctcgtcg

SEQ ID NO: 29891 - DNA, 299 bp, Zea mays
caacatttcagcatcatcaattgtcagcaaatggcgtggagattcagagaagcttgtcaaagttctgtttgagcttgctaggcatcatgcaccatccacaatattccttgatgaaatagatgctatcatcagccagcgtggtgaagctcgcagtgagcatgaagctagtcgtcgcttgaagactgagctacttattcagatggatggtttgacaaagacaaacgacttggtatttgtacttgcagctacaaatcttccctgggaattggatgcagccatgctccgccggcttgagaagc

SEQ ID NO: 29892 - DNA, 286 bp, Zea mays
taagagattggctggatttacggatcgatcacagaggatatcttgactggatttaagatgcactgccatggctggcggtctatttactgcatcccgaagcggcctgcattcaaaggttctgcgcctctgaacctttccgaccgtcttcaccaggtccttcgctgggcccttgggtccgtcgaaattttcttcagcaagcactgcccactttggtacggatacggcggcgggctaaaattcctggaaaggttttcttatatcaactccatcgtttatccctggacgt

SEQ ID NO: 29893 - DNA, 307 bp, Zea mays
acagctcgcccgccgaccgctacgacgtgctgtcgctcgagctcgccaagcacaacatccgcagcgggcccggcaagccgctgcacctgacggccacgccgcgctgcgtgttcccgcccgccggctacctgcgccgcgcgtgcgacacgggcatcttcgagcgcgtccacgtccggatctacgacgacgccgactgcgaggccaggtggcacctcgcgtgggacgagtggacggcggcgtacccggccaccaggttctacgtcggcctcacggcgtcggagatgacgcacggctgggtgcaccccaa

SEQ ID NO: 29894 - DNA, 302 bp, Zea mays
aatttctcctgcatttgtgctattctttgactgttctgagaaagagatggagaaacgtctcttggggcgcaatcagggaagagttgatgataacattgaaactatcaaaaaaaggttcaaaacctttgttgagtcaagtttgcctgtcattgagcattacaactcaagggacaaggttaaaaagattgatgctgcaaaaccaattcctgaggtgtttgaagacgtcaaaaccatttttgccccatatgctccaaaggctgaatagagcagtctaaaagggacatgataaaggtgatacaagg

SEQ ID NO: 29895 - DNA, 302 bp, Zea mays
tctcctctggaggtattcgcagtcgaccgtgtcctcggagcacgatgaaggttgttgctgcctacctgcttgctgtcctcgctgggaatgccagcccctccgctgaggatttgactggcattctggagtcagttggctgtgaagttgacaatgaaaggatggaactgctgctgtcccaactgagcggtaaggacatcaccgagctcattgccgcgggcagagagaagtttgcttcagtcccatgtggcggcggcggtgtggctgttgcggcaggtgcacctgctgctggcggactgctcctg

SEQ ID NO: 29896 - DNA, 304 bp, Zea mays
tacactagaacgacatctaaagttgaaggaggtggcgcttgttgaagcaggcaacattttgcacaccgcgcttgaaagggcactcatagtagaggatgttcagaatcagaacattgaattgaagaagcatatggagatataccatgaagagaataaattgttagagaaggctaacagacagaaggtgctagaggttgagaagctcacacaaacaattaatgagcttgaagagtccattctcgcaaccggtgaggttgccaatgtggtccacttctaccagaatcaagctacaaagttgaatgag

SEQ ID NO: 29897 - DNA, 298 bp, Zea mays
tagccgagctgctcctcgccctcgtggcttcgctcgtcgtgctgccattctactccctcgccgtgtaccaggacttctgaatcgccgacctatccgccgccgccacgccgggcggctacccgtgcaagcccccgatagacgtgaccgccgacgacttccactatggcggcctcgccacccccggcacagcgctgaaacccttcaagatctccctgggctcggccgtcgtcaccacgttccccggcctgaacaggctgggcatctctgccgcgcggatggtgatggtcccgggcggcgt

SEQ ID NO: 29898 - DNA, 293 bp, Zea mays
taaacgttttatgctggaaaggctggcgtgccagttactgaggtgaatgttcctgttgtcgggggccatgcgggtattactattctgccactcttctcacaggccactccagcaagcaattcgttgtcccaagaagacattgaggccctcaccaagaggacacaagatggtgggacagaggttgttgaagcaaaggctggaaagggctctgcaacattgtccatggcatatgctggtgctgtttttgcagatgcatgcttgaagggtctgaatggagttccggacattgtaga

SEQ ID NO: 29899 - DNA, 294 bp, Zea mays
tccaaaacgacacttgcagttggcatcattggacctggtttaattggtagaacactccttaaccagctcaaggatcaggttgctgctctcaaggaaaatatgaacattgatctgcgtgtcattggaataactggctcaagtacaatgcttttgagcgacacgggaatagacttaacccagtggaaacaacttctaaaaaaggaagcagaaccagctgatattgatagttttgttcatcatttatccgataatcacgtatttccaaacaaagttttggtggactgcacagcagat

SEQ ID NO: 29900 - DNA, 293 bp, Zea mays
tataatccactggcatgtgaagctcaactacaaggattactggagagtgaaaatcactatcacaaacttcaacttccgcatgaattacacgcatgaacttagtagctcagcatccaaactttgataatatcactcagttgttcagcttcaactacaaaccacttactccatatggtggtggcataaatgatacggcaatgttctggggtgtaaaattctacaatgatctgctgatgcaagccggcaaacttgggaatgtgcaatcagagctgcttctccgcaaggactcccgg

SEQ ID NO: 29901 - DNA, 293 bp, Zea mays
ccacgctcgaagctcctcccgaaccggccgcatcgccgccatggcagccgccgctcctgcaagctccgtgaaggaagtgctgccgtctcccctgacctccgcctccgagccccctccccttttcgatggcaccaccaggttgtacgtggcctatctttgcccgttcgcgcagccgcttggattgctagaaactacaagggtctgcaggacaagattaagatagttgccatcgatctcgctgacaggccagcgtggtacaaggagaaggtttatccagaaaacaaggtgccttc

SEQ ID NO: 29902 - DNA, 175 bp, Zea mays
ctcactcctcaccatttcccaaaccctacccatacccccgccgccgccgccatgccgcccaagctcgacccgtcgcaggtggtggaggtcttcgtccgcgtgacgggcggcgaagtcggcgcggcgtcgtccctggcgcccaagataggcccgctcggtctctccccgaagaaga

SEQ ID NO: 29903 - DNA, 207 bp, Zea mays
ctccaccccactcgccgccgccgctgccaccgccgcttgctgccgcagccgccatgggggcgtacaagtacgtgtcggaactatggaggaggaagcagtcggacgtgatgcgcttcgtgcagcgcgtgcgctgcatgggagtacaggcagcagccgtccatcgtccgcctcaccaggcccacccgccccgacaaggcccgtcgtctc

SEQ ID NO: 29904 - DNA, 299 bp, Zea mays
atatcctccgctgcccacgcgggaggcccgcacgccgtcgcgtcttctgcaaggccggcggcgaggactacagcctcacggtgcgcaacggcacggcgtgcctggcgcccaccaacccgcgggacgagtaccagcactgggtcaaggacatgcgccacagcacccgggtgcgggacgaggagggctacccggccttcgcgctcgtcaacaaggtcaccggcgaggcgctcaagcactccacggggcagggccaccccgtcaagctcgtgccctacaacccggactaccaggacgagtcc

SEQ ID NO: 29905 - DNA, 298 bp, Zea mays
gctgagcaaaactgcgccaattcaggcactttcactcattatactgggcccctttgtggactactatctaaatgggcggtcattgttgaactaccctttttcaggaggggcaactttcttcatactgctttcctgctccctggcggtgttctgcaacatgagccaatacctctgcatcgggcggttctcagcgacctcattccaggtcctgggccacatgaagaccgtgtgcgtgctgatcctgggctggatcctgtttgactcggccctcaccgtgaagaacatcctcgggatgctg

SEQ ID NO: 29906 - DNA, 290 bp, Zea mays
gccgtcgcatacctccccacccgcgccttcgccgcccgccccgggctccgccctccgacgccgagtcccagtgcgtcatttgtctcgaagaatacgaagagagggacgtgctacgcgtcctccctcactgcggccatgacttccacatggcatgtatacatgtatggctggagcagaactcgacctgccccgtctgtagaatctcgttgctcgataatcccaacagcgagcacaatgcccctccgccgccgccgccgccgctacccggtgtagcagtgacgatgagctct

SEQ ID NO: 29907 - DNA, 297 bp, Zea mays
cacggagttccctccgaaaagcacccttgatccgagcaagtacggcgaccagacgagcaccatcacggaggcgcacatcgcggggagcctggagggcctcaccgtgcagcaggcgctggacagcaaccggctctacatcctggaccaccacgaccactacatgccgttcctgatcgaggtcaacagcctgaacgacaacttcatctacgccaccaggacgctcctgttcctgcgcggcgacggcacgctcgcgccggtggccatcgagatgagcctccccgagctccgggacggcat

SEQ ID NO: 29908 - DNA, 298 bp, Zea mays
ctcgcagcagccaaaacctacctagccgccgccgcaggccccccatcgccgccaagatgcagatctttgtgaagactctgacggggaagaccatcactttggaggtggagtcctcggacaccattgacaatgtgaaggccaagatccaggacaaggagggcatccccccggaccagcagcggctcatcttcgccggcaagcagctcgaggacggtcgcaccctcgccgactacaacattcagaaggagtccaccctccacctggtgctccgcctccgcggtggcgccaagaagcgtaa

SEQ ID NO: 29909 - DNA, 285 bp, Zea mays
cgccggacagaccggctcagcctcgctccgccgccgccggcgaccatgtccctggcggctatcttcgtcttcctcatcgtgtccgcgctgcagctgctctaccgctacctcgacctcgccagaaagagcggaggacttagtgatgagcagatcaaagtgcggcttgaaatcaagcaacttctcaaggaggctgatcagttgtcaacgccgtccacatttgcacaagctgctaaactcaagcgcctggctgctgccaaggagaaggaactggcaaaaatgcaggaa

SEQ ID NO: 29910 - DNA, 293 bp, Zea mays
  unsure (1)..(293): unsure at all n locations
ggactactggcgcgccaagatcgccatcaccaactacaactacaggatgaactacacgcagtggacgctggtggcgcacaccccaacctggacaacgtcaccgaggtcttcagcttccagtacaagccgctgcaaccatacgggagcatcaatgacactggcatgttctacgggctcaagttctacaacgactttctcatggaggccggcccgttcggcaacgtgcagtcggaggtgctcatgcgcaangacgcaaggaccttcaccttcagcatgggctgggcgttcccgcg

SEQ ID NO: 29911 - DNA, 290 bp, Zea mays
cgtcgtcctccattaatattggcagcaagctaggatcatcagcatctgagcttatatattactacatcgatcggttgccaaatggcggggatgacagtcggcaataagctggcgctggctgcggtgctgctgtgcgcggcggcggccatggccacggcgcacaggcctccggcgtgcgcgccacctacaacttctacaacccgcagcagaacaactgggacctcaacgccgtgagcgcgtactgcgcgacgtgggacgccagcaagccgctgtcgtggcgcatgaagtac

SEQ ID NO: 29912 - DNA, 291 bp, Zea mays
aaggcaccacacctcttcttcttcttcctcctcctcctagcacagctagcgcctgctccccttcgcctgtgatcatgtcttgcagcagcggcaagtgcgactgtggctccagctgctcctgcggcagctcatgcaactgcatgtcccctaacgtggagaccgccgccgccagcagcatcaagaccacggtcctcgccgcgccgaccaccaaggccagcgccggcggcttcgaggcggccaccgagggcagcggctgcgactgcaacacctgcaactgcggcaccagctgcg

SEQ ID NO: 29913 - DNA, 290 bp, Zea mays
ctccatcctgctcgacaacgaggccatctatgacatctgcaggcgctccctcgacattgagaggcccaactactccaacttgaatcgccttgtgtctcaggtgatctcatcgctgactgcttctctgaggttcgatggtgccctcaatgtggatgtgaacgagttccagaccaacctggttccttacccgaggatccacttcatgctctcctcctacgcaccggtgatctcttctgcgaaggccttccacgagcagctgtctgtggcggagatcaccagcagcgcgttcg

SEQ ID NO: 29914 - DNA, 271 bp, Zea mays
aagatccgcaaaattctccgtgaaataattgggaagagagagaaggatactagaaacagagaaacaaataacgacgacttgctgggcttattactggagtcaaacacaaggcaatcaaatggaaatgcaagcctgggattgacaacagaagatgtgattgacgaatgcaagttattttacattgcaggtatggagacaacatcagtccttcttacttggacacttattgtgctaagcatgcacccagaatggccagagagagcaagagaag

SEQ ID NO: 29915 - DNA, 284 bp, Zea mays
aataccagccctgaaaattttgttacacctgacttccctgctacttggggggcaatggaaaagttatatgatgctggcaaagctcgcgctattggtgtgagtaacttctcctcaaagaaattgggtgacttgcttgctgtagctcgtgtacctccagctgttgatcaggtggaatgtcatcctggttggcagcaaactaagctccatagcttttgtcagtcaactggtgttcatctaactgcttactcaccactaggttcacctggtacaacttggatgaatgg

SEQ ID NO: 29916 - DNA, 294 bp, Zea mays
caggagacaaccatgcatgatgtgaataacatcgaggaagagatgcgcaggaagcaggctcatgctgctcaggaggcctacgaggaggatgacgagatgcctggcggagccaaagagtgcagtgcgctcaacagtaagcaggctaccgtaattggattcaaggcactttggttgctcttcaattatgcgagtgcgcctgtggactgtatggttctatggttttgctgtcgctgagctacgaataggaagctgatgcgccccctggccatgcaagcggggaatgtatcctttttt

SEQ ID NO: 29917 - DNA, 294 bp, Zea mays
cgataggttcgcctcccgccccgccgacgacaccgttgacgggcaactcaagtgtgagaaatggatccgtgacgatgacagcaagtcagaggaatcaaagatgaaatggtgggtgaagcgtttgattggcaggcctaaggatgtccgcatcatttggccatacccattcacggaaggcaagctatttgttatgactttaacagctggtttggaaggttaccatgtcaacgttgatgggcggcatgttgcttcgtttccttaccgcactggttactctcttgaggatgcaactgc

SEQ ID NO: 29918 - DNA, 301 bp, Zea mays
tctgagggcaagaagtaatgatccgcccaggctcaaaggactcgcaaaattatgataacaataatcaaagagtccatcctcaaccaatcgacgataacatgaatcagaacggggactcaatggacactgtgatcgggaggatattcaacaacatatcctctttaaaatccgcctacattcagctgcaggaagcccacaccccatatgaccctgacaagatccaggaagctgataaacttgtcatagaggagcttacgaggctttcagaactcaagcacgcttacagagaaaaacatcctaa

SEQ ID NO: 29919 - DNA, 298 bp, Zea mays
atcgacttgaactcaagcgactacagcaaacttgctgagactgcagctgatcatggggtcgatgacatggttggcggccgtgctggcagcactcgtcgtcgccgcctcctcatcggtggcatcacacgcctcgccgccggggaaacttgaggtcggtttctacgagcactcgtgcccacaggccgaggacatcgtgcgcaacgccgtccgccgcggcatagcccgcgaacccggcgtcggcgcggggctcatccgcatgcacttccacgactgcttcgtccggggctgcgacggctcc

SEQ ID NO: 29920 - DNA, 298 bp, Zea mays
agaatgcgaatgggtcattgccaacttccaagatccgtcttaacatgcagcgtgttatgcaaaataatgctgctgtattccgtacacaagaaacacttgaagaaggttgtgagctgattagcaaaacatgggaaagtttccatgatgtgaagctcagtgaccggagtctcatttggaactctgacctgatagagacccttgagctggaaaatcttttgataaatgcaagcataaccatgtattcggcagaggctcggaaggaaagcagaggagctcatgctcgtgaggatttcacgac

SEQ ID NO: 29921 - DNA, 296 bp, Zea mays
catcgtcgcaacctgacaatatgccgcgcaagatatttgttggtaatgtgcatgctgatgtggacgtggaccgcctatataactattttgcacaatttggtgagattgaagagggtccgtttggctttgacaagaacactggcaaaccaaaaggattcgcattgtttgtttacaagtctgtggagagtgctcgccgtgctttggaggagccaatgaagaattttgatggcaagacgctaaatgtgcagaaagccatagatgggaggaccaagggctcatctggaacgaatacaaat

SEQ ID NO: 29922 - DNA, 294 bp, Zea mays
catacgtcctcctccattaatattggcagcaagctaggatcatcagcatctgagcttattattactaaatcgatcggttgccatggcggggatgagagtcggcaagctggcgctggctgcggtgctgctgtgcgcggcggcggccatggccacggcgcacaggcctccggcgtgcgcgccacctacaacttctacaacccgcagcagaacaactgggacctcaacgccgtgagcgcgtactgcgcgacgtgggacgccagcaagccgctgtcgtggcgcatgaagtacggctgg

SEQ ID NO: 29923 - DNA, 278 bp, Zea mays
tggacgagactcgcagctagctgacacggccgagaagcagcttgcattgcaggcgtagtacgtacccagcagcagctagcactagcagtccatcggagcgacgatggtgagaaggacggtgctggcggcgctgctggtggccgccgccctcgccggcgaggcgcgggcgcagctcaaggaggggttctacgactactcctgcccacaggcggagaagatcgtcaaggactacgtgaaagcggacatcccccacgcgcccgacgtcgcctccaccctgc

SEQ ID NO: 29924 - DNA, 291 bp, Zea mays
ctcacgagtgatttcggcggcggcggcggaagtaagaggcgatggggcactccaacgtgtggaactcgcaacccaagaactacgggcccggatcccgcgtctgccgggtctgtgcgaaccctcatggactgatcaggaagtacgggctgatgtgctgcaggcagtgcttccgcagcaacgccaaggacattggcttcatcaagtaccgctgaagtcagctgggcgggctatctgaatgccatctcttggacagtgtagtagaggcgatgccacaattttaattactgtcat

SEQ ID NO: 29925 - DNA, 293 bp, Zea mays
tgaaggtttggagaaactccccggctcgaggagatcgtgacattgagaggacgattggagggcgcgcgctcctcctcctcctcctggtctcggcgttggtctttcagatccacgcctccgacccgctgctgtacgagccgatcgatgaggactttgaggggagatgggtcgtctccaagaaggatgaataccaaggtgtgtggaggcatgccaagagtgatggtcatgaggactatggcctccttgttagtgagaaggcaaggaaatacgccataatcaaggagcttgatgag

SEQ ID NO: 29926 - DNA, 293 bp, Zea mays
cgtagtaccacatgccttctcgtcacaaatcgactagggcgtctgagactctgagacacaggaacagaaccctctctgcgccgccgccgccgttgcagtcgcggccacatcgtcgcctatccatccccaccgctcccactgccacgattcacaagaggtgtcgagatgtctcagaacaacccctcccagctcctcccctcagagctgatcgatcggtgcatcgggtccaagatctgggtgatcatgaagggggacaaggagctcgttggcaccctctgcggctttgatgtcta

SEQ ID NO: 29927 - DNA, 290 bp, Zea mays
cattggacaaatattgtgttggcatatgaaccagtttgggctattggtaccggcaaagttgcaactcctgctcaggctcaggaggttcatgatggtctgagaaagtggctccactccaatgttagccctgcagttgctgaattgacaaggataatttatggagggtctgtaaatggagctaactgcaaagaacttgcagctcaaccagatgttgatggattccttgttggtggagcctcattgaagcctgaattcgtggacatcatcaagtctgccactgtcaagtcttc

SEQ ID NO: 29928 - DNA, 292 bp, Zea mays
atagtgtggagaagaaggacccaactggagccaaggtgacgaaggctgctgccaagaagaaatgatctatctgtctggtgctgtgcttgcttgttggttacctcgtggaagcttaaaatatctcgtcttgttgacatccttgcagttgtcgcgtgaacaagtaatctatgatggcaatgtttgcctggtcatgaagtattattactttcgttgaaaccgtgatgctattaagacttaatttttttatggaacatcgaatgtaaggcatacatggttatgagttttgtactac

SEQ ID NO: 29929 - DNA, 280 bp, Zea mays
gctgccaggagctaggctgcccaaaagcgccgaaggaagacagagttctgtattgctcatggtggtgggcgccggtgtgggattgaggaatgcccaagagcggcaagggggaagtctggattctgcataaaacatggtggagggaaaaggtgcaggatagagggctgcactcgtagtgctgaaggccatcctgggttgtgcatctcacatggaggtggtcgccggtgccagtacccaaactgtgataagggggcccaaggaagcaccatcttttgcaagt

SEQ ID NO: 29930 - DNA, 287 bp, Zea mays
ccgctcgagtgcctgcataggttgctacacgtatatattctgaagaagagatcgagatgaccagcgtgtggaagaccaaggttctgcctggcctcaacaagatctttgacaaggatggcaagaaggctgcagctgcaggcttcttgaagtccttcaacaaggaggagtttgacaaggagattgaggacaagaagacagagctggagcccaaggtcgtggaggcctacgaagcatctcctcctgaggtcaaggctctcttcaaggataagaagccagtcaaggtcagc

SEQ ID NO: 29931 - DNA, 285 bp, Zea mays
tcgactccaagttctgcgcggggcccgacgtgctccccgacggcacctacgtggccggcggcacgcgcgtgacgtaccacccctacgcaatgggccggatgccgcgcatctggagcgccgaccacggcgccttccgccccgaccggtggctcaccggagccggcgcctcgttcgtcccagagagcctgtataggtacccggtgttccaggcgggcctccgcgtctgcctcggcaaggagctcgccgtcaccgagatgaaggtggtcgctgtggccgtggtgaagg

SEQ ID NO: 29932 - DNA, 284 bp, Zea mays
cccaaaccctagctcccgatctcgatggcgaaccctcgcgtcttcttcgacatgaccgtcggcggcgccccggcgggccggatcgtgatggagctgtacgccaacgaggtgcccaagaccgcggagaacttccgcgcgctgtgcacgggcgagaagggcgtgggcaagtccgggaagccgctccactacaagggatccaccttccaccgcgtcatccccgagttcatgtgccaaggcggcgacttcacccgcggcaacggcaccggcggcgagtccatctacgg

SEQ ID NO: 29933 - DNA, 284 bp, Zea mays
cgtcatcaagccagtcatccccgagcagtacctcgacgagaagacaatcttccacctcaacccgtctggccgcttcgtcatcggcggacctcacggcgacgccggcctcactggccggaagatcatcatcgacacctacggtggctggggagcccacggcgggggcgccttctccggcaaggacccgaccaaggtggaccgcagcggggcctacgtcgcgaggcaggctgccaagagcatcgtcgccgccggcctcgcccgccgcgccatcgtccaggtctcct

SEQ ID NO: 29934 - DNA, 282 bp, Zea mays
gcttgatccttgagaagagagaggaagacgagagctagaagcgaaggagaaaagcagttcttcagctaggcaggagggcacaggaaggaggagatggcgtcaaagaggattcagaaggagctcaaggatctgcagaaggaccctcccacctcgtgcagtgcaggtcctgttggtgaagacatgttccactggcaggcaacaataatgggtccatctgatagcccatattctggtggagttttcctagtcacaatccattttcctcctgattatcctttcaaa

SEQ ID NO: 29935 - DNA, 285 bp, Zea mays
caaggctcctactagacatcccatatacgagaacttccgagtcgaggccttcaaagcgttgctaacagctgccaaaacagacgagcagctctcagcccttggagagctgatgttccagtgccactacagctacaacgcttgcgggctcggctctgacggcacagacaggctagtgaatctagttcaagaaatccggcacaggaagagctcgcgcgccggagggcccagcctgttcggcgcgaagatcaccggcggacggtccggcggctcggtctgcgtgatggg

SEQ ID NO: 29936 - DNA, 285 bp, Zea mays
cttgagtcgagaggtgcctagggagtccctgttatttataattccagcgtttggagggactgtttcatgggaaggagaaggagctccatttaaagaaatagacgaagatatcactcaccagattgttgataggccgacacaaagccatgttttcctctccagggattatgttcaaccacagtgggtctttgattgtgtaaatgctcgtatcatattgccaacagaaggttatcttgttggaagagtacctccaccacatttgtctccttttgtggacaatgatgc

SEQ ID NO: 29937 - DNA, 285 bp, Zea mays
ctcattcctcctcaagaaggaaaaggccatcatcgtccagcctgagcgtgtgatagtggggaatgggccggcattcggatgtgtgatgatgaaagagttcttgtctgaattggctaagagggttaataagaacaccactgcctatgagaattacaagaggatctttgtacctgagggccagccgctggaaagcgagccaaatgagccactgcgagtgaatgtgctcttcaagcacgtccagaagatgttgactggtgatagcgcggtgattgctgagactggtga

SEQ ID NO: 29938 - DNA, 263 bp, Zea mays
cctcagtaagcggaacgccaagaaaggattgaacctctctatgatagatacaatgaacccaactcgtggcgcctgagcaagcgccgctggtgatttttcatcatgtcttgcaggtctttgatgtaatgttattgtagtgtatatattaaggtgttctttcaatgcaaagactgggataattgcagcgcagtgatacatgtatagttttctcttaaatttggaagacttataaggactatcttttcccttttgaactggatgcc

SEQ ID NO: 29939 - DNA, 305 bp, Zea mays
cccaagacctcctcagacccgagaagcgcactgcgagccatggacgccaccggcactggagctggagggaaggcgaagaagggagcggccggtcgcaaggccggcgggccgaggaagaagtcggtgacgaggtccgtgaaggccgggctccagttccccgtcggccgcatcgggcgctacctcaagaagggccgctacgcgcacgcgtgcggcagcggtgcccccgtctacctcgcggccgtcctggagtacctcgccgctgaggtcctggagctcgccggcaacgctgccaaggacaacaagaa

SEQ ID NO: 29940 - DNA, 304 bp, Zea mays
acattctgttactctagctgacattgtattgacatgcaacctctaccatggaattgcacggatcttgaccaaaagcttcacttctgatttccctcatgttgagaggtatttctggaccatggttaaccaacctaatttcaagaaggtcattggtgaggtcaagcaggcagagtctgtacctcctgttcttaaaaagggtgttcctcctaaggagtcaaaggcaaaggatgtgaagaaagaaactccaaaggaggcccccaagccaaaggtggttgaggtaccagcagaagaggaagcaccaaag

SEQ ID NO: 29941 - DNA, 303 bp, Zea mays
  unsure (1)..(303): unsure at all n locations
ctcgcgctcccagctcgtgttccgcttcttgcagccgtcgccgcgaagcntccagagaacttccgtcaacatggggaagacacgtggtatgggagccgggcgcaagctcaagacccaccgcaggaaccagcggtgggctgacaaggcatacaagaagagccatttgggcaatgagtggaagaaacccttcgctgggtcatcccatgccaagggcattgtcctggagaagattggtattgaggccaagcagcccaactccgctatccgtaagtgtgctcgtgttcagcttgttaagaatggcaa

SEQ ID NO: 29942 - DNA, 302 bp, Zea mays
ccgcccaccgccgtcgccgcccaaccgcagtaaggaggaaggagcaggaagatgccggcggggcacgggctgcggtcgcggacccgcgacctgttcgcgcggcccttccgcaagaaggggtacatcccactcaccacgtacctgcgcacctacaagatcggcgactacgtcgacgtcaaggttaacggcgccgtgcacaagggcatgccgcacaagttctaccacggccgcaccgggagcgtctggaacgtcaccaagcgcgccatcggcgtcgagatcaacaagcaggttaatggccgcat

SEQ ID NO: 29943 - DNA, 298 bp, Zea mays
cggctcgagggggaggccgacaagttcctggctgagcagcagttgctacctcacaagttcgaccaggcgtgcaaggccgcaggggctgctctgaccttgcgcatgcagcctggatatgaccactcgtactatttcatcgctacgttcgtggacgatcacattgcgcaccatgctcagtttctcaagagcgcctgactgtaaatgtgtagcgtgaggaagacaaggaggcagcctagcatgggtgttttatctatgccgacagtgttgtctcgtgtggcagcttgaggagaggtgaaca

SEQ ID NO: 29944 - DNA, 301 bp, Zea mays
acgcagcgcacagctgaagcaccacttcctgcactcactgtgctagctgctcaaaccgtagtagtaacagtccatcaccaccaatggctcccaaggttgcgctcttccttgccctgagcctcctgtttgctgccaccgcgcatggctgcgaacccaactgttctggcccagtcgtcccaacgccgccagtcgtgccgactccgtcgtcgcacagccacgggcgctgcccgatcgacgcgctcaagctcaaggtgtgcgccaacgtgctaggcctcgtcaaggtcggcctaccccagtacga

SEQ ID NO: 29945 - DNA, 301 bp, Zea mays
cacgcaccccaccaacccatacccataccagaggctctctgattttacttctcagcggtagatcggctgagcgagcgagcgagcgaggcacacggagctagctaaacagagcacacggatagaaaagcaagatgtcggacggcacggcgacctgcatcgacatcatcctcgccattatcctgccgccgctcggggtcttcttcaagttcggctgcggggttgagttctggatctgccttatcctcaccttcttcggctacctccccggcatcatctacgccgtctgggccatcaccaagta

SEQ ID NO: 29946 - DNA, 300 bp, Zea mays
attgctggcaagcagctcgaggacgggcgcacgctggccgactacaacattcagaatgagagcaccctccacttggtgttgcgtctcaggggcggcatgcagatcttcgtgaagactctgactggcaagactatcacccttgaggtcgagtcttctgataccattgacaatgtcaaggccaagatccaggacaaggagggcatccctccggaccagcagcggctcatttttgccggcaagcagctcgaggacgggcgcacgcttgccgactacaacattcagaaggagagcaccctccac

SEQ ID NO: 29947 - DNA, 296 bp, Zea mays
caagtcccgcacgaacggagatcgctgcacctcatggtagcatattgggtgctgtgggaaggagcagtagcttgcagggaggggaggcagtaagcagcatgggcattggcggaggatggcagttggcgtggaaatggaccgagagagagggcgaagatgggcaaaaggaaggtggcttccagcgtatttacttgcatgaggagggcgtacaaggcaacaggggttctatattgtcattaccaggcggggatgttcctcctggtggtgagttcatccaggctgcagctcttgtgagc

SEQ ID NO: 29948 - DNA, 295 bp, Zea mays
cttctttctggagttcccttcgaggaaattcgcgccatcactccgagtgttgttgcgaaaatttcttctacaatcagcgaattgattcagctaggagccaagactcttgtggttccaggaaacctccctattggatgtgtcccaaaatatctgatgatattcaagagcaataagaaagaggattatgatccacagacaggttgtcttagatggatgaacgagttctcacagtaccacaacaagcttcttgtggagcagctcaagaagcttcgcaggctccatcctggagtaacca

SEQ ID NO: 29949 - DNA, 296 bp, Zea mays
ccagattgctgcacttgctgttgctctacagcaaactatgtcgcctggcttcaaggcctatgcaaagcaagtgaaggccaatgctgttgcaattggaaactatctcatgagcaagggctacaagatggtgactgatggaactgagaaccaccttgttctctgggatctccgcccccttggcttgactggaaacaaggtcgaaaagctatgtgatctttgccacatcacattgaacaagaatgctgtcttcggtgacagcagtgcattgtctccgggtggtgtccgcattggcgcgc

SEQ ID NO: 29950 - DNA, 295 bp, Zea mays
gctcggtcgcccgtgtcttcgtcttccttaatctcgaattccgaatcctcctccaacacctcgttttcctggattatccagcgagggacgccggtttgttgctcgtcctcctccctggttgcccgaggcggcggtggcggggcgaccatgtacagatcggcgggggtcgcgatggcgtggaacgtgttccggttctgcacggctctgcgtgggctaggttccatcatgatcctgctcgtcctcgcgatcgtcggcgtcacctactacgctgtcgtcctctgcaactacggccccg

SEQ ID NO: 29951 - DNA, 296 bp, Zea mays
cagaagcagaagccaccgatcggcgtgccgcgtgcgtgaggcgatcggagcatcccgtcccgaggaggtagacaaccggcgacgcggggggaacatggggaagacgccggtgcggatgaaagcggtcgtgtacgcgctgtcgcccttccagcagaaggtaatgccggggctgtggaaggacatcaccaccaagatccaccacaaggtcaccgagaactggatctccgccacgctcctcctcacccccgtcgtcggcacctaccaatacgccatgtggtacaaggagcaggagaagc

SEQ ID NO: 29952 - DNA, 292 bp, Zea mays
accgccgtaacatccacggcatgctgaacgcgatcgcctggggcgtcctgatccccgtcggcgccatcatcgcgcggtacctgcgcgtgttcgagtccgcggacccggcgtggttctacctgcacatcgcgtgccagtgctccggctacatcctgggcgtggccggctggggcctggggctgaagctcggcagcgagtcggccggcgtcacctaccagccgcaccgcagcatcggcatcgccatcttctgcctggccacgctgcaggtgttcgcgctgctgctccggcccga

SEQ ID NO: 29953 - DNA, 293 bp, Zea mays
actacgtgatgctgtgctgcttgtttttgccaacaagcaagatcttcccaatgccatgaatgctgctgagattactgacaagcttggattacactccctgcgccactcacactggtacatccagagcacttgtgccacaactggcgagggtctgtatgaaggcctggactggctgtccagcaacattgcgagcaaggcttgaggcctaccttgaatgtcaaccgcgaactgactaggagctccggatgtatcatggaaactcaggacagaatcgcagttgcaacctgttagat

SEQ ID NO: 29954 - DNA, 291 bp, Zea mays
aggtacgtggaaattatcacccctgtggagctgatcaagaagggtgaaaaggtgggctcgtccgagtctgccctgctcgccaagctgggtatccgtcccttctcgtacggcctccaggtcaccagtgtctacgaggatgggtccgtgttcagccctgaggtgctcgacctttccgaggaggacctgattgagaagtttgccactggtgtatccatggttgcctccctgtcactggcgatctcgtacccgacccttgctgctgtgccccacatgttcatcaatgggtacaag

SEQ ID NO: 29955 - DNA, 288 bp, Zea mays
ggcctgcagaacgagaagggcaacgtcccggcgtccgtgaagatccagctgatacacaagctggtcggcgcgggcctgtcggttgtcgaggccaccagcttcgtctccccaaagtgggtgccgcagctagccgacgcagaggaggtgctgaagggtataaagcaggagccaggcgtgcggtacccggtgctaacacctaacctcagagggttcgaggctgccatcgcagccggcgcgaaggaaatcgcggtcttcgcgtccgcgtctgaatccttctccaggtccaac

SEQ ID NO: 29956 - DNA, 288 bp, Zea mays
gcactgcgcaatgagggaggccatcagagccgccaggaaggaattctcggtctgcactggtccagcaaactctgccatcacgttcgagatggacgtgccggcgacgatgcccatcgtcaaggagctctgcggcctggatgttgtggagaggtacctggagagcatgtccactgccggaccaacaaccactgccaaagcatagatccagcaggtgcaccgcccatggtgagagagcttaataggtctgtgtaaaacactgaacagcatgacatgccaagcttacatgtg

SEQ ID NO: 29957 - DNA, 288 bp, Zea mays
tttcaccactcccgggtctccagcattcctatcctctccccgcccgcccgtgccgccgccgcggcttcccttcctctcccgagccaagatgaatgttgaaaagctcaagaagatggcaggtgctgtgcgcaccggggggaagggtagcgtgcgcaggaagaagaaggcagtccacaagactacaaccacagatgacaaacggcttcaaagcaccttgaaaagaataggagtgaacagcattcctggtattgaagaggtcaacatctttaaggatgatgttgttattca

SEQ ID NO: 29958 - DNA, 284 bp, Zea mays
ctcaaggaactgttgaagcggcaaagtggttacacaaagtggtcaaccgccccaatgtctacataaagatcccagctactgcagaatgtgttccttccatccaggaagttatcgctaatggcattagcgtcaacgtcacgcttattttctcaattgcgagatatgaggctgtgattgatgcttacctcgatgggctagaggcttctggcttgagtgacttatcccgagttactagcgttgcatccttctttgtcagccgagtggacacccttattgacaaaatg

SEQ ID NO: 29959 - DNA, 286 bp, Zea mays
gtggcggtgttggacgtaccgctcaggctaagtctcgtcactcaaatgggcagggacgctggcctgtcaaatctgctagattcattctagaccttctcaagaatgctgagagcaatgctgaggtaaaaggtcttgatgtcgataccctctatgtgtcacacattcaagtgaaccaggctcagaagcagcggcgcaggacctaccgcgctcatgggcgcatcaacccttacatgtcctccccgtgccacatcgaactcatcttgtcagagaaggaagagcccgtgaa

SEQ ID NO: 29960 - DNA, 283 bp, Zea mays
aggaggaggaggaggaagcaagtatccatctgacagcagggtgccccccaatggcgacaagatcgacatctacgatttcggcgtgatcctgctcgaggtcgtgaccgggaggcccatcacgtccatacacgaggtggaggtcatgaaggagcagctgcagtcggcgcggacggtgatggagatctgcctgcgctgcctggccaaggaggcggagcagcggccgtcggtggaggacgtgctgtggaacctgcagttcgcggcgcaggtgcaggacgactggcgc

SEQ ID NO: 29961 - DNA, 286 bp, Zea mays
gttagggtttacctgtgaggcctgctcccctgccgccgccgccatgggacactccaacgtgtggaactcgcaccccaagaactacggccctggatctagggtttgccgtgtgtgcgctaacccccacggcttgatccgaaagtacgggctcatgtgctgcagacagtgcttccgcagcaacgccaaggacattggcttcatcaagtaccgctgaaacttggggagctccaaagcatggcaataatggaagcatggatggggacctaaaagatagcctgtactctta

SEQ ID NO: 29962 - DNA, 304 bp, Zea mays
agccattgatgatgctgaaggggtagttaaggtgatcgcggagaaggaaaccgataagattctaggtgtgcacataatggcacccaatgctggtgaaatcatccatgaagctgtcatcgccttgcagtatggagcatccagtgaggatgttgctcgaacatgccacgcacaccctaccgtgagcgaggccctcaaggaggcttgcttgcaaaccttcgataaagcaatccacatataatttctcattttctatttccttgccatccaaacttttggctcaacaagatccaaagtttatggtaat

SEQ ID NO: 29963 - DNA, 196 bp, Zea mays
gcggaaccagtcgagggcatgagcggcaaggagctggacggccgcaacatcagcgtcaacgaggcccagtcccgttgcggccgttgaagctgcggcggtggggtcggtggtggccgttgatgcggcggctacggcggtggctggcgccgtgattgcggcggctgctactgttgtggtgtctgctgctatggcggtt

SEQ ID NO: 29964 - DNA, 296 bp, Zea mays
ccggtccggcagcagagagcgggggtgcagagagatcgagatccggaggccgcgagtgggagcgccaccaccagcgactgcggcaatggcgggcacggtgacggtcccggggtcgtcgacccctccacgccgctgctcaaggacgagctcgacatcgtgatcccgacgatccgcaacctcgacttcctggagatgtggcggcccttcttccagccctaccacctcatcatcgtgcaggacggcgacccgaccaagaccatcaaggtgcccgaaggcttcgactacgagctctacaa

SEQ ID NO: 29965 - DNA, 295 bp, Zea mays
gtacaagtggctggaggcggacctggagaaggtggacaggtcggtgacgccatggctgatcgcgggctggcacgcgccctggtacaccacctacaaggctcactacagggaagccgagtgcatgatggtggagatggaggagctcctctacgcctacggtgtcgacgtcgtcttcaccggccacgtgcacgcgtacgagcggtcgaaccgggtgttcaactacacgctggacgcgtgcggccccgtgcacatctcggtgggcgacggcggcaaccgcgataagatggcgacggcg

SEQ ID NO: 29966 - DNA, 294 bp, Zea mays
caacaagaagacccgcggcgccttcatcgccgccgtgttcgccatgcaggggttcggcatcctcttcggcaccatcgtggcgctcgccgtctcggcggcgttccggaacgcgttcccggccccgccctacttcgtggacgcccaggcgtcgctcgtcccggaggccgactatgtctggcgcgtcatcctcatgttcggcaccgtcccggccgcgctcacctactactggcgcatgaagatgcccgagacggcgcggtacacggcgctcatcgcccgcaacacgaagcaggccac

SEQ ID NO: 29967 - DNA, 290 bp, Zea mays
  unsure (1)..(290): unsure at all n locations
ccaaacacttgcgccgccactgcctcacaggtaaggccgccatggtctccggttcgggcgtgtgcgcgaacatncgtcggtggacgcgcgccaccacatgctgggccgtctctcctcgatcatagccaaggagctgctcaatgggcagaaggtggtcgtcgtccgctgcgaggagatctgcatgtcgggcggcctcgtccgtcagaagatgaagtacctccgcttcctccgcaagcggatgaacaccaagccgtcccacgggcccatccacttccgcgcccccgccaaga

SEQ ID NO: 29968 - DNA, 288 bp, Zea mays
cttggctacagcattgaggacgttcgacctgccggatgcgtgcagaagttccagtctgctgcttactccaactgcgcgaagaagccatcctgatatcccttttggcttcctcattctagtagtttaggatttcttttctgacactttgattctgaccaatctctctggcctgctgcttcctgataatcgaccagttccccagtcttgctccttgcactcctccctccatctccagcattgtgttctgattcacctgctccaatggctgttctttctgctgctgatgct

SEQ ID NO: 29969 - DNA, 294 bp, Zea mays
caagcaccagcgcggcggcggcgaccatggctgtcggaaagaacaagaggatctccaagggaaagaacggtggcaagaaaaagaccgtcgaccctttctctaagaaggattggtatgacatcaaggcaccgtcggtgttcagtgtgcgcaacatcgggaagactctcgtatccaggacacagggtaccaggattgcttctgagggtctgaagcacagagtctttgaggtttgcctagctgatcttcagggcgacgaggatcaagcttacaggaaaatcaggctccgtgctgaag

SEQ ID NO: 29970 - DNA, 284 bp, Zea mays
ctggatacagaatcagctccgtgaaaacaagacaaaagaactcattttgaattatgctaatcagctctgtgagcgtctccctagccccaatggcgagtcaactgttgattgccatcagatctcaaagatgccaaatcttgcattcaccatagcaaacaagactttcaccttaacaccagagcagtacatagtgaagctggagcaagcaggacaaactatctgcatcagtgggtttatggcatttgacgtaccgcctcctcgtggtcctctctggatacttggtg

SEQ ID NO: 29971 - DNA, 286 bp, Zea mays
acgcagcatagcagcagccaactccatccatcctctttcccctcctcgcttcgcttcctcggcggattcctcctccctcgaccgtccccgtccccgtccccttccggcgcgcgagctcgcccgagatggcaaacgctagatcgggtgtcgctgtgaatgacgagtgcatgctcaagttcggcgagctgcagtcgaagaggctgcaccgcttcctaactttcaagatggacgacaagttcaaggagatcgttgtggaccaggtcggggatcgcgctaccagctacga

SEQ ID NO: 29972 - DNA, 284 bp, Zea mays
gttgagatcatcaaggttttgggtactccaacaagggaagagatcaagtgcatgaacccaaactatacggagttcaagttcccacaaattaaagctcatccgtggcacaaggtttttcaaagaaggcttccacctgaagcagtggaccttgttagcaggtttctacaatactcaccaaatctacggtgcactgctttggaggcctgtatgcaccctttcttcgatgagctgagagacccaaacactcgtctacccaatggtcggcctctgccgcctctcttcaa

SEQ ID NO: 29973 - DNA, 283 bp, Zea mays
cggctcgagccgacgcgcagccagtgccgcacccagacaagatctccgcgacatatcagtcgttcgtccagctaactgcactgcactgcactgcacgcaatggccaccacggcgaccgaggcggccaaggctgcaccggcgcaggagcagcaggccaacggcaacggcaacggcgagcagaagacgcgccactccgaggtcggccacaagagcctgctcaagagcgacgacctgtaccagtacatcctggacacgagcgtgtacccgcgggagccggagagca

SEQ ID NO: 29974 - DNA, 284 bp, Zea mays
  unsure (1)..(284): unsure at all n locations
cgncggccggtcggcctcccaaaccctagcgagccgagcgagagagaaactagacgccatgttcgggtacaggaaggcggacccggacctcgaggccggcgggtcctcgctgctgtacccggggatgacggagagtcccgaactgcggtgggcgttcgtccgcaagatatacgtcatcctcacggtccagctcgccatgacggcagccgtctcggccttcgtcgtcaaggtgcccgccgtctccaattttttcgtctcctccaacgccgggatcgcgctctaca

SEQ ID NO: 29975 - DNA, 230 bp, Zea mays
cttctctgaattccagtccaagggccggaataccgtcagacggagtgggagacggggggaaaaaagatggtgaagctcgcatttggaagctttcgcgactctttgagcgccgcgtcgctcaaggcctatgtggccgagttcattgccacgctgctcttcgtgttcgccggcgtcgggtccgccattgcctactcgcaattgacgaagggcggcgctctggaccccgccgg

SEQ ID NO: 29976 - DNA, 233 bp, Zea mays
acctaactaaaccctagctaagggaagggaaacaagaccatggatgcctccaagctccgcgagcttcgcgacttcgtcgaggcgtgcaagaagaatccttcgctcctcgccgaccccaacctctccttcttccgggattacctccagagtttgggtgccaaaattcccgccgccgccccctctttcgaaagtcccaagagatcttccatggacgacattgatgacgacggtga

SEQ ID NO: 29977 - DNA, 232 bp, Zea mays
gtgaacgcggcgttcgcgacgctgcgcagggccaactgccccgcggcggccggcaacggcgacggcaacctggcgccgctggacaccgccacgcccaccgcgttcgacaacgcctactacaccaacctgctggcgcagagagggctgctacactccgaccagcagctcttcaacggcggcgccacggacggcctggtccgcacgtacgcgtccacgccgacgaggttcagcg

SEQ ID NO: 29978 - DNA, 228 bp, Zea mays
ggcaagggctcgaagtctggtgcctcaatgaggtgccctggttgccagggctcaggcatgaaagtcactattcgtcagctgggcccttccatgatacagcagatgcagcagccttgcaatgagtgcaaggggactggacagagcatcaatgagaaggaccgctgtccagggtgcaagggtgagaaggtcattcaagagaagaaggttcttgaggttcatgttgagaag

SEQ ID NO: 29979 - DNA, 229 bp, Zea mays
gacaagttcaaggagatcgttgtggaccaggtcggggatcgcgctaccagctacgaggacttcacaaacagcctccccgagaatgactgccgatacgcgatctatgatttcgactttgtcactgcagaagatgtccagaagagcaggatcttctatatcctatggtccccatcctccgccaaggtgaagagcaagatgctttatgcaagctcaaaccaaaaattcaaga

SEQ ID NO: 29980 - DNA, 227 bp, Zea mays
ggattttccttctcgagagatcccaaaggctacgatgtcggagacatctcggcctcactgcagctacaggaattcctcatcaagtggttcagtgatcatcccgagtacctcgcgaatcctttctacattggcggggactcctatgtcggaaaaatcgtgccgttcctcgggcagatgatttcagaaggtattgaacttggaagaagacccttccctaacctcaaggg

SEQ ID NO: 29981 - DNA, 224 bp, Zea mays
gccgcctgcatcctgacgctggccgtcgtcgtaggcttcatcgtgctcgtcatctacctggcgctgcgcccctccaagccgtccttctacctgcaggacgtgcagctgcgctccatcgacctcagcgacccggcgctctccctcgacctccaggtgacgatcgcgtcgctgaacccgaacgagcgggtgggcgtgtactacaagacgctggacgcgttcaccac

SEQ ID NO: 29982 - DNA, 226 bp, Zea mays
cggctcgaggggcatcatggagaatcatttgttcacatgagcaaaaggtcgcagctgatcgtcagactggtgtgatgatagatgcctataagaagaaagtagaagaggaactaaggaaggtttgcaatgaagtattgtcagtcattgctattcattgccttcccttggccagtacgggtgaaaatatcgtattcttttataagatgaaaggtgactactaccgtta

SEQ ID NO: 29983 - DNA, 223 bp, Zea mays
ggttttcttacattaactccatcgtttatccctggacgtccattcctctcctggcttactgtaccttgcctgccatctgcctgctcacggggaagtttatcacaccagagcttaccaatgtcgccagtatctggttcatggcacttttcatctgcatctccgtgaccggcatcctggaaatgaggtggagtggcgtggccatcgacgactggtggaggaacga

SEQ ID NO: 29984 - DNA, 222 bp, Zea mays
ctcagcgccgcgcttgcgtttccttctcttcgcttccaagatgtcgaagcgagggcgtggaggttcggctggtaacaagttccggatgtcactgggtctaccagtggcagctactgtgaactgtgccgataacactggagccaagaacctgtacatcatttctgtgaagggaatcaagggccgccttaacaggcttccttctgcctgtgttggtgacatggt

SEQ ID NO: 29985 - DNA, 223 bp, Zea mays
ggacggacgacaacgcctccatgatggaggccttcatggcttctgccgacctccccaccttcccctggggagcgccggccgggggcggcaactcgtcggccgccgcggcgtcgccgccgccgcagatgccagcggcgatggctcccgggttcaaccaggacacgctgcagcagaggctacaagccatgatagaggggtcgatggagacctggacctacgccat

SEQ ID NO: 29986 - DNA, 222 bp, Zea mays
tgctcgtcaaccttggtgttccctgggtcattcttggacactctgaaaggagagctctgctgggagaatcaaatgaatttgttggagacaaggttgcgtatgccctgtctcagggactaaaggtcattgcatgtgttggtgagacccttgagcagagggaggctgggtctaccatggatgttgttgctgcacaaacaaaagcaattgctgagaagatcaagg

SEQ ID NO: 29987 - DNA, 224 bp, Zea mays
cgcggacagccgcttcctcatgccaattgtgctgagggagtgcggcgagacgtttcgtgggatcgactcgttggttgacgtcggtggtggccatggtggcgccgccgccgccatcgccgccgccttcccccacctcaagtgcagcgtgcttgacctcccgcacgttgtcgccggtgctccgtctgatggcaacgtgcacttcgtcgcaggcaatatgtttgaga

SEQ ID NO: 29988 - DNA, 222 bp, Zea mays
ctaaaccctagccgcctagcgcctcgatccgagcagccctaggactcgcggaggtagttcttgttgatttggtccaagatggccgaggaaaaggtggggcggatcttcgtcggcgggctgtcgtggaacaccacggagcgcacgctcgagcgcaccttcggtcagtacggcaaggttatcgaggctcaggttgtagtggaaagggagacaggccgctctagg

SEQ ID NO: 29989 - DNA, 221 bp, Zea mays
caccaacgacgacgaatacggccgtggcaccggcggcgggtacggcagcaagccctctggcgacgacgcgtacgccggcggcggcggtggcgggtacggcaagcagtccggtggaggcgcggacgagggcggagagtacggctcctcccgggacgactcggagaagtacaggaaggaggagaaggagcacaagcacaaggagcacctcggcgagatgggcg

SEQ ID NO: 29990 - DNA, 220 bp, Zea mays
agcgtactacgtgcaaggcctggtgatccagaagaccgggcccgtgttcgcgtcggcgttcagcccgctgatgatgatcatcgtggccgtcatgggctccttcatcctcgccgagaagatattcctcggcggcgtcctcggcgccgtcctcatcgtcatcgggctctactcggtgctctggggcaagcacaaggagacgcaggacaaggaggacgatgag

SEQ ID NO: 29991 - DNA, 217 bp, Zea mays
ggactgcttgctccctgttgaccattgggtattctgaaccatcgagccatggctgccaagctgactcgcctccacagtcttcgcgaacgccttggtgccaccttctcctcccatcccaatgaactgatagcactcttttccaggtatgttcaccagggcaagggaatgcttcagcgccatcagctgcttgcggagtttgatgccctgtttgatagtg

SEQ ID NO: 29992 - DNA, 220 bp, Zea mays
aaggagagagaattcgggagcatgtacactgactgggatatccttcctcctcgtaagatcaaagatgttaatgcaaaaaagccaaaagactgggatgacagggaatatattgaagatcctgatcaagttaagccagagggatatgattcaattcctaaagagatacctgatcccaaggacaaaaagcctgagtcatgggatgacgatgacgatggtacat

SEQ ID NO: 29993 - DNA, 289 bp, Zea mays
cacgaccaccatccatcgccatggctggccccaccaccacgctcctcctcctgctgctgtgctccgctgggctcgcgtccggcgccacggcggctgacgacagcgggttcactaccttcaaggtatacttccacgacatcgtggcggggacgagcccgacggccatccgcatcgcgcagggggcggcgtccaacacctcgtccaccagcttcggcgcgatggtggccatcgacgacccgctgacgacgggccccacgcgcgccgcgggcaccgaggtgggccgcgccag

SEQ ID NO: 29994 - DNA, 280 bp, Zea mays
cctcaacccaggaacagagcgaggcgacgccgcggcacctcttctccggcgaagggaaatggcaaccgttccaggggatctgatctggcaggttgtgaggaagaacaactccttccttgtgaagcagttcggcaacggcaatgccaaggtgcagttcaccaaggagccgaacaacctctacaacatccactccttcaaacactcgggtttggcgaacaagaagactgtgacgatccagccagctgcaaaggactcggctgtggtcctctctactaccaag

SEQ ID NO: 29995 - DNA, 293 bp, Zea mays
agagatctcacgtgtcatgaaccatatgaaagatatgggagtgttggttggtaagggtggtttctacgggaacgtttttaggataacaccaccgttgtgcttcaccaaagaggattccgacttcttcattgaggtgatggacattgcgctctcgaagctgtgaggcaagcagggcgaagatgatgtgcaaaccctggtccgtcgccatgggatttttgcccatgaataatattaagattaatgagacagcacctcgttgtctcttaatctaagacgatgccatgtcatccggt

SEQ ID NO: 29996 - DNA, 294 bp, Zea mays
tgttcaggcaaaactacagttgggaagatactatccgaagtgttaggttattcgttcttcgacagtgataagttggtagagaaggctgttggtatttcatctgttgctgagatctttcagctccatagcgaaacattcttcagagataatgagagtgaggtcctgacggatctgtcatcaatgcatcggttggttgttgcaacctggagtggtgcagtgatccgaccaatcaattggagttacatgaagaaagggctgaccgtatggttagatgtcccactggatgcacttgca

SEQ ID NO: 29997 - DNA, 293 bp, Zea mays
cggctcgaggggagaatgatgagaacctcaagaaaattcgtgaagccaggggttactcttacatggacatttgtgatgtgtgcccagagaagttgccaaattacgaggctaagataaagaatttctttgaagaacacttgcatactgatgaagagatacgatattgccttgagggtagcggctactttgatgtgagggaccaagatgatcagtggatccgtgtagcggtaaagaaagggggcatgatcgttttgcctgcaggaatgtatcaccgctttacgttggatagtgac

SEQ ID NO: 29998 - DNA, 291 bp, Zea mays
tcggcgaggacatcgccaaggagacggccaaggactggaagggcctgcgcgtcaccgtcaagctcaccgtccagaaccgcctagccaaggtctccgttgtcccctccgccgccgcgctcgtcatcaaggcgctcaaggagcccgagaaggaccggaagaaggtccagaacatcaagcacagcggccacatcggcctcgacgacgtcgtcgagatcgccaggaccatgaggaacaggtccatggccaaggagttggccggcaccgtcaaagagatcctcggcacctgcgtca

SEQ ID NO: 29999 - DNA, 287 bp, Zea mays
cacagatccatcggagtgacagcgagcgagagcgagagagacagagagattgtccgcgcgtcacgactcccggcgaagacgatggggaaggggttcgcatcctacctggcgatgaagacggggccggagggcggcgacgcggcggcggcgcacaggctctgatcgacgcggacctgcgggagctcggcgtcgccgcgcggaagctcgccaaccacgcattcgtcctcggcggcgggctggggttcggcacctccttcctcaaatggctggccttcctcgccgcagtg

SEQ ID NO: 30000 - DNA, 286 bp, Zea mays
tatcaacaatgtcacctgggatctacttttgtacctgagctgcgtggatacttcttgggaactgaaaatttctattttacttcaaagttctttggacttaagaagtcttcatcactatctgatttcatgtttgctggagaacaattttgcaatcagcatttgtcgagtcttagaaaaaagcatcctaataggtcagatgaggatttttcacggtattgcttctcgatggcatacattgtggctctactgcatgacagtcttggtgtaccactggatgacaagagga

SEQ ID NO: 30001 - DNA, 295 bp, Zea mays
  unsure (1)..(295): unsure at all n locations
gcaaagtgcagatggcggtgccgctgctgacgcagaagatcgtgaagaagagggtcaagcagttcaagaggccccatcttgaccgctacaagtgccttaagccaagctggcgcaggcccaagggtattgactcncgcgtcaggcgtaagttcaagggatgcaccttgatgcccaacatcggatatggctccgacaagaagaccaggcactaccttcccaacaagttcanaaagtttgttgttcacaatgtctccgagctggagctgctgctgatgcacaacaggacttactgcgc

SEQ ID NO: 30002 - DNA, 281 bp, Zea mays
cacatcttttggtcgtccatgagagccagttgggaatctatgatgggaatcttgactgtttgcgcttgtggtctccaagagatgcactcccagctccgatatcgagtgcgatatactcgtgcgacggtctcttggtttacgctgggttctgcgatggtgctatcggagtcttcgaagcagaatctcttaggctgcgctgccggattgctccttccgcttacattccaccttcaatactagcctgtgctggacgggtctacccgttggtagtcgctgcgcac

SEQ ID NO: 30003 - DNA, 282 bp, Zea mays
cgaccacaccgttcctccgagcccaggagcagccccgcgccaggaggaagtttgttcttttaacaatatgtcgagggaggagaatgtttacatggccaagttggctgagcaggctgaaaggtatgaggagatggttgagtatatggagaaggtggctaagactgtagatgtggaagagctcactgttgaggagcgtaaccttctgtctgttgcatacaagaatgtgattggggctcgccgcgcttcatggcgcattgtttcttccattgaacaaaaggagga

SEQ ID NO: 30004 - DNA, 282 bp, Zea mays
actttcctcaccactgaggaccattgccagctcattgcaaaatgcccgaacttactagttctcgcggtgaggaatgtgattggacgtagaggattaggagttgttgcggatacgtgcaagaagctccaaaggctcagaatagagcgaggagatgatgaaggaggtgtgcaagaagagcagggaggggtctctcaagtgggcttgacggctatagccgtaggttgccgtgagctggaatatatagctgcctatgtgtctgatataaccaatggggccttggaa

SEQ ID NO: 30005 - DNA, 286 bp, Zea mays
ccggacagcacatctccgtgccatggagattgccaaagaggcaggtgcactgctctcttatgacccaaacctgagggaggcactatggccatcccgtgaagaggcccgcacccagatcttgagcatctgggaccaggcagacattgtcaaggtcagcgaagtcgagctcgagttcttgacaggcatcgactcggtggaggacgatgttgtcatgaagctgtggcggcctaccatgaagctgctcctagtgactcttggagatcaagggtgcaagtactatgccagg

SEQ ID NO: 30006 - DNA, 287 bp, Zea mays
ctcacggcgccaacgcggggctggacatcgcggtgcggctgctcgagcccatcaaggaggagttccccaccctctcctatgccgatttctaccagcttgccggacttgtggccgtcgaggtcaccggtgggcctgagatccccttccaccccggcagggaggacaagcctcagccgccacctgagggccgtcttcctgatgccaccaagggttctgaccacctgaggcaagtctttggcaagcagatgggtttgagtgatcaggacattgttgccctctctggtggc

SEQ ID NO: 30007 - DNA, 307 bp, Zea mays
ctctgcgcctgctgctccacctcctgcccatcctactggtggaaccccgaggagtacctcggcccagccgcgctgctccacgccaataggtggatacaggacagccgtgaccagttcaccaaggagcgcctggacgccatcaacgacgagttcaagctgtaccgctgccacaccatcaagaactgcacgcatgcctgccccaagggcctgaacccggcgaacagatcgacacgatcaagaagctccagttggacgcctgaaagcggtcatgccttcccttcaagacgaacatggaacaaaacctgtg

SEQ ID NO: 30008 - DNA, 313 bp, Zea mays
agatgggagttgaggtgtaccacaacctgaagagcatcatcaagaagaagtacggtcaggatgcgacaaatgttggggatgaaggtggttttgcacctaacattcaggaaaacaaagaaggccttgaactattgaaggcagccatagaaaaggctggctacactggaaaggtggtcattggaatggatgttgctgcttctgagttcttcggtgagaaagacaagacttatgatcttaatttcaaggaggagaacaacgatggctcaaagaaaatttcaggcgacagctgaatagacctgtacaagtcctttgt

SEQ ID NO: 30009 - DNA, 310 bp, Zea mays
gtttctgattttggacttagtacactgtctcagaatggagcaggacttcttcacacaacatgtggaacaccaaattatgttgctcctgaggtgctaggtagcgatggatatgacggacctgcagcagacatttggtcatgtggtgtcattctctatgttttaatggctggttaccttccctttgaggagaatgaccttccaagtttgtatgaaaagataactgcagctaagtactcatgcccatactggttctctccaggagccaagtcattgatccagagattacttgatccaaatccaagaactcgta

SEQ ID NO: 30010 - DNA, 315 bp, Zea mays
tcgcagagacaggcgtcttcgtactcgcctatctccgcgacccaaagcgttcccccttctcccattcttctctcatttctcaccaccgccgccgctaccccctttcgacaacaccatgagggagtgcatctcgatccacatcggccaggccggtatccaggtcggaaacgcgtgctgggagctgtactgcctcgagcatggcattcaggctgacggtcagatgcccggtgacaagaccattgggggacgtgatgatgctttcaacaccttcttcagtgagactggcgctggcgagcacgtctcgcgtgctgtttt

SEQ ID NO: 30011 - DNA, 294 bp, Zea mays
tgtcgggtcccgacgcggcgtgcggcggcgtcggcgtgctcggcatcgcctaggacttcggcggcatgatcttcatcctcgtctactgcaccgcgggggtgtcgggtgggcacatcaacccggccgtcaccttcggcctcttcctggcgcgcaacgtctcgctggtgcgcgcgctgctctacatcgtggcgcagtgcctcggcgccatctgcggcgtcgggctcgtcaacggcttccagagcgccttctacgtgcgctacggcggcggcgtcaacgagctcagcgacggctact

SEQ ID NO: 30012 - DNA, 310 bp, Zea mays
gccagcgcttcatcgcgctctccaagatcgtcccgggcctcaagaagatggacaaggcatccgtgctcggcgacgcgatcaagtacgtgaagcagctgcaggaccaggtgaaggggctggaggatgacgcccggaggcgcccggtggaggcggcggtgctggtcaagaagtcgcagctgtccgccgacgacgacgagggctcctcctgcgacgacaactccgtgggcgccgaggcctccgccacgcttctgccggagatcgaggcccggctgtcgggccgcacggtgctggtgagggtcactgcgacaac

SEQ ID NO: 30013 - DNA, 280 bp, Zea mays
ggcgaaccggcagtctgcggcgaggtccaaggagaggaagatcaagtacaccagtgagctggagaggaaggtgcagacgctgcagacagaggccaccacactttcggcacagctcacgcttcttcagagggacacctctggtttaaccactgagaacagggagctgaagctccggctgcaggccatggaagaacaagctaaactccgagatgctctaaatgacgccctgagagaagaagtccagcggcttaagatagccacagggcaggtccctaacata

SEQ ID NO: 30014 - DNA, 304 bp, Zea mays
caactccgacgaaggctagctacaccacctggagcgggctcgtctccatcgcccgccacccgctccgtcgtcgtcgtccccgccgcgccgatcccgaatcgaatggggagcctggcgtccgagaggaaggtggtcgggtgggccgccagggacgccaccggacacctctccccctactcctacaccctcaggaacacaggccctgaagatgtggtggtgaaggtgctctactgcgggatctgccacacggacatccaccaggccaagaaccacctcggggcttcaaagtatcctatggtccctg

SEQ ID NO: 30015 - DNA, 301 bp, Zea mays
agtcaatcagtaatcaccccaaatcctagggttctagtcgcttctcgtcgtttcgttcgtagatcacagagacaatggtgaaggcagttgctgtcctcgccggcactgatgtcaagggcaccatcttcttttcacaagagggggatggtccgaccaccgtgactggaagtatctctggcctcaagccagggctccatgggttccatgtgcacgcgcttggcgacaccaccaacggctgcatgtcgactgggccacacttcaatcctgttggcaaggagcatggcgcaccggaagatgagga

SEQ ID NO: 30016 - DNA, 289 bp, Zea mays
agcaaccagctccagtttttgcaagggttcaggaaccagatgcttgatgccgtgaggggtttctctgcatcaaggcaaaatggtctgttcatcaactcatgttttgctcattgccagagcgagagacaggatacttggtacgcgaacaactcgccacgtcttggtaacaagaaaatcgctgacgctgttggggactggttcttcgagagggggaacgccaagtacacagactgcccatacccttgcgatggcacttgccatcaccttgtgttcaggggagacactaaga

SEQ ID NO: 30017 - DNA, 304 bp, Zea mays
tagagatcacttcccttgcaccaagcagcatgaagatcaaggtcgtcgcaccacctgagaggaagtacagtgtctggataggagggtcgatcctagcctcgctcagcactttccaacagatgtggatatccaaggaggagtatgatgagtctggcccggcaatcgtccacaggaagtgcttctaggttccgcaagttcctcattgttatctagtctcaagttatgcccccgtcatttctcgagatatgtgtggcagatttgcctgcgacgtttattttcatcggacctgagtcttctcggggtt

SEQ ID NO: 30018 - DNA, 303 bp, Zea mays
acgcctccgctgccgatcgccgtccccgaccgcagtgcaggactgaggatgagtgaagaggataaggctgctgcttctgctgagcagcctaagagggcccctaagctcaatgaaaggatcctctcctctctgtccaggaggtccgtagctgctcatccatggcatgatctcgagatcggtcctggtgctcctgctgtattcaatgttgttgttgagatcacaaagggaagcaaagtcaaatacgagcttgacaagaaaactggactgattaaggttgatcgagtcctttactcatcagttgta

SEQ ID NO: 30019 - DNA, 303 bp, Zea mays
cggctcgaggagcggacaggcttcacggggcccatcaactactaccgcaacatggaccgcaactgggagctggcggcgccgtgggcggacgccaaggtgcgggtgcccaccaggttcatcgtcggcgacggcgacctcacctaccactacccgggcatccaggactacatccacaagggcgggttcgaggccgacgtcccggggctcgagagcgtcgtcgtcatccccggcgccggccacttcgtccagcaggagaaggccgacgaggtcagccagcacatctacgacttcatctccaagttc

SEQ ID NO: 30020 - DNA, 303 bp, Zea mays
  unsure (1)..(303): unsure at all n locations
gcaagagcaaatcacctgcggtatcgtctggtgggcttagcctgaacggccaagcaccagagtataggctacttctgcagaaggtgctcaagtcacacaaacaccctgtcactgccctttgtataccaccggacttgaagcagcttctgagtggcgatggcagcggtcacttgctctcatggtcattgaaagacgacagtttcaagggttcatagcacagagaaatatagggattcagctgcacatatagagaaacactggttanattgtaccactgatttcttcctcgtccagaactgagca

SEQ ID NO: 30021 - DNA, 305 bp, Zea mays
cgataggtaaaagaacattttcaagttagctcaaggagaatacatagctccagagaagattgaaaatgtctatgccaaatgcaagttcattgcccaatgttttatatatggcgacagtttcaactcttccttagttggtattgttgcagttgaaccagaggttatgaaggcttgggctgcatctgaagggatccagtgcgaagacttgaggcagctttgtgctgaccctagagcaagagctgcagtcctggccgacatggattctgttgggaaggaagcacagctaagaggttttgaatttgcta

SEQ ID NO: 30022 - DNA, 298 bp, Zea mays
aaatgtcaaccatggactgctgtatggtcgtgtcaattctgattcccagccacatcgagatccatatagcaagtggtacataacccctgaggaatggcctgaggagagttatcctccctgggcgcatggaccaggatatattgtttcaaaggacatagctaaagaagtttacaggaaacacaagagtggggagttaaagatgttcaagctggaggatgtcgcaatgggaatatggatcaatgagatgaagaaggatggcttggatgtcaagtatgagaatgatgggaggattttggtt

SEQ ID NO: 30023 - DNA, 296 bp, Zea mays
agcaccccaccaacccatacccataccagaggctctctgattttacttctccgcggtagatcggctgagcgagcgagcgaggcacacggagctagctaaacagagcacacgggtagaaaagcaagatgtcggacggcacggcgacctgcatcgacatcatcctcgccatcatcctgccgccgctcggggtcttcttcaagttcggctgcggggttgagttctggatctgccttatcctcaccttcctcggctacctccccggcatcatctacgccgtctgggccatcaccaagtag

SEQ ID NO: 30024 - DNA, 296 bp, Zea mays
agacaggagtcttcgacagcattttgcatgctataaactcagccacagaggctcaaaatgacatgagaacaatggcatattggttgtccaacttatctacattaacagttctccttcaacgatcattcaaaactactaggacggcaatctcaactccacaaaggagaagattttcatcggagaggatctttcatggaaatcaaacttcaaatgctgggcttgcttatctcagtggtcaatcagttgttgggtctgctggactgccccaagttgaagcaaaatatcctgctttgcta

SEQ ID NO: 30025 - DNA, 301 bp, Zea mays
cacgaccaccatccatcgccatggctggccccaccaccacgctcctcctcctgctgctgtgctccgctgggctcgcgtccggcgccacggcggctgacgacagcgggttcactaccttcaaggtatacttccacgacatcgtggcggggacgagcccgacggccatccgcatcgcgcagggggcggcgtccaacacctcgtccaccagcttcggcgcgatggtggccatcgacgacccgctgacgacgggccccacgcgcgccgcgggcaccgaggtgggccgcgcccagggcacctacac

SEQ ID NO: 30026 - DNA, 301 bp, Zea mays
cggctcgaggcgcgccgtcaccgtatcctcagatcagaggcgagcagaaaccacaccactctactgacgcccgacgagcagtgtaacattttccttcagccatgggtaaggagaagactcacatcaacattgtggtcattggccatgtcgactctggcaagtcgaccaccactggccacctgatctacaagcttggaggtattgacaagcgagtgattgagaggttcgagaaagaggctgccgagatgaacaagcggtcattcaagtatgcgtgggtgcttgacaagctcaaggctgagcg

SEQ ID NO: 30027 - DNA, 299 bp, Zea mays
ctcctctcataacccaccagtccatcgcaccctccctccggtcagcgctcccacagcctcacccctgcgcccccgccgattcgcgtcgccctttgttggaaggaacgatggagcagaccttcatcatgatcaagcccgacggcgtccagcggggcctgatcggggacatcatcagtcgcttcgagaagaaagggttctacctcaaggggatgaagttcatgaacgtggagaggtccttcgcgcagagcactacgctgacctttccgacaagcctttcttctccgggttggtggagtaca

SEQ ID NO: 30028 - DNA, 296 bp, Zea mays
  unsure (1)..(296): unsure at all n locations
aanaaagctggtcctctccactgcaacttggcttggggggaagaacgattttcttggctttgcataccttatagttggcgggctctgcattttcctggcatttgcattcaccttgctgtacttcgtaaaaccaaggaaactgggagaccacaactacttatcctggaacagacgccatgcaggacgctaagatgttttggaaccccaagtgtcctaactacttaagtgcaacttgtatgaaatgaaatgccctgaaccagaaatctcgttgggcacagactggatcagactagaac

SEQ ID NO: 30029 - DNA, 304 bp, Zea mays
ctcgatctcgcacctagggtttcgtctcgtcgctctcgtcctccgcgaagatgccgaagaacaagggtaagggaggcaagaaccggaagcgaggaaagaacgaggctgacgacgacaagcgcgagcacgtcttcaaggaagacgggcaggagtacgcgcaggtgacccggatgctcggcaacgggcggtgcgaggccatctgcgtcgatggcacgcgccgcctctgccatatccggggtaagatgcacaagaaggtctggatcgcggctggggacatcgtcctcgtcggcctccgcgactacca

SEQ ID NO: 30030 - DNA, 308 bp, Zea mays
agcagacggcgatcgaccgcgaggcggtgttcgcgtacgggacgacccgtgcagccccaactacccgactgatgcagaagctccgcgcggtgctggtcgagcacgcgctggccaacggcgacgccgagcgcgccgcggagacgtccatcttcgccaaggtggccgagttcgagcagcaggtccgcgcggcgctgcccaaggaggtggaggccgcgcgcgcgccgtgtgagagcggcagccccctggtccccaacaggatcagggagtgccggtcctacccgctgtaccggttcgtgcgcgaggaggtc

SEQ ID NO: 30031 - DNA, 306 bp, Zea mays
tgatgatgattatgaggccgagcccccgaacgagaaggcaaagcctacgggggctgatgtggcgaagttgaaagagatgaagaggcaggaggagattgagaagaacaagcttgccttggagaggaagaagaggcaggctgagaagcaggcagcaaaagctgtggcccgagcacagaaggaagctgagaagaagctgaagaaagaggagaagaaagccaagaagaaatctggtgcagctgacactgatgagccctcagaatcggatgccaagtctgacgaagccatggaagccccagcggaacaaga

SEQ ID NO: 30032 - DNA, 297 bp, Zea mays
gtgggttggcttctcctccccctccggttcgggttcgggttcgtgaggttctccggggttcgggttcgtgggtgagcggatcgagatggcggcgtcggatgttgagtaccgctgcttcgtcggcagcctcgcctgggccacggacgaccactccctccacaacgccttcagcacctacggcgaggtcctcgagtccaagatcatcctcgatcgggagacgcagaggtcccgcggcttcggcttcgtcaccttctccacggaggaggcgatgcggaacccatcgatggcatgaacggc

SEQ ID NO: 30033 - DNA, 304 bp, Zea mays
  unsure (1)..(304): unsure at all n locations
attttgtgatagagtatgtcaagggaggagagttgttcaaaaaggttcaacgtggaaggttaaaagaagatgttgctcgtacatatttccaacaattgatcagtgctgttgacttctgccatactagacaagtttatcatagagatctaaagcccgaaaatcttcttcttgacggaagtcacaacttaaagatttcagactttggtttgagtgcacttccaaactgcaagagaaaagatgggttactccacacaatttgtgggactcctgcatatgttgctccagaagtaattagtncaaaagg

SEQ ID NO: 30034 - DNA, 299 bp, Zea mays
  unsure (1)..(299): unsure at all n locations
aanaattcataagaatctctcttggtggtgtaaaggatgaagctgatattaggggccaccgaaggacatacattggaagcatgccagggagacttattgatggactaaagagggtatctgtgagcaatccagtgatgcttctagatgaaattgacaagactggttctgatgtacgtggtgatcctgcatcagcactactagaagttcttgaccctgagcagaacaaagcattcaacgatcactatttgaatgtgccgttcgacctgtcaaaagtcatatttgttgcaactgccaatagg

SEQ ID NO: 30035 - DNA, 303 bp, Zea mays
gcagctcgatcgagcacacacacacttgatcactactaatataaacacattgcgcaaaggccgccatggcttaccgcgcctttgctacgctgcttgcagtgctagcatttgtgggcttcgcttcagttccccgtggtctggcaactgacccgacccagctccaggacttctgcgttgctgataacaagaaccctgtgctggtgaacggggtggtgtgcaagaacccgaacgtggtgaaggcaaccgacttcttcttcaggatagtgccgatggcgccaaacgggcagggctccgccgtgacgc

SEQ ID NO: 30036 - DNA, 303 bp, Zea mays
gcctctcttactctccgccgtcgccctgctcgcccgaagcagccgccggcaaaatgggcccgaagaggaatggaaatgtcgcagtaccccgtcaagaaaaaggcggtgttgacgaacccactcttcgagaagaggccgaagcagtctgggatcagcggcgcccttccgcccaagaaggacctccaccgcttcgtcaagtggcccaaggtcgtgcgcatccagcgccaggaccgcatcctcaagcagcgcctcaaggtgcccccggcgctcaaccagttcacacgtaccctcgacaagaacctt

SEQ ID NO: 30037 - DNA, 300 bp, Zea mays
gtcgcagtgtcttccgcccgggctaccaccatgccgaagcagatccacgagatcaaggacttcctgctgactgcgcggcggaaggacgcacggtcggtgcggatcaagcgggccaaggacgccgtcaagttcaaggtgcgctgctccaggtacctctacaccctctgcgtccacgacgccgacaaggccaacaagctcaagcagtcgctcccgccaggtctgactgtccaggagatttaaggtatcaagccacaaactgtgctttttttgcggtgtcagggacgtttgctccagtgttac

SEQ ID NO: 30038 - DNA, 298 bp, Zea mays
gctgactttggagtagctcggattgaagtaaaaactgaggggatgacacctgaaacgggaacctatcgttggatggcaccagagatgattcagcacaggccatatgaccaaaaagttgatgtctacagctttggcattgtgctgtgggagctcataactggcatgctcccttttgctaatatgacagcagtgcaggctgctttcgctgtggtgaacaatggtgtccgcccagctataccccaggactgcctgcccacccttgctgagatcatgaccaggtgctgggatccaaatcctg

SEQ ID NO: 30039 - DNA, 296 bp, Zea mays
acgatcaattaattcatcaacaagcagaacaaatgcagcagagaaatacattcaggtggtttctgttgataaccatgagttttggtttatgggcttcgtttactatgacagtgcggtgaagaatctgcaggaagcacttcaggaggctcagaatttacgtgcttagtgatgttcatggattggaactagcatgtcttatacattacagttgtgatatactgttttcccgtcagtttcgactgtttgtccagatttagtttgcgtaggtatcagctgtttctgtgttttgtactgac

SEQ ID NO: 30040 - DNA, 295 bp, Zea mays
cgtaggactacttcaaaagcaaaaagatggagatgacgattaaatacatagatcctacatacatggtccgtgctattccaagcaatgcatcagacaatgtctactgtacacttctagcccacagtgctatccatggtgcaatggcggggtacagcttcactgttgggatggtcaacggaagacatacctatatacctttctacagggtgacatccacaaggaacaaggttaaagtcactgacaggatgtgggcaaggcttctgtcgtccaccaaccagccaagtttcctgagtca

SEQ ID NO: 30041 - DNA, 286 bp, Zea mays
gtggcacccacgacggcatcaacgagaacaacaccatcatcgaccgcaatggcctgatgagcatccatatgccggcctacctggacgcgctccgcaagggcgtctccacggtcatgatctcctactccagctggaacgggctcaagatgcacgccaaccacaacctcatcacaggcttcctcaagggcgagcacaagttccagggcttcacgatctcggactgggaaggcatcgacaggatcaccagccctccaggggcgaactactcctactctgtgcaggcttc

SEQ ID NO: 30042 - DNA, 295 bp, Zea mays
tacggctcgagcccattcgaacgccggagctcgacaaggacgaccgacgacgcacgcggagatacggcgtactgcaaattttgaaaactgaactgtaagatggcatcagcagagctttcccgtgaggaaaatgtgtacatggcgaactcgctgagcaggcggagaggtacgaggagatggttgagttcatggagaaggtagccaagactgttgactcggaggagctcactgtggaggagcgaaacctcttgtctgttgcatacaagaacgtcattggagcccgccgcgcctcatg

SEQ ID NO: 30043 - DNA, 291 bp, Zea mays
ggaaaccctagccgccatatctcacgatccactcgagcaccaagccgagggaaggtgaggagcgatggcgcgcggcgtggtgtcggcgaagggcggcgcggtcgcgggcaagaagaaggggtcggtttccttcacgatcgactgcaccaagccagtggaggacaagatcatggaggtcgcctcgctcgagaagttcctgcaggagcgcatcaaggtcgccggcggcaaggctggcaacctcggcgactccgtcaccatctctcgcgagaagaccaatgtcaccgtcacctc

SEQ ID NO: 30044 - DNA, 291 bp, Zea mays
acatggacctgttcaggaagtgcatggagcctgttgagaagtgcctgagggatgccaagatggacaagagcaccgtccatgacgttgtacttgttggtggctccactaggatccccagggtgcagcaactgctccaggacttcttcaacggcaaggagctgtgcaagaacatcaaccccgatgaggctgtcgcctatggtgctgctgtccaggctgccatcctgagcggtgagggcaatgagaaggtgcaggacctgcttctgctggacgtcacccctctgtccctgggtc

SEQ ID NO: 30045 - DNA, 291 bp, Zea mays
gagctatcttaaaaggacattaggttgggatcagtatccccatggacggtggggtgattctcggaacccatcatatggagcacttactgaccaccagttcacaagaccacgaggccgtggtaagaagctccaagaggaatgggctgttccactgaaatctgtggaggacattagtgagcgcttcacaaacttctgtcaagggaaactcacaagcagcccatggtcagaattggacggtcttcaaccagagacaaagattatcgatgaccagttggtgaatattaaccagaa

SEQ ID NO: 30046 - DNA, 289 bp, Zea mays
agtctcgtctctcctctcctctcctttttccccctccctgcacagcgccgctcaccgtcaccggaccacagcagcgatcgatggctgaggtacacaatgagcggcccgtggggatggtgggcgacgtccgggacgcaccggtgggccgcgagaacgacctcgaggccatcgagctcgcgcgcttcgcggtcgccgagcacaacagcaagaccaacgcgatgctggaattcgagaggctggtgaaggtgaggcaccaggtcgtggccgggaccctgcaccacttcaccgt

SEQ ID NO: 30047 - DNA, 287 bp, Zea mays
aaacaatcaaccagcaacactcttctcttataacatagtacagcgaaggtaactcacatggcaacttccatgggttgtctcgtcttgctctgccttgtttcttctctccttcccagtgccgtccttggccacccatggggtggcttgttcccacagttctatgaccattcgtgccccaaggcgaaggagattgtgcagtccattgtggcacaggctgtggccaaggagaccaggatggcggcatctttagtcagactgcatttccatgactgctttgtcaagggctg

SEQ ID NO: 30048 - DNA, 322 bp, Zea mays
ctctgaagctgacatcttcgtgaccaccactggcaacaaggatatcatcatggttgaccacatgaggaagatgaagaacaatgccattgtctgcaacattggccactttgacaatgaaattgatatgctcggccttgagacctaccctggcgtcaagcgcatcaccatcaagccccagactgaccgctgggtgttccccgagaccaacactggcatcattgtccttgctgagggtcgcctgatgaaccttgggtgtgctactggccatcctagctttgtcatgtcctgctcattcactaacccagtcattgcccaacttgaa

SEQ ID NO: 30049 - DNA, 206 bp, Zea mays
ctactactcaagtatccatccttatttgttgatccatggactcggaaggagttgtagcagcaaaggtggcagatgagactactaaaccggcaatccaagaagacggcgccgagagcaaggccgggacgactgatctgctgatgctgaccgacaagtcgcagctgcacgcgctggcgatgctgctgcggaacaacgaggagctcatg

SEQ ID NO: 30050 - DNA, 309 bp, Zea mays
  unsure (1)..(309): unsure at all n locations
gagaaaaagattattgtaaagattaaaacaagtgctgaaaagtcactgtgggtagagaaagaggacaatatccgccgtggccttttcgatttactacagaatattgtccttatcagagatccagaggactccacaaaattctatccccgtttcaacctggaagacacatcaagttttagggaccttgatgaacacagcaaaaatatcctcagaagattgtattataactattattttgttcgccaagaaaatctctggcgcncaaatgccctgaagactttgcctgtcctgctgaactcgtcagatatg

SEQ ID NO: 30051 - DNA, 218 bp, Zea mays
atgccaaggaggaagaggaggaagatgaagaggagtctgacaagtccaagtcggaggtcaatgacgaggatgatgaagagggtagtgaggaggatgaagatgatgacgagtgatggagctcctcgagacaatggaccgtgcttcatccaacaatggagcggctacacaaggccccgtggcgatcacaaaaaaggagcctatatccatgtactagaatt

SEQ ID NO: 30052 - DNA, 309 bp, Zea mays
tcccccatttttagctcctaagccagttggtgattacaacaaagggatggctgaagctgatcaaaagattctatcagcggaggtaaaacttgaatcccaatactatttctacatggagacacaagtggcgctactattcctgatgaagataactgtataaccatctattcttcgacacaaattcccgaggtcacacaaaatgtggttgcaaagtgccttggcattccatttcacaatgtccgcctcatcagcagaagagtcggaggaggctttggtggaaaggcaatgaaagcaatacatgttgcatgt

SEQ ID NO: 30053 - DNA, 305 bp, Zea mays
gcaagaagaagggaaacgagaggagggcggcgatggcgaagaggctgctcccgtcgctgaaccgggtgctggtggagaagctggtgcagcccaagaagaccgccggcggcatcctcctcccggaaacatccaagcagctgaatgctgctaaagtggtggctgttggccctggtgagcgcgacaaggcaggcaatctgatcccagttgctctgaaggaaggcgacactgttcttctgcccgagtatggtggatctgaagtcaagcttgcggctgataaagagtcctcctcttcagagacgatgaca

SEQ ID NO: 30054 - DNA, 309 bp, Zea mays
ctggcggagtggttcaagagggacgtggtcacgtcaccgttcgaggagctgcacggggcgactctgttccacgagagcatggggagcctcgacgcagatttccacgacatggcgagcgaggccttggacgcccacgacaacttcggcatcgagatagctatgcgggagttcagggacttgttcgaggggatccagtccatgacctactgctgcggtaacttcggtgatgacaagggtgccagggccattgtcaaagccttcccacacataaaatgcactgtgctggcgcctcccaagatcattgccaca

SEQ ID NO: 30055 - DNA, 305 bp, Zea mays
  unsure (1)..(305): unsure at all n locations
cgcccgattcgacgaggccgtcttctcgtaccagaaagcgctgaccgtcctcaagtctgcccgcagcgacgaccaccctaccgtcgcgtccgtctacgtccgcctcgccgacctgtaccaccgcacgggcaggctccgcgagtccaagtcctactgcgagaacgccctgcgcgtctacgccaagcccgcgcccggcgctgcccccgacgagatcggcggagggttgatggagatcgctgccatctacgaggcgctcgacgacctcgacgnagcgctgaagcttctgcagagggcgctgaagctgc

SEQ ID NO: 30056 - DNA, 300 bp, Zea mays
ctcgctagcgccttccctccgcaaacggaaggctctcgtgaccaccgggatgtccgccatggagaccgacatcaacgcgccgccgccgcccgccccagctgagcgagggatcctctgcggccggtccgtcctcctcccgcaagcccaacaagcgcttcgagatcaagaagtggaacgccgtcgcgctctgggcatgggatatcgtcgtcgacaactgcgctatctgccgcaaccacatcatggatctatgcatcgagtgctcagcgaactaagccagcgcgaccagcgaggagtgcactg

SEQ ID NO: 30057 - DNA, 295 bp, Zea mays
cctccatccacgaactcccgttctccatttacacccatggcggtgtcgatcgagctcaccaaggagtacggctacgtcgtgctggtgctggtggcctatgtcttcctcaacctttggatgggcttccaggtcggcaaggcccgcagaaactacaaggtgttctaccccaccatgtacgccatcgagtcggagaacaaggacgccaagctcttcaactgcgtgcagagggggcaccagaactctctagagtggatgcccgttttcttcgtcatactgctgctgggcggtctgcagc

SEQ ID NO: 30058 - DNA, 293 bp, Zea mays
gcggggagcaaaacaatggaggggaaagaggaggacgtgcgcctgggcgccaacaagttctcggagcgccacccatcgggacggcggcgcagggcgccgctgacgacaaggactacaaggagcccccgccggcgccgctgttcgagcccggggagctcaagtcctggtccttctaccgcgcgggcatcgccgagttcgtcgccaacttcctcttcctctacatcaccatcctcatcgtcatgggcgtctccaagtccacctccaagtgcgccaccgtcggcatccagggcatc

SEQ ID NO: 30059 - DNA, 293 bp, Zea mays
  unsure (1)..(293): unsure at all n locations
caccgcccggtctccgatctccgatccccgatcccctcgtcgatccaagatgcagatcttcgtcaagactctcactggaaagactatcaccctcgaggtggagtcctctgacaccattgacaacgtcaaggccaagatccaggacaaggaaggcattcccccggaccagcagcggctcatcttcgctggcaagcagctcgaggacgggcgcacacttgccgactacaacatccagaaggagagcaccctccaccttgttctccgcctcnaggggagcatgcagatcttcgtca

SEQ ID NO: 30060 - DNA, 293 bp, Zea mays
ctatttctgagtgcacgcgctatttcacaagcccacatcacaagacagtttcttttcaacctaaagcaggacggcaaagcacttcctgatggccctgttgttatatctccagatggtctcttcccgtcactttacagagaagtcatcagaagagctccgcatgaattcaagatttcgtgtctagaggccatcaaagatttatttccacacgactcaaatccgttttatgctggatttggaaatagagacacagacgagcttagctacctcaaggttggtattcctatgggcaa

SEQ ID NO: 30061 - DNA, 293 bp, Zea mays
gcgtaggtagcggcggtctcaaccccaggcgagctcggctccggtcacccgtcgatccacgcaaccatgtcgaggaggaagaccagggagcccaaggaggagaacgttacccttggacccactgtccgtgaaggagagtttgtctttggtgttgctcacatctttgcatccttcaatgacaccttcattcatgtcactgatttgtctgggagggaaactttggttcggatcactggtggcatgaaggttaaggctgatcgtgatgagtcgtctccttatgctgctatgcttgc

SEQ ID NO: 30062 - DNA, 310 bp, Zea mays
gtgaatcttttgatggacaagaggccaagccgtacaagaacgatagtgaaatccttgcaatgacaaacctgattgcagcgtaccagaagaacgacatcatggagtttgaaaagatcctgaagagtaatagaagaacaataatggatgatccttttatccgtaactatattgaggatctgttgaagaacatcagaacccaagtgctgctcaagcttattaaaccgtatacacgaatcaggattccattcatttcgcaggaactcaatttcccggagaaggatgtggagcagctgttggtatcgctcatcct

SEQ ID NO: 30063 - DNA, 308 bp, Zea mays
gagagatcagcgacttaacaacaataatggccaccgccatagttcccacggacgccgagctgctgcaggcgcaggccgacctgtggcgccacagcctctactacctgacatccatggcgctcaagtgcgcggtggagctccacatcccgaccgccatccacaacctaggcgggtctgccacgctgccggacctcgtggccgcgctgtccctgccagcggccaagctcccgttcctcgggcgcgtgatgcggctgctggtcacgtcgggcgtcttcgcgtcgtccgacgacgtgcagtaccggctgaac

SEQ ID NO: 30064 - DNA, 308 bp, Zea mays
ggcaagaagatcgccgtcctcggcttcgccttcaagaaggacaccggcgacaccagggagaccccggccatcgatgtctgcaagggcctgctgggtgacaaggcccagatcagcatctacgacccccaggtgacggaggaccagatccagcgggacctagccatgaacaagttcgactgggaccacccgatgcacctgcagccgacgagcccgacggccgtgaagcaggtgagctgcgtgtgggacgcgtacgaggccaccaagggcgcccacgggctgtgcatcctgaccgagtgggacgagttcaa

SEQ ID NO: 30065 - DNA, 307 bp, Zea mays
aagtccaccaacatcctgctcgacgaggactacgaggccaagatcgccgacttcggcattgccaaggtcgccgaggattcctccgactccgagttcagctgcttcgccggaacgcatggctacctcgcgcccgagctggcctactcgctcaaagtgacggagaagacggacgtgtacagcttcggcgtggtgctgctggagctggtcaccggccggagcccgatcgacccgcgcttcggcgagggcagggacatcgtgttctggctttccagcaagctcgcctcggagagcctccacgacgtcctgg

SEQ ID NO: 30066 - DNA, 307 bp, Zea mays
gcagagaatccccaagcaaacaaacagggtagagggagaggagaggagaggagaggagaggttgggtctgggacaccatggctccgatgaagctgtacggggcggtgatgtcgtggaacgtgacgaggtgcgcaacggcgctggaggaggctggctccgactacgagatcgtgcccatcaacttcgccaccgccgagcacaagagccccgagcacctcgtccgcaacccgtttggtcaggttccagctctgcaggatggtgacttgtacctcttcgaatcacgagcaatctgcaagtacgctgctcg

SEQ ID NO: 30067 - DNA, 289 bp, Zea mays
ggtatgttgatgctgtcatgacaatccccaagggaaccttgttccccatgttggcatgaaccttgccttcgacagggatctcattggccctgctatgtactttggtctcatgggtgatggccagcccatctgtcgctacgacgacatgtgggcaggatggtgtgtgaaggtcatctgcgaccacctgagcctgggagtcaagactggcctgccatacatctggcacagcaaggctagcaaccccttcgttaacttgaagaaggaatacaagggcatcttctggcaggag

SEQ ID NO: 30068 - DNA, 303 bp, Zea mays
cccaagctgagaatgaaggaaaaactgttgagtctaagaaaccaattgttgtgaagtacggccttaaccatgtgacttacctcattgagcagaacaaggctcagcttgttgtcattgctcacgacgtggatccgattgaactggttgtgtggcttccagccctgtgcaggaagatggaggtcccttactgcattgttaaaggaaaggctcgccttggatcgattgttcacaagaagaatgcatcagtcttgtgtctgaccactgtcaagaacgaggataagcttgagttcagcaagatcttgg

SEQ ID NO: 30069 - DNA, 302 bp, Zea mays
gtttccagacgccttcggtgagtacagggaaggaagtcgccatggctgacgacgaacaggcggagaagaaggaggaggtccccgagcttgctccttttgacccaaccaagaaaaagaagaagaagaaggtggtaatacaagagccatcagatgaggtggataacttggcagagaagacagagagcttgactgtaaccgagtctagtgagccaagctttgcgggcatgaaaaagaagaagaagaaacatgtggaacttgattcttctcttaccgagaccggagatgttgatgacacaggagac

SEQ ID NO: 30070 - DNA, 301 bp, Zea mays
ggcgtacgggatgacggcgttcgagtaccacgggacggacccgcgcttcaaccgcgtgttcaacgagggcatgaagaaccactcggtgatcatcaccaagaagctgctggacttctacacgggcttcgagggcgtgtcgacgctggtggacgtgggcggcggcgtgggcgccacgctgcacgccatcacgtcccgccacccgcacatctccggggtcaacttcgacctgccgcacgtcatctccgaggcgccgccgttccccggcgtgcgccacgtgggcggggacatgttcgcgtccgtg

SEQ ID NO: 30071 - DNA, 291 bp, Zea mays
cggctcgagtgggatcaatgtactctgcggtgctgttcatcggggtcatgaattgtacctcagttcagccagtggtggccgtggagcggacagtcttttaccgtgaaagagctgccggcatgtactcagctttcccatatgcatttggccaggttgtcattgagctcccatacgcactggctcaggatatctgtatacgctgtcatagtgtactccatgatcgggttcgagtggacggttgctaagttcttctggtacctcttctttgggtacttcacgctgctctacttc

SEQ ID NO: 30072 - DNA, 297 bp, Zea mays
acaacaagggtttgtattcaacaaccttcaaagttccagatgtttatggagttttccagttcaaagttgagtaccaaagactgggatatactggtctgtcttttacaaagcagattccagtacgtccttacagacataatgagtatgagagattcataacatcagcgtacccatactacaccgcctcattttcaacaatgggtgctttcttcgtattctcgtttgtgtacctgtaccacaaataaaggactcatgggagcgcacaagtctctggaggctgacgtgaccaagatctgt

SEQ ID NO: 30073 - DNA, 292 bp, Zea mays
ggagaatctactggcatctgtggacaagaacgaggcggagatctcgccatcaacactatatgccattgcctatgtcacagagggggtgtcgttcatcaatgggagcccccagaacacttttgtgcctgggctgattgatcttgttatcaagaacaactgcctgatcgatgttgacgacttcaagagtgggcagaccaagatgaaatcagtcctggttgatttccttgttggtgctggaataaagcccacctcaattgtgagctacaaccacttgggaaacatcgacgacatg

SEQ ID NO: 30074 - DNA, 294 bp, Zea mays
  unsure (1)..(294): unsure at all n locations
gctttcccgttccncaccccgaccgactgctccccctcccccgcaccagcctcaagccctcaaggcctcaaggcatcgccggcgccgcaacttcgctgaggaagcccgcacccctgcccggatccgatggccaacagcaacctcccgcggcggatcatcaaggagactcagcggctgctcagcgagccagcaccggggatcagcgcgtcgccctcggaggagaacatgcgctacttcaacgttatgatccttgggccggcgcagtcgccctatgaaggtggagtttttaagctt

SEQ ID NO: 30075 - DNA, 294 bp, Zea mays
ggcgcgggcggacaaggagcaggcggaggaggagttgtgccaagccacaatgggtatctcgcgtgactcgatgcacaagcgccgagccaccggtggaaagcagaaggcctggaggaagaagcgaaagtatgagcttggtcgccagccagccaacaccaagttgtcaagcaataagacagtgaggagggtccgtgttcgtggaggtaatgtgaaatggagggctcttcgccttgatactggtaactactcatggggaagtgaagctgttacccgcaagacccgtatcctcgacgt

SEQ ID NO: 30076 - DNA, 293 bp, Zea mays
gggcgcagagaatccccaagcaaacaaacagggtagagggagaggagaggagaggagaggagaggttgggtctgggacaccatggctccgatgaagctgtacggggcggtgatgtcgtggaacgtgacgaggtgcgcaacggcgctggaggaggctggctccgactacgagatcgtgcccatcaacttcgccaccgccgagcacaagagccccgagcacctcgtccgcaacccgtttggtcaggttccagctctgcaggatggtgacttgtacctcttcgaatcacgagcaat

SEQ ID NO: 30077 - DNA, 288 bp, Zea mays
agcagaacaagatcctgaaggtgatcaggaagaaccttgtgaagaagtgtgttgagctcttctttgagattgctcagaacaaggaggactacaacaagttttacgaggctttctccaagaacctcaagcttggcatccacgaggactcgcagaacaggaccaagatcgccgagcttctgagataccactccaccaagagtggtgatgagctgaccagcctcaaggactacgtgaccaggatgaaggagggacagaatgacatatactatatcactggtgagagcaaga

SEQ ID NO: 30078 - DNA, 290 bp, Zea mays
aggcgggtcatacacctttgttctgcctaccatttcgatcatccttgctggacgttatgctaatgaacctaatccacatattaaatttctccgcatcatgcgtgggacacaaggtgcgttgattgtggcttcagccttacagattatagttggcttcagtggcctttggcgtaatgttgccaggtatctgagtccactttcagctgctcctttggtggcactagttggatttggactgtatgagctaggatttccatcggtcgccaaatgtgttgagattggtctacctc

SEQ ID NO: 30079 - DNA, 323 bp, Zea mays
cgcagagccgcagagatccgtcacactgcaagttttgaaaactgaactgtaagatggcatcagcagagctttcccgtgaggaaaatgtgtacatggcgaactcgccgagcaggcagagaggtacgaggaaatggttgagttcatggagaaggtagcgaaaactgttgactcggaggagctcactgtggaggagcgcaacctcctgtctgttgcatacaagaacgtcattggagcccgccgtgcctcatggcgcatcatctcctccatcgagcagaaggaggagggtcgaggcaatgaggaccgtgtaacactcatcaaggact

SEQ ID NO: 30080 - DNA, 322 bp, Zea mays
cgtcgcagagttctgctacatcaacgagatcgacgggccgagcaagaactactgcgaccggaacaacacgcagtggccgtgccaggcggggaaggggtactacggccgcggcccgctgcagatctcctggaacttcaactacgggcccgcggggcagagcatcggcttcgacgggctgggcgaccccgacgcggtggcgcgcagccagtgctcgcgttccgctccgcgctctggtactggatgaacaacgtgcacggggccatcgtctccggccagggcttcggcgccaccatccgggccatcaacggcgcgctcgagtgcg

SEQ ID NO: 30081 - DNA, 317 bp, Zea mays
ccagcactgaacacttgattgattcagtgggtagctagctagctgaatcacaatggatcctaccaagttccgtccgtccagcagccacgacacgacggtgacgacgacgaacgcgggcgctcctgtgtggaacgacaacgaggcgctgactgtggggcctcgcggtcccatcctgctggaggactaccacctgatcgagaaggtggcgcacttcgcgcgcgagcgcatcccggagcgcgtggtgcacgcgcgcggggcctccgccaagggcttcttcgagtgcacccacgacgtgacgtcgctgacgtgcgccgact

SEQ ID NO: 30082 - DNA, 315 bp, Zea mays
gatggacaagagcagcgtccatgatgttgtccttgttggtggctccactaggatccccagggtgcagcagctgctccaggacttcttcaacggcaaggagctgtgcaagaacatcaatcctgatgaggccgttgcctatggtgctgccgtccaggccgctatcctcagtggtgagggcaacgagaaggtgcaggacctgcttctgctggacgtcactcctctctctctgggtctggagactgccggaggagtgatgaccgtccttatcccgaggaacaccaccatccccaccaagaaggagcaggtgttctccac

SEQ ID NO: 30083 - DNA, 310 bp, Zea mays
cgagcggcgacgacccggacgtgacgctgctggcgcgcacgctcgagagccggcgctcctcgtcctacggccactccgtcatccggaacgcctcgtcgcggatcaagcaggtgtcgcaggagctccgccgcatcgcctccatcaaccgccgcggcgccgcggggccccggatcgaccgctccaagtccgccgccgcgcacgcgctcaaggggctcaagttcatcagcaaggccgagggcgccgcaggatgggaggccgtcgagaggcgattcgacaagctcgccgagaacggactcctccaccggtccag

SEQ ID NO: 30084 - DNA, 307 bp, Zea mays
ctagatctttcaagctatccttgcttcctagctccctttggcgtgctgtaccggacgacaggggtaggtaggtaggtaggtgtagctagctcggcgagcgagggagcaatccggccaacagcacacgcgtcgatcgccatgccgagaagcggcggcggcggcaatggcggtggcattagtagtagtagtagggtgatgcccaacctcccggccgggttccgcttccaccccacggacgaggagctcatggtgcactacctcatgaggcaggccgcctccatgccgtgccccgtccccatcatcgccg

SEQ ID NO: 30085 - DNA, 307 bp, Zea mays
caaggagggcctcgccatcgtcaacggcacgtccgtgggctccgcgctcgcggccaccgtgatgtacgacgccaacgtcctggccgtcctgtcggaggtcctgtccgccgtcttctgcgaggtcatgaacggcaagcccgagtacacggaccacctgacccacaagctgaagcaccacccggggtccatcgaggccgcggccatcatggagcacatcctggatggcagctccttcatgaagcaggccaagaagttgaacgagctggacccgctgctgaagcccaagcaggacaggtacgcgctccgc

SEQ ID NO: 30086 - DNA, 309 bp, Zea mays
  unsure (1)..(309): unsure at all n locations
gcgcagtccgtacatttccccaaggcacggctccctgtcnccgccgccgtctccgccgctactgcggctgttcacgcggaggatagggtttcgtcgctgactcaagtctccggcgtgctggggtcgcagtggggcgacgagggaaagggcaagctcgtcgacgtgctcgccccccgcttcgacatagtcgcgcgttgccaggggggagcgaacgctggacataccatctacaactcagaaggcaagaagtttgctctgcatcttgttccatctggtattctccatgacaggacactgtgtgttgttggc

SEQ ID NO: 30087 - DNA, 305 bp, Zea mays
  unsure (1)..(305): unsure at all n locations
ctcagctcncatatccgctcncctacctctccagcatcctcncgtctccgtcgtctcgtctccgctcctcacctcgccagccatgggcaagatcaagatcggaatcaacggtttcggaaggatcggcaggctcgtggccagggtcgccctgcagagcgaggatgtcgagctcgtcgccgtcaacgaccccttcatcaccacggattacatgacgtacatgttcaagtacgacaccgtgcacggccaatggaagcacagcgacatcgccctcaaggactccaagacgctcctcttcggcgagaagc

SEQ ID NO: 30088 - DNA, 307 bp, Zea mays
ggggagaagaacatgtgcgtggtcggagccatcaacaactacacggcggcgctgaaagactcatcaagtccttttgatccgacggagagcttgatgttcctggcgcacttcgtcggcgacgtccaccagcctctccactgcggccacaccgacgacctcggcggcaacaccatcgtcgtccactggtaccgaaggaagaccaacctgcaccacgtatgggacgtgaacgtcatcgagacggccatgaaggacttctacggcaacgaccagagcaccatgatacaggccatccagcagaacattacgg

SEQ ID NO: 30089 - DNA, 307 bp, Zea mays
ccggaggagggagcgtctgcttcgaccggatgttcggtttcggggactcgctcacggatactggcaacttcctgctctccgtgcctgacgacttcccggaccccgcgcggaacctcccctacggccagaccttcttcggccgcccctccggccgctattccgacggccgcaacctgctcgacttcttcgcagaggcatttgggttgccatatgtgccaccttacctaggcagtggggacttccagaatggcgcaaactttgcagtcggcggcgcaactgctctcaatggctcgttcttccgtgagcg

SEQ ID NO: 30090 - DNA, 305 bp, Zea mays
cgccctcggcttcttcctcccctccctgaccgctgccgcgacctctcggcgaaaccctaacctaccttagaccccgccgccgccgcccaagggagagagagacttgcacatcaaagggcgtccgatggggaagaagaagaagcgcgtcgataaggtcttctgctactactgcgaccgcgagttcgacgacgagaagatcctcgtccagcaccagaaggccaagcacttcaagtgccacgtatgccacaagaagctctccaccgcctctggcatggccatacacgtcctccaggtccacaaggagt

SEQ ID NO: 30091 - DNA, 303 bp, Zea mays
ccgtcatcgatctcgtttcaaatccatccatcctcgtttcctccgtctcgcagcatctcaaccccatggccaagatcaagatcgggatcaatgggttcggcaggatcggaaggctggtggccatggtggctctgcagagtgacgatgtcgagctcgtcgccgtgaacgaccccttcatcagcaccgactacatgacctacatgttcaagtacgacactgtacacggacagtggaagcaccatgaagtcaatgtgaaggactccaaaacccttctctttggtgagaatgatgttgctgtgtttg

SEQ ID NO: 30092 - DNA, 303 bp, Zea mays
gtcgccgcgggcaacgccgtcacgtcacgtgcatcacgacaatctcctcctccgcctcgtcttcctgccaggccgcgggagcaccagcccagcggcagatcagtcgaggcgggcgattccagggtttagagaggagcggagatggtgaaggtcatccaggggcgcccggccgagatggggttccggatgccggcggagtgggagccgcacgagcagtgctggatgggatggcctgagcgtccagataactggagggagaatgctggtccagctcaagaggtatttgctagaactgcaattgcc

SEQ ID NO: 30093 - DNA, 303 bp, Zea mays
ttgaaaaaaaaaacaggcaaggaaaatggctccgaccgccgccaaggacagtggctccgccgatcgctggcgcgaggtgcaggcgttcgaggacagcaagctgggtgtgaagggcctggtcgactccggcgtcaagtccatcccggccatgttccaccacccgccggagtccctcaaggatgtcatttctccaccagctctgccctcctccgacgatgcgccggccatcccagtggtggacctgtccgtggcgcggcgcgaggatctggtggcccaggtgaagcacgcggccgggacggtggg

SEQ ID NO: 30094 - DNA, 302 bp, Zea mays
cattgcattttgggtgattgtccatctttatccctttctcaaaggtttggttggaaggcaaaacaggacaccaacgattgtcatcgtctggtccattctgctggcttcaatcttctcgctcctttgggttcggattgatcctttccttgcgaaggatgatggtccgcttcttgaggagtgtggtttggattgcaactaggatgtcagtgcatcagctcccccaatctgcatatgcttgaagtatattttctggtgtttgtccccatattcagtgtctgtagataagagacatgaaatgtccc

SEQ ID NO: 30095 - DNA, 301 bp, Zea mays
atgctcctgagtggtacttccaacagaagatagactacctgaaagacaaggttgctgcttcatttgttagggagaggagggcgatgaagagagaatacgaggaattcaaggtaaggatcaatgccttggttgcaaaagcccaaaaggttcctgaggaaggatggacaatgcaagatggaagcccctggcctggaaacaacgtacgcgatcatcctggaatgattcaggtattccttggccaaagtggcggtcgtgatgtggaaggaaatgagttgcctcgcctggtttatgtctcgagaga

SEQ ID NO: 30096 - DNA, 302 bp, Zea mays
  unsure (1)..(302): unsure at all n locations
gcncgaggagatcggcgcgggcgaccagggccacatgttcgggtacgccaccgacgagacccccgagctgatgccgctgagccacgtgctggccaccaagctgggcgcgcgcctcaccgaggtgcgcaagaacggcacctgcgcctggctgaggcccgacggcaagacccaggtgacggtggagtacgtgaacgagggcggcgccatggtgcccgtccgcgtgcacaccgtgctcatctccacccagcacgacgagaccgtcaccaacgacgagatcgccgccgacctcaaggagcacgtca

SEQ ID NO: 30097 - DNA, 296 bp, Zea mays
aacaaggacatcacagcacaaatcatctctgctagtatagcaggtgatatggttcttgcttctgcttactcgcatgagttgccacgatatggtcttgaagttggtctgaccaactatgcagcagcctactgcactggccttctgttggctcgccgtgtgctcaagacccgtggtttagataaggaatatgagggccatgttgatgccactggtgaggacttctctgttgagccagctgatgagaggaagcctttccgtgctctcttggatgttggccttattaggactaccactgg

SEQ ID NO: 30098 - DNA, 305 bp, Zea mays
acagcctccgcctcccccaccccctccagagaagactcactttggtggcctcaaagatgaggatcgcattttcaccaacctctatggtctgcatgaccctttcctgaaaggcgcgatgaagagaggtgactggtataggaccaaggatttggtgatccaggggtcagcactggaaagctcccgctatggagactacggtcttagggcactggaggtgcaggttttccttctggtctcaaatggtcctttatgcccaaggtttcagatggacgcccttcttatcttgtcgttaatgctgatgagag

SEQ ID NO: 30099 - DNA, 302 bp, Zea mays
  unsure (1)..(302): unsure at all n locations
ccgacataagtgcactggtgtacgacgattcacttcacgctttcctgccgtatgaccgccagtggataaaacagaagctgtttcagcacctgaagcggctggcgcacagntagggtatcatcaccgctggcttttgacgtgcatgcgtcgtggggagaaccccctcacctaagccttaaggctttgtttgggtgctctagtattaacctcaattcatatgtattgaggtgaattaaggtgtacattagtttaatttacaactcagggcttgttcggttagctctcaatccatgtggattgag

SEQ ID NO: 30100 - DNA, 157 bp, Zea mays
cgacgacgctggtacgaggtgggcggcgcgctccggtggaggcgaacggcggacgcgcgtcatggtgtacgtccagggccctgacgccggcgtcgacctcatggtcgcggggctccaggtgttccccgtggaccggaaggcccgcgtcaagcacctc

SEQ ID NO: 30101 - DNA, 301 bp, Zea mays
taataagctaatagcagcgccacgcaccgacaccaatacgccatgggttccatcatggagcaacgctgcaacaacgatccgcaggcgctgctcgacgctcagctcgagctctggcacagcacgttcgcgttcatcaagtccatggcgttcaagtcggcgctggaactcggcatcgccgacgccatccactgccacggcggcaccgccacgctcacccagatagccaccaaggccgcgctccacccgtccaagacaccgtgcctgcgcaggctcatgcgcgcgctcacagtcgccggcatct

SEQ ID NO: 30102 - DNA, 281 bp, Zea mays
ctcacctccaacctggccggcagccgcaaccccagcctggactacggcttcaagggcaccgagatcgccatggcctcctactgctccgagctccagtacctgggcaaccccatcaccaaccacgtgcagagcgcggagcagcacaaccaggacgtgaactccctgggcctcgtctcggccaggaagaccgccgaagcgatcgacatcctgaagctcatgtcgtccacctacatcgtggcgctgtgccaggccgtggacctgcgccacctcgaagagaacat

SEQ ID NO: 30103 - DNA, 298 bp, Zea mays
ctcctttctggagcagctagggttccgtcctcgatccgatccgccgagtgcacaccacctttccccactccgatcgaatcgatggccgccgagggcgagaagaagatgataaccctcaaaagctccgatggcgaggagttcgaggtggaagaggcggtggcgatggagtcgcagaccatccgccacatgatcgaggatgactgcgccgacaacggcatccctcttcctaacgttaactccaagatcctatccaaggtaatcgagtactgcaacaagcacgtacatgccgccgccgccg

SEQ ID NO: 30104 - DNA, 165 bp, Zea mays
gatggtatcgggctccagaggttctactgcaatcttcagtttatacacctgctattgacatgtgggcggttggtgctattttggctgagctttttacactgtccccactttttcctggtgaaagtgaaactgaccagctttacaaaatatgcactgtgcttggga

SEQ ID NO: 30105 - DNA, 296 bp, Zea mays
  unsure (1)..(296): unsure at all n locations
cgncgcccctctccctcagtaaacccccctctcttcttcgcgcggtctgctcgttcgatctgtgcagcagatctgaggtctcgagcgaccgtgaagcagcttcaatcgtcggcatggcgctcgtattgcatagtggggctggaaacaagaatgccttcaaagcacttattgctgcagaatacagtgggatcaaggttgagttgaccaaggattttgagatgggtgtctccaacaagacccctgagtttcttaagatgaacccccttgggaaggttcctgttctggagactcctgat

SEQ ID NO: 30106 - DNA, 297 bp, Zea mays
ggcaaagcagaagttgcggttggcctcgtcctcctcttctccgtcgcggctcagatctctgcgtgcgtcgatggcgtcgttctcggaggctccccccgggaacccgaaagccggcgagaagatctttaagaccaagtgcgcgcagtgccacacggtcgacaagggcgccggccacaagcaaggtccaaacttgaacggtctttttgggagacagtcgggtaccactgcaggctactcctactctgcgggaaacaaaaacaaggctgtagtctgggaagaagacactttgtatgagta

SEQ ID NO: 30107 - DNA, 286 bp, Zea mays
cgatgttgcaagtacatctgggaaatccattgcaagcttacaggtggaagcatctgatttggcaaacttccttaccatggatcggaatgggggttaccgaggttcacaaactcttctaagatctgtattatcagagaaacaagagctgtgcttctctgttgtctcattgctctggcagaagctcatagcttctcctgaaatgcagatgtctgcagaaagtacatcagctcaccaaggatggaggaacgttgttgatgcactttgtgatgtcgtttcagcctcacca

SEQ ID NO: 30108 - DNA, 292 bp, Zea mays
gtcggaggtggaggacgaggcggcgacgccgctgctcgccaacggtgcagccgacgtccgccggagggtgcgccgccgcgacgcttcctgtcgtttgattttcgttttctcttttctcggatttggctgcttttatgagccctgatcttgtccggcgggtgccgtggtgtgcagagggaccaggcgaaggcaattctgtccacgcaggccgtcaggatcgccaccaaggccgagcagcatgagcgcttcatctttaaggtcacacacttgctgggtgttcttggatttgggg

SEQ ID NO: 30109 - DNA, 293 bp, Zea mays
agtgctgccagtagagctctcagaactcgggaaaaatgtcagaggccgccgtgcgtgtgatcggcctatggccgagcccgttcgtgatccgcgtcctgatcgccctgaagctgaagggcgtcgagttcgagttcgtggaggaggtggtgggcaggaagagcgagctgctgctgaggtcgaacccggtgcacaagaagatccccgtcctgctccaccacggcaagcccatctccgagtctctgatcatcgtccagtacatcgacgaggtctggtcctccggcgcgccggccttc

SEQ ID NO: 30110 - DNA, 293 bp, Zea mays
cccgcgtcaaacaaatctagggttccaagcgagcgaataccttcctccgcctgccgatctccccgcatctctcgggctaagacgattcgaggcacgagcgaagatgccgcagcggcattcgaaaaacaacaacgacctcgccttcttcacgtacgaggagaagcggaagctcgggtacggcacgcagcgggagcgcctgggaaaggactccatcaagcccttcgacgcctgctgcctctgcctcaagccgctcatcggcccgctctgctgccccaagggccacacattctgta

SEQ ID NO: 30111 - DNA, 290 bp, Zea mays
gacaagtactttgccagggagaaaaagcagaaggtgaagaagacggagggtgagctttttgagacagagaaggaggcgtccaagtctctgcctgatttcaaaaaggatgaccagaaggccgtggatgctgctctgatcaaggctattgaggctatcccagagctgaaggcctatcttggcgctcggttctcccttagggatggtgacaagccccacgagatggtcttctaaaccgagttttggagttcggaggaagtcgctttggctgtgctctcttgtgacaagcccca

SEQ ID NO: 30112 - DNA, 287 bp, Zea mays
gctcggatcaggctgtcattaacaaggagaggagaggcgactacctagggaagaccgtccaggtagtgccgcacaacacggatgagatacaggactggatcgaacgcgtcgcggtggtcccagtggacggcaaggaagggcctcctgacgtctgcgtcatcgagctcgggggcactataggggatatcgagtcaatgcctttcattgaagcgttaggtcaattctcgtaccgtgttggacctggaaacttctgtctcgttcatgtcagtcttgttccggttctaaat

SEQ ID NO: 30113 - DNA, 117 bp, Zea mays
actgggtcactcagggtcattggccttttccgtcagatcatattatggagggatatgcttatatactcaccccacctggcatccccacggtgttctatgatcacttctatgaccagg

SEQ ID NO: 30114 - DNA, 188 bp, Zea mays
  unsure (1)..(188): unsure at all n locations
gctcgtcttgcanatgatgatgatgttatgcttcttgactgggtgaaaggactgctgaacgagaaaaaggtggagatgttggtggacccagatctacagaatgcctacgaggagatcgaggtggagaaccttatccaggtggcactcctctgcacgcagggctccccgttggagcgtccaaagatgtc

SEQ ID NO: 30115 - DNA, 118 bp, Zea mays
  unsure (1)..(118): unsure at all n locations
cggcanaggtccagcgtgccgtgtgcatgatcagcaacaacaccgccgttgccgaggtgttctcacgcatcgaccacaagtttgaccttatgtacgccaagcgcgcattcgttcactg

SEQ ID NO: 30116 - DNA, 141 bp, Zea mays
gcctctcgagtctcgtccacccgtcatcctcctagctcctctactcgacagtcgccatgggcaagattaagatcggaatcaacggcttcggaaggatcggcaggctcgtggccagggtcgccctccagagcgaggatgtcg

SEQ ID NO: 30117 - DNA, 162 bp, Zea mays
cgcgtgcagcgacgaactcgaatcgccgagaggggtggcttctctccccaccggttcgtgttcaggttctggttcgtgggcgagagggaagagatggcggcgtcggacgttgagtaccgttgcttcgttggcggcctcgcctgggccaccgacgaccactcc

SEQ ID NO: 30118 - DNA, 177 bp, Zea mays
cgcgtgcgaaccaagcagaccacaacaagaagaagcgtagtcgtcgccggaaggaaaggcgcggacaagatgtcgtggcaggcgtacgtcgacgagcacctgatgtgcgagatcgaaggacagcatctcagcgccgccgccatcgtcggtcacgacgcagcgtttgggcgcagtccg

SEQ ID NO: 30119 - DNA, 170 bp, Zea mays
gtgagatcatcagccgttttgagaagaagggcttctacctcaaggccttgaagcttgtgaacgtggagaggtcgtttgctgagaagcactacgccgatctcgcctccaagcccttcttccagggcctcgtggactacatcatctctggccctgtggtggccatggtctgg

SEQ ID NO: 30120 - DNA, 173 bp, Zea mays
agcggcggcggcggacaaacgcaggcgaaggcgagggtgtgagggaaggagcaccagccatggtgcacgtcaacttctaccgcaactatggtaagacgttcaagaaaccaaggcgtccttatgagaaggagcgtcttgatgctgaactgaagctggttggtgagtatgggctg

SEQ ID NO: 30121 - DNA, 177 bp, Zea mays
cggttcggtcctgagaaggaggaggacaaggctgcaggcgccttctcatacatctccttcggtggcggcaggcatgggtgcctcggtgagcccttcgcctacctgcagatcaaggcaatctggacgcacctactgaggaactttgagttcgagctggtatcgccattcccagagaac

SEQ ID NO: 30122 - DNA, 130 bp, Zea mays
agtaaagccggctttatgtgcctagaaactagtagctagtgtttgctgctgtcgaatgacactatgcaatgtgatctggaacctggtttcttgggtgcgacgcttgtagccgtgttatgactgtcgtccg

SEQ ID NO: 30123 - DNA, 177 bp, Zea mays
  unsure (1)..(177): unsure at all n locations
cgtgaacccgccgccgacgcagcagcaggagacgcgccaaggagtgcccgcaatgaggcgactatgagggccaagtggaagaagaagcgcatgaggaggctgaagaggaagcgccgaaagatgaggcagagatccaagtangctgatggggattgtggatggtggtgtcggcatagt

SEQ ID NO: 30124 - DNA, 172 bp, Zea mays
cggaagtacctgttcgacctccagaacaaggtgtccatgagatggatcctgaacctgggcccgagcctgggcatcgtgcgcgtgcccgggatcggcctcatctacacggagctggtgacgggcgtgccggccatcttctcgcactttcgtcacaacctgccggcgttccaca

SEQ ID NO: 30125 - DNA, 169 bp, Zea mays
agaagcttctgagatgtttgatctgcacaacgttgtcatatctatacctctgccagcacttcgggaggctccgagtgttagacagatcgatggagagtggaagttcgactcaagaaactctgtgttggaatggtctattctccttatcgatcagtcgaatcgcagtggt

SEQ ID NO: 30126 - DNA, 174 bp, Zea mays
  unsure (1)..(174): unsure at all n locations
ctcctgcgctgcgccgtccttcacctccgccgccgaatccgagactctgatctcgggttcaccgcagcgcacagagcacccccgactcncgtcccgatccgcgctctcctctacgacgcttcagtcatggcaggaatggcacccgagggttctcagtttgatgctaagcactat

SEQ ID NO: 30127 - DNA, 209 bp, Zea mays
cagaaaaccctagccgccgccaccgaagcggcctcccaggtaagcaagagcgtccaccccgccgccgccatgaagcgcaatccccgcgtcacgagctctcgccggaagtgccgcaaagcgcacttcacggccccgtcctccgtccgccgcgttctcatgtccgccgggctgtcgacggagctccgccacaagtacaacgtgcgctccat

SEQ ID NO: 30128 - DNA, 294 bp, Zea mays
ggcggggaagcaacgaattcttcttgcagggaagattcatatttgggcctgatgtgagatctgtgtttctcactatgttcctcatcatcgcaccagtggttgtcttctgtgtgttcgtcgcaaggcatctcataaatgatttccccgatagctggggaatctcagtgatggtagtagtggttgtcttcactgtttatgatttgacgctgcttctttgtaccttgggacgagccaaggacggcagctgatatcagggacttggaagcagggttcgggggcatgtttgacgagaaa

SEQ ID NO: 30129 - DNA, 294 bp, Zea mays
  unsure (1)..(294): unsure at all n locations
ctcncccaaaaccccagagcggagaagagcgcaagatgttcggcttcgggcaccacggccagaacccgccggctcacggcgcgtgcaccagcccaccttcaagatcttctgcaagtccgacgaggggtactgcctcaccgtccgcgacggcaacgtggtgctggcccccgccaacccgcgcgacgagcaccagcactggtacaaggacatgcgcttcagcacccaggtcaaggacgaggagggcaaccctgcgttcgccctggtcaacaaggccactgggctcgccatcaagca

SEQ ID NO: 30130 - DNA, 291 bp, Zea mays
gaagggctcacgatcgtggataacaagacctccagtattattgaggaaacaaagaaaattcagatcaggaggaaacctgctggctcaagccctcacgtgccgaattcagcggtagatacgcatacgctcagcacccctgatctttcactccggcagcctgaatctgctgcccaggagactggactgaaagcttctcgcgacgttgctaatgcaatggctgctaaagcaaaacttgtactccgtgaactaaaatctgttaaagcagatctagcctttgcgaacagcgatgtg

SEQ ID NO: 30131 - DNA, 292 bp, Zea mays
tgaagatggttggttgcacactggagacataggtctgtggctacctggaggacgtttaaagatcatcgataggaaaaagaacattttcaagttagctcaaggagaatacatagctccagagaagattgaaaatgtctatgccaaatgcaagttcattgcccaatgttttatatatggcgacagtttcaactcttccttagttggtattgttgcagttgaaccagaggttatgaaggcttgggctgcatctgaagggatccagtgcgaagacttgaggcagctttgtgctgac

SEQ ID NO: 30132 - DNA, 290 bp, Zea mays
ccgacgaggagtacatctgctgcctggaggaggcagagatggtgcggccaggtgagcacgtgaccatcctcacgtactcccgcatgaggtaccacgtgatgcaggccgccaagacgctggtgaacaaggggtacgaccccgaggtcatcgacatcaggtcgctgaagccgttcgacctgcacacgatcgggaactcgatcaagaagacccaccgcgtgctgatcgtggaggagtgcatgcggacgggcggcatcggcgccagcatgcggtcggccatcatcgacaacttc

SEQ ID NO: 30133 - DNA, 292 bp, Zea mays
gatgacttgtgcaaattgcttccatatgtcagtcgtcgtcgtcagacacctgaactttgtcgattgcttgggttgtcgcagaaaatgccaggtgtcattgaagttctggtggaaagtggaagacctattgatgcaattaatttggcttatgtgtttgagcttactgaacaatttgaaccagtacaccttcttaaagcatatctaagggatgttaagaaaatgtcacacgccaggaatgtcaaaacttctcctggagcacagaatgagatgaatgaacgtgagttatctgcgc

SEQ ID NO: 30134 - DNA, 287 bp, Zea mays
gatcctcgtcaatgcctggtacctcgccaacgaccccaagaggtgggtgcgccccgacgagttccggcccgagcgcttcctggaggaggagaagtccgtggaggcccacggcaacgacttccgattcgtgccctttggggtcggccgccggagctgccctgggatcatcctcgcgctgcctatcatcggcatcaccctgggccggctggtgcagaacttccagctgctgccgccgccggggctggacaagatcgacaccacggagaagcccggccagttcagcaacc

SEQ ID NO: 30135 - DNA, 283 bp, Zea mays
atttcagtagaaaacaaagacggcatgtcaagatcagccatatttaaatttatttcatcaattgataaaagattccggatactttgttatctgatgaagttctgggctaaggtacatgatgtgaactgccccaaagatcgaacaatgagctctatggcaattatttctttagtttcttttcatttacagactcggtgtcctccaatattacctgcattttctgccgtattgaaagatggtacagattttgcaagtattgagaagaatgtatcactattccagg

SEQ ID NO: 30136 - DNA, 289 bp, Zea mays
gtaagaacaaggaatgcaggaagcacaccctgcacaaggttacccagtacaagaaaggtaaggatagcctttcagctcaagggaagcgacgttatgaccgcaaacagtctggatatggtggtcagacaaagcctgttttccacaagaaggcaaaaacaacaaagaagattgtgctgaagctgcagtgccagagctgcaagcactactctcaacacccgatcaagaggtgcaagcactttgagatcggtggtgacaagaaaggcaagggaacctctctgttctaagcgta

SEQ ID NO: 30137 - DNA, 281 bp, Zea mays
gtccgcaagtcctaatgtgagggagcctcctgcgcttgttttcagcttctcacggatggaagacagactcaaggctgcctacaaagccacaactgagggcaagttcccagaagcactgaggcagttccttagcatcttacataccattccagttatcgtggtggactcacggagagaagttgatgaggtgaaggagttaatcgagatagtgagggagtatgtccttggtctgaggatggaactcaagagaaaggaactgagggatgatgtgacccgtcaac

SEQ ID NO: 30138 - DNA, 285 bp, Zea mays
  unsure (1)..(285): unsure at all n locations
gttggcnccaggccaagtggagctctcctcacaggcgggggcaatccctgctatcaccgaagacgaggatgaaccacataaccctggattgtggcctcttttgtctctgaatggttcagatggcagcctgcaggggtttgaggagctattggcctcagtacttggaaagaaggcaggcgagaagggtaccttcaagctactgaaggcacgggcctcggctcaaacctatgtcaagatggcattcacggtggagaagaagcttgctgaaggggatgtgaactggtc

SEQ ID NO: 30139 - DNA, 288 bp, Zea mays
agcccgccttcgtcttcgacggccgcaacatcgtcgacccggagaagctgagggagatcggcttcatcgtctactccatcggcaagccgctcgacgcctggcttaaggacatgcccgcggtcgcttaattcgtctgaggtgctccattggattggatccggggaaggaagaggaactggttgaccattcttcattacagtttgttttttgcaggattcttaaaagttggacggcgctgctagtattccatgtttcgtgttttcatattggaggacgtctgtagatgta

SEQ ID NO: 30140 - DNA, 138 bp, Zea mays
ccactcgtcttcgtctagccgccgaccgccaccaccatggcacccggcctctacaccgacatcggcaagaagaccagagatctgctgtacaaggactacaacacgcaccagaagttctccctcaccacctgctccccc

SEQ ID NO: 30141 - DNA, 195 bp, Zea mays
caggacgccgacagcaaggtggcctgcgagacctgcaccaagaccaacatggtgatggtgttcggcgagatcacgaccaaggcgaccgtggactacgagaagatcgtgcgcgacacctgccgcgagatcgggttcacctccgacgacgtgggcctcgacgccgaccgctgcaaggtgctggtgaacatcgagcag

SEQ ID NO: 30142 - DNA, 280 bp, Zea mays
tgcgaaggcgaccctccctccttcgctccttccgcgccgcctcccggccgtcgccgccatggtgaagtactcgcaggagccgggcaaacctaccaagtcggctaaggccatgggcagggatctgagggtccacttcaagaacacaagggagacagcctttgcgcttcgcaagttgtctttgaccaaggctaagcgataccttgaggatgttattgctcacaagcaggcaattcccttccggagatactgtgggggtgttggtcgcaccgcgcaagctaag

SEQ ID NO: 30143 - DNA, 279 bp, Zea mays
caactacttctgctgtttatcgcacagctcaaataattgcttcaataccaaatttgtcatataagaacaaggtatttccagaagcactttttcatcaattgctgttagcgatggttcaccctgatcatgaaacacgtgttggtgcacaccgcatattttctgttgtccttgtcccatcttctgtttctccttttcccaatttgaaatccctagatcagtgtagaaagcatgatgtccagaggacactctcgagggttgtatctgtcttctcatcttcag

SEQ ID NO: 30144 - DNA, 268 bp, Zea mays
agggactaaaggtcattgcatgtgttggtgagacacttgagcagagggaggctgggtctaccatggaggttgttgctgcacaaacaaaagcaattgctgagaagatcaaggactggagcaacgtattgttgcctatgaaccagtttgggctattggaactggtaaagttgccaccccagctcaggctcaggaagtgcacgcctccctgagggattggctaaagaccaacgtcagccctgaggttgctgaatctactaggatcatttac

SEQ ID NO: 30145 - DNA, 278 bp, Zea mays
aaggaccctgaaggggaccttctttggcaactataagccacgcactgatctgccaaatgtggtggagctgtacatgaaaaacgagctggaggtggagaagttcatcacgcacagcgtcccgttcgccgagatcaacaaggcgttcgacctgatggccaagggggagggcatccgctgcatcatccgcatggagaactagatttcgctgtctagtttgtgatctggcctgggcttggggttaataaaagaggcaatgctagcctgccctttcgatgagg

SEQ ID NO: 30146 - DNA, 260 bp, Zea mays
ccaggtgctaaagattttgttaaaaggttactagtgaagaatccaagggccaggctaacagctgctcaagctctctcacatccgtgggtaagagaaggaggggaagcatccgatatccccgtcgacatatctgtgttatcaaacatgcgtcagtttgtcaagtacagccgtttcaagcaattcgcgcttcgggctctggcgagcacccttaacgaggaagagctatcagatctgaaggatcagtttgatgcaattgatat

SEQ ID NO: 30147 - DNA, 116 bp, Zea mays
acgacatccactcgcccaggatcccctccaccgaggagatcgcggaccgcgtcaacaagatgctcgccgtgctcgacaccaacatcctctgggtgaaccctgactgcggtctcaag

SEQ ID NO: 30148 - DNA, 385 bp, Zea mays
cagaagaaggccggcgccatgaacgcgctgacccggtgctccgcggtgctgtccaactcgcccttcatcctcaacctggactgcgaccactacatcaacaactcgcaggcgctgcgcgcgggcatctgcttcatgctcggccgcgacagcgacacggtggccttcgtgcagttcccgcagcgcttcgagggcgtggaccccacggacctgtacgccaaccacaaccgcatcttcttcgacggcacgctcagggcgctggacggcatgcagggccccatctacgtgggcacggggtgcctgttacgccgcatcacgctctacggcttcgacacgccgcggatcaacgtgggcgggccgtgcttcgcggcgctgagcggcatgttcg

SEQ ID NO: 30149 - DNA, 383 bp, Zea mays
cagatttttacaaccacaagggacaaagaaagatgaaagaacaattgtttgtggacaagtttcaggaaacagtccagcatactttcttagattatatatccagtggatttgagctcaatttcatggtggctatagattttactgcttcaaatggagacccacgtgtaccccagtccttgcactacattgacccctctggcagacctaattcgtatcaacaggcaatgctgggggttggcgaagttctgcagttttatgacaatgataggcgatttcctacgtggggttttggagcaagggtacatggttatgtatcacattgctttaacttgaatacagctacaaatgactctgaggtggttggagtttgaagcatcatgtca

SEQ ID NO: 30150 - DNA, 229 bp, Zea mays
cagagtctgaccacctgacactcctgaacgtgtatcttcagtggaagtcgaatcagtatcgaggcgattggtgcaacgaccacttcctccatgtcaagggtctccgcaaggctcgtgaggtgagatctcagctgctggacatactgaaaaccctgaagatccccctgacatcatgccatatggaatgggacgtggtgaggaaggctatctgctctgcgtacttccacaa

SEQ ID NO: 30151 - DNA, 366 bp, Zea mays
ctttgcagcaattactctcatttcagcagactttattaggacagcttggtcaacatcaacctagccagggcgggaacaatgcaggcagtgccacaggtacacggggaaaccctagccttgacaccttgatgagcatgctcagcgggcttggttcgggaggtggtctaggtgttccaaatacctccagcgtgccaccggaggagctctatgccacacagcttactcaactccaagaaatggggtttattgacaccgcggagaacattcaagcactggtcgctactgctgggaatgtacatgctgcggtggaacgccttcttgggaaccttggacagtagctaacccgagcgagccagacactattcg

SEQ ID NO: 30152 - DNA, 374 bp, Zea mays
cagccggctcacttctccaggaaagtgttcgtcctcatggcgccgccgcagccgaagtcgggcctcttcgtgggcatcaacaagggccatgtcgtcaccaagcgcgagcagcctctgcgcccgtcccaccgcaaggggaaagcaacgaagagggtgtccatggtcaggggccttatcagagaggttgctggctttgctccttatgagaagcgtatcaccgagcttctgaaggttggcaaggacaagcgcgctctgaagcttgccaagagaaagcttggaactcacaagagggcaaagaagaagagagagagatgatgggcgtcctcaggaagatgagatcggctggtacgcacactgacaagaagaaataaagc

SEQ ID NO: 30153 - DNA, 222 bp, Zea mays
cgaccagaagaacattctatgaatttatagatcgttttggtattcttgcgcctgatgttttgagtggaagttctgatgaggtcagtgctgtaaggaggttgttggacaagatagatcttcaaggttaccagattggcaagacaaaagtattccttcgtgctggtcagatggctgaacttgatgctcgtagaaatgaagtgctagggcgttcagctagcatga

SEQ ID NO: 30154 - DNA, 375 bp, Zea mays
  unsure (1)..(375): unsure at all n locations
ctcgaggtggcggcgctcnccccgtcttcttcttcttcttcttcctgtactatatagcctcccctcgcaaatcgtcactgacgttcattccgcttgcttgattgttccaggtattagcagtcgaccggttcctcggagcacgatgaagtttgttgctgcctacctgcttgctgtcctcgctgggaacgccagcccctccgctgacgatttgactgccattctggagtcagttggctgtgaagttgacaatgaaaagatggaactcctgctgtcccaactgagcggtaaggacatcaccgagctcattgccgcgggcagggagaagttgcttcagtcccatgtggtggcggcggtgtcgctgttgcggcagctgca

SEQ ID NO: 30155 - DNA, 378 bp, Zea mays
gacgagcgaccagctctactgcccccttccggccttcggcgaccgtgacgagcaacgacgaccacggcgacgatggccgcttcctccctctgccacgggcacttgctcctgtttctcctcgtgtccgtcacatcggcctgcctcggtaccgcggcaggcatcaagccgggtctggagagggttacacgatcgccggccgcgtcaagatcgatggcatgagtgagaagggctatggtcttccagccaagacatcaaacacaaaagtgatacttaatggcggccaaagggttacatttgccaggccagacggctactttgcattccacaacgtgccagctggaactcatctgattgaggtctcctcaattggttacttct

SEQ ID NO: 30156 - DNA, 363 bp, Zea mays
  unsure (1)..(363): unsure at all n locations
aggcagctcaggatattgcgttggcggaactggcatctactcatcccataagacttggacttgcacttaacttctcagttttctattacgagattctgaactctccagacaaagcttgcaaccttgccaggcaggcgtttgatgaggctatttctcagttggatacgcttggcgaggattcatacaaagatagcaccttgatcatgcagctcctgagggacaacctaaccctatggaccgctgacagcacaacggaggacggcatcgaggagggcaatgaggcctcgaagggtgatgctggtgagggtcagtagtctggtanaacctcngattgatggttcggcatgttttgaagtctactgt

SEQ ID NO: 30157 - DNA, 220 bp, Zea mays
gaaggattggtatgacatcaaggcaccgtcggtgttcagtgtgcgcaacatcgggaagactctcgtatccaggacacagggtaccaggattgcttctgagggtctgaagcacagagtctttgaggtttgcctagctgatcttcagggcgacgaggatcaagcttacaggaaaatcaggctccgtgctgaagatgtgcagggcaggaatgtgctcacaaac

SEQ ID NO: 30158 - DNA, 224 bp, Zea mays
acagtccgcaacggcgccgtgtgcctcgcgcccaccaacccgcgcgacgagtaccagcactggatcaaggacatgcgccacagcaacagcgtcaaggacgaggaagggtacccggccttcgcgctcgtcaacagggtcaccggcgaggccatcaagcactcccagggcgagggccacccggtcaagctggtgccctacaaccccggctaccaggacgagtcggt

SEQ ID NO: 30159 - DNA, 341 bp, Zea mays
agcactctgagttcatcagctactccatctccctgtggaccgaaaagacaacggagaaggagatttctgatgatgaagatgaggaagagaagaaagacgctgaggacggaaaggttgaggatgttgacgaggagaaggaagagacagaaaaaaagaaaaagaagatcaaggaggtttctcacgagtggtcattgatcaacaagcagaagcccatctggatgaggaagccagaagagatcacaaaggaagaatatgctgccttctacaaaagcttgacaaatgactgggaggagcatctggctgtgaagcacttctctgtgtgaggtcagctggagttcaag

SEQ ID NO: 30160 - DNA, 367 bp, Zea mays
  unsure (1)..(367): unsure at all n locations
ctgatgcactaaatgcaaatgctggctttgttactttcgttgtttaccctcggcatgttgagggtaaaaagctagatagaacagtttggaatttgttgacatttcatgcttatgtaagctatcatgtaaagtgttctgaaggattcatgcataccaggatgaggcgcagggttgagtcgctgatccaggcgttggaccgggcgaagtctgatgctgagaagttgaagaagttggtacacggtggatctttcaaaagactgagcctgaagaacgagggggactcgcgtttctgaagggaattggcaaatgttgttgttttccatttggctaatgacttctgttgtgggaacttacnccgttcagtttg

SEQ ID NO: 30161 - DNA, 368 bp, Zea mays
atacctcctgcgcagagggctgcattcaatgatgtgtatattgcatatgaattgatggatactgatctgcatcaaattattcgttcaaatcaagctttgtcagaggagcactgtcagtattttctttatcaaattcttcgtggcttgaagtatatacattcagcaaatgttcttcaccgtgacttgaagcctagcaatcttcttttgaatgcaaactgtgacctcaagatatgtgattttgggcttgctcgcaccacctcagaaactgattttatgactgaatatgttgtcacaagatggtatagagcaccagagcttttgttgaactcctcagaatatactgctgccatcgatgtgtggtctgtggg

SEQ ID NO: 30162 - DNA, 368 bp, Zea mays
gctgacctacagatggcaacagatagcttcaacatggacaaccttattggagagggtactttaggacgtgtgtacaaggcacaatttagtgatggaaaggttctagctgtgaagaaattaaacagtacaacactgccaaggcaatcatcagatgatttctatgagctggtgtcgaacatttcgaaattgcaccatcccaatctcagtgagcttgtgggctactgcatggagcacggacagcacttgcttgtttatgatttccacaggaatggttcactgcatgatatgctccatctctcagatgattataacaaaccacttagttggaattctcgtgttaagattgcgctgggctctgcacgtgcact

SEQ ID NO: 30163 - DNA, 329 bp, Zea mays
gcagaggccgacggaatcctcttcgggttccaacgaggttcggaatgatggcagcgcagatgaaggcgttcttcgatgccactggtgggctctggagggagcagagccttgccggcaagcctgccggcgtcttcttctgcactggatcccagggtggtggccaggagacgacagcgttgacagcgatcacccagttgacgcaccacggcatggtgttcgtgcctgtgggctacaccttcggcgccaagctgttcggcatggacgaggttcagggcggcagccctacggcgccggcacgttcgccgccgacggctcgaggtggccgagcg

SEQ ID NO: 30164 - DNA, 347 bp, Zea mays
gacagtgctacacttctgccaaacctgtaatattagaacctgtgatgaaggtggaactcaaatttccaactgagtttcagggcacagtaactggtgatatgaacaagagaaaagggatcattgttggaaatgagcaggaaggtgacgacaccattgtagtttgccatgttccgctaaacaatatgtttggatatgcaacagctattcgatcagcgactcaggggaaaggtgaatttacgatggagtacctggagcataatgttgtatcgcaggatgtgcagatgcaactagtgacctcgtaccaggcggccaagggcacagagtgattcttctttttacagaagaac

SEQ ID NO: 30165 - DNA, 364 bp, Zea mays
cgcactgttatcgtgatggacaaatctacggatgtcgttgacgcgattgctaggctgtcctacttctacaagcatgagagttgtgggcagtgcacgccttgccgagagggcacaccctggctctggatgatcatggagaggctcaaggttggtgacgcgaactggaggaaattgacatgcttcatgaggtcacgaagcaaatcgaagggcatactatctgtgcgcttggggatgctgcggcatggcctgtgcaggggcttatcaggcacttcaggccagagttggagcggaggatccgcgagcgagctgaaatggagctgttggcggcttctgcataatgtgccagccatgttgcccctgtact

SEQ ID NO: 30166 - DNA, 305 bp, Zea mays
gagatggtggaggcatcgccggagtccggcgccgcggcgaccggaggtgcctctagtacggcggcggtgcggaaggggaagtcatgcaagggctgcctctactactcgtcagtgctcaagtcccgcggttacaacccaatctgcgttgggatcccccgctccatcccccaagttcctaactacgtggtggatgaacctaaggaggaggcgacggcgcaggggcatgacctcaggcggttcaggtacgggtgcgcgggttactccatgttcgtggacaacagggacggccagggtggtgagagcga

SEQ ID NO: 30167 - DNA, 304 bp, Zea mays
agctcgccgtcagcccggacgccccggatgaagacggactgggacgaagcggccgtccagcctccatggcacggcgcaagcagccccacgatagtgaactccacgccgcccagccccgggcggcccatcgcgcctgacccggcatggctcgccggcatccagatctcgtccaccagtccaaactccccgacattcagcctcgtctccaccaacccgttcggcgtcttcaaggagtccatcccggtcggcggcggcggcgactcgtcgaagaggatgtgcacgccggggcagagcggcgcctgct

SEQ ID NO: 30168 - DNA, 293 bp, Zea mays
ctcgagccgcgcgacccgaaccgccgccgccgctcaccctccgagcgccttcctgctccacctcggttgcgcgtccctcgcgatcggaggagcagccatggccggccacgtcctcggcggcgtgaaggagaacccagccgcggccaacagcgccgagtccgacgggctcggccgcttcgccgtcgacgagcacaacaggcgcgagaacgcgctgctggagttcgtgcgcgtggtggaggccaaggagcaggtggtggccggcacgctgcaccacctcacgctcgaggccgtcg

SEQ ID NO: 30169 - DNA, 309 bp, Zea mays
ctcttcaccatctggggcgtcctccagctgctccgtcgccaccccggccgcgtccccgatctcgacctcatgttcgacaccgtcgactggcccgtcgtccgctcccacctctaccgcgggaagaacgccgagatgttgccgccgctgttccgctactgcggggatgataaaacgctggatatcgtcttcccggattggtcattctggggatggccggagatcaacataaaaccatgggatgccttgaaggaggacttgaaggctggtaataacagagtgagatggatggatagagaaccttatgcttac

SEQ ID NO: 30170 - DNA, 307 bp, Zea mays
cggctcgagggcatgcgtcgaggttccttgcgcttcagtcaggcgaggtggtcctgcagaggcgcgcatggattcagccgaacacatcttgcagttctactggcatctatattagcaataagttctatgatcgattcatgttgataccatttgtatggagccggagttttcatgctacagatcaccgttgttcgaaacacaaggactactacaaaattcttggtgttcccaaggatgcatcgcaggatgacatcaagaaggcatttcattctcttgcaaaaaagtatcatccagacacaaatagagg

SEQ ID NO: 30171 - DNA, 294 bp, Zea mays
ccacgctctccgactccccgggcctcgcgctcgtgctcgccgtcctgcccttcatcctgatgatcccattgtatcattatcagcacaagcacccacacaatttcgttttcctgggtctgttcacgttgtgcttgagcttcagcatcggtgtggcttgtgctaacacccaagggaaaatcgttctggaggctttagtgctgacggctggcgtggtggtttctctgactgcgtatgccttctgggcgtcaaagaagggcaaggaattcgggtacctggggcctatcctgtcttccg

SEQ ID NO: 30172 - DNA, 225 bp, Zea mays
gaaaaaggagctggaggtggagaagttcatcacgcacagcgtcccgttcgccgagatcaacaaggcgttcgacctgatggccaagggggagggcatccgctgcatcatccgcatggagaactagatttcgctgtctagtttgtgatctggcctgggcttggggttaataaaagaggcaatgctagcctgccctttcgatgaggaggtacatacacgctggcgatg

SEQ ID NO: 30173 - DNA, 300 bp, Zea mays
ctcatcaagctcatcggcgccaagaagaccatggagatcggcgtctacaccggctactcgctcctcgccaccgcgctcgcactcccggaggacggcacgatcttggccatggacatcaaccgcgagaactacgagctaggccttccctgcatcaacaaggccggcgtgggccacaagatcgacttccgcgagggccccgcgctccccgtcctggacgacctcgtggcggacaaggagcagcacgggtcgttcgacttcgccttcgtggacgccgacaaggacaactacctcaactaccac

SEQ ID NO: 30174 - DNA, 298 bp, Zea mays
cttccgttctcaaaccaacctaggcaattcgccgcagcctctcaccctcgcgagtcccgacctcccgcagccgccgcacagatggcacccaaggcggagaagaagccggcggccaagaagcccgcggaggaggagcccgcgacagagaaggtggagaaggctccggcggggaagaagcccaaggccgagaagcgcctcccggcgggcaagtccaaggagggcggcgagggcaagaaggggaaaaagaaggcgaagaagtccgtggagacctacaagatctacatcttcaaggtgctga

SEQ ID NO: 30175 - DNA, 300 bp, Zea mays
atcggactgtagatttgtgaggtgatcttagaaaagattaaaggagagactgcatcatggtttatcttgttgccttttctgtttatgttattggaccatactgtaatttcaagtcacttattctaccttgttcaacatgaagggtttgcatttgtctacatggaagatgaacgcgatgctgaagatgctatcagtagacttgatggaattgattttggcagaaaaggaaggaggatcagggttgagtggacaaaggaggatcgcactgttggccgaaaaagcagctcaaggaggtctcca

SEQ ID NO: 30176 - DNA, 304 bp, Zea mays
cagacacctccgccacctccaccctcgaatcgttccccaccatggcgtcgcagggatcctccgtcttcgccgcactcgagcaggccccggtagaccccatcctcggagtgaccgttgcctacaacaaggatcccagccccatgaaggtcaacctcggggttggcgcctaccggaccgaggaagggaagcccctagtgctgaacgtggtcaggcgcgccgagcaaatgttgatcaataatccgtcacgtgtcaaggagtacctaccaatcaccggtctggctgaattcaataagctgagcgctaa

SEQ ID NO: 30177 - DNA, 290 bp, Zea mays
  unsure (1)..(290): unsure at all n locations
catcnccatcgagctatccgaccgggaatccctcgtcaagtctgcgtccacggctctcaactccaaggtcgtctcccagtactccacccttctctcgcccctcgccgtcgacgccgccctctctgtggtggaccccgctcaccctgaccttctcgacctccgggacatccgcatcgtgaagaagcttggtggcaccgtggacgatactgagctcatccctggcctcatctttgacaagaaggctagccatgctgctgggggcccaactcggatggagaatgctaagatcg

SEQ ID NO: 30178 - DNA, 289 bp, Zea mays
tccgaatctctcggtggcgatggcgctctccgaccgctcccgcgagtcgctcctcccgagcttcctctacgcctcctcggcgcgctctttcgctgccacaggagccgccgcgcgcctcactgtctcctccccagcgcctgccacggctggagcaggaggcggcgtgccgttctcgatccaggcgcccaaggagaagatcgagatgtactcgccggccttctatgccgcctgcactgccggaggaatcgccagctgcgggctcacccacatggccgtcacgcctctcgac

SEQ ID NO: 30179 - DNA, 288 bp, Zea mays
acgccgcctgctggatccggcgggaatgggggcgacgataaccggaccatctgggtgggcgacctgcagtactggatggatgagaactacctccacagctgcttcggccccagcggcgaggtggtgaatattaaagtaattcgcaatagacactcgggagtttccgagggttatggttttgtagagttttactctcacgtttcagcagagaaggcactacagaatttttctggtcatgtaatgcctaatactgagcgagcttttaagttaaactgggcatcatatagt

SEQ ID NO: 30180 - DNA, 290 bp, Zea mays
accacggtcaaaacactcggccacagagcagcgcagacgcagcaagatcaatgataggtttcagatacttagggagctgttgccacacaatgatcaaaagagagacaaagcaacatttctcttggaggttattgaatatatacgttttttgcaagagaaagcgcaaaaatacgaggcaacattcccagaatggaaccaagaaaatccaacgatgcttccgtggagtaaaggccaaatcccaggagattccccgcctgacccttcacatttcgtgagaaatggatcctccc

SEQ ID NO: 30181 - DNA, 218 bp, Zea mays
cttctaattattatgattttgatgtacttgtatggtggcatatgctgcagctatgtgtagattttgaatacccagtgtgatgagcatgcatggcgccttcatagttcatatgctgtttatttcctttgagactgttcttttttgttgatagtcaccctgttgtttggtgattcttatgcagatgcagatcttcgtcaagactctcactggaaagacta

SEQ ID NO: 30182 - DNA, 290 bp, Zea mays
cccggctctcggcttcttctacacgctaccgtctcacagccgtaaacgcccctcccggatcccgctagttcgccaccgccgcccgcccgcccgccgttcgcctcatcatggccgcctcgtcgaccgccacctccgtccacgacttcatcgtcaaggatgcgagcggcaaagacgttgacctcagcacctacaaggggaaggttcttctcattgttaacgtcgcatcccagtgtggcttaaccaactccaactacactgagctggcccagctctatgagaagtacaaggac

SEQ ID NO: 30183 - DNA, 358 bp, Zea mays
cggcggacgggcgggaggtggcggtgaagcggctcttcttcaacacgcggcagtgggcggacagttcttcaacgaggtgaagctggtgagccaggtgcagcacaagaacctggtcaagctgctgggctgcagcgtggaggggcccgagagcctgctcgtctacgagtacctctgcaacaccagcctcgaccactacctcttcgacgcgttcaagaagaacgcgctggactgggagcggaggttcgagatcgtgctgggcacgcggagggcctctcctacctgcacagcgcctcggaggtccggatcatacaccgcgacatcaaggccagcaacgtcgctgctggacgacagttcaggc

SEQ ID NO: 30184 - DNA, 370 bp, Zea mays
cgacttgtttcattgattcttgaagagatcgagcttcttttgcaccacaaggtcgaggatgtcttgcaactgcggatcaagctgcggctgcggctcaagctgcaagtgcggcaagaagtaccctgacctggaggagacgagcaccgccgcgcaggccaccgtcgtcctcggcgtggccccggagaagaaggccgcgcccgagttcgtcgaggccgcggcggagtccggcgaggccgcccacggctgcagctgcggtggcaactgcaagtgcgacccctgcaactgctgatcacatcgatcgacgaccatggatatgattattatctatctagcttgtggtggtggttgaacaataataagcgaggccgag

SEQ ID NO: 30185 - DNA, 250 bp, Zea mays
acaggcgacaaggccagatcagcatctacgacccccaggtgacggaggaccagatccagcgggacctggccatgaacaagttcgactgggaccacccgatgcacctgcaaccgacgagccccacggccattaagcaggtgagctgcgtgtgggacgcgtacgaggccaccaagggcgcccacggggtgtgcatcctgaccgagtgggacgagttcaagaccctggactaccagaagatcttcgacaacat

SEQ ID NO: 30186 - DNA, 363 bp, Zea mays
cgcgcccgcacccatggcctccggtgagctcgcctgcacctacgccgccctcatcctcagcgacgacggcatcgccatcaccgccgagaagatcgccaccatcgtgaaggcggccaacatcaaggtcgagtcctactggccggcgctcttcgctaagctcctggagaagcgcagggtgaggatctaatcctctccgtgggatctggtggtggcgctgctccagttgctgcttccgccccagctgggggtgctgcagctgctgctgcccctgctgcagaggagaagaaggaagagcccaaggaggagtctgatgacgacatgggcttcagctgttcgactgagacctcgctaaccagcattagc

SEQ ID NO: 30187 - DNA, 369 bp, Zea mays
gtgaaggtcatctgcgaccacctgagcctgggagtcaagactggcctgccatacatctggcacagcaaggctagcaaccccttcgttaacttgaagaaggaatacaagggcatcttctggcaggaggacatcatccccttcttccagaacgtgaccatccccaaggactgcgacaccgtccaaaagtgctacatctacctctctggacaagtgaaggagaagctgggcacgattgacccctactttgtcaagctcggtgacgccatggtcacctggatcgaggcctgggatgagctgaacccgtcgacccctgccgccgcaaatggcaaggccaagtagatgtgccatcacttcggcactggagtgaaa

SEQ ID NO: 30188 - DNA, 363 bp, Zea mays
  unsure (1)..(363): unsure at all n locations
ggactctaggggcagaagctgcagcgtcgagatggtgaaggggcgcacggggcagcgcgtgaggctctacgtccggggcaccgtccttggatacaagcggtccaagtcgaaccagtacgagactacgtcgctggtgcagatcgagggggtgaacaccaaggaggacgtcgcgtggtactgcgggaagcggatggcctacatctacaaggccaagaccaagagcagcggcacccactaccgctgcatctggggcaaggtcgcccgcccgcatggcaactccggcgtcgtccgcgccaagttcaggtccaacctgccgccggaatccatgggccgtannagtcaggtgttcatgtaccccagcag

SEQ ID NO: 30189 - DNA, 361 bp, Zea mays
  unsure (1)..(361): unsure at all n locations
cccttcgctccctccctctcnccgcgngccgccagaggcaatttcgccctcgattcgaccccgattcgtccgcccgcgaccgggattccctccgccaagcgcggatctgaacgctgcgctccgtgtcgccgctcgaatccgccatgaagggggccaaatccaagggcgccgccaaggccgatgccaagctggcggtgaagagcaagggggcggagaagcccgccaagggcaggaaagggaaggccggcaaggaccccaacaagcctaagagggctcccagcgctttcttcgtgttcatggaggaatttcgcacagagttcaaggagaagaaccctaagaacaagtctgtcgctgcggtggg

SEQ ID NO: 30190 - DNA, 239 bp, Zea mays
ggatcctgtagtgttcaaggctgtgcttcattttatctacagggacaatcttgttaatgatgacgagttgtctgcatcaagctctgactgctctatctttgatagtttgtccgggaagttaatggctgcagcagacaaatatgagttgccaaggttaagattgttgtgtgaatcttacttgtgcaagcatatttctgtaaattccgtggcaactactctggcattggctgatcggcacc

SEQ ID NO: 30191 - DNA, 354 bp, Zea mays
  unsure (1)..(354): unsure at all n locations
ctgacatcggtgacatcgtcgttgggacggtgcttggccctggttcccagcgtgcaaacgagtgcaggatggctgcgttgtttgctggattccctgaaaccgtccctgttagaactgtcaaccgccagtgttcatctgggctacaggcagtagctgatgtcgcagctgctataaaggctggttactatgacatagggattggtgctggtttggaatccatgtccataaattccattgcttgggaaggacaagttaacccaaaaataagcgcattccagaaagcacaggattgtcttctgcccatgggaattacttctgaanatgttgcccatcgatatggtgtaacaggcaaga

SEQ ID NO: 30192 - DNA, 356 bp, Zea mays
  unsure (1)..(356): unsure at all n locations
catttttcatctcattcggcgccgcggcaccccctgctcgtcactcgcgatggcccggatcaaggtgcacgagctgcgcggaaagagcaagacggatctgcaagcgcagctcaaggagcttaaatcggagctctccctcctacgcgtcgccaaggtcaccggcggggctcccaacaagctctccaaaatcaagatcgtgcgcacctccatcgctcgcgtgctcaccgtcatctcgcagaagcagaagtcggcgctgcgtgaggcgtacaagaagaagaagcttctcncgctcgatctccgccccaagaagacacgcgccattcgcaggcgcctcaccaagtaccactctccttgaa

SEQ ID NO: 30193 - DNA, 350 bp, Zea mays
cttattgtatagttcaggaaaaattcatcatgttgtcatcggacctcttgaagataacactatttattactaccgatgtggagggcagggtccagaattccaatttaagaccccgccctcccaatttcctttgtcattggctgttgttggtgatcttggtcagactagttggacaacatcaaccctgaatcacatcaagcagtgggagcatgatatgcttttactccctggtgatctatcttatgctgattatatgcaacacttgtgggattccttcggcacattggtggagccacttgctagcaaccggccttggatggtgacagaaggcaaccatgagaaggagcaca

SEQ ID NO: 30194 - DNA, 352 bp, Zea mays
cagctcacaattaagtaggagagcgagcccaccacaatggccagtccgacccaattcctgaccatattccctttaatctcccttgtgatcctagcagccatggcaactgcttcagctgcttgtgttggaccactgtgctgctactttggctgtgaacaagagatcagatttcccacctacttcttgtaccaagctcatgggaatacaaatgccaaccaatacataatagtgccatccagtcatgcatttgggtttggaaccattgctgctaatgactgggcaatacttgacgcgccacagcaaggcgcaaaggtcattgcacgtgcaagaggcatgcagatccaagttgacc

SEQ ID NO: 30195 - DNA, 354 bp, Zea mays
  unsure (1)..(354): unsure at all n locations
cgcgctggccgtctcctccgctcccgtcgtccggaaagatggcgtcccacattgttggataccctcgcatgggccccaagagggagctcaagtttgcacttgagtctttctgggatgggaagagcaccgctgaggatctggagaaggttgctaccgacctcagggccagtatctggaagcagatggctgatgctgggatcaagtacatccccagcaacactttctcgtactatgaccaggtccttgacaccactgccatgctcggcgctgtccccgaacgttactcatggactggaggagagattggatttgacacctacttctccnatggccagggcaacgccactgttcctg

SEQ ID NO: 30196 - DNA, 350 bp, Zea mays
  unsure (1)..(350): unsure at all n locations
cgccatcgacggtgccgacgaggttgaccctgaccttaaccttgtgaaagggaggggtggtgctcttcttcgtgagaagatggttgaggcagcatcggacaagtttattgttattgttgacgagacaaaactagttgatgggttaggaggtagtggtctagccatgccagtggaagttgtgcagttctgctggaagtacaaccttgtaagattgcaggaactgtttaaggaggaaggagtcgaggcaaagctaaggtttgaaggcgacaagccctatgttactgacaactncaactacatcgtcgatttatacttcaagacgccaatcaaggatgcgttggcagcaggac

SEQ ID NO: 30197 - DNA, 356 bp, Zea mays
cagagaggcagacggcaggactcgcttcaagctcctcatctcgcgcagggggggtcgcctgagatcacagagacaatggtgaaggcagttgctgtcctcgccggcactgatgtcaagggcaccatcttcttttcacaggagggggatggtccgaccaccgtgactggaagtatctctggcctcaagccagggctccatgggttccatgtgcacgcgcttggcgacaccaccaacggctgcatgtcgactgggccacacttcaatcctgttggcaaggagcatggcgcaccggaagatgaggaccgccatgccggtgatcttgggaatgtgacagcgggagaagatggtgttgttaa

SEQ ID NO: 30198 - DNA, 300 bp, Zea mays
cgtggatctccccagtacccgccggggccgatggctcttcctgtcatcggtcaccttcacctgcacctcttcgagaggcccctccaccgcaccctggcgtgcctcgcagctcgccacggcactgtcttccagctctggttcggttcccgccgcgtcatcgtcgtgtcgtcggctgatgccgccaaggagtgcctggccacgctcgacgtggcgttcgccaaccggccgcgtctgccgtcagccggatcctctcctacgactggaccaccatggggcactctaactacggaccctactggc

SEQ ID NO: 30199 - DNA, 303 bp, Zea mays
ctgcatctccgtgtgcaatgtcagaacgacactgctcttcggatggcccagtttttagaggagcatccaaagattgctcgtgtctactatcctggcttgccaagtcaccctgaacatcacattgccaagagtcaaatgactggctttggcggtgttgttagttttgaggttgctggagactttgatgctacgaggaaattcattgattctgttaaaataccctatcatgcgccttcttttggaggctgtgagagcataattgatcagcctgccatcatgtcctactgggattcaaaggagcag

SEQ ID NO: 30200 - DNA, 303 bp, Zea mays
caagaacgtgcttgctgttgctgtggagactgactactcgtacccacacgccgacaagatcaaggagtacctcaaggacccgagcaagtttgctgttgctgctcctgtagctgctgcggactctagtgctgctgctgcccccaaggaggaagagaaggctccagagcctgccgaggagtcggacgaggaaatgggcttcagcctgttcgacgactaagccgctcttatcgtccatccgccgcaagttttgcttctgcttattattttagtgcattatgttttagtagacaaaccatgttggtg

SEQ ID NO: 30201 - DNA, 301 bp, Zea mays
ctctcgaaccttcttccaaagcacccgaaccctagtgatctcggaaccctagccgcgcgcggatctcggcttttccccttcctccacgccagccatggacgaggacttcgagatgcctcccgccggcgccgatgagatgatgggcgacgacgagatgggcgacttcggcggcgacgagggcccggtgatgaaggtgggcgaggagaaggaggtcggcaaggaggggctcaagaagaagctgctcaaggagggcgagggctgggagactcccgaggtcggcgacgaggttgaagtgcattac

SEQ ID NO: 30202 - DNA, 179 bp, Zea mays
ccccacctcccggtccggcagcagagagcgggggtgcagagagatcgagatccggaggccgcgagtgggagcgccaccaccagcgtctgcggcaatggcgggcacggtgacggtcccggggtcgtcgaccccctccacgccgctgctcaaggacgagctcgacatcgtgatcccgacga

SEQ ID NO: 30203 - DNA, 303 bp, Zea mays
  unsure (1)..(303): unsure at all n locations
cgagctccgaagtccgcagcatcaggcgcggcccccctcgcgtgtgaccgagatggcgcagccgaatcaggggaccgttgattaccccagcttcaagctcgtcatcgtcggcgatggtggaactggtaaaactacatttgtgaagaggcatctcactggagagtttgagaagaaatatgaaccaaccattggtgtggaagttcatccgttggatttcaccactaactgtggtaagatcaggttctactgctgggataccgcanggcaagagaagtttggtggcctcagggatggatactatat

SEQ ID NO: 30204 - DNA, 304 bp, Zea mays
caggaaggacctctatggtaacattgtgctcagtggtggttcgactatgttcccgggtatcgctgatcgtatgagcaaggagatcacttcccttgcaccaagcagcatgaagatcaaggtcgttgcaccgcctgagaggaagtacagtgtctggataggagggtcgatcctagcctcgctcagcactttccaacagatgtggatatcgaaggaggagtacgacgagtctggcccggcaattgttcaccggaagtgcttctagggtttcacaagttcctcgtcgttacctagtctcaaattatgt

SEQ ID NO: 30205 - DNA, 301 bp, Zea mays
cccccgagctgagcttagctccactccagctccaatcacagtcgtgaccagagcgcgagagctagctagagggccgtgaaaatgccgatcaataggatcgccctggggagccaccaggaggtgtaccacccgggcgccctcaaggcggcgttcgctgagttcatctccaccctcatcttcgtcttcgccggccagggctccggcatggccttcagcaagctgaccggcggcggcccgacgaccccggcgggcctgatcgcggcggcggtggcgcacgcgttcgcgctgttcgtggcggtgt

SEQ ID NO: 30206 - DNA, 304 bp, Zea mays
ctagtctcctcttcgcacgagcgcaacaccatccacccaccaattcgaagcggaggcgaccggcaacctgcggcggagatgtcaggcaggggcaagggcggcaaggggctcgggaagggcggcgcgaacgtcaccggaaggtgctgcgcgacaacatccaggggatcacgaagccggcgatccggaggctggcgaggaggggtggcgtgaagcgcatctccgggctgatctacgaggagacccgcggcgtgctcaagatctttctcgagaatgtcatccgcgacgctgtgacctacacggagca

SEQ ID NO: 30207 - DNA, 307 bp, Zea mays
ctcgccgtctgccttgtgcgcctccatttcggcctctgtcccttgcaagttcaatctcacctccaaccatgggtaaagagaagtcccacatcaacattgtggttattggccatgtcgactctggcaagtcgaccaccacaggacaccttatctacaagcttggaggcattgacaagcgtgtgatcgagaggtttgagaaggaggctgctgaaatgaacaagcggtccttcaagtacgcgtgggtgctcgacaagctcaaggctgagcgtgagagaggtatcaccattgatattgctctgtggaagtt

SEQ ID NO: 30208 - DNA, 289 bp, Zea mays
tgcagattgtggctggattactggacatagttatgtgacatatggtccactattgaatggagccacagttcttgttttcgaaggggccccaaattaccctgatcctggccgctgttgggacattgttgataaatatggagtgacaatattttatacagcaccaacacttatacgctcacttatgcgtgatggtactgagtatgttgctcggtactctcgcaagtctctccgagtacttggaagtgtgggtgagccaatcaaccccaccgcatggaggtggttgtatgat

SEQ ID NO: 30209 - DNA, 294 bp, Zea mays
gctgcgtccgcggagcgagcaaatatccttgcccccacgagaccctcgcacagtcgcacctctccgacgtgaccggcgccgtagaaccaccgggtcttcccttgtgggattattcaagaacatggagagaaagagaaaccccattgtctttttggatgtatctgtaggtgatgagccagatgaaagaatgatatttgagttgttcgctgatgttgcaccccttgtgactgagaacttcagagctttatgcacaggtgagctgggaattggacacaagactaagaagccattatg

SEQ ID NO: 30210 - DNA, 295 bp, Zea mays
aaactttcagacctgaagaagggatgatccttgctaatgcaacatcattggggatgtacccaaatgttgatggtactcctattccaaagaaagccttgggtttctatgatgtggtatttgatgccgtatatgccccaaaagttactcggcttcttcgagaagcagaagaatgtggagttaaagttgttagtggtgtggaaatgtttattagacaagccatgggtcaatttgagcatttcaccggtggtatagaagctcctgaaagcctgatgcgtgagatagcagcaaaatacac

SEQ ID NO: 30211 - DNA, 298 bp, Zea mays
ggccgacgtccacctcggcaccaagaactgcgatttccagatggagcggtatgtctttaagcgtcgcaccgacggcatctacatcatcaacctgggcaagacatgggataagctccagctcgcggcgagggttattgttgccattgagaacccacaagacatcatcgtccagtcggcccgcccctacggccagcgtgctgtcctcaagttcgcgcagtacactggcgcccatgccatcgctgggaggcacacccctggtaccttcaccaatcagctccagacctctttcagcgagcct

SEQ ID NO: 30212 - DNA, 297 bp, Zea mays
ctcgagtcaagagcagagcaactaccaaacaagctctcctttcgcttccgatccatggagctcgacgccgacaacctgagcgccaccgagctccgcctcggcctgcccgggaccagcagaagcatcagcgacgacgactggcagaagaagccgtcgccctccgtcggggccaagcgcgctctggacgacggcaccaagagcgaggcctcggggaccagcccggccgccagagacctcgacttcgaccacgaccacgacaccgccgcgcctcccaaggcgcaagtggtcgggtggccg

SEQ ID NO: 30213 - DNA, 272 bp, Zea mays
actacctactggagtagggagcacgccgcacgagccctttccgccgccgccaaaatggtgaacgttcctaagaccaagaagacctactgcaagaacaaggagtgcaagaagcacactctccacaaggttactcagtacaagaagggtaaggatagcctgtctgcccagggaaagcgccgttatgaccgcaagcagtcaggatatggtggccagaccaagcctgtcttccacaagaaggccaagaccaccaagaaaatcgtattgaagctgca

SEQ ID NO: 30214 - DNA, 299 bp, Zea mays
  unsure (1)..(299): unsure at all n locations
cgcgtgatgagccacccgcagcgctggcgcagtgcgagcacacgctcacggccatgggcctcaacgtcgtccgcgaggccttcgacgacacggccggcgccgccgagtacgtggccgccaacggcctccgcgacacggccgccatcgcgtcctcccgcgccgccgagctgtacgggatggaggtgctggcggacggcatccaggacgactccggcaacgtcacccgcttcgtgatgctggcccgggagcccgtcgtgccgcgcaccgaccgccccttcaagacnagcatcgtgttcgcg

SEQ ID NO: 30215 - DNA, 292 bp, Zea mays
cccagaatgatcgccgaggaccaccacctgctgcacagtcctcgatcgacgctatgcccacagtgaagatcacccagaggcatctcagtggggactcgcactgccctatctgcaaggagaagttcgagatgggatccgaagaagcaagagagatgccatgcaagcacctgtaccactccgactgcatagttccttggttagagcagcacaattcctgccccgtttgccgttacgagctcccgccacagggctctgccaccggtgctagctgctcgcgcgcgagatcaaccga

SEQ ID NO: 30216 - DNA, 289 bp, Zea mays
ccaccacctattattccgctcccgacgcccagaattcacgagaacgcacccgcccgcctcctccttccgtccccatccagatgatgcttagggtttccgcgtctccggccgccgcggtggccaaccatctctctggtggggccgcggcgaccacggctcctgccagggtgacggcgcacgcagcggcgtctcgctgtccgccgccgccgccgccggcaaggggaaggaggtgctcagcggggtggtgttccagcccttcgaggagatcaagggggagctcgccctcgtg

SEQ ID NO: 30217 - DNA, 287 bp, Zea mays
tgaacttcgagaagcggttcgggcagtccgcggcgttcgtcacgtcgacgctgatggaggaaggcggcgtccctccttcgtcgagccccgccgcgctcctcaaggaggccatccatgtcatcagctgcggctacgaggacaagaccgactgggggctggagctggggtggatctacgggtcgatcacggaggacatcctgacggggttcaagatgcactgccgcgggtggcgctccgtgtactgcatgccgaagcgggcggcgttcaaggggtcggcgccgatcaat

SEQ ID NO: 30218 - DNA, 262 bp, Zea mays
catttatttggttccttcgttccagtggattctgcatgactggggtgatgccgaatgcgtgaagatactgaagaactgcaagaaggctatagcgtctcaagaagaagggaaggtagtgatactggatatggttgttggagcagggtcatccgacgagaagcatgtggagacgcaaatcgtattcgatctctttatgatgtttatcaatggcactgagcgagatgagacggagtggaagaagatcattttcgaagccgggttt

SEQ ID NO: 30219 - DNA, 334 bp, Zea mays
  unsure (1)..(334): unsure at all n locations
actagttctagatcgcgagctgcctcnccgcccgtgccaccgcaagggaaatcaacgaagagggtgtctatggtcaggggcctgatcagagaggttgctgggtttgctccttatgagaagcgtatcactgagcttctgaaggttggcaaggacaagcgtgccctgaagcttgctaagagaaagcttggaactcacaagagggcaaagaagaagagagaggagatggcgggcgtcctcaggaagatgaggtcggctggtacgcacactgacaaaaagaaatagagagcatttcaagttcatggagctggctgccagagattatgttccagtgtct

SEQ ID NO: 30220 - DNA, 153 bp, Zea mays
cattgatcgctgcgcttacgtcactgagaccgtccttgctgcctgctacaaggcgctcaacgagcaccatgtcctcctggagggtaccctcctgaagcccaacatggtgactccaggctccgactccaagaaggtgacccctgaggtgattgc

SEQ ID NO: 30221 - DNA, 330 bp, Zea mays
tccaactccgaggcgcctagccacatccgagataccagaaattgtcgagcaataccgacaggctgccataaacgccatcaaagcaggtttcgatggcatcgagatccacggtgcccatggctacctaatcgaccagttcctcaaggacggtatcaacgacagggctgacgagtacggtggctcactctccaaccgctgccggttcctcctggaggtgacgcgcgccgtggtctccgcgataggggcagaccgggtggcggtccgggtgtcaccggccatcgaccacctcgacgcgtacgactccaacccgctgcagctcggcctggccgt

SEQ ID NO: 30222 - DNA, 332 bp, Zea mays
gtttgaagcagaagaaggctcacctgatggagattcaggtcaatggtggtaccattgctgacaaggtggactatggctacaaattctttgagaaagaggtccctgttgatgctgtcttccagaaggatgagatgattgacatcattggtgtgaccaaggggaaaggttatgagggtgtggtcactcgttggggtgtcacccggcttccccgcaagacccacaggggtctccgcaaagttgcttgtatcggtgcatggcatccggctagggtctcctatacggttgctcgtgctggtcagaatgggtaccaccaccgcactgagatgaacaag

SEQ ID NO: 30223 - DNA, 149 bp, Zea mays
accagttctacctgtggttcgacccggccgccgacttccacacctacaccatcatctggaacgacaagaacgtcatcttcaaggtggacgacctcttcgtgcggtgcttcaagcggtacccggtcctggcgtacccgggcgggaagcca

SEQ ID NO: 30224 - DNA, 153 bp, Zea mays
atcactcatccacagctcgcagccgtattcctgtctcgaatcctctctcgccgctccgatggcccgcacgaagcaaacagcaaggaagtcgaccggcggcaaggccccccggaagcagctggccactaaggctgcgcgcaagtcggccccggc

SEQ ID NO: 30225 - DNA, 310 bp, Zea mays
  unsure (1)..(310): unsure at all n locations
cggatgaggatgccaagttcaagctctgcaaggtgaggtccgttcagtttggccagaagggcatcncctacctgaacacctacgacggccgtaccatccgctaccccgacccgctcatcaaggccaacgacaccatcaagatcgatctggagaccaacaagatcatggacttcatcaagtttgacgtcggcaacgtggtcatggtgaccggcgggaggaacaccgggcgtgtaggagtgatcaagaacagggagaagcacaagggcggcttcgataccatccacgtcgaggactccatgggcccacagtt

SEQ ID NO: 30226 - DNA, 293 bp, Zea mays
tggtttggcttcaaggtgtgctgagtactataagcagggggcgcgcttcgcaaagtggaggactgttgttagcatcccttgtggtccatctgcatgcagcagtcaaggaagcagcatggggacttgctcgatatgctgctattgctcaggataatggtttagtgccaattgtggagccagagattcttcttgatggagaccatgggatcgagggagctcttgaggtggcagagaaagtgtggtctgaggtgtttttctacttagccgagaacaatgttctgtttgagggtatc

SEQ ID NO: 30227 - DNA, 325 bp, Zea mays
catgccatgcacattaaagatggaaaagctacatatgtatcaagatatgtgaagactgtccgcctcaaacaagaggagtattttggtggagcgaagtttatgaagggcatggaggtactgctggtaacaagttctggatgtcattaggtctaccattgatagctactgtgaactgtgctggtaacactggagccaagaacctctacatcatttctgtgaagggaatcaagggcgccttaacaggcgtccttctgcctgtgttggtgaccatggagaatggaaagcctaaccttaggaagaaggtgatgccagctgtcattgtgag

SEQ ID NO: 30228 - DNA, 326 bp, Zea mays
cggacgcccaccagcagctgcccccttgctgtcgccgcctctccgcgcgaccgatctaccgccgccgccaccatgtcgctgatcgccggcgaggacttccaacatattctgcgtctgctgaacaccaacgtggatgggaagcagaagatcatgttcgccatgacctccataaagggtgttgggcgccgcttctccaacatcgtctgcaagaaggccgacatcgacatgaacaagagggccggtgagctgacgcctgaagagctggagcgcctgatgacggtcgtggcgaaccctaggcagttcaaggtgccggactggttcctcaa

SEQ ID NO: 30229 - DNA, 324 bp, Zea mays
cacgccaaatttacagctagttagctgaattcgatcgatatccaggaactaataatccaccgacccccctcatggcggcttcgtcgcgaatgggcttatccgtctacctcgccatcatggcggcggtgctcgcctcggcgctcggagcggactcaccgcggactactatagcgagacgtgcccgcaagcgctgaccaccatcaagctcctcgtcggcgccgccatcctgagggagcccaggatgggggcgtcgctggtccgcctccacttccacgattgcttcgtcaatggctgcgacggctccatcctgctggacgacaccga

SEQ ID NO: 30230 - DNA, 356 bp, Zea mays
caaagggaagcgacgaagaatcgagtcgatcgagatggtgcagttcggcaagtggctgaggaggcagatcgagcggagcctcccggagtggcaggaccagttcctgcgctacaaggagctgaagcggtgcgtcaaggcccgctccggcggctgcccgccgttgcccgcggaggaggccgagttcgtggccgagatcgacgcggagaccgagaagatcaacgccttcttcctcgaccaggaggaggagttcatcatccgacaccgggagctgcagaaccacatcgagcgcgcgctgggccgcggcaggccggcgccggcgccgcgctgcacgaggcgatgtcgccgcatcccaggag

SEQ ID NO: 30231 - DNA, 324 bp, Zea mays
tccttcctcggcctcgacgagtggttccagcacgagacgggtccgtccccgttcgagctggccaatggccgggacatatggaccctgtccggccacgacgcgagcttcggcaagctcttcgacgacgggatggtcgcggacagcggtttcatcatggacgtcgtggtcaaggagtgcggcgacgtgttccgaggggtcggctccctcgtcgacgtcgccggcgggctcggtggtgccacccagaccatcgcgaaggctttcccggacgtggcgtgcagcgtgctggacctctcacacgtcgtcgccaatgctaccaccgacacc

SEQ ID NO: 30232 - DNA, 320 bp, Zea mays
  unsure (1)..(320): unsure at all n locations
atttggttgctccaagaacagcactgtttgcgtgcactgtgggacaaaaaccaagcaaagccaaattctacctggatgatacattcgaagtggtcactatgctgagcgcactggcagatgccacaggtcctgaactggagactgattcggctgatgaatctgtcgcatatatctcatcacttgatattggtgacgaacaatcagaatccagtgatanaccagttgaagggtcttagccagttttctcttgcgttttcagaacatgatgattgtttcaatagtcaattctattctacacaattttctgatgggacttcacg

SEQ ID NO: 30233 - DNA, 367 bp, Zea mays
cggctcgagctaggacgtttctccgccagagctcctgcgcttcatgcgggagcagcggtcgcagtgggccgacagcaatctagacgcgttcttcgcttctgcgatgaaaccggatttctgcagcttgcctattcctcctcgccttggagggtttggtggccaggtcatacttcctctagcccacacgtttgaccctgaagaattcctcgaggttataaaagtaggaaatgccggtaactaccaagacgcgctcctgcaccgtgatctgtttctgttgcagatgtacaacggggtagacgagaacatggcaggcacttgttcagagctcatgctttgccctatagacgcatcgttcagcgacgactcg

SEQ ID NO: 30234 - DNA, 347 bp, Zea mays
ggaagagggaagcgaggggatggcgcacgtagcaaggagccgtgcaagaaggaggcgtgcgacatccaggcctgcctctccaagaacatgttcgactccaggaagtgtgtgagagttattcagttacttcagtcatgttgtgagcagtgtgagtacaaatcaacacactgtggttccttgtccggattactcaagaacatttctaagtgaggaacaataccgacatactttactgcagccattgaataaaagtttcttttaggttagtttagtactttatggggctcacggcaatctctcttacggatcaagggtccagtttcgatgctatttaagaatgttcttct

SEQ ID NO: 30235 - DNA, 332 bp, Zea mays
acgcgaacggcatcctcaacgtgtcagctgaggacaagacaaccggccagaagaataagatcacgatcaccaacgataagggccggctaagtaaggaggagatcgagaagatggtgcaggaggcagagaagtacaaggccgaggacgaggaacaccagaagaaggtgaacgccaagaacacgctcgagaactacgcctacaatatgcgcaacaccatcagagacgacaagatcgcctccaagctaccggaggacgacaagaaaaagatcgatgacgccgtcgagggggccatcaattggctcgacaacaaccagctcgccgagggtgatgag

SEQ ID NO: 30236 - DNA, 368 bp, Zea mays
  unsure (1)..(368): unsure at all n locations
cgtcaaattgatgatcagaaacttgccattggaaccctctctgttgacaagaacccacacatacaatttgatctgattttcgataaagagtttgagctgtcgcacacatcaaaaactaccagcgttttcttcactggctacaaggttgagcagccattcgaggaagatgaaatggatcttgattctgaagatgaagacgaggagctgaatgttccagtagtcaaggaaaatggcaaagctgatgagaagaaacagaaaagtcaagaaaaggcagttgctgcaccttcanaatcaagtccggacttccagaagagcaaggatgacgacgattctgatgaggacgagactgatgattctgatgaggatga

SEQ ID NO: 30237 - DNA, 327 bp, Zea mays
agcaacttcattgctcaggctgtgcgcggtgagcccctgactgtccagaggccaggaacacagactaggagtttctgctatgttgccgatatggttgatggtcttattaagctgatgaatggaaacaagactggaccgattaacttggggaaccaggtgaattcaccatgctggaacttgctgagaatgtgaaggagttgatcaacccagatgtgacagtgacgatgaccgagaacactcctgatgatccccgccagaggaagccggacatcacaaaggcgaaggaagttctgggatgggagcccagatcgtctgcgggaggcttgg

SEQ ID NO: 30238 - DNA, 314 bp, Zea mays
cgcgtttccaacaggccagtccctccactccagtccatctcgacgacatggccgagccgaggccatcaagctctgtgaaggagacgctcccgccggccctcggctccacctcccagccacctcccgtcttcgatggcaccaccaggctgtacatctgctacttctgcccgttcgctcagcgcgcctgggtcacccagaacttgaagggtttgcaggacaagatggagctggtggccatcgatctgcaggacaaaccggcttggtacaaggatcaaggttacgcacagggcacggtgccttccctggagcacgac

SEQ ID NO: 30239 - DNA, 310 bp, Zea mays
  unsure (1)..(310): unsure at all n locations
caggctgtttcctacgtgcgaagccatcggcttatgccgatgattgatcagggagaggcagatgacaagatcattgcagtgtgcgctgatgatcccgagtacaggcattacaatgatatcaaggagctcccacctcaccgcttggctgaaatcaggcgcttcttcgaggactacaagaagaatgagaacaaggaggttgctgtgaatgactttctaccagcgagcgccgcttatgaagccatacagcactctatggacctgtatgctacatacatcgttgnaggcatgaggaggtaagattctgatggct

SEQ ID NO: 30240 - DNA, 219 bp, Zea mays
gtccactttccccgtgcttctccgccgtcgaggccgcgtcccagtgcgaagagactccgactcagatggccagccgctgggtccggcccgaggtgtacccgctgttcgcggcgacgggcgtggccgtcggcatctgcgggtttcagctcttccggaacatcactggcaacccggaagtcagggtaaacaaggcagggaaggcagctggtgtgcttgaga

SEQ ID NO: 30241 - DNA, 223 bp, Zea mays
atcggcaccttcgtgctcgtctacaccgtcttctccgccaccgaccccaagcgcaacgcccgtgactctcatgtccccgtgcttgcccctctccccatcgggtttgcggtgttcatggtccatctggccacgatccccatcaccggcaccggcatcaacccggccaggagcttgggcgctgctgtcatctacaacaacgacaaggcctgggatgaccactgga

SEQ ID NO: 30242 - DNA, 288 bp, Zea mays
gaggacggcgacggcgacgtggtgcaggtggacctgatggagtccaagacggcgcgcgggccgccgacggggcgctgggcgccgatgcgcgagtcctggggctccgtctggcgcatggacaccaaccaccgcatgcagccgcccttctccatccgcatccgcaacgagtccggcaagacgctcgtcgccaggaacgtcatcccggccaactggaggcccaacaccttctaccgctccttcgtccagtacagctagctagctggtctgcgcccctagttctttctacta

SEQ ID NO: 30243 - DNA, 219 bp, Zea mays
ccgccatcgtggtcgccggcatggggttcttcaccgacgcctacgacctcttctgcatctccctcgtgactaagctcctcggccgcatctactacaccgtggaggggtccgcgacgcccggcaccctcccgccgcacgtgtccgcgtcgaccccgccggttccacgccgccgcagtcgtacttcgtgtggcggatcatcctgatgctgggcgcgatgcc

SEQ ID NO: 30244 - DNA, 251 bp, Zea mays
ggctttcctcccggcgccggcggcgccgggggccacggggctcaccgtgtacctggcgggggggcaggggcaggtggtgggcgggagcgtcatggacggagctcatcgcttcgggccccgtcatggtgatcgccgccacgttcggcaacgccacctacgagaggctgccgctggaccaggcagacgccgaggagggcgccgtgctgtccggctcgtccgagggcgccaccgcgcagcagcttggagcagca

SEQ ID NO: 30245 - DNA, 295 bp, Zea mays
gcagtgtgttctgtgccaatataaagaactatgacgtcacaaagggcagacgcaaccttcagaaattcatcgaggtagctcacgccgatggatttcaaattgactaggatttatatctgtaatacgttcgttcgttcactaacattgtttgagacgatccttttgtcatgttgataatgcttcgttgatgagaaactttgtatgtctcaggaagtgaacaagatcgatgcgtacacacagactaaactggacccgcagtttttgcttgaggaaacaaagaagcggcttggggtat

SEQ ID NO: 30246 - DNA, 250 bp, Zea mays
agttagtgatgtgaagaatgttatcatctggggtaaccactcgtcctctcagtaccctgatgttaaccatgccacagtgaagacttccactggggagaagcctgttcgtgagcttgtctctgatgacgagtggcttaatggtgaattcatcacaactgtccaacagcgtggtgctgcaatcattaaagcgagaaagttctccagtgctctctcggctgctagctctgcttgtgaccacattcgtgattgg

SEQ ID NO: 30247 - DNA, 283 bp, Zea mays
caagggtccaaccctgcttgaggctcttgaccagatcaccgagcccaagaggccttcagacaagcccctgcgtctagccctccaggatgtgtacaagattggtggtattggaactgttccggttggtcgtgtggagactggtgtcatcaagcctggaatggttgtcaccttcggtccaactggcctgaccactgaggtgaagtctgttgagatgcaccacgaggctctccaggaggcccttcctggtgacaacgttggcttcaatgtgaagaacgttgctgtg

SEQ ID NO: 30248 - DNA, 287 bp, Zea mays
cgccgatcacacattggacttgcactggtgcttgctcataattactagttcatcagcaaacaacaaacaatggcaccgaggctagcgtgcctcctagctctggccatggcagccatcgtcgtggcgccgtgcacggcccagaactcgccgcaggactacgtggacccgcacaacgcggcgcgcgccgacgtgggcgtcgggccggtgtcctgggacgacaccgtcgccgcgtacggcagagctacgcggcgcacgccagggcgactgccagctgatccactccggcg

SEQ ID NO: 30249 - DNA, 285 bp, Zea mays
gggccacccgtcaagctcgtgccctacaacccggactaccaggacgagtccgtgctctggaccgagagccgcgacgtcggcaacggcttccgctgcgtccgcatggtcaacaacatctacctcaacttcgacgccttccacggcgacaaggcccacggcggcgtccatgacggtaccgagatcgtgctctggaagtggtgcgagggcgacaaccagcgctggaagatcctcccttggtgaacgaacgaaagaaactactagctggtaccctaataataattctgc

SEQ ID NO: 30250 - DNA, 251 bp, Zea mays
ctcgagcagccacttccgtctctaaccctacagcgacgacgagagcgaggccatgaaggggaagaagccggtcaaggagctcaagctcaccgtgccggcgcaggagaccccggtagacaagttcctgacggcaagtggcacgttcaaggatggtgagctgaggctcaatcagagcggcttgcggcttatctctgaggaaaacggggatgaagatgaatctacaaagctgaaggtggaagatgtgcagttat

SEQ ID NO: 30251 - DNA, 282 bp, Zea mays
  unsure (1)..(282): unsure at all n locations
tgganagggaggacatgctgcacttcctcatcacactatagatccgatattggctgcctcaaatgttattgtgagccttcagcaacttgtttctcgagaagctgatcccttggactcacaggttgtgacagttggaaagtttcaaggaggtggagccttcaatgtgatccctgattcggtaactataggtggcaccttccgagcctttctgaaagagagttttaatcaattgaagcagcggattgaagaggtgattgtgtctcaagctagcgtgcacgctgc

SEQ ID NO: 30252 - DNA, 240 bp, Zea mays
ataagcatgaagaaatagctttcgttgaagagatcgccagaacagcgccaattaagtacttgcaccggtacttagtgcagaagggggctgtgcctcaggactacgaggacttcaagagaatgctggcatccctatggtttgatttgtatggaagaggtggcaactctagctgctcttctgcctttgagcatgtgtttgttggtgagatcaaaggacggggaccaagggagagttaagtat

SEQ ID NO: 30253 - DNA, 244 bp, Zea mays
gccgagagtcccggccaccatggacaccttcttcctatcgcacggctcgcccacgctctccatcgacgacagtatcccggcgcggcacttcttcaagtcatgggtgccggcgaaggtcgcgggcgaccagcccccgcgcgccatcctcgtcgtctcgggacactgggagacggccacgccggcggtcaacgtcatccgcggcagcaacgacaccatctacgacttctatggctttcccaagccc

SEQ ID NO: 30254 - DNA, 244 bp, Zea mays
ctttcggggcggtgatcacgccagaaacgctcaagtacatgtccaagtaccagggacgtgagatcacgcaggtggattgtgcgcgggaggcgatgaggctgatccacgcggaagacaagaacctgcaagccgagaattccgcatgggaactcaagaagaagttcggcaacggcgtgagcaccatggtgctcgtctacaacgccaccggcgccaccctgagcctggcggacgacggccaggactg

SEQ ID NO: 30255 - DNA, 283 bp, Zea mays
tcgagctctactccaccccctcgatctcgaagcgcagcagcagcagtcaggcggccatggacgcgagcgcagccggagccggcgggaaggcgaagaagggcgcggccgggcgcaaggccggcgggccgaggaagaagtcggtgacgaggtccgtcaaggccgggctgcagtttcccgtcggccgcatcgggcggtacctgaagaagggccggtacgcgcagccgtcggctacggcgcccccgtctacctggccgccgtcctcgagtacctggccgccgaggtg

SEQ ID NO: 30256 - DNA, 281 bp, Zea mays
gcttaacgcaggccctaacggataaagggaagtttcttttggctgctcgaaggttcagacaaggagcacatacagaatatatcatctcttatgactatgatgatctgcacccaagaagcagttcatatgttggaaagttgagatctgacttcttggggacaaagttcatcatctatgatagccaggcgccatatgacggtgccaaaccttcgaggacccgatccactcgccgctttgcaagcaagcagataagcccacaggtttcaggcggcaatttcgaa

SEQ ID NO: 30257 - DNA, 277 bp, Zea mays
ttgccaaattacgaggctaagataaagaatttctttgaagaacacttgcatactgatgaagagatacgatattgccttgagggtagcggctactttgatgtgagggaccaagatgatcagtggatccgtgtagcggtaaagaaagggggcatgatcgttttgcctgcaggaatgtatcaccgctttacgttggatagtgacaactacatcaaggcaatgcgtctatttgtgggcgagcctgtctggacaccatacaatcgtccgcatgaccatctcc

SEQ ID NO: 30258 - DNA, 271 bp, Zea mays
cggctcgagcatccatcgattggaacccagatccgcaggccgcagcacaagagggtgggatcggatcggatcggagcagagggggacaaccgaccagaatccgccggtgaccaccatgggctccgcgagccgtgccgtctcgtgcctgtgctgcccctgcaagtgcctggcgtgcgggctcctgagctgcctgtgcagcatcctcgtctcgctcgccgtcgtcctgggcgtcgtcgcactcatcctctacttcatcttcaagccgcacatg

SEQ ID NO: 30259 - DNA, 278 bp, Zea mays
cggctcgagtgctgtcctctgtgctatccgctacggtttatctgctcgaggaatggcgtcggtgcaggtctccggcgcgggggtcggtgccgcggccttctctgtgaaggggaaggcctccaccggtgcgctccggcttcgctctacgttgaccttcggcgaggtctgcccggcgcggcgggcgttccgcggcctcgtcgtcagggccgctaccgtcgtcgcccccaagtatacaacacttaagcccttggctgatagagtgcttgtaaagattaact

SEQ ID NO: 30260 - DNA, 303 bp, Zea mays
ccgtcacaactcacaacccgagccccccaaacccgaagcagcaggagctcccctgaccctgctccgcctccgatcaaggaaaaggaagatgagctactacggccagcagccccccgtcggcgtcccgcgcagcaaggctacccggggaaggacggctacccgccagcggggtacccccggccggctaccccccgccggcgcagggctacccaccgcaggctacccgcagcagggctacccgccgcagtacgcgcaccgcctccacagcagcagcagagcagcgggcgttccttcatggaagga

SEQ ID NO: 30261 - DNA, 181 bp, Zea mays
tgcgattttgacttcgaaccctgtggctactccatgaatgcgatccatggctctgcattctccacaatccatgtgacgcccgaggacggtttcagctacgccagttacgaggttatgggcttggatgccactgctctgtcttatggtgaccttgtcaagagggtcctccggtgctttggcc

SEQ ID NO: 30262 - DNA, 325 bp, Zea mays
  unsure (1)..(325): unsure at all n locations
accagaccagcagcgtctgatctttgcgggcaagcagctggaggatggccgcactctcgcggactacaacatccagaaggagagcacccttcaccttgttctccgcctcagaggtggtatgcagatctttgtaaagaccctgactggacaaaccataaccctggaggttgagagctcggacaccatcgacaatgtgaaggcgaagttccaggacaaggagggcatcccccgggacagcagcgtctgatcttcgccggcaaacagcntgaggatggccgcaccctagcagactacaacatccanaaggagagcaccctcaacttgt

SEQ ID NO: 30263 - DNA, 303 bp, Zea mays
agacaagtcatatctagctatagtagctcccttgagaagcatttaaaggaggagccatgtctgaggagaagcaccaccaccacctgtttcaccaccgcaagccagaggaggagggcgcctccggcgaggtcgactacgagaagaaggagaagcaccacaagcacatggagaagctcggcgagctcggcgccatcgccgccggcgcgtacgccctgcacgagaagcacaaggcccagatggaccagagaacgagcacgggcacggtgatcaaggagagtggcagcgtcgcagcgtgggctccgc

SEQ ID NO: 30264 - DNA, 202 bp, Zea mays
  unsure (1)..(202): unsure at all n locations
nagtacctcctgcggagcttgaagcccttctcatcacacatcctgaaatcaaggatgccgctgttgtctcgatgaaagatgaagtcgccggcgaagtcccggtggcattcattatacgcatgaaggctctgagatcagtgagaacgagatcaagcagtttgttgcaaaggaggtcgtgttctacaagaggatcaacagagtt

SEQ ID NO: 30265 - DNA, 177 bp, Zea mays
ctgctcctgcaccagcggcccctgctgcttcgaggtccgctggcatagtcgtggatgactcccagccatttacatccatacagctgaggctggctgacggcactcgcatggtcgcccggttcaacatgcaccacaccgtgggagacatcaggtccttcatcgacgcatctcggcctg

SEQ ID NO: 30266 - DNA, 177 bp, Zea mays
  unsure (1)..(177): unsure at all n locations
agccgtggtatcnccaaacatttaaagcgtctcaatgcccccaagcactggatgctcgggaaaatgggcggcgactgggctcctcatccctcgcctggtcctcacaaactccgtgagtgccttcctttggttgtcctcttgcgaaacagactgaagtatgccctcacccgtaaggag

SEQ ID NO: 30267 - DNA, 179 bp, Zea mays
aggcaagcacaagaggattgctgtgattactcaaggtgctgatccagtggttgttgctgaggatgggaaggtgaaaacgttccctgtgatcctattgcccaaggagaagcttgttgacaccaacggcgcaggtgatgctttcgttggaggcttcctctcacagttggttctaggcaagg

SEQ ID NO: 30268 - DNA, 177 bp, Zea mays
acggctcgagcgtggatgaaaatcggacgcattgaggacgttacccaggtccccactgacagcactcgcagaaagggcggtaggaggggaaggaggctgtaggcgtctcgtctgcgtggcatttgccggctcttggccggtggccattatgaagctagccctctctgggtggtgttg

SEQ ID NO: 30269 - DNA, 299 bp, Zea mays
gtttaccattcctccccaaaacacatcctgcgatcctcgaagcctccgccgagcatcgatcatgtcggcctactgcggcaagtacgcggatgagctcatcaagaatgctgcctacatcggcacccctggcaagggtatccttgctgctgatgagtcaactggcaccattggcaagcgcctttccagaatcattgtcgagaccttgaagagaaaccgccgggttttccggaacttctgttctgcttgcctggttgcctccagtacatcagcggtgtgatcctcttcgaggagaccctcta

SEQ ID NO: 30270 - DNA, 177 bp, Zea mays
agctgcgcgcaagaaggccgcaccagtgactgctccacggccggatgtgccattggggtcgacggtaccattcacgacaatgcagggtgctgtcagcaagaacatggtggagagccttgccatcccgacattcagggtcggatacaccatcacaactgatgctcttgatcagctcta

SEQ ID NO: 30271 - DNA, 278 bp, Zea mays
agaacctcaagaaaattcgtgaagccaggggttactcttacatggacatttgtgatgtgtgcccagagaagttgccaaattacgaggctaagataaagaatttctttgaagaacacttgcatactgatgaagagatacgatattgccttgagggtagcggctactttgatgtgagggaccaagatgatcagtggatccgtgtagcggtaaagaaagggggcatgatcgttttgcctgcaggaatgtatcaccgctttacgttggatagtgacaactac

SEQ ID NO: 30272 - DNA, 173 bp, Zea mays
gccgccgccgctgcagtgtccatagccaccgcaggagactgagatggggggttttgtcaagacccacaagaccaatgcgtacttcaagcgtttccaggtgaagttcaagagaaggcgcgctggcaagacagactacagggccaggataaggctgattaaccaagacaaaaaca

SEQ ID NO: 30273 - DNA, 317 bp, Zea mays
  unsure (1)..(317): unsure at all n locations
ccagaccatcaaacaagtgccagcgccctctcgcagtcgccgcaatggagagcaccttcatcatgatcaagcctgacggcgtccagaggggcctcattggtgagatcatcagccgttttgagaagaagggcttctacctcaaggccttgaagcttgtgaacgtggagaggtcgcttgctgagaagcactacgccgatctcgcctccaagcccttcttcgagggcctcgtggactacatcatctctggccctgtggtggccatggtctggganggcaagagcgtcgtcacaactggccgcaagatcattggcgccaca

SEQ ID NO: 30274 - DNA, 311 bp, Zea mays
cggcgcagagaatccccaagcaaacaaacagggtagagggagaggagaggagaggagaggagaggttgggtctgggacaccatggctccgatgaagctgtacggggcggtgatgtcgtggaacgtgacgaggtgcgcaacggcgctggaggaggctggctccgactacgagatcgtgcccataaacttcgcaaccgcggagcacaagaccccggagcacttgttcggaaccccttttggcaggttcactcttcaagaatgtgacttgtacctcttcgaatcacgagcaatctgcaagtacgctgctcgcaa

SEQ ID NO: 30275 - DNA, 325 bp, Zea mays
  unsure (1)..(325): unsure at all n locations
cctttnccccactcccgggtctccagcattcctatcctctccccgcncgcncgtnnnnnnnnnnnnnnnnnnnnnnnnnnnnnnccttcctctcccgagccaagatgaatgttgaaaagctcaagaagatggcaggtgctgtgcgcaccggggggaagggtagcgtgcgcaggaagaagagggcnntccanaagactacaaccacagatganaanggnnttnanaccactttaaaaaanatgggtgtnnnnnnttccnggtatttaangggtcaactntttanggnanatgtgatanncatttgaaaacccctagggnccaggtc

SEQ ID NO: 30276 - DNA, 218 bp, Zea mays
aatttccttgatgcatttgtcaaaatcatccgcgacgaagggcctactgagctctaccgaggcttaaccccaagcttgattggagtggtgccatatgctgcaacgaactacttcgcctatgacagcctgaagaaggtgtacaagaagatgttcaagacaaatgagattggcagtgttccaacactgttcatcgggtctgccgcagagctatctcaagc

SEQ ID NO: 30277 - DNA, 277 bp, Zea mays
acgccacaaccacacgttcacggtagcgagagcttatcgtcgtcggcggtgaagatggtgtcgctgaagctgcagaagcggctcgccgctagcgtcctcaagtgtgggaaaggcaaagtctggcttgaccccaatgaagtcagcgagatctccatggctaactcccgccagaacatccggaagttggttaaggatgggtttatcatcaggaagcctcagaaggttcactcctaggtcccgtgcaagaagggcatatgaggccaagcagaagggaagg

SEQ ID NO: 30278 - DNA, 169 bp, Zea mays
caaacacttgcgccgccgctgcatcacaggtaaggccgccatggtctccggttcgggcgtgtgcgcgaacatgcgatggtcgacgcgcgccatcacatgctgggccgtctctcctcgatcatagccaaggagctgctcaatgggcagaatgtggtcgtcgtccgctgcg

SEQ ID NO: 30279 - DNA, 308 bp, Zea mays
aggaagagagtatgatatggaaagatatcagttgtttaagcatttccgattcgattggccagtgaatcacacgtcattgagccctgatggaaagcttgttattattgttggtgatgacacagatgctttacttattgatgctaattcaggaaagactattcattccatgaaaggtcacttggatttctcctttgcttcggcttggagcccagatggcctgacattcgccacaggtaaccaagacaaaacttgtcggatttgggatgccaggaatctcaccgagtctgtctatgtcctgagaggcaacg

SEQ ID NO: 30280 - DNA, 335 bp, Zea mays
ccagccgccgccatgtcgaagcgaggcaggggaggttcggcggggaacaagttccgcatgtcgctgggtctgccagtggccgcgacggtgaactgcgcggacaacacgggcgccaagaacctctacatcatctccgtcaagggcatcaagggccgcctcaatcgcctcccgtccgcctgcgttggcgacatggtcatggccaccgtcaagaaggggaagcccgacctcaggaagaaggtgatgcccgccgtcatcgtccgccagcgcaagccgtggcgccgcaaagacggggtctacatgtacttcgaagataatgctggagtgattgtgaatcc

SEQ ID NO: 30281 - DNA, 338 bp, Zea mays
gcgccgccaccgccaccgcgaggatgccgttcaagaggttcgtggagatcgggcgcgtggccctggtgaactacggggaggactatggccgtctcgttgtcatcgtcgatgtggtcgaccagaacagggcacttgtggatgcccctgatatggtcaggtgccaggtgaacttcaagcggctctcacttactgacatcaagattgacatcaaacgtgtccccaagaagacagccctgatcaaggcgatggaggaagctgatgtgaagaccaagtgggagaacagctcatggggcaagaagctgattgtccagaagaggagagcatcgctcaatgacttt

SEQ ID NO: 30282 - DNA, 338 bp, Zea mays
gagagattcagatccactcgtcacacatccgcgttaccccctctcccttggtttcctctcccaccaccaacccccatcccggttatctccgccgccgcccgctttgggaaggcgcgacgaaggcaggcgagaggctccagccggacgaggaggaaagaggagcagcagggccggaggagagatgttcctgtgggactggttctacggggtgctggcctccctcggcctgtggcagaaggaggcgaagatcctcttcctcggcctcgacaacgccggcaagaccacgctgctccacatgctcaaggacgagcggttggtgcagcaccagccgacgcagc

SEQ ID NO: 30283 - DNA, 342 bp, Zea mays
attgcccttctgtgaagaacattttacttctggattctgaaggaaagcgtgttgctgtaaagtatttctcagatgattggccgactaatgcatcaaagttagcctacgaaaagtctgtttttactaaaactctaaagacaaatgcacggacagaagctgagataacattgtttgatggttatattgtcgtttacaagtttgtacatgaccttcacttttttgtcaccgctggagatgatgagaatgagctcatcttagcaagtgtactacatggtttttctgattctgttggtcttctactcaggggtgatgttgagaagcggactgcgcttgagaacttgg

SEQ ID NO: 30284 - DNA, 335 bp, Zea mays
gcacgttcgcacgaatcactgctctgctttcaccccccgcatcgaacctcacccccgatctgatcgaatcgaaggctgcggcggcgatgggcggtgaccatggcggtgggcacgccggcggcgacttccgccagaaggtatggagcatgacgggcggcccgtactgccgccccgtccactggcgccgtaacaccgccatcgccatgttcggcgtcttcctcatctgcatccccatcgctatgaagtccgcagagctcgagcaacgcccgcatcacccagtccggccaatcccatctcaactgtggtgcaaaaactttggtaagaaggaatactga

SEQ ID NO: 30285 - DNA, 332 bp, Zea mays
ataacagcggaaccatcgactatggtgaattcatcgcagctactctgcacatgaataagctggagagggaggagaacttggtttcggcattctcattttttgacaaagacggaagtggctttataaccattgatgaactgtcacaagcatgtcatgaattcggtcttgatgacgtccacctcgaggatatgattaaagatgttgaccagaacaatgatggccaaatcgactacagcgagttcacagcgatgatgaggaagggcaatgctggtgcaacaggaaggagaaccatgaggaacagcttgcacttgaatctcggcgaactcttgaat

SEQ ID NO: 30286 - DNA, 334 bp, Zea mays
gtgcagaaaagcaagattttcttcattgcctggtccccatcgacatcccgcatacgtgctaagatgctgtactccacgtcgaaggaccgcatcaagtacgagcttgacgggttccactacgaaatccaggcgaccgacccatcggaggtggacatcgaggttctccgggagcgggctcactgaagctggttctccttttgaagggacctgtggagggccgtgaaccttcagccagatgcaaattcaattgtcaacgatgaagctcccgccgtggtgtttgttaataagttactgtaagcatatcatttagtcgctactcgctatgcatgacact

SEQ ID NO: 30287 - DNA, 336 bp, Zea mays
gtcaagggcaccatctttttcacccaagagggagatggccctaccgctgtcaccggaagtgtctctggcctcaagcctggcctccatgggttccatgtacatgcacttggtgacaccaccaatggatgcatgtcaactggaccacactacaatcctgcgagcaaggagcatggggcaccagaagatgagaaccgccatgctggtgatcttggaaacgtgacagctggagcagatggtgttgctaatatcaatgtcactgacagccagatcccactgactgggccaaactcaatcattggcagagctgttgttgttcacactgatcctgatgatctt

SEQ ID NO: 30288 - DNA, 335 bp, Zea mays
cgtctgtccgctacacctccccgaccagatcgctacgagacgccgcgcgatcggacccaggccgacgccgacgacccctctcgccgccggggccatggcgtacggcgaccgcgtcaccaccttcgaggactccgagaaggagagcgagtacggctatgtccgcaaggtctctggacctgtggttgtggctgatggaatgagtggtgctgccatgtatgaacttgttcgtgtcggacatgataacctcattggggaaattatccgtcttgagggcgattcagctacaatccaagtttatgaggaaacagctggactgatggttaatgaccctgtat

SEQ ID NO: 30289 - DNA, 177 bp, Zea mays
ttcgggttcgtgaggttctccggggttcggtgtcgtgggtgagcggatctagatggcgtcgtctgatgttgagtaccgctgcttcgtcggcggcctcgcctggtccacgggcgaccactccgctccacaacgccttcagcacctacggcgaggtcctcgagtccaagattatcctcg

SEQ ID NO: 30290 - DNA, 311 bp, Zea mays
gtggtcgtccctcagccgcgtcgcaccgcatcgcattctacgattcgaagctctctctgctcgcagccatggcgaagaattacccaaccgtgagcgccgagtacagcgaggccgtcgagaaggccaggcgcaagctccgcgccctcatcgccgagaagagctgcgcgcccctcatgctccgcctcgcgtggcactccgcggggacgttcgacgtgtcgtcgaggaccggcggtcccttcggtactatgaagtgcccggcggaactggctcacggcgccaacgcggggctggacatcgcggtgcggctgctc

SEQ ID NO: 30291 - DNA, 321 bp, Zea mays
gcagccccaactacccgctgatgcagaagctccgcgcggtgctggtcgagcacgcgctggccaacggcgacgccgagcgcgccgcggagacgtccatcttcgccaaggtggccgagttcgagcagcaggtccgcgcggcgctgcccaaggaggtggaggccgcgcgcgcgccgtgtgagagcggccaccccctggtccccaacaggattagggagtgccggtcctacccgctgtaccggttcgtgcgcgaggaggtcggcaccgagtacctgaccggcgagaggaccaggtccccggcgaggagctaacaaggtgctcgtg

SEQ ID NO: 30292 - DNA, 326 bp, Zea mays
tgcagcgccacggctacattggagagttcgagtacgttgatgaccaccgatcgggcaagatcgtggtcgaactcaacgggaggctgaacaagtgcggcgtcatcagccctcgctttgatatcggcgtgaaagacattgagggatggactgcaaggctgctcccgtccaggcagttcggatacatcgtcctcacaacttcggcaggcatcatggaccacgaggaggcccgccggaagagcgtaggaggcaaggttctaggtttcttctattgaagaagctgagaatctttgttatggcctgcctgcctgtcttactctctcagacta

SEQ ID NO: 30293 - DNA, 324 bp, Zea mays
ggttcctgccttgaacgaaaggatactgtcatccatgtccaggaggtctgttgctgcacacccttggcatgatctggagataggtcctggtgctccaaccatattcaactgcgtaaggccaccctgtcatgcttgactggtcctcttgtgatatgttcatgttaatagcatgatgtcttttgttctattggaaaataaaaagtctccctggactctaaaatcaatgcctgtgaacacatgaactgtttgtgtcacccatgttcctctgctccttggcactttctgatgcatgctcaaatgcttaagaaagactcatagaagcga

SEQ ID NO: 30294 - DNA, 305 bp, Zea mays
cgagaattggccccaagttcctgaacgccagtgctgggttcggtggctcatgcttccagaaggacatcctgaacctggtgtacatctgcgagtgcaacggcctgcccgaggtggccaactactggaagcaggtgatcaggatcaacgactaccagaagagccggttcgtgaaccgcgtcgtggcctccatgttcaacaccgtcgccggcaagaagatcgccgtcctcggcttcgccttcaagaaagacaccggtgacaccagggagaccccggccattgacgtctgcacaggcctgctgggcgac

SEQ ID NO: 30295 - DNA, 327 bp, Zea mays
cccggtctgacgagaagctactgtccgtcttccgtgagggtgtgaagtacggagctggcattggccctggtgtctacgacatccactctcctaggattccctccaccgaggagatcgcagaccgcgtcgagaagatgctcgccgtgctcgacaccaacatcctctgggtgaaccctgactgtggtctcaagacacgcaagtacacggaggtcaagcccgccctgaccaacatggtctcggccaccaagctcatccgcacccagcttgccagcgcgaaatgagtcgtttgatagctccatggtctgatagcgcggaatgagccagttt

SEQ ID NO: 30296 - DNA, 326 bp, Zea mays
  unsure (1)..(326): unsure at all n locations
cgttttctcgcagtcggcggcacatggtggcgcgccttgctccacgttctcggcatatgccatggcccacaaggggaaggcgacgtccgacgtcacctacaacccggatgacgggcccgacgcgtacaccaaccccgccatccacagccgactcagtgagtacaccgcaatggccaaggaggtccatgggccagattacgatccgaggaccgaggacatcgacggagatgtcctcatgagggtcggaggaggcaagaggcatgggcggtactggattgccgacggggcaatcgactcgtcctnncactccactctctctcaggtgc

SEQ ID NO: 30297 - DNA, 322 bp, Zea mays
cggaaggcagatgtctacagctatggcgttctgcttatcgaaattgtgagcggaagatgcaacactgatacgaaattgccctatgatgaccagattctccttgagaagacatggagatactatggtcgcgggaatctggagaagatcatagacagctcccttggcgacgacctggacgttgacgaagcctgcaggtttctgaagatcgggctcctctgcacccaagacggcacgaaacgccggccgggcatgtctgcggtggtggccatgctgagaggcgaggcggacgtggacacggagacgatcagcaagcccgacgtga

SEQ ID NO: 30298 - DNA, 307 bp, Zea mays
  unsure (1)..(307): unsure at all n locations
gtgatacagccgttccttggcaccgtgcacgcgctcgtggcggcctggctgccgggaagcgaaggccagggcatcaccgacgtgctcttcggggactacggcttcacggggacgctgccgcggacgtggttcaagtcggtggaccagctgccgatgaactacggcgacgagcactacgacccgctgttcccgctcgggttcgggctcaccacacagggcaagaaggggtgctagaagaagacggggtggggggtggtacttggtagagataggaaattggattaaacagtgcntgctgcgagggaca

SEQ ID NO: 30299 - DNA, 322 bp, Zea mays
ccggaagcctcaaatccgctctattcctctctctccctctctcccccatcgcaccagcaggcgagcgcgaggcggaggagtagagatggagtcggaccagggcaagcttttcatcggcggcatctcctgggaaacgacggaggagaagctgagcgagcacttctcagcctacggcgaggtaacgcaggccgccgtcatgcgcgacaagatcaccggccgcccccgggcttcgggttcgtcgtcttcgcggatcccgccgccgtcgacagagcgctgcaggacccccacaccctcgacggccgcacggtcgatgtgaagcggg

SEQ ID NO: 30300 - DNA, 326 bp, Zea mays
cgcccatcgtgaagctggaggaggtcgccgttaccactggagaggaggacgaggacgcgctcctggacatgaaggcgaactgctaccggttcgacaaggaggggaaccagtggaaagagcgcggcacaggcactgtgaagctgctcaagcacaaagacaccgccaaggtccgcctcgtcatgcgtcaggcgaagacgcttaagatctgcgccaaccatctcgtggtggcgacgactaagatgcaggagcacgcggggagcgacaagtcgtgcgtgtggcagcgctggacttcgccgacgggagctcaaagaggagatgtttgctat

SEQ ID NO: 30301 - DNA, 329 bp, Zea mays
gcttgtgaagctgaagacagaatgtggctaccagtttacttcaaagttggagggcatgttcactgatttgaagacctctcaggatactacacaagggttttatgcatctacttcctcggagctgccggcagatgcccccacaatgtctgtccagatactcacaactgggtcatggccaacgcaaacctgcaatacctgcaatctcccccctgaaattgtttctgtctcagagaagtttcggtcttattaccttggcacacataatggcaggaggctaacatggcaaacaaacatggggacggctgacatcaaagtaacatttggaaatg

SEQ ID NO: 30302 - DNA, 320 bp, Zea mays
gaacgcccccggctgccccaccacctccggggcaggggctggagccggtgccggcagcaccttcagcggcccagtaggccggtcctctaggtcctccggctacctcggccgcgcagggccgcagccgatgctcccgttcctgccggcgttcaacgacacgaacacggcgaccgccttctcgaacaggctccggagcccagtgccggtgaaggtgcccggcccggtgacccaggaggtgttcaccaccgtggggttcgggctcttcaactgccgccccggcccgttctgccagggccccaacaacagcccgttcggcgcga

SEQ ID NO: 30303 - DNA, 321 bp, Zea mays
agaagaagggcttctacctcaaggccttgaagcttgtgaacgtggagaggtcgtttgctgagaagcactacgccgatctcgcctccaagcccttcttccagggcctcgtggactacatcatctctggccctgtggtggccatggtctgggagggcaagagcgtcgtcacaactggccgcaagatcattggcgccaccaaccccctggcttctgagcccggcaccatccgtggcgactttgctgtcgacattggcaggaatgtcattcatggaagtgacagcattgagagtgctaataaggagattgccctgtggttccccg

SEQ ID NO: 30304 - DNA, 321 bp, Zea mays
tgaccatgtcgccacctggcccctctacagtgaaagatgcctactgcttgctgaacttcggggacagcattactacagatcacatttcacctgcaggaagcatacacaaagacagtcctgctgccaagtatttgatggagcgtggtgtggaccggaaggacttcaactcatatggtagccgtcgtggtaatgatgaagtaatggcaaggggaacgtttgcaaacattaggatcgtgaacaagtttttgaacggagaagttggacccaagaccattcatgttcctactggggagaagctttctgtttttgatgcggccatga

SEQ ID NO: 30305 - DNA, 320 bp, Zea mays
cggcgacaccagggagaccccggccatcgatgtctgcaagggcctgctgggtgataaggcccagatcagcatctacgacccccaggtgacggaggaccagatccagcgggacctggccatgaacaagttcgactgggaccacccgatgcacctgcagccgacgagcccgacggctgtgaagcaggtgagctgcgtgtgggacgcgtacgaggccaccaagggcgcccacgggctgtgcatcctgaccgagtgggacgagttcaagaccctggactaccagaagatcttcgacaacatgcagaagcccgccttcgtcttcg

SEQ ID NO: 30306 - DNA, 323 bp, Zea mays
cccaccagcagcttcccccttgctgtcgccgcctctctccgcgcgaccgatctaccgccgccgccaccatgtcgctgatcgccggcgaggacttccaacatattctgcgtctgctgaacaccaacgtggatgggaagcagaagatcatgttcgccatgacctccataaagggtgttgggcgccgcttctccaacatcgtctgcagaaaggccgacatcgacatgaacaagagggccggtgagctgacgcctgaagagctggagcgcctgatgacggtcgtggccaaccctaggcagttcaaggtgccggactggttcctcaac

SEQ ID NO: 30307 - DNA, 319 bp, Zea mays
cacttcatgctttcgtcctacgctccagtcatttctgctgagaaggcctaccacgagcagctgtccgtggctgaaatcaccaacagcgccttcgagccatcctccatgatggccaagtgcgacccccgccatggcaagtacatggcatgctgcctcatgtaccgtggtgatgtggttcccaaggacgtgaacgctgctgtggccacaatcaagaccaagcgcaccatccagttcgtggactggtgcccgactggcttcaagtgcggaatcaactaccagcttcccagcgtcgtcccaggcggtgatcttggcaaggtgc

SEQ ID NO: 30308 - DNA, 320 bp, Zea mays
atcacaagcatgcgccaaccatcgagcagatagaagatcgtcgagatcgaccatatgccatggcggcctctgtttctgcctcttgccttattggcctgacgtcgttggcggcggtgctggtggcgctggcgtcggcggcgtcggcgcagtgctcgtcgacgttctacgacatgtcatgcaccaactcgctgtccaccatcaggagcggcgtgaactccgcggtgacgcaggagcctcgcgtgggggcgtcgctgctcacgctccatttccacgactgctttgtccgcagcttcgacgcgtcccttctgctgatagacacg

SEQ ID NO: 30309 - DNA, 324 bp, Zea mays
tgactgttggtattgctgtaatcagctggttggcccttccagctaagtttaccatcttcaactttggtactcagaaggatgtctccaactggggcttgttcttctgtgttgcaattggtctgtgggctggtctgattattggttttgtcacagaatactacactagcaatgcatacagtcctgtgcaagacgttgcagattcttgcagaactggtgctgccactaatgtcatttttggtcttgctcttggatacaagtcagttatcatcccgattttcgctatcgctgttagcatctatgtcagtttctccattgctgcaatgt

SEQ ID NO: 30310 - DNA, 324 bp, Zea mays
caacagggatgtcaagttggaatataagatcctgaaggagaagatcaaggagtacaacaagaaggacgccaaattctacagcaacatgttcgccaagatgacaaagtagcttttggggtggaggatgttgtggtgaagcgaagggattaaaaacaccgatttctgctgccgaagacttcgcccgttgcttaacttctcgcttttcgcatactttgtagtcaattagtgtgcacggatgcttggatatgtgaaactgaggaacatgtacttcgaggattattattggttctgaatttttatgttttctggttcttgttaggacca

SEQ ID NO: 30311 - DNA, 323 bp, Zea mays
tccgctatgagtccctctcagacccatccaagctcgactcgggcaaggatcttcgtatcgacattattcctgataaggaaaacaagaccatcaccatccgcgataccggtattggtatgaccaaggctgatctcatcaacaacctcggtactattgcccgctccggtaccaagcagttcatggaggctctgactgctggtgccgatatctccatgattggtcagttcggtgtcggtttctactctgcatacctcgtcgccgacaaggtcaccgtcatctcaaagcacaatgatgacgagcagtacatctgggagtctagcgcg

SEQ ID NO: 30312 - DNA, 326 bp, Zea mays
ctcatcttttctcgtttagaacctctaaaatttcccccactcgccagtcgcagcagcacctgtagcagtcatggacgccagcggagccggtagcaaggggaagaagggggcggccgggcgcaaggcaggcggccccaggaagaagtcggtgacgcggtccgtcaaggccgggctgcagttccccgtcggccggatcgggcgctacctcaagaagggccggtacgcgcagccgtgggcactggcgcccccgtctacctcgccgccgtcctggagtacctcgccgccgaggttctggagttggcagggaacgcggcgaaagacaacaa

SEQ ID NO: 30313 - DNA, 323 bp, Zea mays
tggttggcctgttggtactctatatcgtcccttccagtgtacccgtcctccagcccattatacattatacttgctccagataagaccaagagcgtcatggccaacgccttgcctctcatcgtcgcgctggtcgccgccgccgggtgcgcggcgctggcttcggccacgtcgtacaccgtcggcgactcgcagggctggacgacaaccggcgtcgactacagcagctgggccagccgcaacactttcgtcgtcggagacacactagtgttcaactacgtgagcaaggcgcacacggtgacggatgtgagcaatgccggctacga

SEQ ID NO: 30314 - DNA, 321 bp, Zea mays
cgtccaggggtcgtcctccgccagccgcgatcgcaagaaaggtgttccttggactgaagaagaacaccggagtttttgctgggattacaaaagctcgggaaaggggattggcgaggaatttctcgtaattttgtggtctcaagaacacctactcaagtagcaagtcatgctcaaaagtattttatacgccaatcaaatatgagcagaaggaagagaaggtctagccttttcgacatggttcctgatgagtccatggaccttccaccccttcctggaagtcaagaaccagagatctcacagttaaatcaaccgccactgccg

SEQ ID NO: 30315 - DNA, 327 bp, Zea mays
ctgctcctgtacgcatcgaaatgctggtgaccttccttacagtgcttcaggcatacttgttagccgaatgcccgttttatacgagtgtggtgattcctgcacatgttcacaaaattgccggaaccgagttgtacagaaaggtacgcagatccgttttgaagtttttaagacaggagatcgtggttggggcctccgtagttgggatccaattcgagcaggcacatttatctgtgaatatgcaggtgaaatcattgacataaatagagtgaatggtgaagatgactacatatttgagacttctcctttagagcagaatttaagatggaa

SEQ ID NO: 30316 - DNA, 319 bp, Zea mays
gccaaagcaagttgctaggtcctttgaaccagcaactgaagcttcctcgtctcatcatcgagaccagtaagcaacatggcggctaatctcaagtgggctcctgttctagccctcgtcgtcgtcgttgctgccatggttggcaccacgagcgccggcaacatcgcagtgtactggggccagaacggcaacgaaggcagcctggcggacgcctgcaactccgggctctacgcctacgtcaacatcgcgttcctcacaaccttcggcaacggacagaccccagtcctcaacctcgccggacactgcgaccccggctctggca

SEQ ID NO: 30317 - DNA, 201 bp, Zea mays
tgcaaataacctgtctcccatgagacggtggacgatatgtgtaggcctgtgagcagttagtacaccggcgccagtgtgttctggaggatttttcatgtcagagcctttctcttgtgtgcttgctgtagatgccaaggggagcttattggctgttgaagcctgatgcaaaataaagtacgaaactatgttttttgtttaact

SEQ ID NO: 30318 - DNA, 317 bp, Zea mays
cgactgggccgccgccgcttggtgctgaggctttcgttggtctcttcggcggcgacgagcacccaccagcagttctgtagaaatggctgatggtgaggacatccagcctcttgtctgcgacaatggcaccggaatggtcaaggctggttttgctggggacgatgcaccaagggcggttttccctagcattgttggccgtcctcgccacactggtgtcatggtagggatgggacagaaggatgcatatgttggcgatgaggcacagtccaagagaggtattctcacgctcaagtacccgattgagcacggtattgtga

SEQ ID NO: 30319 - DNA, 316 bp, Zea mays
cggctcgaggggcggttctcagcgacctcattccaggtcctgggccacatgaagaccgtgtgcgtgctgatcctgggctggatcctgtttgactcggccctcaccgtgaagaacatcctcgggatgctgctcgccgtgatgggcatggtggtctacagctgggccgtggaagcggagaagaaggcggcaccccgatcccccggaacaagggcggcatgctcgacggcgaggacgtgcccctcaaggccagggtgagcggcgtgcccgcggtcgacctcgaggacggcgacgtgaagggctagccgctgatccgttc

SEQ ID NO: 30320 - DNA, 186 bp, Zea mays
  unsure (1)..(186): unsure at all n locations
atccacttccagcagaacagagaggcacggcnccgccgccgtcgtcgccgccttcaacagccagctccagggcacgcaggccatcgccatgacgctcttcggcgccgtgccgcccgtgccctccgacatcctcgccaaggccttccgcatcagcagcggcgaggtggaccacatcaaggccaactt

SEQ ID NO: 30321 - DNA, 330 bp, Zea mays
gccgtctacgcctccaatttggcctctctcccttgcaagtttaagcttcatcttcagccatgggtaaggagaagtcccacatcaacattgtggtcattggccacgtcgactctggcaagtcgaccaccaccggccacctgatctacaagcttggaggcattgacaagcgtgtaatagagaggtttgagaaggaggctgctgagatgaacaagcggtccttcaagtatgcttgggtgctcgacaagctcaaggctgagcgtgagaggggtatcaccattgatattgctctgtggaagtttgagaccaccaagtattactgcaccgtcattg

SEQ ID NO: 30322 - DNA, 326 bp, Zea mays
aagcaactgtgaactgatagggccagatggagaggagagaatagcatgttcagttggaacaggtccagttgatgcagcttacaaggctgttgaccaaataatccagattccaaccgtcctccgagaatacggcatgacttcagtcacagaaggcattgactctattgcgacgactcgagtggttgtcaccggagacgtggccaacaactccaaacacgccttgactggccactctttcaaccgctccttcagcgggagcggggcggcaatggacatcgtcgtgtccagcgtcagagcttacctgagtgccctgaacaagatgtgca

SEQ ID NO: 30323 - DNA, 334 bp, Zea mays
gaagatgtttccctctgacgtcgagttactatgaacaattttgatcacttatgtgcttctaccggtagagtgaagaccagaatgacaacataccgttggatagcagagaagtcaatcccatttttgaagaaggatccaaatatgggcgcaaaaaagttacaagaggagctagaggataaatataatgtgaagctaggatactcaacagtgtgggctggtagacagaaggcggtggaacaaatatttggaacatgggaagaaagttttgcagatttgtataggttcaaggcagagattgacgcaaaaatgcctggaagtgttgtcgatttagagg

SEQ ID NO: 30324 - DNA, 336 bp, Zea mays
ctccggccggcgacgcgggggaaaatggggaagacgccggtgcggatgaaggcggtggtgtacgcgctgtcgcccttccagcagaaggtgatgccggggctgtggaaggacatcaccaccaagatccaccacaaggtcaccgagaactggatctccgccacgctcctcctcacccccgtcgtcggcacctaccaatacgccatgtggtacaaagagcaggagaagctttcccacagatactaaatgggatgtcctccaagttgctgcggcttgtcgcagttgaattttccatgatgggttgtataatctgtcaatgtcatttctttgctcagtttt

SEQ ID NO: 30325 - DNA, 332 bp, Zea mays
agaggatgcagctaaagttgttgatggtctagctctaaaggcagcggataggcagtcttctatagaacagattaagaagctgtatgaacttttctgcaagtgtgattgcacattgctggagataaatcctctggcggagacagctgacaacaagcttgttgctgctgatgcaaaattgaactttgatgataatgctgcatttagacagaaagaaatatttgcactgcgtgatacaactcaggaagaccccagggaggtcgctgctgccaaagcagatttgaactatattggtcttgatggagagattggttgcatggtgaatggagcaggat

SEQ ID NO: 30326 - DNA, 317 bp, Zea mays
agcggctacggtggcggcggcggctacggtggtggtggcggcggctacggcggtggcaaccgtggcggcggctacggcaactccgacgggaactggaggaactgagcggtggggcccgcgcggccaagttatcctgttcgctaccgtgatgtttaccctagtccagagggtttatcttcgttcgtgtcgtgtttgttgttgcccatctgtgtttttgattgcaaggtcgctctgtgtcagttgttagtgctgtgttcatcctcggtttcagcagacccatgcatcaaacagcatggactgcggatcgatggatgctg

SEQ ID NO: 30327 - DNA, 252 bp, Zea mays
tggcgaggcaaaagcattgcgaccacagacagcgcgcgcttcaaggcctttttttttgagataacaaggaggagaggaggagatggcggtcacgatcacgtgggtgaaggcgaggcagatcttcgacagccgcggcaaccccaccgtcgaggtggacgtgggccttagcgacggcagctacgcgaggggggccgtacccagcggcgcatccactgggatatatgaggccttggagttgtaggatggaggatc

SEQ ID NO: 30328 - DNA, 325 bp, Zea mays
gctgtacggggcggtgatgtcgtggaacgtgacgaggtgcgcaacggcgctggaggaggctggctccgactacgagatcgtgcccatcaacttcgccaccgccgagcacaagagccccgagcacctcgtccgcaacccgtttggtcaggttccagctctgcaggatggtgacttgtacctcttcgaatcacgagcaatctgcaagtacgctgctcgcaaaaacaagccagagctgttgagggaaggaaacctcgaggaggcagcaatggtggatgtttggatcgaggtggaggctaaccagtacaccgctgcactgaatcccatc

SEQ ID NO: 30329 - DNA, 325 bp, Zea mays
agccaatcggcacggcggcgcagggcacggaggagaaggactacaaggagcctccgccggcgccgctgttcgaggcggaggagctgacgtcgtggtccttctaccgggccgggatcgccgagttcgtggccaccttactgttcctgtacatcagcatcctgactgtgatgggcgtgacaagtcgtccagcaagtgcgccaccgtgggcatccagggcatcgcgtggtccttcggcggcatgatcttcgcgctggtgtactgcacggcgggcatctccggcggccacatcaacccggccgtcaccttcggcctcttcctggcgcgg

SEQ ID NO: 30330 - DNA, 325 bp, Zea mays
agtcagatatgtaaatcgtttaaagctttgtgctagtctaatcttgatctgtggttccttttagtcatgatgtttatgccgatacaattatatataaagcagtttttggttaataaacagtaaacttcctgaattaataattaaagtttattttgtattattcaggatggcctcctgatttgataatggaagtcattttgtattattcagtatagccttggtacctggtagatagccatgcttattatgcatattgttttgcagatgagctcatcaagaatgctgcctacattggcacccccggcaagggtatccttgctgctga

SEQ ID NO: 30331 - DNA, 325 bp, Zea mays
gcggactcatgaggaaccatgacagccctgaaaccttggtgatactcgctagtgcctctgaccttctacttcgtgctactgatggaatacttgttgacggtgaagcttgtactttgccacagcttgagcttctcgaagtaaccgctcgagcagtccatcttattattgaatggggagatccaggtttatcagttgctgatggcctttctaatctgctaaagtgccgtctttcaaccaccatccgctgcctttctcacccaagcgcgcacgtgcggcagctcagcatgtccgttctccgtgacatcctggaccacggatacgtgag

SEQ ID NO: 30332 - DNA, 316 bp, Zea mays
gaggaagcacggtcaccttttgtaaagaagtacaaaactatagttcatcctggtgaggttaacagaatcagggaacttccacagaacagtaagatcatagccactcacactgacagtccagatgtacttatttgggatgttgaagcacaaccaaatagacatgctgtcctaggagcaagcgagtctcgccctgatctgatattaacaggacataaggaaaatgcggaatttgcgcctgccatgtgtccagcagaaccatatgtcctatcaggaggaaaggaccaatctgttgtcttgtggagcatccaagaccata

SEQ ID NO: 30333 - DNA, 317 bp, Zea mays
ggtccgtgttcgtggaggtaatgtgaaatggagggctcttcgccttgatactggtaactactcatggggaagtgaagctgttacccgcaagacccgtatcctcgacgtggtctacaatgcatcaaacaatgagcttgtgaggacacaaacccttgtgaagagtgccattgtgcaagttgatgctgccccattcaagcagtggtacctcactcactatggagttgacattggtaggaagaagaaaacccctgctgcaaagaaggataatgctgagggacaagaggttgaggcagcagctgaggaaacgaaaaagagca

SEQ ID NO: 30334 - DNA, 309 bp, Zea mays
  unsure (1)..(309): unsure at all n locations
gggtttgggaatctgtaggaagggagaggggagcgcgctcagggtcagggaggcgaagatgatcgaggtggtgctgaacgaccgcctggggaagaaggtgcgggtgaagtgcaacanggacgacaccatcggcgacctcaagaagctggtggcggcgcagacggggacgcgccccgagaagatccgcatccagaagtggtacaacatctacaaggaccacatcacgctcaaggactacgagatccacgacgggatggggctcgagctctactacaactaggcgccctgaccccaaccgtgccctgatgt

SEQ ID NO: 30335 - DNA, 319 bp, Zea mays
ctcatttcttgagatgaacccattcaccttggtaaatggtgaaccgtatcctctggatatgagaggagaactagatgacacagctgctttcaaaaacttcaataagtggggcaacattgtgtttcccctaccatttggaagagttctcagtccctccgaaagttttatcacatgaactggatgagaagacaagtgcgtctctgaaattcacggtactgaacccaaaaggacgcatctggacaatggttgcaggtggtggtgctagtgtcatatacgcagacactgttggtgatttgggatatgcttcggagctaggaaa

SEQ ID NO: 30336 - DNA, 315 bp, Zea mays
tagcttttgtagctcaaattagggatgaagatggaactgtgttgcctaatatccatatagctgactgtggccataagattggactgaatggtgttgataatgggcggatttggtttcagaatatacgtgttcctcgtgagaacttgcttaatttggttgctgacgttttgccagatgggcgatatgttagcatgatagataatccagatcagaggtttgcagctttcctatctccgcttacacttggtcgagtaaacattgcagttaactcagtctacatttcaaaggtcagcctagcaattgctgtgagataca

SEQ ID NO: 30337 - DNA, 322 bp, Zea mays
ctctcccccacctcccggtccggcagcagagagcgggggtgcagagagatcgagatccggaggccgcgagtgggagcgccaccaccagcgactgcggcaatggcgggcacggtgacggtcccggggtcgtcgaccccctccacgccgctgctcaaggacgagctcgacatcgtgatcccgacgatccgcaacctcgacttcctggagatgtggcggcccttcttccagccctaccacctcatcatcgtgcaggacggcgacccgaccaagaccatcaaggtgcccgagggcttcgactacgagctctacaaccgcaacgaca

SEQ ID NO: 30338 - DNA, 325 bp, Zea mays
agctctgtatcagtatgccaaatttcagtttgagtgtggtaactactcctgggctgctgagtacctgtaccagtatcgtgctttgtgcacagatactgagcgaagtgtgagtgccctctggggaaagctagcagcagaaatcctaatgcagaactgggatgtggctttggaggaattcaaccgcttgaaggaaataattgattcaaagaacttctcatcacctctgaatcagctccagaacaggatatggctgatgcattgggctctgttcatcttctttaaccatgaaaatggtagaaatgggatccatgatctgttcttccag

SEQ ID NO: 30339 - DNA, 324 bp, Zea mays
ctgggatgataaaggactttgatgaacctggaactcttgcaccaactggtctttttgttggaggtacgaagtacatggtgatccaaggtgaacctggagttgtcatccgaggaaagaagggcactggaggcattactatcaagaaaactggcatgtccttgattatcggtatctatgatgagccaatgactccagggcaatgcaatatggtggtggagaggctcggcgattacctgatcgaacagggcttctaagtttgtcataatgctattttggtcattgggcacttaagtttgcacctcatttggttctgtaatatgtggg

SEQ ID NO: 30340 - DNA, 331 bp, Zea mays
agaaggcggcgcacctggcgctgaaggcactgggcaggcccaacgccgtggacgggaccatcccagaggtgtcgccggcgctgcgcgaggagttcgtgattgcgtccaaggacgacgaggtcgtggacgcctgagcgagcatccacgtgccagcatgcaagcagtgtcttatctgggccggggcgccatcacggggtttcttttaatctgggactttgttgttgttggacgaatgaattcccttccttcgatcggttagctttaatctgtctcgttagtgtcgtgttcgtgtagcacgatgccacagctacaccatgccgtgtgctctgtc

SEQ ID NO: 30341 - DNA, 327 bp, Zea mays
cagattctctgaagcctaaatccttcctggaagagcactcgtttcttatcactgatgttagatttagcccaagcatgtcgcgccttgcaacatcctccttcgacaaaactgtgcgggtttgggatgcagataacactgactattcactccgaactttcacgggccattcagcatctgtcatgtcacttgattttcatccaaacaaagaggatatgatatgctcctgtgatggtgatggggaagtgcgcactcggagcataaataatggtagctgtttgacatgtgttaaggtgtttaaggcaggtgctactcagatgagatttcaac

SEQ ID NO: 30342 - DNA, 327 bp, Zea mays
gatggcgcagatcatcgatggcaaggccatcgccgccgacgtccgccgcgaggtcgccgccgatgtggccgcgctctcgtcggcccacggactcgagccggggctggccgtggtcatcgtggggagcaggaaggactcgcagacgtacgtgaacatgaagcgcaaggcgtgcgccgaggtcggcatctgctccatcgacgtcgacctcccggaggacatctccgagaccgcgctcgtcgccgaggttcatcgcctcaacgctgaccccgccgtgcacgggatccttgtccagcttccacttcctaagcatatcaacgaagagaagat

SEQ ID NO: 30343 - DNA, 298 bp, Zea mays
aggagcggtacgagcgcgagttccgcgagctcgcaaagggcgccggcttctccgggttcaaggccacctacatctacgccaacgcctgggccatcgagttcatcaagtgaaccaccgtcgccgcgatgagatggcatggctgccacatgctttgcttgcttggtcctcgtatcgtacgtcgccgtcgtcgtcttcttctggttattgcgctgctacctcgctgctctcgcgtatgcatgtacttttgcttaattttctttcttcatatcatgcactctggctggcctagactgccccg

SEQ ID NO: 30344 - DNA, 325 bp, Zea mays
gcagcagccggcggcggccatagcccaggagcccggagctgtttcttcgtcgcaggaatgggcaaggacggcatccagtggacgccttcacggcggagcgattcaagggcaacccagccgcggtgtgcctcctcgaggacgccgccaaggccgccgacgagcggtggatgcagtccgtcgccgccgagttcaacatctccgagaccgccttcctcctccgggaaaagtcctccgcggccggcgccgtcccgctgttccagctccgatggttcacccccgtcgctgaggtggagctctgctgccacgccacgctggcttccgccca

SEQ ID NO: 30345 - DNA, 321 bp, Zea mays
gtcgaaatgacattgagattgatggagcgttttggtgtgaaagcagagcattctgatagctgggacagattctacattaagggaggtcaaaaatacaagtcccctaaaaatgcctatgttgaaggtgatgcctcaagcgcaagctatttcttggctggtgctgcaattactggagggactgtgactgtggaaggttgtggcaccaccagtttgcagggtgatgtgaagtttgctgaggtactggagatgatgggagcgaaggttacatggaccgagactagcgtaactgttactggcccaccgcgggagccatttgggagg

SEQ ID NO: 30346 - DNA, 316 bp, Zea mays
gtagccattagcagctggaacttgttggaggagatctagagcttagctttgagagagataaaaatgggcgtgggaaaagttctgaacgacgtgaagccgtacctggccatggtcctgctgcaggtaggcttcgccgggatgtacatcgtggccgtggcctcgctcaagcgcgggatgagccacttcgtcctcgtcgtgtaccgtaacctctgcgccaccgccgtcatggcgccattcgcgctctggttcgagaggaacgcgaggccaaggatgaccatcaccatcttcctcaagataatggggctcgccatgctcg

SEQ ID NO: 30347 - DNA, 320 bp, Zea mays
atctcctcgcattttccttgcaaccgattgcctatcgccctcccagcccaagatcgatggcgcgcaaggtcgagaagaagcccgcggcgaagaatccggcggaggaggagcccgctgcggagaagacgaccgccgggaagaagctcaatgcggagaagctggtccccgcgggcaagtccgccggcatagagggcggcgagggcaagcgtggctagatgaagggcaagaagatcgttgagacgtacaagatctacatcttcaaggtgctgaagcaggtgcacccggtcatcggcatctcgtccaaggccatgtccatcatg

SEQ ID NO: 30348 - DNA, 315 bp, Zea mays
ctggaatgtcatagcagttactacagcttggatcaagggggcaggcgttaagatctggttgttggcaataatctacttcatatctggtgttcctggtgcatatgttttgtggtatcgtcctctatataatgcaatgaggactgatagcgcattgaagtttggattgttcttcttgctttacgtgttccacattcttttctgcgtattttctgctgtggctcctcctgttgtatttgaaggaaaatcattggcaggaattttgccagcaattgatcttattagcgtgaatgctttggttgggatattctactttgt

SEQ ID NO: 30349 - DNA, 314 bp, Zea mays
gccgcaacgccgagaagacgcgagacgaagggaggaggtgagccaccggaagcggagacgtgagcactcgaccaaccccgtcgatccggctgcggcgcggcgtgctagatcgctaccgaccatggtggtggaggagatcgccgagggggtgaagaacctaaccgtcaccggagatgcggcggcttcaggcggagaggggcagacgaagggcggcggcggcagcagcaaccgcatccaggtgtccaacaccaagaaacccctcttcttctacgtcaacctcgccaagaggtatatgcaacagcacggcgatgtag

SEQ ID NO: 30350 - DNA, 313 bp, Zea mays
ggaatctgctgagagcacaatggtggcctataaggctgctcaggacattgctctggctgagctggcacctacccatccgataaggctgggacttgctcttaatttttcagtgttctattatgagattctgaactccccagacaaagcttgcaacctggcaaagcaggcgtttgatgaagctatctctgagttagacagccttggtgaggagtcatacaaggatagcactctgatcatgcaactcctgagggataacttgaccctttggacatccgacctcacggaggatggtgctgatgagggcaaagatgcc

SEQ ID NO: 30351 - DNA, 286 bp, Zea mays
ttggcttctcctccccctcctgttcgggttcgggttcgtgaggttctccggggttcgggttcgtgggtgagcggatcgagatggcggcgtcggatgttgagtaccgctgcttcgtcggctgcctcgcctggtccacggacgaccactccctccacaacgccttcagcacctacggctgggtcctcgattccaagatcgtcctcgatcgggagacgcagaggttccgctgcttcggcttcgtcaccttctccacggatgatgcgatgcggaacgccatcgatggcat

SEQ ID NO: 30352 - DNA, 319 bp, Zea mays
gttgaattcgatatggaggggaaagtgtgtggtgtcacatctgaaggtgaaactgcaaagtgcaagaaggtggtctgtgatccttcgtatttaccaaacaaggttaggaagattggtagagttgttcgtgcaattgctatcatgagccacccaatccctaatacaaatgagtcccactcggttcaaattattttgcctcagaaacaacttggacgtagatcagacatgtatgttttctgttgttcatacacgcacaatgttgcgccaagagggaagttcattgcatttgtgtctgcagaagcagagactgataacccgc

SEQ ID NO: 30353 - DNA, 322 bp, Zea mays
ctctgtcttcgcctccgctgccgattcgaaagcacccgtcctgtcccctcgcaaaaccctagctccagccaccatgaagggcaaggctgacacctccaagaaggacgagggcaggctccgggcgggcggcgccgccggaaagcgcaagaaggccgccgcgagctgcaagcccaagcgcccgccctccgccttcttcgtcttcatgtctgaattcaggcaggagtatcaggcgctgcaccctggcaacaagagcgttgcgaccgtgagcaaggcagcaggggaaaagtggcgtgctatgtcagatcaagagaagcaaccatat

SEQ ID NO: 30354 - DNA, 202 bp, Zea mays
agattcaagtcagcggtttttagggttcgagatctcggcatcgtgtcgcggaagccatggcgacaagcatgcttagtaccgtgaaggtgagcaatgtatcactgaaagcagcacaacgtgatataaaggaattcttttccttttctggtgacattgtgcatgttgaaatgcagagtttcgatgagctttctcaagttgccta

SEQ ID NO: 30355 - DNA, 201 bp, Zea mays
cctcaatgtgctgcgtatcatcaatgagccaaccgctgctgctattgcctatggtcttgacaagaaggcaaccagtgtcggtgagaagaatgtcctcatctttgaccttggaggtggtaccttcgatgtctccctccttacaattgaggaaggtatctttgaagtcaaggccacagctggcgacacccatcttggtggtga

SEQ ID NO: 30356 - DNA, 200 bp, Zea mays
gcagccggcaaccgccgccatcgatcgatcgcccggaaactgacctctaccgatgtctggagccggcgaggaggataagaagcccgcggagggcggcgcccacatcaaccttaaggtcaagggacaggatggcaatgaggtgttctttcgcataaagaggtccacccagctgaagaagctgatgaacgcctattgcgacc

SEQ ID NO: 30357 - DNA, 200 bp, Zea mays
gtccgccgggcgctcaaagaagagaaaattgctgctcgcagtgctatactgccgatgctccaagcagaagaggatgaaagatttgtcaaagagtggaagaagtgtcttgaggaggaggcgaggatcatgaaagacgttccagggtggaaggtcggcgagagcgtgtacaactctgggaaatggatgcacccggctactgg

SEQ ID NO: 30358 - DNA, 199 bp, Zea mays
aaagttcactagagaagcatttgaaggaggagccatgtctgaggagaagcaccaccaccacctgttccaccaccgcaaagcagaggaggaggaaggcgcctccggcgaggtcgactacgagaagaaggagaagcaccacaagcacatggagcagctcggccagctcggcgccatcgccgccggcgcgtacgctctgcac

SEQ ID NO: 30359 - DNA, 194 bp, Zea mays
atataataataagctaatagcagcgccacgcaccgacaccaatacgccatgggttccatcatggagcaacgctgcaacaacgatccgcaggcgctgctcgacgctcagctcgagctctggcacagcacgttcgcgttcatcaagtccatggcgttcaagtcggcgctggagctcggcatcgccgacgccatcca

SEQ ID NO: 30360 - DNA, 171 bp, Zea mays
gtctttgaactagcaggagagactgtcatgctagcttctggtactgccattggatatggttcaacattgactatgactgatacatcgaacaagattaagaaggggacaaaaggagatgtttctgtactgaatcctactcttataatttcagttcctgcaattttggatcgt

SEQ ID NO: 30361 - DNA, 182 bp, Zea mays
gaaggagaggctgcccaggttcactcctgagcaggctaaactggtgaagggctcggcagactacatcggtatcaacgagtacacatccagctacatgaaggggcagaagctggtccagctggcgcccagtagctactctgccgattggcaggttcaatatgtttttgcacgcaatggcaaac

SEQ ID NO: 30362 - DNA, 165 bp, Zea mays
gcacgacgcacgcagagccgcagagatccgtcacactgcaagttttgaaaactgaactgtaagatggcatcagcagagctttcccgtgaggacaatgtgtacatggcgaactcgccgagcaggcagagaggtacgaggaaatggttgagttcatggagaaggtag

SEQ ID NO: 30363 - DNA, 174 bp, Zea mays
ctcagaggtgggttggcttctcctcccccaccggttcgtgttcaggttctggttcgtgggcgagagggaagagatggcggcgtcggacgttgagtaccgttgcttcgttggcggcctcgcctgggccaccgacgaccactccctcaacaacgccttcagcacctacggcgaggt

SEQ ID NO: 30364 - DNA, 269 bp, Zea mays
  unsure (1)..(269): unsure at all n locations
aanatggagaggatctatcagtggataccccaggacacattgtcagcttccatatcgcatgcatcatactcatgtaacagccagctagtttttgctgccttcaatgatggtaacttaggtgtttttgatgcggagaacttgagattaagatgtcgaattgcaccatcggtgataaacagcaatccacctgttcaccctcttgtcgtcgccgcacatccccacgagccaaaccaatttgcggtcgggctgtcagatgggtccgtcaaagt

SEQ ID NO: 30365 - DNA, 249 bp, Zea mays
gaggaaatggttgagttcatggagaaggtagcgaaaactgttgactcggaggagctcactgtggaggagcgcaacctcctgtctgttgcatacaagaacgtcattggagcccgccgtgcctcatggcgcatcatctcctccatcgagcagaaggaggagggtcgaggcaatgaggaccgtgtaacactcatcaaggactaccgtggcaagattgaaactgagctcaccaagatctgtgatggcatcctc

SEQ ID NO: 30366 - DNA, 194 bp, Zea mays
cggctcgagcggaagagcaggcacatcttcaattcatgaaccctggcatggaggatgatccaacttgtggtcctatcctagacaacgttgccgtcaagaagctcttcaccccagacaaaccaaaggataacgtggtgctgaatggagactttgaggagggtccatggatgttccccaacacgagcttcggcgtg

SEQ ID NO: 30367 - DNA, 193 bp, Zea mays
tggacaccagtgcacacggttgaaagtatagttctgagcatcatttcaatgctctctagtccgaatgacgagtctccagcaaatattgaagctgccaaggattggagagagaagcgggatgagttcaagaagaaggttaggcaatgtgtccgcacgtctcaggaaatgctgtgaaggaggaacatgggggagt

SEQ ID NO: 30368 - DNA, 179 bp, Zea mays
tccaggacaaggagggtatccccccggaccagcagcggctgatcttcgccggcaagcagctggaggatggtcgcaccttggctgactacaacatccagaaggagagcaccctccatctggtgctccgcctgaggggcggtatgcagatctttgtgaagaccttgactggcaagaccata

SEQ ID NO: 30369 - DNA, 180 bp, Zea mays
agtcgaccaccacaggacaccttatctacaagcttggaggcattgacaagcgtgtgatcgagaggttcgagaaggaggctgctgaaatgaacaagcggtccttcaagtacgcgtgggtgctcgacaagctcaaggctgaacgtgagagaggtatcaccattgatatcgctctgtgggagt

SEQ ID NO: 30370 - DNA, 144 bp, Zea mays
gaatcctaccaaacctagctaccaactcgatcgtcgtcatcacgctcgaccgcacaactgcaccgatgggaggagacctaaaaactactacagcttgtagagctacacatctagctaaatatcgagagtggtaaataaggacac

SEQ ID NO: 30371 - DNA, 184 bp, Zea mays
atcgcgtcctgtccttccacccggcggcttaaaccctagttctcactcccatcgccgcttcagctccgccgctgcagatggagttctggggtctcgaggtcaagcctggttccactgttaagtgtgagcctggatatggctttgtgctgcacctttcccaggctgctcttggggaatcgaagaa

SEQ ID NO: 30372 - DNA, 213 bp, Zea mays
caggacgcctcgctgctttaaagcgcacacggaagagagtcagaaatgctcttcatacagaattgccttacctaatctcgacagaattttcatctaaccaagagaacgaatcatccattgcaaatacgtgtgatgctggatgtactgaaaaagcagtttcagaagcgcatgtggcacgatggaggtctctgtttgtccagatggaccgagcac

SEQ ID NO: 30373 - DNA, 239 bp, Zea mays
cggctcgaggcgcaccaaggcggcgtggagcctccctctgcgcccctacagcttctggaccttcgaccgcttcaactcgcagctctcctgggacctgcagatcagccaggctgccggtcgccgggacccttacgacgacctcatcacccgccactccggctccccgccgtcttcctaaacgcccgtgtcgatctctgcgcagaaggtctacttgggcatcaataagaatctgggtccgt

SEQ ID NO: 30374 - DNA, 221 bp, Zea mays
caacaacaaacaaacaaacgaaacaactcaaaaccgaacttctgtttctttcagttatcgaaatggctaaggatccaatcagagtcctcgttaccggtgctgccggtcaaattgcatactccttggtcttcccaattgccaagggagagctcttcggaaaggaccaacctttgattcttcacttgttggatatcgcacaagctcaagaagctctcggtgga

SEQ ID NO: 30375 - DNA, 323 bp, Zea mays
ctcggctgctacgtagctatatatagctgcagaacagttttagttaccggactgtaggcacaccaagctagatatccaaggggcccccccggaaactagctagctaggatgccaacagcagaggcgacgacgcccgtgccgccggagctgtcctccgggcaagggcggacggtttgcgtgaccggagctggagggttcattgcctcctggctcgtcaagcgcctcctggagaagggctacacagtccgcggcacggtcaggaaccctgtggatccaaagaacgaccacctgagggcccttgacggcgccgtcgaccgtctcgt

SEQ ID NO: 30376 - DNA, 319 bp, Zea mays
cgcgacggcaaggtctgcctcgtgcgcacggaccgtgatgacgacgcgcacgactggatcaaggacatgaagtacagcaccagggtgaaggatgaggaaggctaccctgccatcgtcctcgtcaacaaagccactggagaggctctcaagcattcccttggccagtcacaccctgttcttctgacccgccataatccagactccctggacgagtctgtcctgtggacagagagcagggacgttggtgatgggttccgctgcattaggatggtcaacaacatctacctgaactttgatgctttacatggagacaaggacc

SEQ ID NO: 30377 - DNA, 322 bp, Zea mays
cggttgccgtcgcagatgaccccgcctcaggccgccgcggtgttctacagtccccagtacggcgggtactggtacccacctgattattcataccaacaggtgctacaacattactaccctcagatgtatggtccagcctctcattcagtaccaccctaccaatacatggggtatatgcctagtggcccaagtccaagtgctggattctcaccgatgcagcaacccatgcgaccagcgttctttcagcagccaacggcacagatggatggttctttcccaccagggcattcgcttccgcctaatttcagactccagctgccct

SEQ ID NO: 30378 - DNA, 320 bp, Zea mays
gccgggttcggcccgtgaagcaggaccacagccgcgggctcgaccacggcgcctgggtgccctgatgctcatgtacccggacgccagcatccccgtgtgccagctctcggtgcagaccgaccgcgacggcacgtaccactacaacctcggcaaggcgctggcgcccctgcgggaggaaggcatcctcatcctcggctccggtagcgccacgcacaacctgcgcaagattagcccgtccgacgcgcccgtgccgcagtgggccgccgagttcgacacctggctcaaggactcgctcctcaacggaaggtacgaggacgtga

SEQ ID NO: 30379 - DNA, 320 bp, Zea mays
ggacctcaaatgtgggctgctggttggcaaaaggctcttgcagaagttggacccaatgttgtctggtggattgctgcacagagcgtgttctaccacttatataaccaggtgtcctacatgtctctcgatcagatttctccattgacattcagcattggcaatacaatgaagcgtatatcagtgattgtttcatcaatcattatcttccacactcctgtccgcgctgtcaatgcactgggagctgccattgccatccttggcacattcctgtactctcaggcaaaggcgtgaggcgggccatgatgacgaacgtctgcaga

SEQ ID NO: 30380 - DNA, 285 bp, Zea mays
ctcatgcgcaatccatgcgcacattgtccgggtccgctctcgtgagaacaggaggaaccgtgagcccccgcagcgcttcagacgccgggatgatggcccaaggcctggtcagggcccgccgcgcccaggcggtgcagctcctgcagctgcagctgctgctgctcctcgtacctaagttctggaattagtttcggggcttagttttgtgaaacattacctgttttgagaaaccattgttactgtatccccttgatgtcaaactttttagcacaatttgtggttctg

SEQ ID NO: 30381 - DNA, 319 bp, Zea mays
gacggggaagaccatcactttggaggtggagtcctcggacaccattgacaatgtgaaggccaagatccaggacaaggagggcatccccccggaccagcagcggctcatcttcgccggcaagcagctcgaggacggtcgcaccctcgccgactacaacattcagaaggagtccaccctccacctggtgctccgcctccgcggtggcgccaagaagcgtaagaagaagacgtacaccaagcccaagaagatcaagcacaagcacaagaaggtgaagctctccgtgctgcagttctataaggtggacgacgccacaggcaag

SEQ ID NO: 30382 - DNA, 318 bp, Zea mays
aggcagacggcacacacaccacaccacacctcctcgcttccactccgctcgtctgacatctcgtcccgtcctttcgtttcgaagcctcgcgagccccgacgatggccaccgccgcggtgtcggtcgacgagaagctcgacaagcttcgcgccgaggtcgccaagctcgaccagatcagcgagaacgagaagtccgggttcatcagcctcgtgtcacgctacctcagtggggaagcggacagatcgagtggagcaagatccagacccctacggatgaggtggtggtgccctacgataccgtcgcgtcgcctcccgaaga

SEQ ID NO: 30383 - DNA, 320 bp, Zea mays
caccattagagcgcgcgcgccaagctcgtggtgaggttttcgagatgaaggttatcgagaagatcctggaggcggcgggggatggccggacggcgttctcgttcgagtacttccctcccaagacggaggagggggtcgagaacctgttcgagcggatggaccgcatggtggcgcacggcccctcgaaatcgccaaccgtatgcagaacatggtgtgtgtggaaaccatgatgcacctgacatgtacaaacatgccagtagagaagattgaccatgccttggaaaccatcaaatccaatgggattcaaaatgttttggccc

SEQ ID NO: 30384 - DNA, 308 bp, Zea mays
attttgtcaatgactacaagcagaaaaatcgagactgtctcactcaggtaatccataatcagatcttttgtgtggacatactggagtgagacagtctgtccacacaaaagatctgattatggattacctgagataaatttatttttgcttgcttcaatcagctttacaaaatggaccctgcagctctttgacacatggtgcaatattctcaaacgtgttcccaacagcgcattatggcttttaagattcccggcagctggtgaaactagagtgagagcatatgctgctgccagaggagtaagatcaga

SEQ ID NO: 30385 - DNA, 313 bp, Zea mays
aacgcactctcctatatccgccgccatcgtctcgggctctcatctctaatcttcgggttcgcgtcgcagtgtcttccgcccgggctaccaccatgccgaagcagatccacgagatcaaggacttcctgctgactgcgcggcggaaggacgcacggtcggtgcggatcaagcgggccaaggacgccgtcaagttcaaggtgcgctgctccaggtacctctacaccctctgcgtccacgacgccgacaaggccaacaagctcaagcagtcgctcccgccaggtctgactgtccaggagatttaaggtatcaagcc

SEQ ID NO: 30386 - DNA, 311 bp, Zea mays
cgtcggcctctgctactgaccagcacgggtggaatggtcatctcgctcatcagcctcgggacggcgctcaccgtcgtggggcatcacccggacgccaagatcccgtcggtcgtcgctctgtgcatcgcgtccaccctggccttcgtcgccttcttctctatcggcctcgggcccatcacgggagtgtacaactcggagatattcccactacagctgcgcgcgctgggctttgcggtcggcgtggcgtgcaaccgcgttaccagcgccgttatctccatgaccttcctgtctctctccaaggctattaccat

SEQ ID NO: 30387 - DNA, 312 bp, Zea mays
actatggccaagagcttcctggcgtcgagagtgcacctgatgcgctccgcaagaccggattggccgacaagatcaagtctttaggtttccgcgtggaagatgcaggaaacgttgatattcctgttggtgtagctacgagaaaagctggagagcgccttatgagccccgaggagtgcaccaccgcatgcaagaaaatccacgacgcatctacaagcatgcccgagaccgcgataactttgttactattattggaggagaccatagcattgctcttggctctatttcaggaattatgaaggcacgtcctgatac

SEQ ID NO: 30388 - DNA, 313 bp, Zea mays
ctgtcacacacacacacacacacagacaagtggtttccaaagccaagtgtgtgtactagcaaccagctagctcgggcggcacaggcagccatcatgtcggaggagaagcaccaccacttcttcaaccaccacaagaaggacgaggagcagcccgccggcgagtacgggtactccgagaccgaggtggtcaccgccaccggctgagggcgagtacgagaggtacaagaaggaggagaaggagcacaagcacaagcagcacctcggcgaggccggcgccatcggcgccggcgccttcgcactctacgagaagcac

SEQ ID NO: 30389 - DNA, 312 bp, Zea mays
cgaagctttgaggttcctataacagcacaaaagcttgggaaatctggaaaatttgatgcaattctgtgcattggagctgtgattagaggtgacacaacccactatgatgctgttgcaaactcagctgcatcaggtgtactcaatgctggattatctgctggtgttccttgtgtatttggtgttctaacctgtgaagacatggatcaggcgctaaaccgcgctggtggcaaggctggaaacaagggtgctgaaactgctcttactgccattgagatggcctctctgttccggcatcacttaggctgacacttt

SEQ ID NO: 30390 - DNA, 336 bp, Zea mays
  unsure (1)..(336): unsure at all n locations
ggcttccgctgcatccgcatggtcaacaacacccgcctcaacttcgacgccttccacggcgacaaggaccacggcggcgtgcacgacggcaccgccgtctgctgnctgggagtggtgcaagggcgagaaccagagctggaagatcctgccgtggggtcccgaggccaactcctccgcggcccacgcgggaggcccgcacgccgtgcgcgtcttctgcatagccggcggcgaggactacagcctcacggtgcgcaacggcacggcgtgcctggcgcccaccaacccgcgggacgagtaccagcactgggtcaaggacatgcgccacagcacccgggt

SEQ ID NO: 30391 - DNA, 333 bp, Zea mays
gtttgagactttcaatgttcctgccatgtatgttgcaatccaagcagttctatcactctatgctagtgggcgtactactggtattgttcttgactctggtgatggtgtgagccacactgtgcccatttacgaaggatatgcccttcctcatgccattcttcgtttggatcttgctggtcgggacctcacagactccctcatgaaaatcctgactgagaggggttactccttcacaacctctgccgagcgagaaattgtaagggacatcaaggagaagctggcatatatagcccttgactatgagcaagagttggaaactgccaagaacagctc

SEQ ID NO: 30392 - DNA, 335 bp, Zea mays
tagcgactacgtcgacgtcaaggttaacggcgccgtgcacaagggcatgccgcacaagttctaccacggccgcaccgggagcgtctggaacgtcaccaagcgcgccatcggcgtcgagatcaacaagcaggttaatggccgcatcatcaggaagcggatccatgtccgcgtggagcatgtgcagccctcccgttgcacggaggagttccgcttgaggacagccaagaatgaccagctcaaggcggatgccaaggcccgcggtgaggtgatcagcaccaagaagcagcctgtgggacccaaacctggcttcatggttgaaggtgctacactcgaga

SEQ ID NO: 30393 - DNA, 329 bp, Zea mays
ctaggctctagtcctctcgcatccgcagcttccccagccagctagggtttgcagatgacgaccgcggcgcgccccacctgggcgccggccaagggcggcaacgagcaggggggcaccgcatcttcggcccctcccagaagttctcctcccgcgacctcgccgcgcacacctccctcaagccaagaaaagacggtcaacagacccaagaggagttacagaagaggaatctcagggaggaacttgaggaacgtgagcgcaagcactactcttccaaggataagtcctatgccgaagaaagagaccggcggaaaagctctagccatctactc

SEQ ID NO: 30394 - DNA, 330 bp, Zea mays
ggagaactgccacgagaacgccatggtgctcaaggagggcctggagaagacgggccgcttcgacatcgtgtccaaggacgaaggcgtcccgctggtggccttctccctcaaggaccgcagccggcacgacgagttcgagatctcggacatgctgcgccgcttcggctggatcgtgccggcatacaccatgccccccgacgcgcagacgtcacggtgctccgcgtcgtcatccgggaggagttcagccgcaccctcgccgagcgcctcgttctcgacatcgagaaggtgatgtaccagctggacgcgctcccgtccaggctcccgccccct

SEQ ID NO: 30395 - DNA, 328 bp, Zea mays
gaagaagctccccctctgaactgaagcaatggcaggcggcaatgccggtggcgccgctcgagtcctgttctccatcctcggcctggcgctggcgctgccgctgctcgtggccggcgacgacccgtaccggttcttcacgtggacggtgacctacggcgacatctacccgctgggcgtcaagcagcaggggatcctgatcaacaaccagttcccggggccgcagatcgaggccgtcaccaacgacaacctcatcatcaacgtcttcaacaagctcaacgagccgttcctcctctcctggagcgggctccagcagcggcggaactcgttc

SEQ ID NO: 30396 - DNA, 330 bp, Zea mays
gccgcaactgcagcaacatcggcgtcgcgcagatcgtcgccgccgcgtggtccgactgccccgccgcctccgcggcgcggaggtcagcgcaattcccaacgctaaggttgcgcaaacgaccgccgtcgtcttggccgagcgtaacctgctcggctccgacgccagcatcgccgtccacgcgggggaaaggctgggaagaaggatcgccacggatgcgatcaccacaccggtagtgaacacgtcggcctactggttcaacaactcgcaagagctaatcgactttaaggacgggaggcatgctagcttcgagtatgggaggtatgggaaccg

SEQ ID NO: 30397 - DNA, 327 bp, Zea mays
agacagttcatcgagttgtgaagcatcacaacaagatgaaccaacgcatgccacttatttatgtgaagctgtatatgtaccagatatgtagggcattggcttacattcatggcactattggtgtctgccacagagatattaagccacaaaaccttctggtgaacccacacacccaccagcttaaactatgtgactttggcagtgcaaaagttctggtcaagggggaaccaaacatatcgtacatctgctcccgatactatagggctccagagctcatatttggtgccactgagtataccacagcgattgacatttggtctgctggat

SEQ ID NO: 30398 - DNA, 308 bp, Zea mays
ggggcatggagaacgaagacgacgacgacgtacgccggccgtaagtgagccgagagcccccgatataccagctagctagataaccagccagcgcgacatggaggcggcggcggcggcggtccggcaccggacggtggaggcgaacggcatctcgatgcacgtggcggagtccggccccgacggcggcgacggcgcgcccgcggtggtgttcctgcacggcttcccggagctctggtactcgtagcgccaccagatggcgcaccttgccgcgcggggctaccgctgcgtggcgccggacctccgcggct

SEQ ID NO: 30399 - DNA, 326 bp, Zea mays
acgctgcagccatgagtaagttgcagtctgagtctgtcaaggatgccatctcccagattgttggggatgccaaggagaagaataggaagttcactgagactgtggaacttcagattggtctgaagaattatgatccacagaaggacaagcgtttcagtggctctgttaagttgccccatatccctcgtcccaagatgaaggtgtgcatgcttggtgatgcccagcatgttgaggaggccgagaagatgggacttgactacatggatgttgaggctctcaagaaaatgaacaagaaccagaagcttgttaagaggcttgccaagaag

SEQ ID NO: 30400 - DNA, 325 bp, Zea mays
agagatatcaagcaaaggctttctgaatctgattcaaagccagaggatcgcacgatcagtattaacagacctgatggcggtgaggcttcggcttcacaaaaatcagcttgctgcggatcgtgagggggttacattgtcacaaggaagataaatagtgtgataccatgcttgtaatttacccttctacctttttatctggcttaatcgtccacttctaacttttaaatgcaattccttgaattcagacttctgtgttgtaatgtgaacaattttagttgtacccccctgttagcaatgcaagtgctcgtaagtcaatgcaccttgt

SEQ ID NO: 30401 - DNA, 326 bp, Zea mays
gagcaccctccacttggtgctgcgtctcaggggtggcatgcagatcttcgtgaagactcttactggcaagacgatcacccttgaggtggagtcctcagacaccattgacaacgtcaaggccaagatccaggacaaggagggcattccaccggaccagcagcggctgatcttcgccggcaagcagctggaggatggtcgcaccttggctgactacaacatccagaaggagagcaccctccacttggtgctccgcctcaggggtggcatgcagatctttgtgaagacattgactggcaagaccatcaccttggaggtggagtcgtctg

SEQ ID NO: 30402 - DNA, 321 bp, Zea mays
ggagacagccacttgagttccgttgttctgcttctgctgctgatgacaaggagtcaaagactcaggtggtgccagttcagtcggaaggcgcacagaggttgaagatctccatctatttcgccacctggtgggcgcttaatgtgatatttaacatttacaacaagaaggttctcaatgcattcccttacccctggctcacctccacactctccctcgcctgtggctctgctatgatgcttttctcgtgggccacccgtcttgttgaggcccctaagaccgacctggacttctggaaagttcttttcccggttgctgtggcgc

SEQ ID NO: 30403 - DNA, 322 bp, Zea mays
caagaaaactagaaaaggctcctcccgaccgcaacgcccctcatctccctcgaccccgacatccccgacccgatggcgcccaaggcggagaagaagccagcggagaagaagccggcggccgaggagaaggcggagaagacgaccgcacggaagaagcccaaggccgagaagcggctgcccgcgtccaagtcctccggcaaggagggcggcgagaagaaggggaagaagaaggccaagaagagcgtggagacctacaagatctacatcttcaaggtgctgaagcaggtgcaccccgacatcggcatatcctccaaggccatgt

SEQ ID NO: 30404 - DNA, 317 bp, Zea mays
gcctgcaagcagctagtgtccaccgccagaaactagctagctagctagcatgggtcggctggcggcggcgctggccgcgtggcggtgctctgcgtgaccttggcggcgggagcggaggtggtggacgagttcggcggcggggcatccttcatcttcggggactcgctggtggacgccggcaacaacaactacatcccgacgctgtcccgggccaacatgaccccgaacggcatcgacttcgcggcgtcgggcggggcgcccacggggcggttcacgaacgggcggaccatcgcggacatcatcggcgagatgctggg

SEQ ID NO: 30405 - DNA, 318 bp, Zea mays
aggagatggttgagttcatggagaaggtagccaagactgttgactcggaggagctcactgtggaggagcgaaacctcttgtctgttgcatacaagaacgtcattggagcccgccgcgcctcatggcgcatcatctcctccatcgagcagaaggaggagggccgaggcaatgaggaccgagtaacactcatcaaggattatcgtggcaagattgagactgagctgaccaagatctgtgatggcatcctcaagctgcttgagacccatcttgtgccgtcttccactgcccccgagtccaaggtcttctatctcaagatga

SEQ ID NO: 30406 - DNA, 318 bp, Zea mays
actgtgcctcttgtggctgatgcctgcattcaagtttgccccaaaaatcctgcaaactttaatgttgacaatgttagagtggctaagctacttggaggtggtttgcacaattcttctgtggtccgtgggatggttctgaaaaatgatgctgttggtagcatcaaaagggcggagaaggcaaagattgtcgtatttgctggtggtgtcgacacctcggcaactgaaacaaagggaaccgtgttgatccattccgctgagcagctagaaaattatgctaagactgaggaagctaaggtggaggagcttatcaaagctgtc

SEQ ID NO: 30407 - DNA, 322 bp, Zea mays
actgatgtgaatgtgcatgagcctgatactactgcagatgctcctgcactgaaaatggaacacaaaatcccgaggaaaaatctgttccaatggaaactgatgcaaaggttgagccatcaaaaaggaaagttaagagaacttctgttccggtccatgcgttggtctatggtgccttggctgcagctgacctgcagaaggctgtagagaaagagtatgagatggctcttcaggacagagtaatggaagaaaccatagagaagaaaaatgctgtggaagcttatgtctatgacatgcgtaacaagctctacgacaggtacaacga

SEQ ID NO: 30408 - DNA, 322 bp, Zea mays
aggctcgagaaaagggtcttcagagcacaatacagagtccttaaagggtctctctttgagtgaagttggtaacaaccgtacaagtaacaacaaagttgtttgctgtcacttctcttcagatgggaagttactcgctagtgccggccatgagaagaaggtcttcctctggaatatggacaattttaagatggataccaaaatagaagaccatacaaactttatcacagacataagattcagaactaattcaactcagttggctacatcatcttctgacggaactgttcgactttggaatgctgctgatgaaagtggcgcttta

SEQ ID NO: 30409 - DNA, 323 bp, Zea mays
cttatgtatagaggttatcagtattgtcgaattgacggacaatacaggtggagaagatcgtgatgcatccattgaagccttcaataagccaggaagtgaaaagtttgttttcttactttcaactagggcaggtggccttggtatcaacttggccactgctgatgttgtggttctttatgacagcgattggactccacaagctgatctgcaagctcaggaccgtgcacataggataggtcaaaagaaagaagttcaagtgttccgcttttgcactgagtacactatcgaggataaggtgattgagagagcatataagaagctag

SEQ ID NO: 30410 - DNA, 356 bp, Zea mays
ccaccaacgtaactcgggatcggctcgaagtagctcgctgaaaagttcactagagaagcatttgaacgaggagccatgtctgaagagaagcaccaccaccacctgttccaccaccgcaaggcagaggaggaggaaggcgcctccgggaggtcgactacgagaagaaggagaagcaccacaagcacatggagcagctcggccagctcggcgccatcgccgccggcgcgtacgctctgcacgagaagcacaaggccaagaaggacccggagaacgagcacggccaccgggtcaaggaggaggtggccgccgtcgccgccgtgggctccgccgggttcgccttccacgagcatcacgag

SEQ ID NO: 30411 - DNA, 324 bp, Zea mays
ccaggatgaaaattgcagcaggtgctgtcaaaggactggagtacctacacgacaaagctaatccaccagttatttatagggatttcaagtcgtcgaacattctgttggatgaaagtttccacccgaagctctctgactttggacttgccaagttgggtccagttggcgacaaatcacacgtctcaacacgtgtaatgggtacatatggttattgtgcaccagaatatgctatgacagggcagctgacagtgaagtctgatgtgtatagctttggggtcgtcttgctagagttgataactggtcgtagggctatcgacagcacca

SEQ ID NO: 30412 - DNA, 324 bp, Zea mays
agtgcatctgttcatggtgcgaataggctaggcgcaaattcgcttcttgacatagttgtttttggcagagcttgtgcaaacagggtagcagatatttctaaaccaggtgagaagcagaaacctctggaaaaagatgctggagaaaagaccatagcctggttggacaagctgaggaatgcgaatgggtcattgccaacttccaagatccgtctcaacatgcagcgtgttatgcaaaataatgctgctgtattccgtacacaagaaacacttgaagaaggttgtgagctgattagcaaaacatgggacagtttccatgatgtgaag

SEQ ID NO: 30413 - DNA, 316 bp, Zea mays
tgagcgacggcatcattggtgtcgggtcatcggggacggtgtactgtgtgaagatgtcgtacggggatgtcattgtggtgaagtagctgtggcaaccgtcggcgcagtaggagggtggagctcaggcgccggaggagccatcaaagcggaaggacgtggcagtcgcggacgacggcaacaggagcatgtacgccgtggtggtggtgctgggtcacctccggcaccgtaacatcgtccggctgttggggtggtgcatcgacggcgatgcgacgctgctgctctacgagtacatgtcgtacggcagcctggacgagct

SEQ ID NO: 30414 - DNA, 318 bp, Zea mays
gccttctgcgcctccatttcggcctctgtcccttgcaagttcaatctcacctccaaccatgggtaaagagaagtcccacatcaacattgtggttattggccatgtcgactctggcaagtcgaccaccacaggacaccttatctacaagcttggaggcattgacaagcgtgtgatcgagaggttcgagaaggaggctgctgaaatgaacaagcggtccttcaagtacgcgtgggtgctcgacaagctcaaggctgagcgtgagagaggtatcaccattgatatcgctctgtggaagtttgagaccaccaagtactactg

SEQ ID NO: 30415 - DNA, 319 bp, Zea mays
aaatgatcgaaattggcatgcttgagaagcttggtaaatatggtgaaagcagatccaggtctcatcccaatccccaaaggaggggtcctattacaagcagttgcccaagtctagtgctatcaaggtgattgatttcggtagcactacttatgatcaacatgatcagagttatgtggtatcgacgaggcactatcgggctccagaagttatattgggacatggatggagttacccatgtgatatctggagtgttggttgtattcttgttgagctttgcacgggtgaggcgttattccagactcacgaaaacttggaacat

SEQ ID NO: 30416 - DNA, 317 bp, Zea mays
taagctcactctggttgtattttacgctgtaaatcagaagaaacgggctcagaggcttgtgtccatcaacaatccttttgcgtcttggggatcattgggagaagatattggtgcagcaccacaactgaagagtgctaaattcttctcattggaagaactcaagttatgcaccaatgatttccgagaaattaatgcgattggagctggaggctatggaacggtttaccgaggaaaacttccagatgggcagttagtggcaatcaagagatccaaggaagggtccatgcagggtggtcttgagttcaagacagaaatag

SEQ ID NO: 30417 - DNA, 301 bp, Zea mays
aacagttcgtctattaaaggggaaccagtgaaccacccgatgcaacttgcgtagagagttgggcgcagagaatccccaagcaaacaaacagggtagagggagaggagaggagaggagaggagaggttgggtctgggacaccatggctccgatgaagctgtacggggcggtgatgtcgtggaacgtgacgaggtgcgcaacggcgctggaggaggctggctccgactacgagatcgtgcccatcaacttcgccaccgccgagcacaagagccccgagcacctcgtccgcaacccgtttggtc

SEQ ID NO: 30418 - DNA, 307 bp, Zea mays
gtcagtcagacacaggcacacagctagcaagctagcgtacgcaccagccgagctcggacatggcgtaggggaggccgagcacgccggcgccgaccatggcggtgacattgtggaaggcggagtaccaccacttggcgttcctccgcgcgttgatggggagccagtcgtcgatggccttctcctctgcgggccgccactgcgagtccggccagcgccctccgggtgtcacagggcggctggcgagctgcagggagttgagtcgatttcatcggtcatccccaaattaagcgcacagtcagatctttgt

SEQ ID NO: 30419 - DNA, 312 bp, Zea mays
gttcaggaagtgcatggagcctgttgagaagtgcctgaaggatgccaagatggacaagagcaccgtccatgacgttgtacttgttggtggctccactaggatccccagggtgcagcaactgctccaggacttcttcaacggcaaggagctgtgcaagaacatcaaccccgatgaggctgtcgcctatggtgctgctgtacaggctgccatcctgagcggtgagggcaatgagaaggtgcaggacctgcttctgctggacgtcacccctctgtccctgggtctggagactgctggaggagttatgacagtgct

SEQ ID NO: 30420 - DNA, 314 bp, Zea mays
atggcctcttcgcttgacgtttctggtttcttcgaggaagaggatgcagcgcaaagaaagattcggttcacttcgacgcacccacccaaggatctatttgacaagatcgagagcgttgtcatggagatgggattcaaagtccataggggggcaggcaagctcaaggtcttgaagaatagcaagtgttccaggaacccgtcatcattgttggtgtgcaccgaggtgtttgagctcggtccatcattatatgtcgtagagcttaggaaatcccacggagactctacgttgtatagacagctgtgcgaaaggctctc

SEQ ID NO: 30421 - DNA, 313 bp, Zea mays
agaagaagacaactccacattggatatatgatcttggccggaagaggaattttgctcaggtttttggaaatgacagaaaatattggttcatccctgcatattcagaagaggatctgagaagaattccagctctacagggtcttgattatcctgtcagtgagaccagattttgatggccaggaattgtaatggggcaattctaacagtgtcctcgtcagatacctcagtgttggacatctactcatacaactgtcagcattgctgattgcactatgcaaggcatctagtgacatgtgcacaagatgattgtagt

SEQ ID NO: 30422 - DNA, 311 bp, Zea mays
agcttcccagagacccagccatggcgatctcccagatctcacgcatattcctggccatccttctcctggccgccgccttcgccgccgccccagctgcgcttgcggacggcgacgacgtggtggcccttaccgaatccacgttcgagaaggaggtcggaaatgaccgcggcgccctcgtcgagttctacgctccctggtgtggtcactgcaagaagcttgctcctgagtatgaaagacttggtgcaagttttaagcaagctacatctgtcttgattgctaaggttgattgtgatgagcacaagagcttgtgc

SEQ ID NO: 30423 - DNA, 301 bp, Zea mays
cggctcgagcaaggatcattggtgtcgacctgaaccccagcagattcgaagaagctacgaagttcggttgcactgaatttgtgaacccaaaggaccacaacaagccagtgcaggaggtacttgctgagatgaccaacggtggggtcgaccgcagcgtggaatgcactggcaacatcaatgctatgatccaagctttcgaatgtgttcatgatggctggggtgttgccgtgctggtgggtgtgccgcataaggacgctgagttcaagacccacccgatgaacttcctgaacgaaaggaccct

SEQ ID NO: 30424 - DNA, 295 bp, Zea mays
aagtttctcaaagccgagaataatcgcagtggcagcggaaacatagctgagttgccagaccaaggaagcctgagaagaatagattcaaatgccgatgaatctgatgggaatgatgaactggatgagcaagacgaggaagactccgacgaggacgatcccaaatttcagcaggatacagcctgtgagtataggaaactcatcaccatccaagctggcaaaccaaaaggccatttgcgggatgcgctaaaagtggatccagacagagtcaggcggctttctttgagcgagacacagt

SEQ ID NO: 30425 - DNA, 309 bp, Zea mays
atcgaaactggtggcatcatcaggttgcaacacatgaggacacggatgtggttgcacagtcacctgcacgcttcaccgttgtctggtaaccttgaggttagctgtatcggcggggatgaattgtcagatagtggtgaccattggaggctagaaattgaaggaagtggaaaagtatggaaaagagatcaaaaggtgcgacttagacatgttgacaccggaggttatctgcatagtcgcaacaagaagtacaatcgccttggcggtgggcagcaagaggtctgcggtgtccgagagaagcgagctgagaac

SEQ ID NO: 30426 - DNA, 336 bp, Zea mays
gcttgttcctcgatggtatgaacattggacttcaaatttggtctatgatggcgatatgatcgttcttcaaggccaggagaagattttcctagctgcaaccaaggagtcttctacggatattaatcagcagtacacaaagatcacattcacgcccacacaagctgatcgatttgttttagcattccgcacgtggctaaggaaatttggcaatagccagccggagtggtttggaaatcctacacaagaagcattgccttccaccgtcctttcaaagcgcgagatgctagacagatacgagcagcacacgttgaaatgctcgtcttgcaaaggagcata

SEQ ID NO: 30427 - DNA, 224 bp, Zea mays
cccggagctgtttcttcgtcgcaggaatgggcaaggacggcatccagtacgcatggtggacgccttcacggcggaccgttcaagggcaaccccgccgcggtgtgcctcctcgaggacgccgccaaggccgccgacgagcggtggatgcagtccgtcgccgccgagttcaacatctccgagaccgccttcctcctccgggaaaagtcctccgcggctggcgccgt

SEQ ID NO: 30428 - DNA, 231 bp, Zea mays
tgtcaaggccatcgaggtgcttgtcgagctcgcctcgctccagacctccttcctcacgctcgacgaggccatcaagaccaccaaccgtcgcgtcaacgcgctcgcgaatgtcgtcaagcccaggatcgagaacaccatcagctacatcaagggggagctcgacgaactcgagcgcgaggactttttcaggctcaagaagatccagggctacaagaagagggcgatcgagcg

SEQ ID NO: 30429 - DNA, 227 bp, Zea mays
cggctcgaggtcctcagtctctcacacactcactatacactgctctgctgcagcaagaaggaagaagctagcgcctccctagctctcgttgtcagcaatggccaccaccgccgcgtccagcctcctcaagtcctccttcgcgggctcccggctcccttcggccacgcgcaccaccaccccgtcgtccgtggccgtggccatcccgcgcgccggcggtggtcccatcc

SEQ ID NO: 30430 - DNA, 231 bp, Zea mays
aaatttcgatgacaagtatatcatcggcacaggtgctcacggaactgtttacaaggcaacactgaggtcaggggatgtttatgctataaagaagcttgcgatttctgcacacaaaggttcatacaaaagcatggttagagaactgaagacactgggtgaaattaagcacagaaacttgataaagctgaaagaattttggttgagaagtgataatggattcatactgtatga

SEQ ID NO: 30431 - DNA, 218 bp, Zea mays
ggctgatggtgaggacatccagcctcttgtctgcgacaatggcaccggaatggtcaaggctggttttgccggcgatgatgcaccaagggctgtattccctagcatcgttgggcgtactcgtcacaccggtgtcatggtagggatggggcacaaggatgcatatgttggtgatgaggcacagtccaagagaggtattctcacgctcaagtacccgattg

SEQ ID NO: 30432 - DNA, 211 bp, Zea mays
agggtaccagtcgtggggcccgctcttcggcaagctcttcttcgcgttctggatcatcgtccacctctacccgttcctcaaggggctcatggggcgccagaaccggacgcccaccattgtcgtcatctggtccgtgctgctggcctccatcttctccctgctctgggtcaggatcgatcgcttcatcgtcaggaccaatgggcccgacgtc

SEQ ID NO: 30433 - DNA, 330 bp, Zea mays
tctggccatacctggagacatacactgaggatgtttccagtgaaataatgaaagaaatgcaggccaagcctgaccttatcattggcaactacagcgatggcaacctagtcgctactctgctcgcgcacaagttgggagtcactcagtgtaccatcgctcatgccttggagaaaaccaaataccccaactcggacatatacttggacaaattcgacagccagtaccacttctcttgccagttcacagctgaccttattgccatgaaccacactgatttcatcatcaccagcacattccaagaaatcgcgggaagcaaggacaccgtggggc

SEQ ID NO: 30434 - DNA, 213 bp, Zea mays
tggcgacccagatcagcaagaagaagaagttcgtcagcgacggtgttttctacgccgagctcaatgagatgctgacgcgggagctggcggaggacggctactctggcgtggaggtgcgcgtcacgccgatgcgcacggagatcatcatccgcgccacgcgcacgcagaacgtgctcggcgagaagggccgtatgatcatggagctcacctccg

SEQ ID NO: 30435 - DNA, 207 bp, Zea mays
cgcaaccccgcgggtcgcgggatcaaggagccagagagcgggacgcagcgagcgttccgccagagatcgagaccgtagctagggtttgaggcgccgggctgcggtggacgagatgtcgacgccggcgaggaagcggctgatgcgggacttcaggcgcctgcagcaggacccgcccgccgggatcagcggcgcgccgcacgacaacaa

SEQ ID NO: 30436 - DNA, 329 bp, Zea mays
aatgaacttctagacagaatgaccaaaaggttcaaaacttcctgcaagatatggttatgccgcattcagtttgctctcaagcaaggcaaggatgttgagtacatcaaagccattgtaaaccgtgcacttctaagtttgccacacagaaagcgcataaaattcctctcacaaactgctattctagaattcaaatgtggggtgcctgaagaaggaagatccagatttgacataatattgcgggagtacccataaagaacagacctttggagtgtttatctagaccaagacatccgccttggtgacgtagaagttatacgggcattgtttga

SEQ ID NO: 30437 - DNA, 327 bp, Zea mays
agcgtgggtatgtggcctccaactccaaggatgaccctgccaaggaggctgctagcttcacctcccaggtcatcatcatgaaccaccctggccagattggcaatggctatgccccagttctggactgccacacctcacacattgctgtcaagtttgctgagctcgttaccaagattgataggcgatccggcaaggagctggagaaggagcccaaatttctcaagaacggtgatgctggtatggtgaagatggttcccactaagcccatggtggtggagaccttttctcagtacctcctcttggtcgatttgctgtccgtgacatgag

SEQ ID NO: 30438 - DNA, 207 bp, Zea mays
cttcaccaatcagctccagacctctttcagcgagcctcgcctgatcatccttactgacccaaggactgaccatcagccaatcaaggagtctgctctggggaacatcccgaccattgccttctgcgacactgactctcccatgcgatatgtcgatatcggcatcccagccaacaacaaggggaggaacagcattggatgcctgttctg

SEQ ID NO: 30439 - DNA, 207 bp, Zea mays
agagacctgaagccggagaacgtcctcgtgagagaagatggccacatcgtgctctccgacttcgacctctcccttcgctgcgcggtctcgccgacgctggtgagaccttccctgggctccgaccccaggaacaggcaggcctgcacccagcccaccgcctgcatccagcccacatgcttcatgcccaagctcttcggccagaggagc

SEQ ID NO: 30440 - DNA, 205 bp, Zea mays
cgcatggaacgaccactggatcttctgggatggcccttcatcggtgctgctcttgccgccatctaccacgtggtcatcatcagggtgctccccttcaagagccgtgactgattatacgtacattgtttattaccaacagcaaccatgcagcatacgaatcatcgttattaagctatatatgtataatatccagcatgtcttgtta

SEQ ID NO: 30441 - DNA, 320 bp, Zea mays
  unsure (1)..(320): unsure at all n locations
attacttgctggtaacgtacaggccgcttttctagatttaccaattgactggaagaggtaccttggtttgattatgtggtatcaattatcacctgatacaccactcgatattatcattcgttcttacgatcaactccttgttgagggcaaagttccctatcctgttcctgtatatatagatgaaggacctcttgatgaagcacctcagtggtccccgggtgaccattttgatatctccttctacctaatgcttcttcatgccaataaagacgagaagtttgggctgctanagactatgttcagtgcattctcatcttcat

SEQ ID NO: 30442 - DNA, 341 bp, Zea mays
aaaatatccccaaaccctagctcccgatctcgatggcgaaccctcgcgtcttcttcgacatgaccgtcggcggcgccccggcgggccggatcgtgatggagctgtacgccaacgaggtgcccaagaccgcggagaacttccgcgcgctgtgcacgggcgagaagggcgtgggcaagtccgggaagccgctccactacaagggctccaccttccaccgcgtcatccccgagttcatgtgccagggcggcgacttcacccgcggcaacggcaccggcggcgagtccatctacggcgagaagttcaccgacgagaagttcgtgcgcaacacaccgcccccggtg

SEQ ID NO: 30443 - DNA, 189 bp, Zea mays
ctcataggtaatagctgagagcctatcagaagaggacattgcggggttaaaggaaatgttccagaccatggacactgacaacagtggcgcaattacctacgatgaactaaaagaaggattgagaaaatatggttccacactgaaggacactgagattcgtgatcttatggatgcagtaagttaactgaa

SEQ ID NO: 30444 - DNA, 338 bp, Zea mays
ggagatctacctgcactcgctgccggtcaaggagcaccagatcgtggagaccctcgtcccggggctcaaggacgaggtgatgaagatcacgcccgtccagaagcagacccgcgccgggcagcgcacgcgtttcaaggccttcgtcgtcgtcggcgacggggacggccacgtcgggctcggcgtcaagtgcgccaaggaggtcgccaccgccatccgtggcgccatcatcctggccaagctctcggtcgtgcccgtcaggaggggctactggggaaacaagatcggccagccgcacactgtgccctgcgaagtcgacggcaagtgcgggtccgtcaccg

SEQ ID NO: 30445 - DNA, 336 bp, Zea mays
  unsure (1)..(336): unsure at all n locations
agcgcagctcatgatcctgggcctatcggaggcattcaacctcatcagccagattgagttctactacaaggagatcccggagcacatgcggagcgtggacgcgggcgctcgcattctgcaacctggcactcggcaactacctcagtggcttcctggtgaccatcgtgcaccggaccacggggtccgagcagaactggctggcgcaggacctcaacaagggccgcctcgacctcttctactggaccatcgcaggcatcggcgtctttaatctcatctacttcgtcatctgcgccangtggtacaggttcaatgcgaccagcaactgatccgccgagt

SEQ ID NO: 30446 - DNA, 142 bp, Zea mays
ctcagctcccatatccgctcccctacctctccagcatctcccgtctccgtcgtctcgtctctgctcctcacctcgccgccagccatgggcaagatcaagatcggaatcaactgtttcggaaggatcggcaggctcgtggcca

SEQ ID NO: 30447 - DNA, 337 bp, Zea mays
gagcagccgacaactctctaccgtccgagacgccaagcaccagcgcggcggcggcggcggcggcgaccatggctgtcgggaagaacaagaggatctccaagggaaagaacggtggcaagaaaaagaccgtcgaccctttctctaagaaggattggtatgacatcaaggcaccgtcggtgttcagtgtgcgcaacatcgggaagactctcgtatccaggacacagggtaccaggattgcttctgagggtctgaagcacagagtctttgaggtttgcctagctgatcttcagggcgacgaggatcaagcttacaggaaaatcaggctccgtgctgaaga

SEQ ID NO: 30448 - DNA, 320 bp, Zea mays
aaggggaaccggagaagctgatgaatcagatcttcgacctcaagttcacctccaagtcgctgcagcggcaggcgcgcaagtgcgagaaggaggagaaggagcagaagctcaaggtcaagaaggcgatcgagaagggcaacatggacggcgcccgcatctacgccgagaacgccatccgcaagcgcaccgagcacatgaactacctccgcctcgcctctcgcctcgacgccgtcgtggcccgcctcgacacgcaggccaagatgcaggtcatcggcaagtccatgcagtccatcgtcaagtcgctcgactcctcgctcgcc

SEQ ID NO: 30449 - DNA, 333 bp, Zea mays
atgccagttacccccctgcatatcagcagggagcccaggctggggcgtaccaacagggagcccaggctgggacgtaccagcagggagcgggaacccaggctggggcgtaccagcagggagcccagtctggggcgtaccagcagggagcccaggctggggcgtaccaacagggagcccaaactggggcataccaacagggaacccaagctgggacatatcagcagggaacccaagctgggacatatcagcaaggaaaccaggctgggacatatcagcaaggaaaccaggctggagcatatccctatgcttatgatgctgccacggcttacacat

SEQ ID NO: 30450 - DNA, 334 bp, Zea mays
agacatcatggagaatgggctagtcgactactccccacacaatccgacgcagatcgaaaaactcgactctgcatctaatgtcattctcattgacaactatgattccttcacttggaatatctatcaatacctggccctcgaaggtgcttcagtaacggtctatcgcaatgaccagattacgctggaggggctgattgccgagaaacccacccagttggtgatcagtcctggccccggccatccggacaccgatggggggattagcaaagcagcaattagggaattcagtgggacaatacctgttgtcgggggttgcatgggtcatcaatgcatg

SEQ ID NO: 30451 - DNA, 336 bp, Zea mays
aggcgtacgcggacacagccccgatccgaatcgtcgtcctagcgagcctcgccgatcccccactcccctcccctcgcttcaagatgcagatctttgtgaagaccctcaccggcaagactatcaccctcgaggtggagtcttctgacaccattgacaatgtcaaggctaagatccaggacaaggagggcatccctcctgaccagcagcggcttatcttcgccggcaagcagcttgaggacggacgcacacttgctgactacaacatccagaaggagtcaaccctccacttggtgctgcgccttaggggaggcatgcagatctttgtcaagaccttga

SEQ ID NO: 30452 - DNA, 139 bp, Zea mays
cgcatggaacgaccactggatcttctgggttggcccttcatcggtgctgctcttgccgccatctaccacgtggtcatcatcagggccctccccttcaagagccgtgactgattatacgtacattgtttattaccaacag

SEQ ID NO: 30453 - DNA, 324 bp, Zea mays
  unsure (1)..(324): unsure at all n locations
ccgtcaagaacttgccggactccatggatggcatccgcaagctcatcaggaggttcgcttccaagaacctcagcgtcaaggatctcgctgttctctcaggcgcccacgcgatcggcaaatcgcactgcccgtcgatcgccaagcggctgcgcaacttcacggcgcaccgggacagcgacccgaccctggacggcgcgtacgcggcggagctgaggcggcagtgccggagcgcagggacaacacgacggagctggagatggtgccgnggagctccaccgcgttcggcacggcctactacggcctggtcgcggagtgagggcgctc

SEQ ID NO: 30454 - DNA, 323 bp, Zea mays
  unsure (1)..(323): unsure at all n locations
cggctcgagtgactggcgaggcaaaagcattgcgaccacagacagcgcgcgcttcaaggccttttttttgagataacaaggaggagaggaggagatggcggtcacgatcacgtgggtgaaggcgangcagatcttcgacagccgcggcaaccccaccgtcgaggtggacgtgggccttagcgacggcagctacgcgaggggggccgtacccagcggcgcatccactgggatatatgaggccttggagttgacggatggaggatctgattatcttggcaacggtgttcttaaggctgtcagcaatgtanataacattattggac

SEQ ID NO: 30455 - DNA, 324 bp, Zea mays
  unsure (1)..(324): unsure at all n locations
tgctgctgcagctggccgatgacactagtcttgaagtccagctcagcagggacaatgttaaggctatcacacaggacctaatcatcgcaggcacggatagtaatgcaaacacgctggagtgggctgtctcggagctcctcaagaaccctaagatcttagccaaggccatggaggagctgaaccatgtcatagggccggaccgactggtgacggaaagcgacctccctcgcctcccctacatcgangctgtgctcaaggagaccatgcgcgtgcaacctgccgcgccgatgctggcaacccacgtggcccgcgaagacacatccg

SEQ ID NO: 30456 - DNA, 328 bp, Zea mays
aaatgctcctactgtcagctgggcagatcataagaatgctagtgaagctacatctacttcacaggttaaatctctatatgtcaaaaacctccccaagactgttactcaagagcagctgaaaaagctgtttgagcatgttggagaaatcacaaaagttgttattccacctgcaaaatctgggcatgaaaatcggtacggttttgttcattttaaggaacggtccatggttatgaaggctctgaagaacactgagagatatgaacttgatggtcagctgctggattgttcacctgcgaaacctcctgctgataagaaggatgatactgga

SEQ ID NO: 30457 - DNA, 329 bp, Zea mays
ggcggagttgcggagaatatgcagagcagcagcatgaagagggagatcagcgaggcccacgacaccattcgcttcggcatcaacgccggcgtcaaagccgacctcgccccgccgcacccgctccagtctaccatccaatcggagaccaagttctgggcggacaagaagaagttcgggacagatgccatatatggatccgccctcaacatccgcatagatctcgatgcccaaatcctctccaggttccaaaggccccctggtgctttgccgtcatctctgcttggatacgaggcactgacaggttccctggactgatttgggattgaaga

SEQ ID NO: 30458 - DNA, 314 bp, Zea mays
  unsure (1)..(314): unsure at all n locations
ggagcattcgagaagccgaagaaaattcgaagacgaggaccagctacactgcggacggacttcgggcatggagggccagttccaggttggcaaggaggaggtcatccaagcatggtacatggacgacagtgaagaggaccagaggcttcctcatcatcgtgagcccaaagaattcattcctctcgacaaactttccgaactaggaatattaagctggcgcctaaatgctgatgattgggagaatgatgagaacctcaagaaaattcgtgaagccagnggttactcttacatggacatttgtgatgtgtgcccag

SEQ ID NO: 30459 - DNA, 324 bp, Zea mays
  unsure (1)..(324): unsure at all n locations
cagtctagtccgattcaaacccgcccgttccccgtgtccgagccacgcaagccgagctcaatccccagaggccagagccagctgctcggcgctccacgcgatggcgcagaaggagaccaatggcagcaacggcgagcacatctccacccgcccgccgccgaccccgtcgcccctccgcttctccaagttcttccaggctaacctgcggatcctggtcactggtggggcgggcttcatcggctcgcacctcgtggacaggctcatggagaacgagaaacacgaggtcattgttgctgataacttnttcactggttcaaaagataa

SEQ ID NO: 30460 - DNA, 320 bp, Zea mays
cgacaagcgaacagagcactggcatgagcatggaccgcatggcgcggcgttccgtgtccttgctcctcgctctggctctcctgtccgccgcggcgtcggcggactcgtggctgtacgagaagttcacgacggagtgcaacgtgcgcgcggactacaacgcgcagtggcagcaggtgacgtctctgatcctgacgcagcattcctgcggagccttcagctcgcggcagaagtacctgtacggggagttcagcatccagatgaggctgatcccgggcaactccgcgggcaccgtgacctccttctacctgtcgtcgggcgac

SEQ ID NO: 30461 - DNA, 147 bp, Zea mays
gcttgctgagggtcagaacaagcttgattatgttcttgccctcaccgctgagaacttcctcgcaaggcggcttcaaacacttgtcttcaaggctggcatggccaagtccattcaccatgctcgtgtcttgatcaagcagcgtcacat

SEQ ID NO: 30462 - DNA, 324 bp, Zea mays
cttttgtgagcgagtacgctgtctggagaagtgacgcgggtacaggcagtcttcttgcttcgttggctgaagctgctttcctcactggtctggagaagaacagtgatattgttcagatggcaagttacgcaccactcttcgtgaacgacaatgaccaaacgtggaacccggacgctatcgtcttcaactcctggcagcactatggaactcctagctactggatgcagacgattttccgcgagtccagcggcgccatgatccatccggttaatatcagttcccggtactcgagttcgctggccgcgtctgcgatcacgtggcaag

SEQ ID NO: 30463 - DNA, 184 bp, Zea mays
cacatctcatatatttgattttaattctatagttttactgtgtctaaaacctttagaatctagagtctcctgccataacttcaatttcttatttactcctgctcgactttcaccaatcaatactacactgtctgcaaaaatgcatacaccaagggatatcctcctgtatgtcccgtatgatatc

SEQ ID NO: 30464 - DNA, 324 bp, Zea mays
  unsure (1)..(324): unsure at all n locations
accggcctggcgatcgccgacctgggctgttcctccggcccaaacacgcttgtgctcgtgtcgacggccgtcgccgccgtccgccgccgctgctcggagctccggcggcagcaccggagctctgcgtgcacctcaacgacctcccaaacaacgacttcaacctggtaaccaagagcctggccacgtacgcgagagcccaagaaagcttgggccctcctgtcctgaccagcatcgatcncggctcgttccacgcccggctaatcagcaagcgtaccttcacctggtctgctcaaacgcgagcttgcagtggctctcaaaggcact

SEQ ID NO: 30465 - DNA, 178 bp, Zea mays
cctctctcccccatcgcaccagcaggcgagcgcgaggcggaggagtagagatggagtcggaccagggcaagcttttcatcggcggcatctcctgggaaacgacggaggagaagctgagcgagcacttctccgcctacggcgaggtaacgcaggccgccgtcatgcgcgacaagatcac

SEQ ID NO: 30466 - DNA, 320 bp, Zea mays
ctttagggagctgccaggtgtcaagatatcggaacctcagggagccttctatttattcatcgacttcagctcgtactatgggtctgaggtggaaggttttggtaccatcaaggactctgagtccctctgtctgttcctgttggagaaggcacaggttgcgcttgtccctggggatgcatttggcgatgacaagggtgttcgcatttcatatgctgcagctatgtcgacactgcaaactgcaatgggaaagataaaagaagcgatggctctgctcaggcaccctgttgccgtttaacaaaaccaacgtatcgctaatcagt

SEQ ID NO: 30467 - DNA, 319 bp, Zea mays
atctacctctacctaccggagcagggagcacgccacacgagcactttccgccgccgccaaaatggtgaacgttcctaagaccaagaagacctactgcaagaacaaggagtgcaagaagcacactctccacaaggttactcagtacaagaagggtaaggatagcctgtctgcccagggaaagcgccgttatgaccgcaagcagtcaggatatggtggccagaccaagcctgtcttccacaagaaggccaagaccaccaagaaaatcgtgttgaagctgcagtgccagagctgcaagcactactcacagcacgcaattaag

SEQ ID NO: 30468 - DNA, 304 bp, Zea mays
cagggagaagtgtgtcggatgcagcaagacagtctatccaattgagagggttactgtgaacaacaccatgtaccacaagtgctgcttcaagtgctgccatggaggatgcaccatcagcccttctaactacatcgcgcacgaggggaagctctactgcaagcaccaccacgtccagctgatcaaggagaaagggaacttcagccagctcgagaatgaccacgagaagacatcgcaggctgggtcgctggaggacgacgaagaagaagagtattaattaatcgctgagcaaaaatacataccacca

SEQ ID NO: 30469 - DNA, 105 bp, Zea mays
gtcatcgatctcgtttcaaatccatccatcctcgtttcctccgtcccgcagcatctcaaccccatggacaagatcaagatcgggatcaatgggttcggcaggatc

SEQ ID NO: 30470 - DNA, 172 bp, Zea mays
cgaccctctcacgtggtggaggtcttcgtacgcgtgacgggacgcgaagtcggcacggcgtcgtcgctggacctcaagatcggtacgctcggtctctccacgaagaagatcggttacgacatcgccaaggagaccgccaacgactggaggggcctccgcgtcaccgtcaagc

SEQ ID NO: 30471 - DNA, 317 bp, Zea mays
cgcgccggcggcttgtgttccctttaaagcttggctgctcgtctgctcctgctgctgtctttcttctgctcttccatcgcgccagtgttttgagaagctggtcggcgctcctagatcccttcgcctctctcgcgttcgaggctaggtagccgccaccatgagccgctcggggcagcctccggatctcaagaagtacatggacaagaagcttcagattaagctgaatgcaaaccgtgttgttattggcacacttcggggattcgaccagttcatgaatctggtgatcgacaacactgtggaggtcaatggaaatgaca

SEQ ID NO: 30472 - DNA, 315 bp, Zea mays
agacacccagggtcttatctttgttgtggacagcaatgaccgtgaccgtgttgttgaagccagagatgagctccacaggatgctgaacgaggatgagctacgtgatgctgtgctgcttgtttttgccaacaagcaagatcttcccaatgccatgaatgctgctgagattactgacaagcttggattacactccctgcgccagcgacactggtacatccagagcacttgtgccacaactggcgagggtctgtatgaaggcctggactggctgtccagcaacattgcgagcaaggcttgaggcctaccttgaatgta

SEQ ID NO: 30473 - DNA, 314 bp, Zea mays
tgaacacttgattgattcagtgggtagctagctagctgaatcacaatggatcctaccaagttccgtccgtccagcagccacgacacgacggtgacgacgacgaacgcgggcgctcctgtgtggaacgacaacgaggcgctgactgtagggcctcgcggtcccatcctgctggaggactaccacctgatcgagaacgtggcgcacttcgcgcgcgagcgcatcccggagcgcgtggagcacgcgcgcggggtctccgccaacggcttcttcgagtgcacccacgacgtgacgtcgctgacgtgcgccgacttcct

SEQ ID NO: 30474 - DNA, 310 bp, Zea mays
agcaacttgttgcgagcctcctctatggcgagctccgaccatggttccaccaccgcccccaaggacgtgcacggcagctacggcctgccgctggtgggcgccgtgcgcgaccgcctcgacttctactacttccaggggcaggacaagtacttcgagtcccgcgtggagcgctacggctccaccgtggtgcgcatgaacgtgccgccgggccccttcatggcgcgcgacacgcaggtggtggcggtcctggacgccaagagcttccccgtgctcttcgacatggacaatgtggagaagaaggacctgttca

SEQ ID NO: 30475 - DNA, 185 bp, Zea mays
caagacaataaaggagactacttctgagtgggaacttctgaatgatgtgaaggctgtatggcttcgcagcccaaaggaggttaccgatgaagaatactcgaagttttaccattcactagccaaggacttcggtgatgacaagcctatgggttggagccacttcactgccgaatgagatgttgagt

SEQ ID NO: 30476 - DNA, 336 bp, Zea mays
cttcttcgcgttctgggtgatcgtccacctgtacccgttcctcaagggtctggtggggaggcagaacaggacgccgacgatcgtcatcgtctggtccatcctgctggcctcgatcttctcgctcctgtgggtccgcgtcgacccgttcctcgccaagagcgacggcccgctcctggaggagtgtggcctggactgcaactgaagtgggggcccctgtcactcgaagttctgtcacgggcgaattacgcctgatttttttttgttcttgttgttggaattctttgctgtagatagaaaccacatgtccacggcatctctgctgtgtccattggagca

SEQ ID NO: 30477 - DNA, 317 bp, Zea mays
aagggacacaagaattacgagctcatgctgcagctgcaattgggcatcaggcattccgtgggaaagtcttcggccgtgccgacgcgagcactgcaaccgggcgattttgacccaggggagaagttctggacacggttcccaccagagggttcgaaggttacgctaccacattcatctggagagttccgatggaaggactactgccccatggtgttcaggcatttgaggaagttgtttgctgttgatacagcggattacatgcttgcgatctgtggcaatgatgctctgagggagctgtcttcacccggcaaaagtgg

SEQ ID NO: 30478 - DNA, 329 bp, Zea mays
attgccttcttgatatcaaaaaaattattctactcagattatcttattattctcatggatgtttatttgcaacttcaggagtttaaggcatttgctgatttgcgacgaagattggagccactgtcgatggctatctttgcttacggtaaattgaatgggttattgacgaaggaggatctaaaacgtgcagcgcaacatgtaagattttcttaccaggtttggcatgcttatttatgttattttgcttctaactgatgtctagctatgtaatttttcattttggtttgtgatgtaggtttgcggggtcgacttaacagatagagtagtag

SEQ ID NO: 30479 - DNA, 331 bp, Zea mays
gccgcgcgtacaagcaggtggagacaggatgccggctggccacggcctgcgctcgctgacgcgcgacctcttcgcgcgccccttccgcaagaacggctacatcccgctcaccacctacctccgcacctacaagatcggcgattacgtcgatgtcaaggtgaacggcgccgtccacaaggggatgccgcacaagttctaccacggccgcaccggtcgcgtctggaacgtcaccaagcgcgccatcggcgtcgacgtcaacaagcaggtcaatgggcgcatcatcaggaagcgtatccatgtccgtgtggagcatgtgcagccgtcccgctgc

SEQ ID NO: 30480 - DNA, 332 bp, Zea mays
cggtattgaggcactgattgctgagggggctgttgagatgattgtgcctggtgtcatgcccacgggctgcttcccagtttacttgaacatgcttgatgagcccaaagaaggatacggcccccacagtggttgtgtccgccggtacaacacattctcctgggtgcacaatgcacatcttaaggccatgcttgagaagctccgggctaagcaccccaatgtgaggatcatatatggcgattactacactccagtcgtccagttcatgcttcagcctgagaagtttggttttgccagacaactgcccagggcatgttgtggggcgcatcgactcc

SEQ ID NO: 30481 - DNA, 319 bp, Zea mays
cgctcccggaccaccttttataagcaccaaccatctggccttgccgcgccgattcgccacgaagccgcactgtgagagagggacgcggcctgttgtcccggcttttagacgcaacttccatcgctgcgaactatccattcgtgttcgtcatggccgccagcgtcaccgtggaaaacctcaaccccaaggtcttaaaatgtgagtatgcagtccgtggggagattgtcatccatgctcagcgcctgcagcaacaactacaaacacaaccagggtctcttccttttgatgagatctcctatgcaatttgggaatcccaatc

SEQ ID NO: 30482 - DNA, 297 bp, Zea mays
cacaaatccagtaactcgcatcttcctgcgtcatccaagttctagcagcgcacgctcggtttcggcaatgtcggggcgcggcaagggcggcaagggtctgggcaagggcggcgcaagcgcaccgcaagtcctgcgcgaaacatccagggcatcaccaagccgggatccggagttggctaggagggcgcgtcaacgcatctccggctcatctacgaggagaccgcggtgtgctcaagactttctggagacgtcatcgtgacgcgtcactacacgacacgccgcgcagacgtcacgcat

SEQ ID NO: 30483 - DNA, 328 bp, Zea mays
agacttgatcaatgagccgaagaggccttcagacaagcccctgcgtctccccctacaggatgtgtacaagattggtggtattggaactgttcctgttgggcgtgttgagactggtatcatcaagcctggtatggttgttacctttggtcctagtggccttactactgaggtgaagtctgttgaaatgcaccatgaggctctccaggaggcccttcctggtgacaatgttggcttcaatgttaagaatgttgctgtgaaggatctgaagcgtgggtatgtggcctccaactccatagatgaccctgctaagaggctgctagcttcacgt

SEQ ID NO: 30484 - DNA, 321 bp, Zea mays
  unsure (1)..(321): unsure at all n locations
gctcacttgtacgttgacccccgggaaaaggtcactgctcggtatcagctcatctgtccatcaaagagagaggtcatgatatttggaagcctgaagcaggctgggacgctgctaccaaaagcgccgaatggctgngcgctggcgcactgctatactatttgatgagcttgctgatcttctccagggtggtgccctgcgaattgctgcagtggtccagcttgtctagattagttgcagaaaacaactgcttgcaaggatggtgatagcacatgcagttgtgtaattgatatactccctccgtcctanaatatagttnttctg

SEQ ID NO: 30485 - DNA, 316 bp, Zea mays
ctcacagactccctcatgaaaattctcactgagaggggttactccttcacaacctcagccgagcgagaaattgtaagggacatcaaggagaagctagcatatatagcccttgactatgagcaagagttggaaactgccaagaacagctcttcagttgaaaagagctatgagctacctgatggacaagtaatcaccattggtgcagagagattcaggtgccctgaggtcctcttccagccgtcgatgattggtatggaggctgctggaatccatgagacaacatacaattcaatcatgaagtgtgacgtggatatca

SEQ ID NO: 30486 - DNA, 327 bp, Zea mays
ggctccggcgatggcgggcgtcggctccgcgctgcgtcggctctacctctccgtctacaactgggtcgtcttcttcggatgggcgcaggtgctgtactacgcggtcctgacgctgcgtttgagcgggcacaaggccgtctatgccgccgtcgagaggccgctgcagttcgcgcagacagccgccatcatggagatcgttcatgggctcgtagggttggtgaggtctccggtctctgcaactcttccacagattggatccaggttgttccttacgtggggtgtcttgtggagttttcctgagacccagtcacaccttcttgttactac

SEQ ID NO: 30487 - DNA, 326 bp, Zea mays
accgatcccaccgaatggacagccgcctcgccatcgccgcgctcctcctgctcgcctccgcctcctccgctgccgcggacggcgggaaggtggccgtggcgctgtactacgagtcgctgtgcccctactcggcgcgcttcgtggtgaaccacctcgccaaggtcttcgcggacggcctccgcgacgtcgtggacctcacgctcgtcccctacggcaacgcccggatccaccccggcggagagatctcgtgccagcatggtccgtacgagtgtctgctcaacaccgtggaagcttgcgccatcgacgcctggccggatctggatgtg

SEQ ID NO: 30488 - DNA, 318 bp, Zea mays
atcagctcccatatccgctcgcctacctctccagcatctgccgtctccgtcgtctcgtctctgctcctcacctcgccgccagccatgggcaagatcaagatcggaatcaacggtttcggaaggatcggcaggctcgtggccagggtcgccctgcagagcgaggatgtcgagctcgtcgccgtcaacgaccccttcatcaccacggattacatgagctacatgttcaagtacgacaccgtgcacgtgcaatggaaggacagcgacatcacgctcaacgactccaagacgcttctcttcggcgagaagcggtcaccgtct

SEQ ID NO: 30489 - DNA, 211 bp, Zea mays
tacctgtgcatggaccttgcctaccagtatactttgctagtagatggctttggtgtggagaggaccaacgagatcacagtggtggacaaggtgaagcacggagagtactacgtcgaagctgcatggcctctaggctctgctattgaggctgtgtcgtcaaccaaagaatggcgtcaagataaatgatctgttggtccaatctcatatgcta

SEQ ID NO: 30490 - DNA, 303 bp, Zea mays
  unsure (1)..(303): unsure at all n locations
agcacacacacacaaccagatctcccccaaatccacccgtcggcacctccgcttcaagatgcagatctttgtgaaaaccctgactggcaagactatcaccctcgaagtggagtcgtctgacaccattgacaacgttaaggccaagatccaggacaaggagggcatccccccagaccagcagcggctcatctttgctggcaaacagcttgaggacgggcgcacgcttgctgactacaacatccagaaggagagcaccctccaccttgtgctccgtctcangggaggcatgcagatctttgtgaa

SEQ ID NO: 30491 - DNA, 318 bp, Zea mays
aggctcgagcccagatcctctctcaggagtttgggtgggacaaggacctggccaagaagaattggtgttttggacctgagaccactggcccgaacatggttgtagatatgtgcaagggagtgcagtatctcaatgaaatcaaggattctgttgtggctggtttccagtgggcatcaaaggagggtgcactggctgaggagaacatgcgtggaatttgctttgaggtatgtgatgtcgttcttcatgctgatgctatccacaggggtggtggtcaggtcattcccactgccatgtaggtcatctatgcatctcagctca

SEQ ID NO: 30492 - DNA, 329 bp, Zea mays
cggacggtccgccgccgagcggcacggcgatgtcggtggggaccaagctcaagaagctcagctacaactcggtggtggagatcgtgctgcagaacccggcggccgtcccgacggagaaccacccgatccacctccacggcttcaacttcttcgtgctggcgcaggggatgggtaccttcgccccgggaagcgtggcctacaacctggtggacccggtggcccgcaacaccatcgccgtgcctggcggtggctgggctgtcatacgcttcgtcgccaacaatccaggcatgtggttctttcactgccacctggacgcgcacgtgcctatg

SEQ ID NO: 30493 - DNA, 333 bp, Zea mays
caggcagcttctgatcaaatcaaaccccggcgaagttgttaaacctgaccaattcaaggcgataaatgacgaggggatgcctatttaccagaggcccttcatgaaggggaagctctacattcatttcacggtggagttccccgactcgctggcaccagagcagtgcaaggctctcgagtcggtacttccgccaaagccttcgtccaagctgacagacatggagatagatgaatgcgatgagacaaccatgcatgatgtgaacaacatcgaggaagagatgcgcaggaagcaggctcatgctgctcaggaggcgtacgacgaggacgacgagat

SEQ ID NO: 30494 - DNA, 82 bp, Zea mays
gaagcaggccaagaagttgaacgagctggacccgctgctgaagcccaatcaggacaggtacgcgctccgcacgtcgccgcag

SEQ ID NO: 30495 - DNA, 329 bp, Zea mays
  unsure (1)..(329): unsure at all n locations
atcaagaaatgcttctcaactttgctacagaatgtgcggactctgtacttcctgcgtacataccgatcatagaacggaggaagaacactccgttcaacgaggagcacagggcatggcagcaattgcggagaggtcgttatgtggagttcaaccttgtctacgaccgtggtacaacatttggcctaaagactggaggaaggattgagagcatacttgtgtcncttccacttacagcacgatggcagtatgatcatanaccggaagaaggaaccgacgaatgganacttctggaagcctgcatagacccgaaggattggatctgattagcg

SEQ ID NO: 30496 - DNA, 325 bp, Zea mays
cagtagctcacatccagttggtcattgtaaccaagttcatttcgaaggtgcagcaggacattcctggacctggagtgaaggaacagctccagaacctttgcaatgtctatgccctctacattctccacaagcacctgggcgacttcctggcaaccgggtgcatcacacccaagcagggagcgctggcaaacgagcagctgggcaagctttacgcacaggtgcgtccaaatgctgttgcgctggttgatgccttcaactacacagaccactacctggggtctgtgctggggcggtacgatgggaatgtgtaccagcgctgtacgag

SEQ ID NO: 30497 - DNA, 304 bp, Zea mays
ctgaaggagcacgtcatcaagccagtcatccccgagcagtacctcgacgagaagacaatcttccacctcaacccgtctggccgcttcgtcatcggcggacctcacggcgacgccggcctcactggccggaagatcatcatcgacacctacggtggctggggagcccacggcgggggcgccttctccggcaaggacccgaccaaggtggaccgcagcggggcctacgtcgcgaggcaggctgctaagagcatcgtcgccgccggcctcgctcgccgcgacatcgtccaggtctcctgacgcatcg

SEQ ID NO: 30498 - DNA, 175 bp, Zea mays
gttgctattgcttatagtgcaacagcagcactgccctttggcactatctgtgtcattgtgctcatctggaccttggtcacgtttcctttgcttgttttgggtggtattgctggtaaaaacagcaaaagtgagttccaagctccttgccgtaccacaaaataccccagggagattc

SEQ ID NO: 30499 - DNA, 316 bp, Zea mays
gtctctctcttctctctgactctctctctcgtagccgcgtccacctcgcagcagcaagcaagcgcgaccagatggcgcctctaggagacggcggagtgctgccgcggcggcgtccaacaacctggtggtgtcgttcggcgagatgctgatcgacttcgtccccgacgtggccgggctgtcgctggccgagtcgggcggcttcgtcaaggcattcggcggcgcgcccgccaacgtcgcctgcgacatcgccaagctcggcggatcctccgccttcgtaggcaagttcggcgacgacgagttcgggcacatgctggtg

SEQ ID NO: 30500 - DNA, 318 bp, Zea mays
gtccgggacgtgaaggtgcagccgaacccagatgaagtcgctgacgtgaagtacgtgaaccgcgacgagctcaaggagctcatccggaaggctgacgctggcgaggacggggtgaagatctccccctggttcaggctggtggtggacaacttcctcatgggctggtgggaccatgtcgagaaaggcaccctcggcgaggccgtggacatggagaccatccataagctgaaggactgaggggccgccggccggccggctccgatgacctcaccacctgttgatgttgctgctgctgctgcactgcatgtttatcaaaag

SEQ ID NO: 30501 - DNA, 316 bp, Zea mays
atcctccgagcctcagttcgcatccacgcgcgccgccgccgcctcgcagctcgacgctcaccgcgaagcatggcggaacagactgagaaggctttcctcaagcagccaaaggttttcctcagctcaaagaaatccggcaaaggtaagaagcctggcaagggcggcaaccgattctggaagagcattggccttggcttcaagactcccagggaagcaattgaagggacctacattgacaagaaatgcccattcactggaactgtttctatcagaggcagaattattgctgggacatgccacagtgctaagatgaaca

SEQ ID NO: 30502 - DNA, 296 bp, Zea mays
gccaataaataactacaaaggtttcctgcgcatgactgggttctgcaaaactaagataccttctgagatcactgctgcactagatcctatcaaagacaatgaggaggctgttagacaatatggaatccaccttggaactgagatgtgcaagaaaattcttgctactggcattaagactttgcacctttacacactaaacatggacaagtctgctataggaattttgatgaatcttggattaattgaggagtccaaggtttcaaggccattaccttggaggccagcgactaatgttt

SEQ ID NO: 30503 - DNA, 171 bp, Zea mays
cataatgttagatctgtatgttttcatccttgtggggattaccttttagcagggactgatcacccagttgctcatttatatgatataaatacttttacatgctacttatcagcaaatgcacaggattctagttctcccattaaccaggtacgctactcttgtactgggagc

SEQ ID NO: 30504 - DNA, 312 bp, Zea mays
agatcgattgcagccatgagtaagttgcattccgagcttctcaaggattgcatctcccagatagttcaggatgccaagaagaataggaagttcactgagactgttgagcttcagattagtctgaagaattatgatccacaaaaggacaagcgtttcagtggctctgttaagttgcctcacatccctcgtccaaagatgaaggtgtgcatgcttggtgatgcccagcacgttgaggaggctgagaagatgggacttgactacatggatgttgaggcgctcaagaacatgaacaagaacaagaagcttgttaag

SEQ ID NO: 30505 - DNA, 272 bp, Zea mays
tgtcgacattggcaggaatgtcattcatggaagtgacagcattgagagtgctaataaggagattgccctgtggtttcccgagggccttgctgattggcagagcagccagcacccctggatctacgagaagtaaacagtgaaagtttcacatgaaaccttgagagctagaggaagcatgtcaccatttgtgctttagcaaagttttggcaaagaaataaatttggtccatggaaataaggttccaagatacagatcataatcttttctttgcc

SEQ ID NO: 30506 - DNA, 285 bp, Zea mays
ctttcgccgagctcctcgaaaccctaggagcgtgcttgaccggcggcggcgaggtgatggcgatggaccctgacgcggtagcgaaggccttcgtggagcattactaccgaacgttcgacaccaaccgcgcggcgctggttgggctgtaccaggagacctccatgctcaccttcgagggccagaagttccagggcccctccgccattgccggcaagctcggatctctccctttccaggcctgcgtacatcagatcgtcaccgtagactgccagccatcgggtcccc

SEQ ID NO: 30507 - DNA, 291 bp, Zea mays
ccgaacgcaatcgcgaccggacccgcagtgacatacatacggtgcgagcgtcggcagccggaagcaccggtgacgaagccttccgtgtcatcaggatcgcagggttttgtttcgtttcgcgggcgttgggaatccatccatggcgaggaagatgctcatcgacggggaggtggcggccgtcgcggatggtgggcactatgactacgatctcttcgtcatcggggcgggcagcggcggtgttcgcggctctcgcaccgccgcctccttcggagctaaggttgcgatttgtga

SEQ ID NO: 30508 - DNA, 320 bp, Zea mays
gccgcacagtaactcggatcggtcgagcgggtcattcctgcatccccctcccgccgcgccgcctcaccgccgccggagaagatgggtcgcgtgatccgcgcgcagtacaggggtccggggtccgtgttcaagtcccacatccaccaccgcaagggtccccgccgcttccgctccctcgacttcggcgagcgcaacggagtactcaaggctcgtcgtcatcgacgtcatccacgaccccggccgtggcgcgccgctcggcaaggtcactttgcgctaccgatcgagtacaagcaccagaagagtctttgtcgcagccgagg

SEQ ID NO: 30509 - DNA, 285 bp, Zea mays
ctcctctccactttccacattccagttccactccgcctccgctgccggtcgccgactccgaaactccgacagtccgaccacaagaaggatgagtgaagaggataagactgctgcttctgctgagcagccgaagagggcccctaagctcaatgaaaggatcctctcttctctgtccaggaggtccgtagctgctcatccatggcatgatcttgagatcggtcctgatgctcctgctgttttcaatgttgttgttgagatcacaaagggaagcagagttaaatatga

SEQ ID NO: 30510 - DNA, 135 bp, Zea mays
aaaactgccgtttcaggtcttcaatctgctgtgtcagcatttgaacttgatgaagcaactgagaaagaactgcttgtgaagctggagaagcatggaaggagtgttgttgagtcaaaggcaaaagaagaagctgga

SEQ ID NO: 30511 - DNA, 131 bp, Zea mays
ggatgagcgagagcaagagaaggagaaacagaaggaccggcggccgtacgtgttcgaccggcgcactttgcgtcgcgtggtccggagcgagcaagggtctctgagggtgctccggcgcttcgacgaggtgt

SEQ ID NO: 30512 - DNA, 289 bp, Zea mays
ctgctctccacttgggcaagcttggtgccaagctgaccaagctcaccaagtctcaggccgactacatcagcgtgccgatcgagggtccctacaagcctgcccactaccggtactaggcagccagcacacggcttgcagctcactcgggccgttgtgtgctatgaagttcgctacactggcctgtcagttatcttttgcatgcatatgcattatcatatacgcagtcgcgtacaggtttccttatggttatcgcttgagctgattcggagggcaagagctgtttgctttt

SEQ ID NO: 30513 - DNA, 134 bp, Zea mays
agattacatccatgtggttgaccttgctgacggacatattgctgcattgcagaagctttttgagaactctagcatagggtgtgaagcgtacaaccttggaaccggaagacgtacatctgtgctggagattgtta

SEQ ID NO: 30514 - DNA, 289 bp, Zea mays
gaagaacaaagtggacaaggttgttgtgctgtggactgcaaacactgaaaggtacagcaatgtatgcgctggtctcaacgacacaatggagaatctgctggcatctgtggacaagaacgaggcggaaatctcgccatcaacactatatgccattgcctgtgtcacggaaggggtgccattcatcaatgggagcccccagaacacttttgtgcctgggctgattgatcttgctatcaagaacaactgcctgatcggtggtgacgacttaagagtgggcagaccagatgaa

SEQ ID NO: 30515 - DNA, 286 bp, Zea mays
gtttgtgtggggtagttcatggatgtaccttgcaactggcaattcgtcatacttgactctagccacacaccctaaacttgcaaagcatgctggcgctttctggggtggaccagattatggtgtgttcagctgggataataagctcactggggcacaggttcttctaagccggttgaggcttttcttgagtcctggatatccatatgaagagaccttgagtacattccacaaccagactagcattatcatgtgttcctaccttccaatattagatcttcaacagaac

SEQ ID NO: 30516 - DNA, 280 bp, Zea mays
agcgacgccgccgccgcaagccgtccgccttgcccctcgaaggcttggtcctcctccttgtatcccgacctcccccgcgacagacccgtttccccgctaggctagagttatcgttcctctgcagcgatggcgatcaagcggaccaaggcggagaagaagatcgcgtacgacaagaagctgtgcagcctgctcgatgagtacaccaaggtgctcatcgccctcgccgacaacgtcggctccaagcagctccaagacatccgccggggcctcaggggcgact

SEQ ID NO: 30517 - DNA, 253 bp, Zea mays
gcctcttctcctccctcctgccgggtccttaataaagagcagcagcgcaagaggttggtagagcgagcgagaagaaggcaatggcggcggagagcttcctgttcacctcggagtccgtgaacgaggggcacccagacaagctgtgcgaccaggtgtcggacgcggtgctggacgcctgcctggcgcaggaccccgacagcaaggtggcctgcgagacctgcaccaagacgaacatggtgatggtgttcggcga

SEQ ID NO: 30518 - DNA, 275 bp, Zea mays
cccgttccatttccccatctcccagatccaattcgcgagttctccctcctctgccgccatggcgctctctgtggagaagacctcgtctggacgggagtacaaggtcaaggatctctcgcaggcggacttcggccgcctcgagattgagctggccgaggtcgaaatgcccggcctcatggcgtgccgcgccgagttcggcccgtccaagcccttcgccggcgctaggatctcggggtctctccacatgaccatccagaccgccgtcctcatcgaga

SEQ ID NO: 30519 - DNA, 199 bp, Zea mays
gaacaaggccagaagatgtggagagtcaaccaacgtatagtgaagcttatagcggagctcatgaggaaccatgacagccctgaagccttggtgatactcgctagtgcctctgaccttctacttcgtgctactgatggaatgcttgttgacggtgaagcttgtactttgccacagcttgagcttctcgaagtaaccgctc

SEQ ID NO: 30520 - DNA, 296 bp, Zea mays
cttcttgttgccaaagaattccctcccctagccgccgccgccgctcgtctccctgagaggtgccgggaccgaagaactggccgagttctaggtagagaatcggttttgcttgtctcagcacggggtctgctgcgtctggtggtggtgaaggggagaaattcgtgagatatgttccggatcaggcgtgcgagctcgggaatcaggggtttcacacatagcttcgtcgatttgaatttgatgtactaatggagtctaagggtggcaaaaagtctagcagtagtcgttccatgatgtat

SEQ ID NO: 30521 - DNA, 272 bp, Zea mays
taataagataaacccatgaataagtgtccctacccttgatcatgtgacagggacagggacagtttcctgtacttgtggggtgaatttgtacgtgtgatacggtaactgggtccgtgtactgttcatgctacgttttcctacgtatatagtacagcacttgcgagtggctttacttgtgtgcacttcctaaaagtgtcgatattacctccatcagtaaatatgacccttgtgatgaaacttacacagcatgtcttaccaacagctgttattat

SEQ ID NO: 30522 - DNA, 296 bp, Zea mays
cgacagaatcctcgccttctctcaagatgtcgtctctggaaagattctttccccatctggtcgtttcacttcaattctctctataggaatcggagggtcagctttgggccctcaatttgttgctgaggcacttgcgcctgataaccctccactgaagataagatttattgacaacaccgatcctgctgggattgatcatcaaattgctcaactaggacctgaactggcaactactcttgtaattgtcatttctaagagcggaggcacacctgaaacccgcaatgggctactggaag

SEQ ID NO: 30523 - DNA, 193 bp, Zea mays
gagttatttcccagccaggcatctgagagctttggtcttgacctcgacagagatcgccatggacgcatcggcggaggtggaccacctcgccgccgagaggtcggccgcgcgcttcgacgtcgaggcgatgaaggttgcatgggctggctcgcgacacgccgtcgaagtcggcgaccgcatggcccgactcgtc

SEQ ID NO: 30524 - DNA, 194 bp, Zea mays
caccaatccacagcgagacacgcccgagcgagtgatccccgacccagccgccgccatgaggccgtcgctgctgaagtccacggccgagctcctccgccgcagccgcggctacgcgtccacggccaatccggagcggaaggtggccatcctgggcgcggcgggcggcatcgggcagccgctctcgctcctcatga

SEQ ID NO: 30525 - DNA, 295 bp, Zea mays
caaatcatccttggcttcacagaaggtcatcacagttataaccgcaaaggatattccaagtggtggagaaaatattggaagcagcttcttgatgcaaggagaagcactatttgcagatccaatcgctgaatttgctggtcaaaatattggtgtcgtgatcgctgaaacacaaagagatgcttacatggctgcaaagcaagctgttgttgagtatagcacagaaaatctgcagccaccaattctgacaatagaagatgccatccagagaaacagctacatccaaattcccccattt

SEQ ID NO: 30526 - DNA, 291 bp, Zea mays
atttcatctttcggaatcgaccatgatttcactgggatgtgctacccactccttgttagctctgttggtatcattgtctgcttgatcaccaccctttttgctactgatttctttgaagtcaaggctgtgaaagaaattgagcctgcacttaagaagcagctcatcatctccaccgtcctgatgacttttggtattgctctaatcagctggttggcccttccagctaagttcaccatctacaacttcggtactcagaaggaggtttccaactggggtttgttcttctgtgtt

SEQ ID NO: 30527 - DNA, 186 bp, Zea mays
cacacacaagacacaaccccactcacccggcacggaggccctcttcgtcggcggaggccatggtttccctcaagccgcagaagaggctcgccgcgggagtcctaaaatgtggcaaggggaaggtgtggcttgaccccaacgaggtctacgagatctcgatggctaactcgcgtcagaacattcgta

SEQ ID NO: 30528 - DNA, 283 bp, Zea mays
cgcctccctttcaccttccctccctccctctccccgcgggccgccagaggcaatttcgccctcgattcgaccccgattcgtccgcccgcgaccgggattccctccgccaagcgcggatctgaacgctgcgctccgtgtcgccgctcgaatccgccatgaagggggccaaatccaagggcgccgccaaggccgatgccaagctggcggtgaagagcaagggggcggagaagcccgccaagggcaggaaagggaaggccggcaaggaccccaacaagcctaagag

SEQ ID NO: 30529 - DNA, 287 bp, Zea mays
ctcgctttggatcgattggtttcgtaactggtgagggactgagggtctcggagtggattgatttgggattctgttcgaagatttgctgaggggggcaatggcgaccgcggggaaggtgatcaagtgcaaagctgcggtggcatgggaggccggcaagccactgtcgatcgaggaggtggaggtagcgcctccgcaggccatggaggtgcgcgtcaagatcctcttcacctcgctctgccacaccgacgtctacttctgggaggccaaggggcagactcccgtgttcc

SEQ ID NO: 30530 - DNA, 316 bp, Zea mays
  unsure (1)..(316): unsure at all n locations
gagccatctcncctctctccgacccccaaccatggatgaggcgcaagttgtggagtcaaaggatggaaccatctcggttgcttctgcatttgctggttatcaggaagctgtgcaagacagggatcacaaattcttgacaaaagcagtggaagaagcatatcgaggagtcgattgcggtgacggaggtccattcggagcagttgtcgtctgtaatgacgaagtagtagtcagctgccataacatggttctgaagcacactgaccctactgcgcatgctgaagtaactgcaattagagaggcttgcaaaaagcttggg

SEQ ID NO: 30531 - DNA, 325 bp, Zea mays
  unsure (1)..(325): unsure at all n locations
cgcttcgcttctcncccagctcggacggagctcctcgcagtcgcagcagccgccgatcaacctgcgctcgggctcagcgctggaaggtgttggaagagaatagcctgaaggttcacagtaaccttcatctgttggaagatgtatcgggctaagagggctgcattgtcaccgaagtgaagcgccgcgtcggcaagtacgagctcgggcgcaccattggggaagggacctttgccaaggtccggtttgctaagaacaccgaaaacggggaacctgttgctatcanaatccttgacaaggagaaggttaagaggcacagattggttga

SEQ ID NO: 30532 - DNA, 321 bp, Zea mays
ctcgcatatccgctcgcctacctctccagcatctcccgtctccgtcgtctcgtctctgctcctcacctcgccgccagccatgggcaagatcaagatcggaatcaacggtttcggaaggatcggcaggctcgtggccagggtcgccctgcagagcgaggatgtcgagctcgtcgccgtcaacgaccccttcatcaccacggattacatgacctacatgttcaagtacgacaccgtgcacggccaatggaagcacagcgacatcaccctcaaggactccaagacgcttctcttcggcgagaagcggtcaccgtctttggcatc

SEQ ID NO: 30533 - DNA, 98 bp, Zea mays
tgcgagcagtggtccctgagggtgctccggcccttcgacgatgtgtccaggctcctcctctgcatccgggactaccgcgtggcgttcctggaggcgaa

SEQ ID NO: 30534 - DNA, 319 bp, Zea mays
  unsure (1)..(319): unsure at all n locations
cagtgaccgaagtctcatttggaactctgacttgatagagaccctggaactggaaaatctgttgataaacgcatgcataactatgtattcggcagaggctcggaaggaaagcagaggagctcatgctcgtgaagatttcacgacaagagatgacgagaagtggatgaaacactccctgggatactgggagaacgagaaggttcgattggcatacaggccagtgcacatgaacacattggacgatgaagtagagtcattcccgccanaagcacgtgtctattgatcgattcaagcctaacacctcgggaattccgtgtaa

SEQ ID NO: 30535 - DNA, 294 bp, Zea mays
ggagttcgaagacaagatgaaggagcttgaggggatctgcaaccccatcatcgcgaagatgtaccagggcgagggcgcgggcatgggcgctgctgctggcatggatgaggatgccccgtctggtgggagcggtgctggtcccaagatcgaggaggtggattaagttggttagtgttcgaggtttggtttggtgaggtgtgaagtgcctgaactctgatggttgtttgtgaggtgtggtcgcaatagctgcggcctgtggtgaacttctcagaaataaataagttttcgttccta

SEQ ID NO: 30536 - DNA, 150 bp, Zea mays
aacactcaccgatagcaagtagcgccgccgacgtttcgagagcagagtatccaagctagccaagcgcgcacctcggtgacctagctagctacctagctagttcaggcgacgatatggcgtctggtcaggagagcaggaaggagctggacc

SEQ ID NO: 30537 - DNA, 325 bp, Zea mays
  unsure (1)..(325): unsure at all n locations
cgccgagtgacagcccncgcccgcccgccctccgccgcgcgtcggacggtgacgaggagacagaggcaccatgaggttggagaagtgctggttctgctcctctaccatctaccccggccatggaatccagttcgtccgcaacgacgccaagatcttccgcttttgccggtcaaagtgccataaaaacttcaagatgaagaggaaccctcgtaaggttaagtggacaaaagcatacaggcatttgcatggcaaggacatgacncaggatacaacctttgagtttgagaggaagaggaacaggcccgagcgctacgaccgcaatttg

SEQ ID NO: 30538 - DNA, 322 bp, Zea mays
ctgcacccatctttgcagctatgtattgtatcttctttgcttatgccggttctgctgggatcggcttccttcagttctgtaacctcaacacctttaggaccaagttcatccttgggttctcagttttcatgggcctttctgttcctcaatacttcaatgagtacacatctattgctggttatggtcctgttcacacacattcaagatggttcaacgatatagtgaatgtgatattctcgtccaaggcgtttgttgctggcttcgtggcatatttgctggacaacactattgacaggcatgaagcttcgagtcagagagaccg

SEQ ID NO: 30539 - DNA, 312 bp, Zea mays
  unsure (1)..(312): unsure at all n locations
caaacccaaatcaagccaccaccctctcctcctcctcagcggcgagcaccaccagcaacagcgagacacgatgaggccgatcttgatgaagggccacgagcgcccgctcacgttcctgcgctacaaccgcgacggggacctcctcttctcctgcgccaaggaccacacccccacggtctggtacgccgacaacggcgaccgcctcgtcacctaccgcggccacaacggcgctgtctggacctgcgacgtctcgcgcgactcggcgcgcctcatcaccggatccgccgaccagaccgccaagctctgngatgt

SEQ ID NO: 30540 - DNA, 308 bp, Zea mays
  unsure (1)..(308): unsure at all n locations
attctcacgcgctcgccgcctaggagcattcacgttggcggcgggcggcggctcggttcctctcctccaccgcacctccaagaatccacctccacgactgagctgacggctcggtaccgccatggcagttcaccggctccaaccttccccatccggcctacagtgctccaccgcccggtcgccagtgctcctccatgggccacggctgacgggtgcacgcaccggtangagaggtggatttggtggacctagattcgatgtgcagagagcgacttggaggtggctgacatcttcaagcactgcatcat

SEQ ID NO: 30541 - DNA, 296 bp, Zea mays
ccactcttcgcctcctttctggagcagctagggttccgtcctcgatccgatccgccgagtgcacaccacctttccccactccgatcgaatcgatggccgccgagggcgagaagaagatgataaccctcaaaagctccgatggcgaggagttcgaggtggaagaggcggtggcgatggagtcgcagaccatccgccacatgatcgaggatgactgcgccgacaacggtatccctcttcctaacgtcaactccaagatcctatccaaggtaatcgagtactgcaacaagcacgtacat

SEQ ID NO: 30542 - DNA, 309 bp, Zea mays
gatgccgtggacaagacctcgcagacggcgcacaccgcgggcgacaagctcggcgagtacagggactacaccgccgacaaggcccgggaggccaacgacagcgtctcgcgtaagacgggcgagacggcggaggccacccggaacaagctgggcgagtacaaggacagcgccgtggagaaggcgagggagaccaaggacgcggtggcgcagaagacgagcgagaccgcggaggcgaccaagaacaagctcggggagtacaaggacgcggcggccggcatagcgcgggaggccgcggactacaccgccggc

SEQ ID NO: 30543 - DNA, 164 bp, Zea mays
  unsure (1)..(164): unsure at all n locations
ctcatatccgctcncctacctctccagcatctcccgtctccgtcgtctcgtctctgctcctcacctcgccgccagccatgggcaagatcaagatcggaatcaacggtttcggaaggatcggcaggctcgtggccagggtcgccctgcagagcgaggatgtcgag

SEQ ID NO: 30544 - DNA, 163 bp, Zea mays
ccgctggggggaagctgtacacgatcatggaaatatgccgtatgtttgatggtatttacaaagagcatctggatggagtgcgccctggcggagagaaagtttaccatgtcttcgacaatcaatttcctgtagctattaaacgattgcagtttgataaacaact

SEQ ID NO: 30545 - DNA, 200 bp, Zea mays
cacctatcatcgccgctgcgccgtctcctccgctcccgtcgtccggaaagatggcgtcccacattgttggataccctcgcatgggccccaagagggagctcaagtttgcacttgagtctttctgggatgggaagagcaccgctgaggatctggagaaggttgctaccgacctcagggccagtatctggaagcagatggct

SEQ ID NO: 30546 - DNA, 299 bp, Zea mays
cggcgtcaccgcaccaaatctagcaaacggaaatcccatctcgccgccgccgcgatgtctcgccgctatgacagtcgcacgacgatcttctcgccggaggggcgtctctaccaggtggagtacgcgatggaggcgatcggcaacgccgggtcagccctcgggatcctggcggccgacggcgtagtcctggtcggcgagaagaaggtgacctccaagctcctccagacctcccgctccgccgagaagatgtacaagatcgactcccacctggcgtgcgctgtggcagggatcatgtccga

SEQ ID NO: 30547 - DNA, 159 bp, Zea mays
actctgtcgcacagcgtcgcccgtcgccgctgagatcctaggaagaaatggagctctctcgcaagctcttcacggccgtcctcctcgtcatgctgctgctgctgtccgcagaggtcgggccggtggcggtggcggaggcgcggacgtgccagtcgcaga

SEQ ID NO: 30548 - DNA, 159 bp, Zea mays
cagctggataagaagcaggaaatttatacttgggctgaggattgctcctggcttttatgaaggcattcgtgtccgagaagccaagacagaagctttccccgttaaggatcacagaggagaatgtatgtgtgatacattgttgatttactcattagatga

SEQ ID NO: 30549 - DNA, 324 bp, Zea mays
  unsure (1)..(324): unsure at all n locations
ggacgcgtggcggacgcgtgagctgcgatctgatcgacatggctgccgccaccatggctatcagatcacgcgcgctcatcgagaagccggcggctggcacgagggacgtcttcggcgagggccgcatcagcatgcgcaagaccgccgccaagcccaagccggcggcgtccggcagcccctggtacggtgccgaccgcgtcgtgtagctgggcccgctgtccggctcggcgccgagataactgaacggcgagttcaccggcgctacgggtgggcnacgcggggctgtcgcagaccggagccttcgcaagaacgcgacttgagtga

SEQ ID NO: 30550 - DNA, 341 bp, Zea mays
tgttgaggaggccgagaagatgggacttgactacatggatgttgaggctctcaagaaaatgaacaagaacaagaagcttgttaagaggcttgccaagaagtaccatgctttcttggcatcagaggccatcatcaagcagattccccgtctccttggtcctggtctcaacaaggcaggcaagttcccgaccctggttactcaccaggaatccctcgagtccaaggtgaacgagactaaggcaaccgtcaagttccagctcaagaaggttctttgcatgggtgttgccgttggcaacttggcgatggaggagaagcagatctagcagaacatccagatgagcg

SEQ ID NO: 30551 - DNA, 333 bp, Zea mays
catctctctctgctcctccgcctccgcctccgcctgatccatccaagacagggatcgccatgtcggactcggaggagcaccacttcgaatcgaaggccgacgctggggcgtccaagacctacccgcagcaggctggcaccgtccgtaagataggcttcatcgtcatcaagaaccgtccctgcatagttgtggaggtttctacctccaagactggtaagcatggccacgccaaatgccactttgtcgccatagacatattcaatgggacaaagcttgaagatattgttccttcatcacacaactgtgacattccgcatgtgtaccgtactgagt

SEQ ID NO: 30552 - DNA, 331 bp, Zea mays
gccagggtaacctcgtgctaactgggccatcatgggccacctcggcatacagtccaattgccttcaccctctacctccatgatggcagcccgcaagccggagaagccgctgaggacgacgaggacatcgggaggataatctgcgactgcatcgacggtgacttctccaactacaacagggccatagtcgagactgtccaaacgggctatggccccgctgaagtgatctatgccgtcctgagcaacggcgtccaaggccgggtcgccatcaaacttgctcgcctgccagtgtccaaagctggagaagaagacgccacggcgattctcgggag

SEQ ID NO: 30553 - DNA, 332 bp, Zea mays
  unsure (1)..(332): unsure at all n locations
ctcatcttttctcgtttagaacctctaaaatttcccccactcgccagtcgcagcagcacctgtagcagccatggacgccagcggagccggtagcaaggggaagaagggggcggccgggcgcaaggcaggcggccccaggaagaagtcggtgacgcggtccgtcaaggccgggctgcagttccccgtcggccggatcgggcgctacctcaagaagggccggtacgcgcacgcgtgggcactggcgcccccgtctacctcgccgccgttctggagtactcgccgccgggttctggagttggcanggacgcggcgatagcaacaagaagcgcgca

SEQ ID NO: 30554 - DNA, 334 bp, Zea mays
  unsure (1)..(334): unsure at all n locations
aagcaaacgnacacgcgtccgcggacgctggcgacgtggtnccgtctccaactcactagtactcagccgccgatatcaggggggcaggtagcacgagcgcgcgctccacctgcgccgacgcgatgcgggccaagtggaagaagaagaggatgcggaggctcaagaggaagcgccggaaaatgaggcagagatctaagtaggcgcatcttgtgaccgaggatggcgagcttctcctgcaccatggctgtgacgcgttgggatgattgtcatcctntgtagacgtgctttgctgtagacgtaggcgatgtaaaccgtcccttttgataattctagt

SEQ ID NO: 30555 - DNA, 335 bp, Zea mays
  unsure (1)..(335): unsure at all n locations
cccgtatccagtttgagaacaactgtgaaattggtgttttctccaagctgacaaatgcttactgtctggtagcgattggagggtcagagaacttctacagtgcctttgaggctgagcttgcagatgccatccctgtggtcaagacctctattggtggcactagaataataggccgactttgtgttggaaacaagaatggacttctattgccacatactacaaccgaccaagagcttcagcatctgaggaattgcttgcctgatcaagtggtggttcagcgcattgatgagaggttatctgnccttggcaattgcatagcctgcaatgaccatgtt

SEQ ID NO: 30556 - DNA, 330 bp, Zea mays
ggggttcatacggggcagatggtcctcaaggtcgtcgaggccatcgatgtgtatcttgctggaacagtcatgctgatatttgggatgggtctctacggcctcttcatcagcaacgctcccgccggtgttcctcctgaatccgaccgtgccctcagcggctcgtcgttgttcgggatgttcgctttgaaggaacgcccgaagtggatgaacatcacctcgcttgacgagctcaagacaaaagtggggcacgtcatcgtgatgattctacttgtgaagatgttcgagaagagcaagatggtgacgatagctacggggctggacctcctcagc

SEQ ID NO: 30557 - DNA, 335 bp, Zea mays
  unsure (1)..(335): unsure at all n locations
gatctggcgagtcaaggactanaaggttacatcaccgatgaaataagtcatcttaaagacttggtaagcttgaatttgagctataattcactgactggaagcttaccacctggtttaggtcaaccttcacttgtgtcactggatatttcatcaaatgagtttactggaagcattcctggaaccataggttcatccaagttacagactgcattactagacaacaatcaactcgatgggcaagttccagaaagactttactcaattggcgtgcatggtggcgtgatagacctctcaggtaataaagggttgtgtggcgtgcctaccttactgcttgt

SEQ ID NO: 30558 - DNA, 335 bp, Zea mays
  unsure (1)..(335): unsure at all n locations
gacagaggcaatgatgtccgtgcattaagaataagtgatttcatacatgcgcatgaacaggtgtgtgcaagtgtttcctcagattccagtaacatgaacgagcttgtgcaatggaatgatctctatggagaaggcgggtcaaggaaaaagacaacgctaagctacttcatgtagctgatgttgcaagtatatcgggagaagtgccctggcacaaagcagaaatggttggaggcagttgggggtgtgtatcgggtgcagttggaaaagagctaggttcacctgccatccatccattgagagaattgatggctcangtggagcggaatggagtagta

SEQ ID NO: 30559 - DNA, 336 bp, Zea mays
  unsure (1)..(336): unsure at all n locations
ccgttcagtgtccgcgagctggcaattcaaggcgattaacgatgaggggatgccaatttaccagaggcctttcatgaaggggaagctgtacatccatttcacggtggagttccccgactcgctggcaccagagcagtgcaaggctctcgagacagtacttccaccaaggccttcatccaagctgacagacatggagatagatgaatgcgaggagacgactatgcatgatgtgaacaacatcgaggaagagatgcgcangaagcaagctcacgctgcccaggaggcgtacgaggatgacgacgagatgccgggcggagcctagagagtgcagtgcgc

SEQ ID NO: 30560 - DNA, 264 bp, Zea mays
aatcacgcgtcctaacacgcgtccgcggacgcgtgggcagtatgagctgcggccaagatggcctcttggtgaggaatattcagaaggaagaagatttgcacgatcattgaagaccgctcgagtccatccatcactaacgtccatgatacagggctcgcttcaaaagtagttgagttggaagttggaaactaattattggtctcaactgctttatgcagttgagtttcccgtcttctagttttggggtcacaaatcagctgcttt

SEQ ID NO: 30561 - DNA, 328 bp, Zea mays
  unsure (1)..(328): unsure at all n locations
caagcactacaccaaggactttggcatcgagtgccgcgtcggccgcttccacaacatctacggccctttcggaacatggaaaggtggccgcgagaaggcaccggctgccttctgcagaaaggctcagacatccacggagaggtttgagatgtggggcgatggtctccagaccaggtccttcaccttcatcgacgagtgcgtggagggtgttctgagattgaccaagtcagacttccgcgagccagtgaacatcggaagcgatgagatggtgagcatgaacgagatggctgagatcgtgctgngctttgaggataggaagctgcccatc

SEQ ID NO: 30562 - DNA, 299 bp, Zea mays
  unsure (1)..(299): unsure at all n locations
gagcttcttcttcttgatgttactcncctgtcactaggtattgagacgctcggtggtatcttcaccagattgatcaacagaaacactacaatccccacaaagaaaagtcaggtgttctcaactgctgctgacaaccagacccaggtaggtatccgggtgttgcaaggtgagcgtgaaatggctacagacaacaagctccttggtgaatttgacctcgtgggcattccacctgccccaagaggcttgcctcagattgagggtacattcgacatcgatgcaatggaatcgtgactgtctca

SEQ ID NO: 30563 - DNA, 216 bp, Zea mays
cggacgcgtggaggacacctgtttctcctatcaactctctcggtactgcgattgcacttgccggagttatcctgtactcacagctcaagcgacttaagcccaagccgaagacggcttaaatagggattgtattttccatctctttgtgttaatggagttaaacacttctatgtttcaggtgactgcattttaaaagatttgtgcttataacaacaa

SEQ ID NO: 30564 - DNA, 307 bp, Zea mays
gtcgccaaccgtctggtcaggaactatccccaatacaagatcgttgtccttgacaagattgactactgctccaacctaaagaacctcaatccttcacggtcttcaccaaatttcaaatttgtcaagggtgatattgcaagtgctgacctggtgaattaccttctgatcaccgagtcaattgacaccatcatgcactttgctgctcagacgcatgttgataattcttttggcaattcatttgagttcacaaaaaacaatatatatggcacgcatgttcttcttgaggcttgcaaggttactggtcaga

SEQ ID NO: 30565 - DNA, 320 bp, Zea mays
  unsure (1)..(320): unsure at all n locations
cagcaacatcgtggtgcaaggcatcaccatcctggcgccgaccaactcgcccaacaccgacggcatcaacccagactcctgctctcacgtccgcatcgaggactgctacatcgtgtcgggcgacgactgcgtggccatcaagagcggctgggacgagtacggcatctcgtacgggatgcccagccagcacatcgtcatccgccgcctcacgtgcgtgtcnccgaccagcgccgtcatcgcgctgggcagcgagatgtcgggcggcatccaggacgtgcgcgccgaggacatcacggcgatcaacaccgagtccgccgtgc

SEQ ID NO: 30566 - DNA, 296 bp, Zea mays
ctggagatactaagcggcaggaaagcgatcgacatgcagttcgaggaggggaacattgttgaatgggcagtgcctctgatcaaagcaggggacatttttgccatccttgatccagtcttatctcctccctcagaccttagaggcgctcaagaagattgcttccgtggcatgtaagtgtgtcagaatgcgaggtaaagatcggccttccatggataaggtgacgacagctctagagcacgcacttgcactgctgatgggcagccctgcatcgagcagccattctaccgaccgaggtg

SEQ ID NO: 30567 - DNA, 299 bp, Zea mays
cacaagagctactactacagctcctcatctcaagtgtgtagacgagacagagagacactgagagagcgccatggccagcctccaagtcactcctacttcggcgttcactgagtggaacgagctgaagttcgaaggcctgtacctgttccacacgcccctgggctcaggcgccaaccaagctcgggtcatagacaacaaggcgccgattggcatcggtgccaccgtagttaacaactggacagtgtatgacgggccagggcccgacgcaaagctggttgcacgtgcacagggcttgcata

SEQ ID NO: 30568 - DNA, 321 bp, Zea mays
cccacgcgtccgctcgcctcgggtcaaaccctaagcagggagttgatttatccgctgcagccatgagtaagttgcagtctgagtctgtcaaggatgccatctcccagattgttggggatgccaaggagaagaataggaagttcactgagactgtggaacttcagattggtctgaagaattatgatccacagaaggacaagcgtttcagtggctctgttaagttgccccatatccctcgtcccaagatgaaggtgtgcatgcttggtgatgcccagcatgttgaggaggccgagaagatgggacttgactacatggatgttg

SEQ ID NO: 30569 - DNA, 323 bp, Zea mays
  unsure (1)..(323): unsure at all n locations
gccgcacctgagtccgttcatgaagccgctgggctccaacttctccaacggcgtcaacttcgccattgcagggtccacggccatgccgggagtaaccaccttctcgctggacgtgcaggtggatcagttcgtcttcttcaaggagagatgcctcgactccatcgagagaggtgagagtgccccgattgttgagaaggcgttcccagatgctatatacaccatggacatcgggcacaacgatataaacggtgttctccacttgccttatcatacaatgctcgaaaatctcnccccagtaattgctgaaatcaagaaagccatcg

SEQ ID NO: 30570 - DNA, 316 bp, Zea mays
  unsure (1)..(316): unsure at all n locations
acgcgctctacgacgcggccacgggcggcggcgacgtctggatcaacgagcgccgcttccgcgtccttcgccagatcggcgagggcgggttcgccttcgtctacctcgtcagagagcaccagcccgcctccgatgcggcgttcgctaggcgtgacnccgcccacgtctcagaggatggaacgtatgccatgaagaaggtgctgatatagagcaangagcagttggatctgttganggangagatccgtgtgtcgtcttattcgatcacgcnaccttctgcagctcntgatcatgcataatagcgtgaagagcaaca

SEQ ID NO: 30571 - DNA, 243 bp, Zea mays
atctgccacctcgccgtctcgcacgttcctttccccaactccccagcgcctctccgcgccgcgatccagatccaggttgttcagcatgggtctggtgaaggaaggcgtcgacatggaggagggaaccctagagatcggcatggagtacaggactgtatctggtgtggccgggcctctggttatcttggataaagtaaagggcccaaagtaccaagaaattgtaaacatccgacttggagatgg

SEQ ID NO: 30572 - DNA, 247 bp, Zea mays
gcgaaggcgaccctccctccttcgctccttccgcgccgcctcccggccgtcgccgccatggtgaagtactcgcaggagccgggcaaccctaccaagtcggctaaggccatgggcagggatctgagggtccacttcaagaacacaagggagacagcctttgcgcttcgcaagttgtctttgaccaaggctaagcgataccttgaggatgttattgctcacaagcaggcaattcccttccggagatact

SEQ ID NO: 30573 - DNA, 250 bp, Zea mays
cgaacccgaatcccgagcacaggccgccgctcgctcgctcgctgcagctacgcacgcacgcgcctgctcctccccttagcttccacaaggctcgactcggccggcggcgatggcgcggaagaagatccgggagtacgactccaagcgcctcctccgggagcacctcaagcgcctcgccggcatcgatctccagatcctctccgcgcaggtcacacagtcaacggatttcactgagcttgcaaaccaggag

SEQ ID NO: 30574 - DNA, 118 bp, Zea mays
cggacgcgtgggtgacgggcgtgggcctcgtcgaccagatgggcaacttcttctgcaagacgctgctgttcgtcgccgtcgccggcgtgctgctggtcaggaagaacgaggacgtgga

SEQ ID NO: 30575 - DNA, 233 bp, Zea mays
gttccctcaacactactcgtcgatctcagaaaataatctccctgcggaactcttccctcagtataccaccgtcgagtacatatcttcaactgaaactggtcctatagttccaccagttttcatttttgttgtagatacttgcatgattgaagaagaaattggttatttgaagtctgcactggcacaagctgttgagctattgccagataattctcttgttggattcattacgt

SEQ ID NO: 30576 - DNA, 235 bp, Zea mays
cccacgcgtccggggaagaacaaaatagatcttctaagtgcaacagttgggctgtcgaattatggtgcattctttgacctggtaggtgctggaattactggcccagtaaaactgagtggactaaacggtgcgctcgatctgtcttctgcagaatggacatatcagattggactcagaggagaagatttgcacctatatgatccttcagaagcttcaccagaatgggtctcagcca

SEQ ID NO: 30577 - DNA, 235 bp, Zea mays
cggacgcgtgggggtttttgattttagccgccgccgctgctcatctcacatccctcgagaagacgcctgctcatcgccgatcgatacgatggccgtcttctccgacctccacaccgccgacggcctcaagtccctcgaggctcacctcgccggcaaaacctatgtgtctggtgactccattactaaggatgacattaaggtcttcgccgcggtgccgtcgaagcctggcgctgag

SEQ ID NO: 30578 - DNA, 237 bp, Zea mays
gaaatctgccaaaggccaaagcctccttaaccgctgctagaacagcagcaaatgccatttatgttccacctgctcagcaaggcactattgatctccagagtggaatcctccatgctgaagaaaaggattacaagactgcttacagctacttctttgaagcatttgaagctttcagtgcactggaggacccgaagccatctttagcctgaagtacatgctcttgtgtaagataatggt

SEQ ID NO: 30579 - DNA, 243 bp, Zea mays
ttcagagtcttcaaccagttcaccgagcagttctctgtcaatgagctagccaaactggtgactgcggcaggagcgaaacttgggcttgaagtggagaccaaatcgatacccaacccacgagtcgaggctgaggagcactactacaacgccaagcacacgaagcttattgagctcggcctggtgccccacctgctctcggactccctgctcgactcgcttctcaactttgccatccaatacaag

SEQ ID NO: 30580 - DNA, 242 bp, Zea mays
cctaggtgcaaaatcctgatattaatgggaaagacagatttttctgcacctaagcataagcagcagtccatgattttagtggacatcaacactcctggggtgcagataaagagaccattgttagtctttggttttgatgatgcacctcatggacacgcagagattacatttgaaaacgtgcgtgttccagtaacaaatatcctgcttggagaagggcgtggttttgagattgctcaaggaag

SEQ ID NO: 30581 - DNA, 242 bp, Zea mays
cgacgcaggacctgtacgactccatcgcggcggggagcttcccggagtggacgctgtacgtgcaggtgatggacccggacacggaggagcagtacgacttcgacccgctggacgacaccaagacgtggccggaggacctgctgccgctccgccccgtggggaggctggtgctggacaggaacgtggacaacttcttcaacgagaacgagcagctggcgttcgggccggggctggtggtgcca

SEQ ID NO: 30582 - DNA, 139 bp, Zea mays
gagttttttctagttgctctgcaaggatatagaacaatgttctaagactaccatgtttttaagtctgcctgatgcttataattcatgaacgatttttgcagctagctgtaatgtgactatttatcttatctgcttgttc

SEQ ID NO: 30583 - DNA, 243 bp, Zea mays
cggacggtgggggatgggctgaggctttgcgtgagatctcagggcgtttggctgaaatgcctgctgatagtggttacccagcttacttggctgcgcgtttggcatccttttatgaacgtgctggtaaggtgaaatgcctgggaagtccagacaggactggcagtgtcacaattgttggagccgtctctcctccaggtggtgatttttcagaccctgttacctctgcaaccctcagtattgttc

SEQ ID NO: 30584 - DNA, 238 bp, Zea mays
cccactcccgggtctccagcattcctatcctctccccgcccgcccgtgccgccgccgcggcttcccttcctctcccgagccaagatgaatgttgaaaagctcaagaagatggcaggtgctgtgcgcaccggggggaagggtagcgtgcgcaggaagaagaaggcagtccacaagactacaaccacagatgacaaacggcttcaaagcaccttgaaaagaataggagtgaacagcattc

SEQ ID NO: 30585 - DNA, 236 bp, Zea mays
gcagcccagaaagtgtacgcattaagctgatcaccaccactgctgtaagaatggccatgacttcaacttcctcggtcccttcctatttgctgctatcatggtgctcatggtgttttcactaatccagatctttttcccgctgggtaagatatctgtgatgatatacggtgggttggcatcacttatcttctgtggatacatcatctatgacacggacaatgtcatcaagcgctaca

SEQ ID NO: 30586 - DNA, 236 bp, Zea mays
gcctataataaggtagatgttataggtatcgatgaggcccaattcttcgacgatctttatgatttctgctgcaaagctgcagatcgtgatggaaaaattgtagttgttgctggcctagatggtgactacaaacggagaaagttcggttcaattcttgatattgttcctctggctgactcggtcaccaagctaacagcacgctgtgagctatgtggtcgccgggcgttctttacact

SEQ ID NO: 30587 - DNA, 237 bp, Zea mays
cggacgctccgcccacgcgtccgcccacgcgtccgccagggtgttcaagtgttcccagagataatggttcctcttgttggaacaccacaggaactggggcatcaagtgactcttatccgccaagttgctgagaaagtgttcgccaatgtgggcaagactatcgggtacaaagttggaacaatgattgagatccccagggcagctctggtggctgatgagatagcggacaggctgaat

SEQ ID NO: 30588 - DNA, 237 bp, Zea mays
atcacgcgtccgcggacgcgtgggggttgtttgacgctatgaaggaagcggggatgcagcctaatcagtatacatacaatgtgctgatgagcggtcactgtcagagagatgatgtcaacagtgcagttgtgttgtaccaggaattgctgaagagtggcctgaatccaaatgctgttatctttacaaccctgattgacggtttctgtaaagcgaagagtttcagtgaagcaaaaggta

SEQ ID NO: 30589 - DNA, 325 bp, Zea mays
atacacaacacagagcatcagaaggagctgcgatctgctcgacatggctgccgccaccatggctatcacctcccgcgcgatcatcggcaagccggcggctggcacgagggccgtcttcggcgagggccgcatcaccatgcgcaagaccgccgccaagcccaagcaggcgccgtccggcagccgctggtacggtgccgaccgcgatctgtacctgggcccgctgtcccgctagcacccgagctacctgaccggcgagttccacggcgactacgggtgggacacgcggcgctgtcggcggacacggcaacttcgccaacaccgcgag

SEQ ID NO: 30590 - DNA, 343 bp, Zea mays
  unsure (1)..(343): unsure at all n locations
cccacgcgtccgagggttttgctgctctccgaccccgagctccgaatgccgcagcatcaggcgaggcncccctcgcgtgtgaccgagatggcgctgccgaatcaggggaccgttgattaccccagcttcaagctcgtcatcgtcggcgatggtggaactggtaaaactacatttgtgaagaggcatctcactggagagtttgagaagaaatatgaaccaaccattggtgtggaagttcatccgttggatttcaccactaactgtggtaagatcaggttctactgctgggatacccgcaggcaagagaagtttggtggcctcagggatggatactatatccatg

SEQ ID NO: 30591 - DNA, 277 bp, Zea mays
  unsure (1)..(277): unsure at all n locations
cggacgctggcgagacaggttcacctttctgagccctttgaaccgtcagttttccttcgacttcagcctgacgtacgttcgtgctcggatgatctgctcgcacctcggnaagctctcgttgctgctcggtgccgtcgtttcctcgggcgtcatgtggccactcatcggcaagcagaagggcaactggtatgcggcagatgcatctcagcataggatgccacgcatctacgggtacaaggccttgctttgcattgcccttttcgtgggagacgtctct

SEQ ID NO: 30592 - DNA, 340 bp, Zea mays
caaactgcagaaactgatagatgagcagcaaccacaatctgcactgtgctagagagggctcacctcattagcatgccttgttcggtttttcatatggcatatggattggaagggattgagctaacggataagaactttgacttgatatagattggaacccatccaatcccctcaaatccatatggattttgatgaaaccgaacaagcactaagttgaattggacagctcacttcaatccagacccctaaaccttttgtaggccttggttaaaattgttgtgaaatcagatggctactcgaggctgggcacttggggtccggaataataccgaaaccttct

SEQ ID NO: 30593 - DNA, 308 bp, Zea mays
ttacatttatacacggtgctgatcaccgctggagtgaaatgaaacaagaaccacaccacctacataccatgcagctagagaggaggatcggccggagctatgtatacgcatcttcgatgatatctacttgaagaagtaggggaggtcgagcacgtagaggagaaagtaggcccagagcacgccggacatgccgccgaagaagaatcccccggtgaacttggcccagccgtcggaggtctgcagcttgtcggcgtccttcttcatgccggtcgacgtgacgaagggcgccgtggacgggtcccctcgtt

SEQ ID NO: 30594 - DNA, 334 bp, Zea mays
cggacgcgtgggtccagcgcatatgatgatcagttcaagcagctcatttcggctggaaaggacgcggagagcgcttactgggaactcgttataaaggatatccaagatgcgtgcaaactttttgagcccatctacgatgagactgatggggctgatgggtatgtctccgtagaggtgtctcctaggttggcaaatgacactcaaggaactgttgaagcggcaaagtggttacacaaagtggtcaaccgccccaatgtctacataaagatcccagctactgcagaatgtgttccttccatccaggaagttatcgctaatggcattagcgtcaacg

SEQ ID NO: 30595 - DNA, 329 bp, Zea mays
  unsure (1)..(329): unsure at all n locations
atgcaatctatcacgcgtccgcggacgcgtggcgacgcgtggcgtgacgcgtgggcgcgacgcgtgggcgccgccgctgctgtgtccatagtcaccgcagatgactgagatgaggggttttgtcaagacccacaagaccaatgcgtacttcaagcgtttccaggtgaagttcaagagaaggcgcgctggcaagacagactacagggccaggataaggctgattaaccaagacaaaaacaagtacaatacacccaaatacagatttgttgtgcgatttaccaacaaggacatcacagcacaaatcatctctgctagtatagcangtgata

SEQ ID NO: 30596 - DNA, 336 bp, Zea mays
cccacgcgtccgggcaaggagctgtgcaagaacatcaaccccgatgaggctgtcgcctatggtgctgctgtccaggctgccatcctgagcggtgagggcaatgagaaggtgcaggacctgcttctgctggacgtcacccctctgtccctgggtctggagactgctggaggagttatgacagtgctgatcccgaggaacaccaccatccccaccaagaaggagcaggtattctccacctactcggacaaccagcccggtgtcctgatccaggtctacgagggtgagaggatccggacacgcgacaacatactgctgggcaagttcgagctctccggc

SEQ ID NO: 30597 - DNA, 334 bp, Zea mays
cggacgcgtggcggacgcgtgggcggacgcgtgggggagagcagattttagcaattggttacaggacagagtttgccatcgagtgcaaggagaagtgggttccttaaatgatgccaggtacttggaaaatattctcctccttttgactggtcgacaattggacacggccactgaaattgctgcctcaaggggtgatgttcggttggcaatcttgctaagtcaggcaggtgggtcaatgtcaaatcgatctgaccttgcgcaaacactggatcagtggaaaatgaatggtctagattttgattatattgaggaagactggttagaggtatatatg

SEQ ID NO: 30598 - DNA, 318 bp, Zea mays
  unsure (1)..(318): unsure at all n locations
ctgacgcgtggcgccgtcgaactactccggacgggaagcacctccaatcccctcgcccccacggaccctcgatgccggggaagcgccgctcgctcaggaggacagccatggcgccggagccggaggatgatattatgaacgagaagaatccccgcccgctcgacgaggacgacatcgcgctcctcaaaacctatgggcttgggccgtactcgactagcattaagaaggtcgagaaggagatcaaggaaatggccaagaaaatcaatgacctatgtggtatanaggagtctgatagcaggttggctcgacctagccagt

SEQ ID NO: 30599 - DNA, 325 bp, Zea mays
cccacgcgtccgcggaggctctcaagagaaacccaaaggatcctagggtttacagcaatagggctgcctgctacaccaagttaggagccatgcctgaaggtcttaaagatgcagagaagtgtcttgaactagaccccaccttcactaaagggtacacaaggaaaggtgcaattcaattcttcatgaaagaatatgacaaggccatggaaacctatcaggctggcctgaagcatgacccgaaaaaccaggaactgcttgatggtgttaggaggtgcattgaacaaattaacaaggctaacagaggtgaaataagtcaggacgaatt

SEQ ID NO: 30600 - DNA, 317 bp, Zea mays
cggacgcgtgggctgccatggctggtcgtcgttccagaagccggcggtgactgcggtgatcgctttcggagactccattgtggacccggggaacaacaacgggctgcatacggtgatcaaggccaaccatccgccctacggcaaggacttgttcaaccacgaggccaccggacgctactccaacggcctcattccaaccgacctaattgcccaggagttgggtgtgaagctgctgcttcctgcctacttgggcgtggatctgagcccggatgacctgctcaccggcgtcacttcgcgtccggcgccaccgggttcga

SEQ ID NO: 30601 - DNA, 324 bp, Zea mays
gcttgggggaaccaccgaccagaaagttgtggatgagaaccttgagaagctgaagaaggtgctagaggtgtacgaggcacgcctgaccaagtgcaagtaccttgctggagacttcctcagcctcgccgacctgaaccatgtgtctgtcactctctgcctgtttgctacgccctacgcatctgtgctcgacgcctacccgcatgtgaaggcctggtggtctggtctgatggagaggccgtctgtccagaaggtcgctgccctgatgaagccatctgcttgaaacggttgccctgtcaatcggtgaatggaataagccaagtctgt

SEQ ID NO: 30602 - DNA, 320 bp, Zea mays
ggagtgagctattgccattccatgcaagtatgccatagagatctgaaactagaaaacactctcctagatggtagtgtcgcaccccggctcaagatctgtgatttcggttactccaagtcttctgtgctgcactctcaaccgaaatcaactgttggcacacctgcatacattgctccagaggtcctctctagaaaagagtacgatggaaaggttgctgatgtctggtcttgtggagtaacactatatgtgatgctcgtcggcgcgtatcctttcgaagaccctgatgacccgaagaacttccgcaagacgatcacgagaat

SEQ ID NO: 30603 - DNA, 309 bp, Zea mays
gacgcagtcggctgccgcagactggtagtagccggcgcgccgtcaccgtatcctcagatcagaggcgagcagaaaccacaccactctactgacgcccgacgagcagtgtaacattttccttcagccatgggtaaggagaagactcacatcaacattgtggtcattggccatgtcgactctggcaagtcgaccaccactggccacctgatctacaagcttggaggtattgacaagcgagtgattgacgagttcgagaaagaggctgccgagatgaacaagcggtcattcaagtatgcgtgggtgcttgac

SEQ ID NO: 30604 - DNA, 324 bp, Zea mays
  unsure (1)..(324): unsure at all n locations
cggacgcgtgngcggacgcgtggggccaaggctaacaagctcaagctcgagtacaacaaggccatcgctgccatacaacaagggcgtgagcactgcagctaagaaggctcctgccaaggaggaagaggaggaagatgaagaggagtctgacaagtccaagtcggaggtcaatgacgaggatgatgaagagggtagtgaggaggatgaagatgatgacgagtgatggagctcctcgagacaatggaccgtgcttcatccaacaatggangcggctacacaaggcccgtggcgatcacaanaaaggagcctatatccatgtactag

SEQ ID NO: 30605 - DNA, 159 bp, Zea mays
gacaaccttagcacgattattcgcacaattctcttagataaaaaaccagaagaaatcccactgattgttgaatcactactaaacaaagttattcaggaatacgagcttcgctttgcaaatcagaacttgatggatgaagagaagcaaaataacttgact

SEQ ID NO: 30606 - DNA, 156 bp, Zea mays
cggacgcgtggctcccagccgtcgtctgctgcggactccgcctccagtttggtctgtttcttgcaagtagatcttgtggtagttcccccaactgtcaccatgcagaacgaggagggtaagactgtggacctctatgtccccaggaagtgctcggcc

SEQ ID NO: 30607 - DNA, 249 bp, Zea mays
cttcatggaatgctgaagccacatcttcttcgaagattcaagaaggatgttatgaaagaacttcctccaaaaaaggaattgattctacgagttgaattgacaagaaaacagaaggagtctataagccatctcacgagaattataatgtacccgcgaatggggaataatcctataacgtgaatgagtcgaactcgtgcatgatcagatgatgactgtctgactgcatcagagagttagagctcaatacag

SEQ ID NO: 30608 - DNA, 306 bp, Zea mays
attattatatgtattattacaaggcacaatggcacatacatacagtgatacagctgcaatatacatgaacaccctttgtctcgctcctgctttatctatgcaactgctggcatgcatgcaaaagacgcctcgggagataagacccctgttattctgctagtacgtatgcatgcatgtgcacgatcgatgggcgcgatggtcatatcatccgttggttcagtagtagggctggatcttccagcgctggttgtcgccctcgcaccacttccagagcacgacgttggtgccgtcacggacgccgccgtg

SEQ ID NO: 30609 - DNA, 325 bp, Zea mays
cccacgcgtccgcgtcctgtccttcccttacccggcggcttaaaccctagttctcactcccatcgccgcttcagctccgccgcagcagatggagttctggggtctcgaggtcaagcctggttccactgttaagtgtgagcctggatatggctttgtgctgcacctttcccaggctgctcttggggaatcgaagaagagtgataatgccttgatgtatgtcaaaattgatgatcagaaacttgccattggaaccctctctgttgacaagaacccacacatacaatttgatctggttttcgataaagagtttgagctgtcgcacaca

SEQ ID NO: 30610 - DNA, 111 bp, Zea mays
gagcacgcgtccgcgacgctgggtggatatcaaaggaggagtacgatgagtctggcccggcaattgttcacaggaagtgcttgtaggtttctgccaagttcgtcaagtgct

SEQ ID NO: 30611 - DNA, 150 bp, Zea mays
cggacgcgtgggtcctcagtccctcacacactcactatacactgctctgctgcagcaagaaggaagaagcacgcgcctccctagctctcgttgtcagcaatggccaccaccgccgcgtccagcctcctcaagtcctccttcgcgggctcc

SEQ ID NO: 30612 - DNA, 152 bp, Zea mays
cccacgcgtccgcccacgcgtccgcccacgcgtccgcccacgcgtccgaggaagggttcgaaagcgggaaggatcttgttgtgactgtccagtctgcgatgggggaggagcagatctgcgcgctgaaggatgttggccccaagtaacttcct

SEQ ID NO: 30613 - DNA, 152 bp, Zea mays
ctccttcccggtctcctccgcccgttgccttcgtcccctccatctccggctgcgtcgccggcgagcccgacaccgcgaatcggatccgccgacaaggtgagagggaagagatggggctcacgttcaccaagctgttcagccggctgttcgcc

SEQ ID NO: 30614 - DNA, 313 bp, Zea mays
ccgagtccgcgtttccgtcgccgggcgagccaggagccccatcattgcgatggcttcggccaaggaaggaagcggtgcaccgaccaagaggactgcgcttcatgatctctacgagctccagggcctgtccccgtggtacgacaacctatgccgccctgtcacagacttgctgcccattatcgccagcggcgtccgtggagtcaccagcaacccaacgattttccaaaaggccatttcatcgtccagcgcatatgatgatcagttcaagcagctcatttcggcaggaaaggatgcggagagcgcttactgggaa

SEQ ID NO: 30615 - DNA, 153 bp, Zea mays
ggaccacctgaattacgagattggacagatatggctgagtcgtatgacaacctcaataactctgttaaagttgctttggttgggaagtatactaatctgacagattcttacctatcagtggtgaaggctctcctacatgccagtgttgcctgt

SEQ ID NO: 30616 - DNA, 316 bp, Zea mays
gggataaatctacccaaatctacagtctgtaccttagttttagctctgccgtgactgtcgaaaatggcaaattccttctatccgcaaaaaggaactgccgtgcaacatatacagaatatataatatcaataaattctggtgatacatctaggtgtacaagtaacaacacatacattgggaaattaaggtcaaatttccttggcacaaaatttgtaatatacgatactcatccgccatacaatggaactagtcaaacagtggcagggaaaacaagtcagagattctactccaagaagggatcaaccaaggtttcttg

SEQ ID NO: 30617 - DNA, 155 bp, Zea mays
cccacgcgtccgcccacgcgtccggactagttctagatcgaccagcccgggatgatcggcaaggtcggcaacatactcggcgacacgaacgtgaacatcaacttcatgagcgtcggacggactttcaggggcaagcaggtgatcgtcgctattgg

SEQ ID NO: 30618 - DNA, 145 bp, Zea mays
cggacgcgtggcggacgcgtgggctggcctcaagcctggcctccatgggttccatgtacatgcacttggtgataccaccaatggttgcatgtcaactggaccacactacaatcctgcgagcaaggagcatggggcaccagaagat

SEQ ID NO: 30619 - DNA, 332 bp, Zea mays
ccaaactccgcgccctcctcaccgtccggcgagctacggactcagcagatcaccgtcgctcgagttgtacctgaaggcgcgcccgtggaaccggccgcgagataagggccgcgggaaggcgggcgacgatgccggtggcagcgtcggccatctacttcctcaaccttcgcggggacgtcctcatcaaccgcctctaccgtgatgatgttgggggaaatatggttgatgcgttcagaatgcatatcatgcaaacaaaagaacttggcacatgccctgttcgtcagataggaggctgctccttcctttatatgaggatcagtaatgtttacatt

SEQ ID NO: 30620 - DNA, 291 bp, Zea mays
gacaaggccaccaaggtctcccgagggtgctgcttcgtcatatgcccctcaagggaggaagctgacaaggcggtgaatgcctaccacaacaagcaaacgctctctggggcatcaagtcctttgcaagtaaaatatgctgatggggagttggagaggcttgaacataagcgtttcattggaatgcttccgaaaaatgttacagacactgagttgactgatttgttttccaaatatgggaatgtcacggatttgcaaattttgagaggttcacaacaaacaaacaaagctggc

SEQ ID NO: 30621 - DNA, 327 bp, Zea mays
gccttgaggatccccaacgctgtggtactgaagaggagcttcgacagactgaacctcaactacgaggtaatcggcaagacgaaaactttccagaagcagctgggcgatctcctgaaagagcgcttcatgaacgaatctggtatcgtgtactgtctctcgaagaacgagtgtgcagacactgccaagtttttgagggagaaatacaagatcaaatgcgcgcactaccacgctagcctggcagctcgtcagcgaaccagtgtccaggagaaatggcacagcggggaggttaaggtcatctgcgctaccatagccttcggcatggggatc

SEQ ID NO: 30622 - DNA, 356 bp, Zea mays
cagatgcgcccgtcgactcacgcgtccgcacactcgggtaaagctatctcgagctagctagctgctgtaagccgttgccatggccaaaatggtattgctctgcgtgctcgtctccttcctcctgatgcccttggcctccctagccctgacgcaggacttctgcgtcgccgacctgacctgcagcgacacgccggctgggtacccgtgcaagtccagcgtcatcgccaacgacttctacttccacggcctggccggccacggcacaataaacccactcatcaaggccgccgtcaacccggccttcgtgggcgagttcccgggcgtcaacgggcttggcatctctgcggccaggctcg

SEQ ID NO: 30623 - DNA, 330 bp, Zea mays
  unsure (1)..(330): unsure at all n locations
ggcaaaactggaggagcaaaggtactgaagaagatttggctttgaaggaaatgactgagcctactgttagggagaaagaggaactaaagaaagcaaaaacccacgataagaaagagcagctttgtaatatcagtcaagcattggctgtgcttgcatctgtttcttctgttaccaaggagcgacaagagtttttaagccttgtcaacaaggagatagaactatataataacatgctcgcaaaggagggtacagatggtgaagaagaagccaggagagcgtacaatgctgctanggatgaatcagaccatgctgcagatgcagctgtgggag

SEQ ID NO: 30624 - DNA, 307 bp, Zea mays
  unsure (1)..(307): unsure at all n locations
aaaggattttgtgtggagacatgatctctttgaggatagcatggtagcagctgggctttctgggatagaatctggaacaaagctttacatttcaaatttgcactatggagtgacaagtgaagatctacaggagcttttttcagaaatgggtcatttgaagcactgtgctgttcattatgacagttatagacacccaactggttcggctgaggtgatattcaccaggagaagtgaagctctcgcagcactgaagcgatataataatatgcgccttgatnggaaggccatgaagattgaagtaatagga

SEQ ID NO: 30625 - DNA, 272 bp, Zea mays
  unsure (1)..(272): unsure at all n locations
acgacgctgagtacgtccgaatccgggtcaccacgcgtccgccagatctcgctggaggaccggcacgtcggcggtggggggcgatggcgctcaacatgaagaccctgacgcaggcgctggcgaaggcgtctgctgtcatcgagaagccggtgtccacgacggtgcaggaggtgacgggcccgctgccgctgcangactacgagctgctggacccaggccggtccggcgggcctggactcgcgtgtgcgatctacactgcgcgaccgcgggac

SEQ ID NO: 30626 - DNA, 316 bp, Zea mays
cgacagacgagcggtggatgaaccagcgcctcgaccacttctcccccaccgaccaccggcaattcaagcagcgctacttcgagttcctcgactaccatcgggcccccggcggcccggtcttcctgcgcatctgcggcgagtccgcctgcgacggcatccccaacgattaccttgccgtgctcgccaagaagttcggcgccgcggtggtgacgccggagcaccggtactacgggaagagttctccattcaagcagctgaccaccgagaacctgaggttcctgtcgtcgaagcatgctctgttcgacctggccgtctt

SEQ ID NO: 30627 - DNA, 297 bp, Zea mays
cggacgcgtggctcgggcaaccccatcaccaaccacgtgcagagcgcggacagcacaaccaggacgtgaactccctgggcctcgtctcggccaggaagaccgccgaggcgatcgacatcctgaagctcatgtcgtccatctacatcgtggcgctgtgccaggccgtggacctgcgccacctcgaggagaacatcaaggcgtcggtgaagaacaccgtgactcaggtggccaagaaggtgctgaccatgaatccctcgggcgagctctccagcgcccgcttcagcgagaaggagctga

SEQ ID NO: 30628 - DNA, 316 bp, Zea mays
cacaaatgctggtctggtaggatctgatggtccaactaattcaggaccatttgatattacattcatgtcatgcttgccaaacatgattgtcatgtcaccatctaatgaggatgaacttattgacatggtggcaacagctgcaatgattgatgacagacctatttgcttccgctatcctaggggtgccattgttgggactagtggaagtgtaacatatgggaatccatttgagattggtaaaggagagattcttgtcgagggaatagagatagcttttcttggctatggcgaggtggtccagagatgcttgattgct

SEQ ID NO: 30629 - DNA, 319 bp, Zea mays
cggacgcgtggatgatggccgtggtctggggcagggagtaatggacaacaagcccatgaatgttatatgatcatctcctcatggagtccaatgtctcagctttgccccaaacccatagcttgcttactcttcaaccttctctcctctcgcaccgtgttggggcgcacctgaactacccaatgcatgcttttatgagcaaaaaacctcatgaaaaatccttcaagctggttcaacagtcatttgctccattaactgcttctttgccctgtgatgtacatattgtgaacctgaaggtcccacagcccctaagattttctca

SEQ ID NO: 30630 - DNA, 318 bp, Zea mays
gtttcttctctgtagttccagcgtaattttttctactttcaagtaattttactttgctgcatctgcgaactcgtgagatagttcagctacgtagcccccgtgaagatctcaagacctaccgataggaagtgccgtttgacactgtaaacagcagctgctgcactcagctgcaggtgttccatctctcgaccataacctttgtggtttggtcaggctggatctcccatctgcatctgctctgtgtttcagctgtggtgtgtgattaagatcgggtctctgagggactcttcagaaccgtcgtgctgttctcattgctga

SEQ ID NO: 30631 - DNA, 316 bp, Zea mays
  unsure (1)..(316): unsure at all n locations
gcgaacatggtccgggaccgtgcgagtgancgagaacactcctgatgatccccgccagaggaagccggacatcaccaaggcaaaggaagttctagggtgggagcccaagatcgtcctgaaggacggcttggtgctcatggaggatgatttccgggagcgcctggccgtgcccaagaaaaccaaggcctaaactgccctgcggtgggcgaagaatatccacgggggagcatactcatagttggcttgtcattattcgtggccacatttcattacggaatttgagttcaataaacggaatataccttcttcgatcact

SEQ ID NO: 30632 - DNA, 298 bp, Zea mays
acgggacgcgtggggcggcggctacggcaactccgacgggaactggaggaactgagcggtggggcccgcgcggccaagttatcctgttcgctaccgtgatgtttaccctagtccagagggtttatcttcgttcgtctcgtttgttgttgcccatctgtgtttttgattgcaaggtcgctctgtgtcagttgttagtgctgtgttcatcctcggctccagcagacccatgcatcaaccagcatggactgtggatcgatggatgctgttactcctgtcgagatttgttctaagttaatct

SEQ ID NO: 30633 - DNA, 143 bp, Zea mays
tccagctagcactgctctgcttgagatgatgatattccaccttccttccccagcaaaggctcaaaagtatcgtgtggagaacttgtacgagggaccccttgatgatgtgtatgcaactgctatcagaaactgtgatccagagg

SEQ ID NO: 30634 - DNA, 136 bp, Zea mays
ccggcgactacggctgggacaccgcggggctgtccgccgacccggagactttcgccaagaaccgcgagctggaggtgatccactgccgctgggccatgctgggcgcgctcgggtgcgtgttcccggagctgctcgc

SEQ ID NO: 30635 - DNA, 298 bp, Zea mays
ctagttctagatcgcgagcggccgccctttttttttttttattttttttttttgttattgtttttttttagacggcaaatctttgcaagaacaagtccattgataaatttcagaaatgagcaatcacagtccattgcactgaagccaagacatctagaacattactcctacaggataaggaagccacgaaacgaatgccaccatctacttctagtaacactacaacgacgagcagcacgacgggcgctcaagccctctcgcccctgatgcgcgcgcgagctggatgtccttgggcatg

SEQ ID NO: 30636 - DNA, 305 bp, Zea mays
ggacgctgggcggcggtggctacggtggtggtggtggcggctacggcggtggcaaccgtggcggcggcaacggcaactccgacgggaactggaggaactgagcggtggggcccgcgcggccaagttatcctgttcgctaccgtgatgtttaccctagtccagagggtttatcttcgttcgtctcgtttgttgttgcccatctgtgtttttgattgcaaggtcgctctgtgtcagttgttagtgctgtgttcatcctcggctccagcagacccatgcatcaaccagcatggactgtggatcgatgg

SEQ ID NO: 30637 - DNA, 304 bp, Zea mays
  unsure (1)..(304): unsure at all n locations
nccacgcgtccgcgacgcgtggcgactggancgcgacgcgtggggcaaaatctgcacgagagacagacgacgagatggccgatgcggagagccgccgccgccgcgcgccgacgggccgccataaccgactaccgcaagaagctgctcaactgcagggagctcgagtcgcgcgtcggcaccgtgagagaaagccttaaaaatgcaaagagggattttaccaagactgaagacgacttgaaatctctgcagagcgtggggcaaataattggagaggttctccgcctcttgataatgaacgctttat

SEQ ID NO: 30638 - DNA, 301 bp, Zea mays
ctccgcgctcatcaccgagaccaaccaggaggacgccgtcaccgcgcactcaagaacggtgttaggggcctgatgctcgacacgtacgacttcgacaacgatgtctggttgtgccactcgttccaaggaaaatgctacaacttcactgccttccaacctgccatcaatgtgttcaaagagatccagacattcctcgacgcgaacccgtcgcaagtggtcacgatcttcctagaagactacaccgcggtagggtccttgccgagagtgttcaacgcctccggcctcacgaagtactggttcc

SEQ ID NO: 30639 - DNA, 303 bp, Zea mays
  unsure (1)..(303): unsure at all n locations
cgcctgcgctccctcgcctcnccagttccncaccccctgctcacccacccgtcccctcctgctcgcccatggctcccatcgctgtcggcgacgccctccccgacggccagctcgggtggttcgacgagaacgaccagctgcagcaggtctccgtccacgcgctcgccgccggcaagaaggtcatcctcttcggcgtccccggcgccttcaccccgacctgcagcaaccagcatgtgccaggcttcatcacacaggctgagcagctcaaagcctaaggtgtagacgagatcctgcttatcagcg

SEQ ID NO: 30640 - DNA, 303 bp, Zea mays
cgcattctcgcgtcggcttgcttttaactgaatccagcccaccgcttctcgcacgtcgccatggacgcggtcgattctgtggtggatcccctccgcgacttcgccaaggacagcgtccgcctcgtcaagcgctgccacaagcctgaccgcaaggagttcaccaaggtggcagcgcggacggcgatagggttcgtcgtcatgggcttcgtcggcttcttcgtcaagctcatcttcattcccatcaacaacattatcgtcggttccggctaggctcagggcgcgactagcatgggagtagtgcga

SEQ ID NO: 30641 - DNA, 285 bp, Zea mays
ataacaagcaggtactcaaggttttcccataccctataaacatcacagaagttcaatttgctgtcggaactgtagcagctctgttcatgtggatcactggtattattaagaggccaaagatttctggagcacagcttgtagccatcctacctctggctattgttcatactatgggcaatctcttcaccaacatgagccttgggaaagttgcagtgtcatttacgcacaccatcaaggctatggagcctttcttttcggtcatcttccggaattttccttggcgag

SEQ ID NO: 30642 - DNA, 325 bp, Zea mays
agatcaatgtcagccctgaggtctctgaatctacaaggatcatttatggaggttcagtaactgctgcgaactgcaaagagctggcagcacagcctgatgtcgatggtttccttgtgggcggtgcttctttgaagcccgagttcatcgacatcatcaacgccgccgccgtgtgaaatccgcttaagatgttccaacccttcaccctgttgcggtgatgtgctgaagacagatcagactatttttttgtttaaccgtgccgtgctatgtaagctactaactttgcgctggtgcggatgctgatttccctcccccctagctttttgtg

SEQ ID NO: 30643 - DNA, 327 bp, Zea mays
cggacgcgtggcgctcccacagcctcacccctgcgcccccgccgattcgcgtcgccctttgttggaaagaacgatggagcagaccttcatcatgatcaagcccgacggcgtccagcggggcctgatcggggacatcatcagtcgcttcgagaagaaagggttctacctcaaggggatgaagttcatgaacgtggagaggtccttcgcgcacagcactacgctgacctttccgacaagcctttcttccccgggttggtggagtacatcatttccggccccgtggtggcgatggtgtgtgaggggaagacgtcgtgtgactggcccaga

SEQ ID NO: 30644 - DNA, 252 bp, Zea mays
ggaattcgcttacaatgtggagacaaaaattcttggcggtatccaagacttgccaaagggaatatcgagagagaataagatcattcaaacggtgatgagacaactcttatttgctcttgatggacttcattcgacaggaattgttcacagagatataaaacctcaaaatgtgatattttcagagggatcaagaaccttcaaaattattgatcttggagcagcagctgacttacgggtaggaattaactatat

SEQ ID NO: 30645 - DNA, 186 bp, Zea mays
cccacgcgtccgggccgacgaccccgaggccttcgccgagctcaaggtgaaggagctcaagaacggccgcctcgccatgttttccatgttcggcttcttcgtccaggccatcgtcaccggcaagggcccgctcgaagacctcgctgaccacatcgctgacccagtcaacaacaacgctggggccta

SEQ ID NO: 30646 - DNA, 321 bp, Zea mays
cccacgcgtccgattcttaggtgattatgttgatcgaggcaaacaaagtttggagactatatgccttcttcttgcttacaaaatcaagtaccctgagaacttttttcttctgaggggcaatcatgaatgtgcctcaataaacagaatatatggattttatgatgaatgcaagcgtcgatttaatgtgcggctatggaaggtcttcacagaatgttttaacactctacctgtggctgctcttatcgatgataaaatattatgtatgcacggtggactttctcccgatctagcacacttggatgagataaagaacttgcaacg

SEQ ID NO: 30647 - DNA, 309 bp, Zea mays
ccccgttcgcctcttctcctccctcctgccgggtccttaataaagagcagcagcgctagaggttggtagagcgagcgataagaaggcaatggcggcggagagcttcctgttcacctcggagtccgtgaacgaggggcaccagacaagctgtgcgaccaggtgtcggacgcggtgctggacgcctgcctggcgcaggaccccgacagcaaggtggcctgcgagacctgcaccaagacgaacatggtgatggtgttcggcgagatcaccaccaaggcgagcggtggactacgagaagatcgtgcgcgacac

SEQ ID NO: 30648 - DNA, 281 bp, Zea mays
tggattcatgatgtctgcaaattatcatcctgcaatgaaaattgtcagacctgtgaggaagaagcttaaaataaagacagttttcaatatccttggtcctctactgaatccagcaagggtgcctcatgctgttattggtgtttaccatgagaatatagttaccaagatggctaaggctgctcagaaatttggaatgaagagagcattggtcgtccattcaaagggtttggatgaaataagcccacttggtccggatataatccttgatgtactccagagaa

SEQ ID NO: 30649 - DNA, 309 bp, Zea mays
agcagcgatccgaagctcaatcaattcactcaaacctcttccccaaatcttcgattagattctcgttgacaagaagactagaaccgaacctgaccatgtcgctgatccgccgcagcaacgtgttcgatcccttctccctcgacctctgggacccctttgagggcttccccttcggctccggcagcagcagcagtctcttcccctcgttcccgcggaccagctcggagaccgcggccttcgctggcgcgcggatcgactggacagagactccagaggcgcacgtgttcaaggccgacgtaccggggctga

SEQ ID NO: 30650 - DNA, 311 bp, Zea mays
cggacgcgtgggctgatatcaaagctgatgcatctatctctgctggcaatgatgaatttatcggatccatgactgctgaagcaattgacaaagtggggcctgatggtgttctatcaattgaatcctcctcgtcttttgagaccactgttgaagttgaagaaggaatggagattgaccgcggttatatttccccacaatttgtgacaaaccttgagaaatcaattgtggagtttgagaattgtaaggttcttattactgatcagaagatcacaagcataaaggagatccttccgattatggagaagaccaca

SEQ ID NO: 30651 - DNA, 309 bp, Zea mays
gtgacaggtgaaggattcaaggggacattggtggactgggttaaccagctcaaggcttctggtcgaatcagtgatgctattgataaaccattgcgtggaaagggccatgaggcagagattcaggagttcttgaagatagcttttgcttgcacccagccccgtgtgacggagaggcattcaatgtatcgggttttccacgctctgaagagcatcggatagggctgcgatgtcacggagcagtttgatgagttcccattggcctataacaaggatgattcagacgctatttagctgatgatgctgattgcc

SEQ ID NO: 30652 - DNA, 307 bp, Zea mays
  unsure (1)..(307): unsure at all n locations
cccacgcgtccgnccacgcgtccgcggacgcgtggggcaagccgcaaagttctatgtagctgaggtgctccttgcattggaatacctgcatatgcttgggattatataccgtgatcttaaaccagagaatgtcctcgttcgggaagatggccacatcatgctgtcggacttcgatctatctcttcgctgttcagtgagcctaacggtgatcaagtccgcaaatcctggcctagatgcaatgcggaggaacaatgcagcgtactgtggccagcctgcttgcatcgaaccatcctgcattcagcctcct

SEQ ID NO: 30653 - DNA, 315 bp, Zea mays
cccacgcgtccgcgacgccgcggagaagctgctgctcgccgtcgcagccgagggtcctatctgtggtgtgccagacttcaagatgaggggaaagaagagtgatgagctcgaacctgtcgatgctggcgatgaagatgatgatggtggtgacgatggggacgaggatggtgactttggggaggagggtgaagaggacgtctcagaaggggagggatatgacaacccaaagggcaatgagaccaagaagcagagaggtgatcctgaggataatggtgaggaagatgaggaagaaccagaagatcatggaggtggcgg

SEQ ID NO: 30654 - DNA, 330 bp, Zea mays
ccaaggtgggaggcgttggccaagaaaggtgccaagaaacaaaggttgttgtgggcatccaccggtgtcaagaacccagcttatcctgacactctttatgtggacagtctcatcggacctgacacggtcaacacgatgcccgaccaagctttgcaagcattcatagaccacggcaccgtttcaaggacagttgatgcgaacgtgtctgaggcggaaggtgtatacagtgccttggagaagcttggcatcgactgggaagaggttggaaagcagcttgagctggaaggcgtggactccttcaagaagagctttgacagcctactcgtgagc

SEQ ID NO: 30655 - DNA, 325 bp, Zea mays
cactcccaaacccccgcttccagaaccttctcgaagctccccgccgcctcctccactcgcaccgatggcgaaggaaccaatgcgcgtgctcgtcactggcgccgcaggacaaattggatatgccctggttcccatgattgctaggggtgttatgcttggtgcagaccagcctgttattctgcacatgcttgacattccgccagcagctgaagcccttaatggtgttaagatggagttggttgatgctgcgtttcctcttctgaagggagttgttgctacaactgatgttgtggaagcctgcactggggtcaatgtggccgtcatg

SEQ ID NO: 30656 - DNA, 328 bp, Zea mays
agaacgaggataagcttgagttcagcaagattttggaggctattaaggcaaacttcaacgacaagttcgatgaggtcaggaagaagtggggaggtggcatcatgggatccaagtcgcaggccaagaccaaggcccgggaaaagctgctcgccaaggaagctgcgcacggaatgacctagattgtctactgctgtgtctgccctgtagtttaacggggaagaactgatgaactcgtattgtggttttccgaatctagtttcatatgtttctgtccaccagaccatgtttagaagccttgcaagacagagtttacagtgtttatgtgatg

SEQ ID NO: 30657 - DNA, 328 bp, Zea mays
cccacgcgtccgcgccatcacataaaaccagtgcaagcagaagcagcgcaatggcgagcagcaccatggccctctcctccacagccttcgccggcaaggcagtgaacgtgccgtcgtctctcttcggcgaggcccgcgtgacgatgcgcaagacggcggcgaaggcaaagccggcggcgagctccggcagcccgtggtacggccccgaccgcgtgctctacctgggcccgctgtccggcgcgcccccgagctacctgacgggcgagttcccgggcgactacggctgggataccgcggggctgtcggcggacccggagacgttcgccaa

SEQ ID NO: 30658 - DNA, 319 bp, Zea mays
agacaacggtccgggacgcgtggcggtgtggcggtgcagcgccggctccagtgccgtggatttcagtattcaggatgtcaagggctcatccaaaagcttccccaagcacgaggtgaagcatgtctctgaccataagaacgctgcccggtgtgtgaaatttagtcctgatggaaagtattttgcaactgggagtgctgatacatccattaagttttttgaggttgctaagattaagcagactatggtaggagactctagagatggccctgccaggcctgtggtacggacattttatgatcacacacaggccatcaatgat

SEQ ID NO: 30659 - DNA, 323 bp, Zea mays
ggaaagaaggttttcatgttacatcaatgacaactgcaggaagccgctggggtgtagttatgtcaaggaactctggatactctgaacaggtagtggagttggattttctttatcctagtgaaggtatccaccgacgatgggagaacggatatagaataacttctacagcagctactggcgatcaagctgctttcatattgagtatacctaaaagaaagttaatggatgagacacaagaaactcttagaacatctgcttttccaagcaaccatgtgaaggagaaatgggccaagaacctttacattgcttcaatatgctatggc

SEQ ID NO: 30660 - DNA, 322 bp, Zea mays
cgactctttgaggagagagattacaaaaaacataggtatgaacaacagaagaagaaaaagattcagcagaaaagatctgtcgcgaaacgcatgggcttgaaggagctgaaaatgggatacaacattgacatccatgattacagcgtgaggcttaaagctgcaaaaaagtttcttaaagctggcgacaaggttaagataattgtgaacctgaaaggacgggaaaacttgtataaaaaagaagctatcgaactccttagaagattccaaaatgatgttggcgagctggcgacagaagaaagtaagaatttcgcggagaggaata

SEQ ID NO: 30661 - DNA, 321 bp, Zea mays
caacatgtgcaggttcatgagcaacgacgggctcggcccgccgctgggcaacgaggagggcgtgttctccgacaccggctggtatggcaccaaccagttctccgtggatgtcatcttcggcaacaggatgaagcagtacgagtgcctgaccaaggactcgtccgttgccgcggcggtgttcgtgccgttctacgctgggttcgatgtggcaaggtatctctggggctataatatcacgacgagggatgcggcgtcgcttgatttggtggagtggctgatgaacaagcccgagtggagcgtgatgggtgggcgggaccattt

SEQ ID NO: 30662 - DNA, 321 bp, Zea mays
gccagccatcctactgtcacacacacacacacacacagacaagtggtttccaaagccaagtgtgtgtactagcaaccagctagctcgggcggcagcaggcagccatcatgtcggaggagaagcaccaccacttcttcaaccaccacaagaaggacgaggagcagcccgccggcgagtacgggtactccgagaccgaggtggtcaccgccaccggcgagggcgagtacgagaggtacaagaaggaggagaaggagcacaagcacaagcagcacctcggcgaggccggcgccatcgccgccggcgccttcgcactctacgaga

SEQ ID NO: 30663 - DNA, 312 bp, Zea mays
cggacgcgtggcgagcgacagcacggagcggaaggccatgaaggagctgggcctccggcgggcgcggcacttacgggtggtccaacacgtacgtgttcaccaaggccatgggggaggccgtgctgggccagcagctccggggcggcgacgtccccgtggcggtgatgcggcccagcatcatcaccagcgtccggcgcgacccgctgcccgggtggatgcagggcacccgcaccatcgacagcatcatcatcggctacgccaagcagaacctgtcctgcttcctcgccgacctctgcatcgtcatgacgtcat

SEQ ID NO: 30664 - DNA, 311 bp, Zea mays
agacctgccgcaacattggttttgtgtcaaacgatgttgggcttgacgccgaccactgcaaggtgctcgtgaacattgagcagcagtcccctgatattgctcagggtgtgcatggccacttcaccaagcgccccgaggagattggagctggtgaccagggacacatgttcgggtatgcgaccgatgagacccctgagttgatgcccctcagccatgtccttgccaccaagctaggtgctcgtctcaccgaggtccgcaagaacggaacctgcccctggctcaggcctgatgggaagaccaggtgacagtcg

SEQ ID NO: 30665 - DNA, 308 bp, Zea mays
cggacgctggggcggtgtgattgctggcttagcagcctgcggtgttatgatgtccatcgtgtccactgcagacgatctcatgcaggacttcaagaccggttacctcacactctcttcccctaggtccatgttcgtgtcgcagttgatcgggaccgcccttggttgtgtcattgctccactcaccttttggctctactggtcgggtttcgatattggtaaccctgacggcgcattcaaagctcgatatgctgtaatcttccgtgagatgtcaattcttggcgtggaagggttttctgcactgcctcagc

SEQ ID NO: 30666 - DNA, 131 bp, Zea mays
cgccgtctgccttctgcgcctccatttcggcctctgtcccttgcaagttcaatctcacctccaaccatgggtaaagagaagtcccacatcaacattgtggttattggccacgttgactctggcaagtcgac

SEQ ID NO: 30667 - DNA, 340 bp, Zea mays
tagtacctgcagtacggtcggaattccgggtcgaacacgcgcctgcaacggtccgcgacgctggcgaccgtggggatgtgtacaagttagctgagaatatcaaatccaagggtggtaagatcacccgcgaaccaggtcctgtcaagggaggatccactgttattgccttcgcacaggatcctgatggctacatgtttgagcttatccagagggctgacacacctgagcctctttgccaggtcatgcttcgtgttggtgaccttgagcgttctatcaagttttatgagaaggccctagggatgaagctcctaaggaagaaggatgtacctgattacaagta

SEQ ID NO: 30668 - DNA, 304 bp, Zea mays
ctgggtggcgcactgctggggtccaccgtggcgtgcttcctgctccgcttctcgacgggcgggcaggccacgggcaccttcgggctgacgggcgtgtcggtgtgggaggcgctggtgctggagatcgtgatgaccttcgggctggtgtacacggtgtacgcgacggcggtggacccgaagaagggcagcctgggcaccatcgcccccattgccatcggcttcatcgtgggggccaacatcctggtgggcggcgccttcgacggcgcgtccatgaaccccgccgtgtccttcggccccgccctcg

SEQ ID NO: 30669 - DNA, 304 bp, Zea mays
atggcttcctgcacaggtcagaggtaacccgagaggagcaccctttaagccttgggaagaccagtgcttggaatcagttttttgagtactcagagattatggagcagattgaccgcgatgtaaagcgcacccaccctgacatgcagttcttctgcggcgactcgtcttttgcaaagtccaatcaggaatctttgaaaaatgtactgttaatctttgccaagctgaatgctggaataagatatgtacaagggatgaatgaagttttggcacccctcttctttgtatttcggagtgatccggatga

SEQ ID NO: 30670 - DNA, 304 bp, Zea mays
gaagcgagcaaaggatgaggcagcgagggatttgcagagtgtgaggagagagagtgaaaagtcaaagtctgaattggctgaaattagtaaggtgcatcaggccaaactaaaggaagaggaggatatatcgaagagcattatggatcgtgagaagcggctaagtatattgtaccaaaagcagggaagggcgacccaattcgcaaacaaagctgctagagataagtggcttcaaaaggaaattgaagatctcaagcctgtacttttatcaaataaaaagcaggaaggtttacttcaagaagaaatc

SEQ ID NO: 30671 - DNA, 324 bp, Zea mays
cattgggcagcccctggataagagactgatcttgagattcaggccaatgagatgctgcaccacaaggcgaacttaaatggataccttgcataccacactgggcagcccctggataagatcaacgtagatactgaccgtgactacttcatgagcgcgaaagaagcaaaggagtatggccttattgatggagtaatcatgaatcccctcaaggcccttcaaccacttccagcttccagttagtcatgaagtgtgctagaactccgtcaaacatttttgttgtatcaatgtgtatgttggaagccctggctacgtaatattctacgt

SEQ ID NO: 30672 - DNA, 324 bp, Zea mays
cggacgcgtggcgagacgcgtgggctcgatggggcacagacatgtttacttatggatcatactcatatgtggctattgcggcttctggtgatgactacgacattttggccgaaagtgtgcatgatagagttttctttgctggggaggcaacaaataggcggtacccagctacaatgcatggagccctgcttagtgggtatagggaggctgctaacatcttaagggcagctagaaggagagcaaaaaatgtgtactcacctgagaaaatggatattaatgttgatgtagaagtgggtgttaatggtgaagtagaagatactgtta

SEQ ID NO: 30673 - DNA, 312 bp, Zea mays
atcgacacgatcgcgagcgcaagcacgtacgttgtcggaagctcaagttagaagaagcaccagtgcctgatcgatggcggcccaggctctcctctccggccggcagctgctgggccgccccgtgcagtcggccgtctctaggtcgtcggcgaggaaggcgcccttcgtcgtcagggccagctccagccctccagccaagcaaggtgccgacaggagctgtggttcgcgtccaagcagtccctctcctacctcgatggcacgctgcccggcgactatggcttcgacccgctgggcctctcggacccggaggca

SEQ ID NO: 30674 - DNA, 254 bp, Zea mays
cagacgcgtggcgccggcgacatcatggtgttcccccagggcctgctccactaccagtacaacgcacgcaccggcgctgccgtgggcctcgtcgccttcagcagccccaaccccggcctgcagatcaccgactttgcgctctttgccaacaacctcccgtccgccgtcgtggagaaggtcaccttcttggacgacgcgcaggtgaagaagctcaagagtgtgctcggcggcagcggttaacttgtttttcgaga

SEQ ID NO: 30675 - DNA, 252 bp, Zea mays
gcgccaccaccgccgccgcagtttgccaagcacttcgctgctgggccgcccccgccgctccaagctggtgctgggcgccgcacgccgactccgccctcgtctggatccggcgggaacgggtgcgaagaaaataaaaccatttgggtcggtgacctccagtactggatggatgataactacctacataactgcttcgggcccagcgtcgacgtggttacaataaaagttatccgcaatacgcaaacaggacag

SEQ ID NO: 30676 - DNA, 319 bp, Zea mays
cggactcgtggcgagacgcgtgggcaaccggtgccctacatgcagacaagagcttggtgatatcaggtgcttagcattggaaaaagtagcagagtcacttgagcttccatgtaagtactgctctttaggttgcccagagatcttcccgtactacagcaagataaagcatgaagcacagtgcagcttcaggccatataactgcccctatgctggctctgaatgtgctgtggctggtgatattccattccttgttgcacatttgagggatgatcacaaagttgatatgcacagtggctgcacgttcaaccatagatacgtc

SEQ ID NO: 30677 - DNA, 119 bp, Zea mays
cggacgcgtggcaactccaccgtgggctcgctgctggtcagcttcaccgtctacatcatcccggcgctggcgcacatggccaccttcttgacgccggccgccacggagaacgccgtgga

SEQ ID NO: 30678 - DNA, 318 bp, Zea mays
ctgctctgctagtgccaggattccgccctatccatcacatcaacctcagctaaggtccccagcggcggcgaggcgatggcggcgcctgtgacggtgtacggaccgatgctctcaccagctgtggcccgcgtggcggcctgcctcctggagaaggacgtgccgttccagatcgagccggtggacatgtccaagggcgagcacaagtcgccgtccttcctcaagctccagcccttcggacaggtccctgccttcaaggaccacctcacaaccgtctttgagtcaagggctatttgccgttacatatgcgtacagtatgcg

SEQ ID NO: 30679 - DNA, 309 bp, Zea mays
ccacgcgtccgggacgtggtggggatagcggtgttggcaagagttgcctcctgttgcggttctctgatggttccatcactacaagctttattaccacgattggtattgactttaagatacggacaatagaattggatggcaagcgtataaagctacagatttgggatacagcgggccaagaacgcttccgtactattaccactgcgtactaccgtggagctatgggtatcttgctggtttatgatgtcaccgatgaatcttctttcaacagtaaactcttcttaactatatactccaaatccttactgc

SEQ ID NO: 30680 - DNA, 319 bp, Zea mays
cggacgcgtggttgcactctgtggtggggacccgtcacctcctgtcttcagatctcctgtagatgacgctgaggacatcatggataatcaagtgatatgctcaatctacaagcttccagatccacacaagcacatcgctcgtccaccagctggtgttatcatacccaagaagagtgtagaagccggtgatctgaaaccaccaccagtgctgtggcatgaagacagcggtaggaggcctcatgataacaaccaccggaggccttatgataacagcaacaggcaaaacccatcaggagctctatctggccgccaactcggg

SEQ ID NO: 30681 - DNA, 310 bp, Zea mays
ctacctttgcccctcccccgcattccacctcgcggagatccagtccagccctagggtttcgccagcgggaggccagactccacgagcgggggaagaggggaaagcagggacgacgagggggcagccatggggcagcagtcgctgatctacgcgttcgtggcccgtggcacggtcatactggccgagtacacggagttcaccggcaacttcaccaccatcgcctcgcagtgcctcgatgaagctccccgcaagcaacaacaagttcacctacagactgcgacggtcacactttcaattacctcgtggaaga

SEQ ID NO: 30682 - DNA, 307 bp, Zea mays
cggacgcgtggaaaatatgccaatttcatcgggatggtattgatgcagctcaggttgttccagcctgacttagctgcttgcctataaaagacgacaaggttgaagctaaagttgtacatggacagctttgctccatggtggagaggtcggatgctgaaattcttgggcctcacagtcagtatcttcctaaaattgtttcaatttttgcagaggttttgtgcaatggaacagaacttgccactgatgaaactagaaacaggatggtgaatgtcttgaggcgtttccagcagactttgcctcctgattt

SEQ ID NO: 30683 - DNA, 244 bp, Zea mays
gagaagggaatggatccagatgttgttgtccacaacacaatgattgaggggttgctgcgtgggcagaggcgacccgaggccgtgaagatgtttgagctgatgaaggcaaaggggcctccaccaaatgtgtggacttacacaatgttaatccgtgaccattgtaagcaggggaagatggacatggcaatggagtgctttgaggagatgcaggaggctaaatgccaaccagatgttgctacctata

SEQ ID NO: 30684 - DNA, 243 bp, Zea mays
  unsure (1)..(243): unsure at all n locations
ttctcgcagatgaggtttaccaggaaaatatatatgttgaagataagccattccactcattcanaaaaattgcacggtcactgggatacactgatgatgatcttcctttggtatcattccagtcagtttctagaggctactacggagaatgtggagaacgaggcggttatatggagataactggattcagtcctgaagtacgggaacaaatttacaaggtggcatcagtagacctgtgctcca

SEQ ID NO: 30685 - DNA, 306 bp, Zea mays
gaaggaggaggagcagcagcagcaggcggcgccgaggagcggcatcccactcagtgcttgcaaccatggctaggggattgaagaagcacttgaagaggctcaatgcgcccaagcattggatgctcgacaagcttggcggagcttttgctcccaagccatcttctggacctcacaagtccagggagtgccttcctctgatcctcatcatcaggaacaggctcaagtatgctctgaactaccgtgtagtcatttctatcctgatgcaacgccatgtacttgttgatggcatagtcaggactgacaaga

SEQ ID NO: 30686 - DNA, 314 bp, Zea mays
gtcgactctgcgcacttcagcgggaaccacacctacgtccccgtctcccgcaagggatactggcagttcgacatgggggaccttctcatcgacggccactccaccggtttctgcgccaaggggtgcgctgccatcgtcgactccgggacttccttgctcgctggcccaacggccataattgcccaggtgaacgaagcgatcggggcagacgggatcatcagcacggagtcgaaggaagttgtgagccagtacggagagatgatcctcgacatgctcatcgcacagacggatccacagagggtgtgcagccaggt

SEQ ID NO: 30687 - DNA, 317 bp, Zea mays
ggacgcgtggtgaactgagaaaagcctttgccaaatatgatcttgcctctgtgaaaattcctctaggaaagcaatgtggctttgttcaatttgttagcagaactgatgctgaagaagcactacaaggattaaatggatcactcattggaaagcaggcagttcgcctttcatgggtccgcagcccatcgcataagcagtctaggggtgactccgtcaacaggaggaacaacatgtactatggcacaccattctacggcggatatggctatgcctccccggtgccacacccaaacatgtacgctgcagcgtatggcacg

SEQ ID NO: 30688 - DNA, 237 bp, Zea mays
  unsure (1)..(237): unsure at all n locations
cccacgcgtccgaacaaacatccttctggatgagaaatgggttgccaaggtttcagattttggtctgtccaagactggcccatctatggaccatactcatgtgagcacagttgtcaaaggcagtttcggataccttgatcctgaatactttcgcaggcagcagctcacagagaagtctgatgnatactcttttggtgttgtgctgtttgaggtcctctgtgcacggcctgccttgaa

SEQ ID NO: 30689 - DNA, 151 bp, Zea mays
gttgcctccactctgatggagtatggtggtgttcctcagtccgcaactccggagtctcttctgaaagaagctatccatgttataagctgtggctatgaggacaagactgaatggggaactgagatcgggtggatctacggttctgtgacag

SEQ ID NO: 30690 - DNA, 307 bp, Zea mays
agcagctattgtggtcgtccctcagccgcgtcgcaccgcatcgcattctacgattcgaagctctctctgctcgcagccatggcgaagaattacccaaccgtgagcgccgagtacagcgaggccgtcgagaaggccaggcgcaagctccgcgccctcatcgccgagaagagctgcgcgtccctcatgctccgcctcgcgtggcactccgcggggacgttcgacgtgtcgtcgaggaccggcggcccttcggtactatgaagtgcccggcggaactggctcacggcgccaacgcggtgctggacatcgc

SEQ ID NO: 30691 - DNA, 313 bp, Zea mays
gagcagctggcgttcgggccggggctggtggtgccagggatctactactcggacgacaagatgctgcagtgccgggtgttcgcctacgccgacacgcagcgctacaggctgggaccaaactacctgatgctgcccgtaaacgctccgcgctgcgcgtaccacaacaaccactacgtcggcgccatgaacttcatgcaccgcgacgaggaggtggactactacccgtccaggcacgcgccgctgcggcaggcggcgccgcccacgccactgctgcccaggccggtcactgggatgatggagaatgcaaccatac

SEQ ID NO: 30692 - DNA, 214 bp, Zea mays
ccaattactatagaaatatacaaagatgcttctgctgacgttgtggatagatttatcaacttgtgcaagagtaatcatttcaaaggaatgccatttcgtcatatcataaaaaattttgtaattcaaggaggtgattttgatttcgatggagcttcccaagaatggataaccaaagctagagctagtggaaaaaatgatctcagtccaaaacatg

SEQ ID NO: 30693 - DNA, 154 bp, Zea mays
ctcctccactttggcctcctcacttgcaagtttaatcttcgcctccagccatgggtaaggagaagtctcacatcaacattgtggttattggccacgtcgactctggcaagtcgacaaccaccggccacctgatctacaagcttggaggcattga

SEQ ID NO: 30694 - DNA, 308 bp, Zea mays
cccacgcgtccgcaaggagggcatcccgccggaccagcagcgcctcatcttcgccggcaagcagctcgaggatggccgcaccctcgccgactacaacatccagaaggagtcgacgctgcacctggtgctccgcctcaggggaggcgccaagaagcgcaagaagaagacgttcaccaagcccaagaagatcaagcacaagcacaagaaggtgaagctcgccgtgctccagttctacaaggttgacgacgccaccggcaaagtcacccgcctccgcaaagagtgccccaacgccgagtgcggcgcggggg

SEQ ID NO: 30695 - DNA, 164 bp, Zea mays
cgcccagcagcagggagcagccatgccaggggaccacggctccaagggcgacatctccttcgccggacgcttcacggccagcgccatcgcagcatgcttcgcagagatatgtaccatcccgctcgacacggccaatgtcaggctccagctgcagaagaacgtcg

SEQ ID NO: 30696 - DNA, 196 bp, Zea mays
cggacgcgtggcgccggcgccggcgattcctcctccaccgattcgcccggcgggagtctccgctaggctcaacgggaccgcgggtccacgatggccgccaacttctggacgtcgtcgcactgcaagcagctgctggaccccgaggacgtggacctggtgccggctcggaccgggagcacggcatcacgccggaaga

SEQ ID NO: 30697 - DNA, 109 bp, Zea mays
cgacttgtttcattgattcttgaagagatcgagcttcttttgcaccacaacgtcgaggatgtcttgcaactgcggatcaagctgcggctgcggctcaagctgcaagtgc

SEQ ID NO: 30698 - DNA, 112 bp, Zea mays
ctctgctctcccccacctcccggtccggcagcagagagcgggggtgcagagagatcgagatccggaggccgcgagtgggagcgccaccaccagcgactgcggcaatggcggg

SEQ ID NO: 30699 - DNA, 237 bp, Zea mays
atctgatctctttgggtcatacgcagagtcttcttgtgctgcccttgttgttgcgtctatttcatctttcggaatcgaccatgatttcactgggatgtgctacccactccttgttagctctgttggtatcattgtctgcttgatcaccaccctttttgctactgatttctttgaagtcaaggctgtgaaagaaattgagcctgcacttaagaagcagctcatcatctccaccgtctg

SEQ ID NO: 30700 - DNA, 264 bp, Zea mays
gatctcctcgtcgtcgcctcgctgtctcctccgccgttgcctgcgatcccgatcatggagggcgacagtaccaacctcgacgcggctatagagtcgctcctgaacgtggagaagcagatgaggctggcaggcgatgtcgccggcacgcggaaggccgtcatcgacatcgtcgagctctgctacaagaccggcgcgtggaagacgctaaacgaccagatcgttctcctctccaagaggagggccagcttaagcaggcattactgc

SEQ ID NO: 30701 - DNA, 331 bp, Zea mays
ctcgcgccgccgcctccttcgccacccagcgctcgagctcctcgctccctgcgagcgcgcgccgcaacgccaccatgaagttcaacatcgcgaacccttccaccgggtgccaaaagaagctggaaatcgatgacgaccagaagctacgtgccttttatgaccgaagatatcccaggaggtcagtggtgatgctctgggtgaggagttcaagggttatgtcttcaagatcatgggtggatgtgacaagcaaggcttcccaatgaagcaaggagttttgacttctggtcgtgttcgtcttctgctccataagggcactccctgcttccgtggt

SEQ ID NO: 30702 - DNA, 317 bp, Zea mays
  unsure (1)..(317): unsure at all n locations
ggacgcgggcggacgcgtgggcccgagtatgtggtcagttggctgtctagagagcttttggagacaggaatctaaaatcactattgagatcagagcctgatataaaagtcgaagcatagatcacactgccgagctacttgttcttgcgagtgacggtctttggaaggtgatgaacaatcaagaggttgtcgatttggccaaaaggtacaaggatccctatgctgctgccaagcaattaaccgtcgaagcacaaaaaagagatagtaaggatgatatatcatgcatcgttgttcggttcaaggtgtanatcggtctcg

SEQ ID NO: 30703 - DNA, 326 bp, Zea mays
aagttcctgcacgtacgcacgcaccgggacaccagcaacccccaacagcgccactgtccagtgcgcgcgtcaagcttgcttagctagccgccatggcctccctcgccgccgtctccgtgaagcccgtggccatcaagggtctcgccggcagctccatctccggaaggaagctcgccgtcgccaggccgtcggcgcgctccatccgcagccccgcgcagcgccgtggtggccaagtacggcgacaagagcgtctactttgacctcgacgacatcggcaacaccaccggacagtgggacctctacggctctgacgcgccctcgcccta

SEQ ID NO: 30704 - DNA, 332 bp, Zea mays
  unsure (1)..(332): unsure at all n locations
agcgactcagcgagcgagagcagcacacacgcagctagctaggagcagcagcagagcagcggcgatggcggcctccatgatctcctcgtcagctctggcggtggcgcctcagggcctgccgcccctcggccgccgcgcctcctccttcgccgtcgtctgctccaagaagaagatcaagaccgacaagccctacgggattgggggtggcctgaccgtcgacgtcgacgccaacgggagaaagggcaagggcaagggcgtgtaccagttcgtcgacaagtacggcgcgaacgtcgacggatacagcccaatctacaacgangatgactggtctc

SEQ ID NO: 30705 - DNA, 295 bp, Zea mays
  unsure (1)..(295): unsure at all n locations
ggacgctgtcgtgacgcgtaggcgacggtgccggcgctgtcgttcgtgacggagcacttcatcgtagcagcggcccaccaccatgttctacgtgtacctggccatcgtgctgggcacgctgctgatcctggccgtcctggaggtgaagtgggcgggcgtgacggtgttcgagtggttcaggaacgggcagttctggatgacngccagctgctccgcgtacctggccgcggtgtgccaggtgctggtgaacgtggtgttcaggcgggacatctcgttcaagctgacgtcgaagcag

SEQ ID NO: 30706 - DNA, 328 bp, Zea mays
  unsure (1)..(328): unsure at all n locations
gcagctccgggcgaagatctccgccttagagtcagacatagcagtgcgatctctggaactgaagaataaggacgatgtcatcgtgaacctagagaaagccattgcggagaagtcaaaggctattacctctatgcagggcgagattgcttctctccaggcaaaaggatctttagctgccgaggagcaggctaacaaggccaatgccaaggctgttgaacttgagaagcagattgacaagctcaaaaaggatattcaagcacaaagtagtcagaaagcagcactagaatctagggccaacgatgcagagaacaaggtgganaagttgact

SEQ ID NO: 30707 - DNA, 327 bp, Zea mays
aaaaagagcaaccatgtcacgaggaagcttgagaagcgcaaggagggacgtacccttgacccacacattgaggagcaatttggcagtggacggttgctggcatgcatttcttcccgccctggacagtgtggccgtgctgatgggtacatccttgagggtaaagagcttgagttctacatgaagaagctacagaggaagaagggcaagagcgctgtagcttagagcattctcatggattgtcttgcaccgaaatgtgtgtcctgatgagtacactttttttggttagtcgtctcaagttcagagcgttatgccatgttttcagacctg

SEQ ID NO: 30708 - DNA, 253 bp, Zea mays
ggacgtggatccagatgatatattgctcaaaagagaactggatagacttgccagtagctatcctaacttcaaggtattttatacagttgataaaccgtcaactgactggaggggtggtgttggttttgtatcaaaggacatggttttgaaaggtttgccaggcccagcggaggactctctgattcttgtttgtggtccaccaggaatgatgaatcacatatctggagacaaggccaaggatagatcacagggc

SEQ ID NO: 30709 - DNA, 314 bp, Zea mays
ccacggtccgaccacgcgtccgacacggtccgggacctggtggatgtgtccattgacggattggtgagagatcacaactctggaacagcatccaacgccggaaatatacggtgcaggaggttgccttctggctgtgtgatgcaggacactcccaatggctactgcaaggtcacatgggtagagtatacggaatacgacgaggcgtcagtacaccagctctatagaccactcatccggtccgggctggcctttgggagcaggcggtggcttgcaatgctgcagcgccagtgcgaatgcctggccatactcatgtc

SEQ ID NO: 30710 - DNA, 267 bp, Zea mays
cttggcttcgcactccactgaagcagggcgagagagagtaaggaggaggaggagaagccatggcgagcgacggcgacggtaagggccgcgtcgctacggcgccgggggcagggtacgggtacgcggcgtacggcggctaccagtgggcggaggagcggaagtggtggccgtggctcgtgcccaccgtcatcgtcgcctgcatcgccgtgttcgtcgtcgagatgtacgagaacaactgccccaagcacgggagccagctcggcgact

SEQ ID NO: 30711 - DNA, 312 bp, Zea mays
ggacgtgggcactgtgctggcccctcccaagatcattgcattttatgtgtgggacggctttgacaatggccctggcacccttgtcatcaccgaagttaccgcagcagtaggtcatggactggatcccctcgaacaagtccctgaactcccgcatagctatctcgatgccgaagttgtcgtgggcgtccaaggcctcgctcgccatgtcgtggaaatctgcgtcgaggctccccatgctctcgtggaacagagtcgccccgtgcagctcctcgaacggtgacgtgaccacgtccctcttgaaccactccgcca

SEQ ID NO: 30712 - DNA, 321 bp, Zea mays
acgtcgccaacaccgtgtcgcggtccatccgcgccggcgccatctggatcaactgctacttcgcgttcgacccggacgcgccgttcggcgggtacaagatgagcgggttcggcaaggacatgggcatggacgcgctcgacaagtacctgcagaccaagaccgtggtcactccgctgtacaacactccatggctctgaccgaccgacctcatccctgtccgatgaacagttcaacatcacaaaacaagaagaaacatgtcttgtaagatactccaaaggatcggttgcctgcagtagctgtactcttacacctgcatggatt

SEQ ID NO: 30713 - DNA, 258 bp, Zea mays
ccatcaatctttacaaaaggggtctggagcagatttgggtggttttgatggggaagctgatgacgacgacaatgtggaactagagaaaagcaatgtcctgttaatgggacctactggctctggtaaaactttacttgcaaagacattagctcgttttgtgaatgtaccatttgtaattgctgatgcaacgacattaacccaggcaggttatgtaggagaggatgtagaatctatattatacaagttactcacggtgac

SEQ ID NO: 30714 - DNA, 138 bp, Zea mays
ccacattgatgcgctcgtgaggctgagcggaattactgcagagggccaaggtgtgaaggttgaatcctcagcagttccttcagccccaactccagatgttgctgaagcacaggccccagttgctgaggaggacgacga

SEQ ID NO: 30715 - DNA, 109 bp, Zea mays
gggaaaacaactttggtggattcaatgttaaggcaagccaaggttttccgagataatcaagttgtgcaggaaagaataatggactccaatgacctagaacgggaaagag

SEQ ID NO: 30716 - DNA, 258 bp, Zea mays
ggctcagctgtaatactacaaatttgagcaagttgcagagcagaactgaggttggttaactaggaacgcagccatggcaagcagtgccgtcatcgtccctgcctctccaagaaagttggagggaaaggtggccgtgatcactggcggggcgagcgggataggggagcgcacggcccggctgttcgtggagcacggcgcccacgtcgtggtggccgacatccaggacgaggccggcgcgcgcgtctgcgccgatctcgg

SEQ ID NO: 30717 - DNA, 136 bp, Zea mays
ggagagagagagggagagattagagggagcgccctgcccaagcaaagagaaaccgcggcgcgagaagaccggaggaagggcagacgggcgagcaggatgagagagatcatcagcatccacatcggccaggccggga

SEQ ID NO: 30718 - DNA, 301 bp, Zea mays
  unsure (1)..(301): unsure at all n locations
gtcaccggcaagggccccctcgagaacctcgccgaccacatcgccgaccccgtcaacaacaacgcctgggcttacgccaccaacttcgtccccggcaagtgagcgagggcatgatgcttgcatgcgtgtaccgtagacgtacgtattcctacgtactgcaggttgcaccagtatttgtgaagggagctttgggagccagagattgtaccgctagtgtatttgtatgcatgctgtggagctgaacaataaaatatgctgtaaatatattatgtcttcanaaaaaaaaaaagggaggaggggc

SEQ ID NO: 30719 - DNA, 236 bp, Zea mays
tcacgatcacgatgttgaggaggcgctgatcaagcatgagggtacccagtctgctggcagagctggtaagaagcctcggcggaacatcaacgtgcacagcgcatacctccacgtgctcggggactccgtccagagcgtcggggtcatggtgggcggggcgatcatctggtacaagccggagtggaaggtcatcgacctcatctgcacgctcgtcttctcggtggtggtgctgttca

SEQ ID NO: 30720 - DNA, 130 bp, Zea mays
ccaagcagcagcagcagggatggcgcctctgaagctgtacgggatgccgctgtcccccaacgtggtgcgcgtggccaccgtgctcaacgagaagggcctcgacttcgagatcgtccccgtcgacctcacc

SEQ ID NO: 30721 - DNA, 305 bp, Zea mays
  unsure (1)..(305): unsure at all n locations
ctctctggtggcccaagatgcagacggtggccgagctggtcaaggcctgcaccaccatcatctggatcgcgtcggcgctccacgcggccgtcaacttcgggcagtacccgtacgccgggtacctcccgaaccgcccgtccgtcagccggaagccgatgccggcgccgggcagcgacgagtacgcggagctggagcgcaagccggagaaggtgttcgtgcgcaccatcaccagccagttccaggccctcgtcggcatctcgctgctggagatcctgtcccagcactcctccgacgnagtgtacctc

SEQ ID NO: 30722 - DNA, 309 bp, Zea mays
ggacgctggtgcagattgacccagcgaaatacaagagtatctcatctggatttggtatcctgttaaaagagcaaggggccaggggtttcttcaggggatgggtgcctactttgcttggttacagtgctcagggggcttgcaagtttggcttctatgagttctttaagaagtattactcggacattgcagggcctgagtatgcccaaaagtacaagactctaatctacctcgcaggatctgcatctgctgaggtaattgctgatgtggctctctgcccttttgaagctgtgaaggtacgtgtgcagacac

SEQ ID NO: 30723 - DNA, 309 bp, Zea mays
cggacgcgtggcaaagcataccccaaaatccccaaaccctaggcgaactcggcacggcggcgatggcagaggcgggcctgcggaaggggaacgcgcgcctcccacccgaggtgaaccgggtgctgtacgtgcggaatctgccgttcaacatctcgagcgaggagatgtacgacatcttcggcaagtacggcgcgatccggcagatccggctgggcaacgccaaggacacgcgcggcaccgcctacgtcgtctacgaggacatatacgacgccaagaacgccgtcgaccatctctgcggcttcaacgtcg

SEQ ID NO: 30724 - DNA, 311 bp, Zea mays
ctgatgcttgtttcatccgtgtaattggaagtgagctagttcagaagtatgttggagaaggtgctcggatggtcagggaactgttccagatggcccgctcaaagaaggcatgcattgtattctttgatgaagttgatgcaattggtggtgctcgttttgatgatggggttggtggtgacaatgaggtgcagcgtacaatgttggaaatagtaaaccaacttgatgggtttgatgcaagagggaacatcaaagttctcatggccactaataggcctgataccttggattctgcacttctgcgccctggtcgc

SEQ ID NO: 30725 - DNA, 200 bp, Zea mays
ggccatggcgtcgtccatgctctccgctaccaccgtgccactccagcaggggggcggcctgtccgagttctccgggctcaggagctccgcgtcgctgcccatgcgccggaatgccacctccgacgacttcatgtccgccgtctccttcaggacccacgcggtcggcacgagcggcgggtcgcggcgggcgccgacggaag

SEQ ID NO: 30726 - DNA, 203 bp, Zea mays
ccactaccgggcgtacaacttcaccatcagcatgttctggtcgccgttcctggtgcgcgcccgggagcccgaccacgacggccccgcgcacacgggccactggagcctctacctggacgagcccgacgacaagtgggtgtcccagatgccccgcttcgactacgtgctggtgtcggcggccaactggttctcccgcccctccc

SEQ ID NO: 30727 - DNA, 303 bp, Zea mays
ggtatattgcaagatgaagttgatcctatggtatctgtgatgaaagttgagaaagcacctttggaatcttatgctgacattggtggactagattcccagattcaagaaattaaagaggctgttgagcttcccttgactcatcctgagttgtatgaagacattgggatcaggccacccaagggagtcatattatatggcgaacctggaactggaaaaactctactcgccaaggctgttgccaattcaacatctgcgactttcttgcgtgttgtcggtagtgaacttaattcaaagtaccttggg

SEQ ID NO: 30728 - DNA, 306 bp, Zea mays
ggagacggtgctaatcgagcggaagatggacaactgcaagccctgcggcggcgccatcccgctgtgcatggtgtcggagttcgacctgccgctcgaccttgtggaccgcaaggtgaggaagatgaagatgatttcgccgtccaacgtcgccgtcgacatcggccgcacgctcgcgccccacgagtacatcgggatggtcaggcgcgaggtgctcgacgcctacctccgctcacgggcacagtccgtcggcgcggaggtcgtcaacggcctcttcctaaggtacgaggcgcccaaagagccgaacgg

SEQ ID NO: 30729 - DNA, 306 bp, Zea mays
cccacgcgtccgcccacgcgtccgccgcgtgcgaaccaagcagaccacagcaagaagcgtagtcgtcgccggaaggaaaggcgcggacaagatgtcgtggcaggcgtacgtcgatgagcacctgatgtgcgagatcgaaggacaacatctcagcgccgccgccatcgtcggtcacgacggcagcgcttgggcgcagtccgagagcttccccgagttaaagcctgaggaggttgctggtatcataaaggactttgatgaacctggtactcttgcaacaactggtcttttcgttggaggtacaaagta

SEQ ID NO: 30730 - DNA, 308 bp, Zea mays
  unsure (1)..(308): unsure at all n locations
gagcgatatatattatccattacagtctagtgatgtgccaagcaattcccgtgttacatttgcgttggaccataactaccgatcacatatcgagtatcgttggggaggagaaggtttaaggaagtacttagttaagtgggcttcttcagtagtagaaagaagggggagaactgaaaagcaagtcatctttgaagattcggaacactcttcaacatattgtcttgcatttagagtggttaatccaaatcatttgcctcctttgaaggagctgncaaacgtgatgagaatccagtcactgcgttgtcatg

SEQ ID NO: 30731 - DNA, 277 bp, Zea mays
cggacgcgtggcggacgcgtgggtccgcagagagcttgttccgtccaggcaaccaaaaagcaagttgccccgccgcgcagaggacgaagagagcagaggaggatgctcgtacgaagcagaccgcccgcaagtccacgggaggcaaggccccccgcaagcagctcgccaccaaggcggcgaggaagtcggcgccgacgaccggcggcgtgaagaagccccacaggtacaggcccggaaccgtggcgctgcgcgagatacgcaagtcacagaagagcac

SEQ ID NO: 30732 - DNA, 332 bp, Zea mays
gtcacgtcaccgttcgaggagctgcacggggcgactctgttccacgagagcatggggagcctcgacgcagatttccacgacatggcgagcgaggccttggacgcccacgacaacttcggcatcgagatagctatgcgggagttcagggacttgttcgaggggatccagtccatgacctactgctgcggtaacttcggtgatgacaagggtgccagggccattgtcaaagccttcccacacataaaatgcactgtgctggcccctcccaagatcattgccaccaaaccggccgatggagcgatgataaactatgtcgaaagtgacatgttcag

SEQ ID NO: 30733 - DNA, 338 bp, Zea mays
caagaatggttcaacatcacacaagaaaaacggtttctcaagaccactcttgaaatgtgcagaagaggtcctactgaatggcgatgttgcaagtacatctgggaaatccattgcaagcttacaggtggaagcatctgatttggcaaacttccttaccatggatcggaatgggggttaccgaggttcacaaactcttctaagatctgtattatcagagaaacaagagctgtgcttctctgttgtctcattgctctggcagaagctcatagcttctcctgaaatgcagatgtctgcagaaagtacatcagctcaccaaggatggaggaaggttgttgatg

SEQ ID NO: 30734 - DNA, 305 bp, Zea mays
agacagttgctgttggagtcatcaagagtgtggagcagaaggacacgaccggcgccaaagttaccaaggcagctgccagaacagaatgatgcgacctgtcgttaatcctgtatctgcttttgcaatacctgacttgtcactccatcccgaagttttgtatgcggttgttactgttattgtgtactgttaagctctgctgcggcgtgccctgttgtttgggtagcgtcaacgtcgagcgccacttgcgggtgtgcctttgtctgctatcagtagcggcaaaaattgaaagctctcgagacttatgt

SEQ ID NO: 30735 - DNA, 225 bp, Zea mays
gggccacgcaagccccccctccggcccgcgcttgcgctaggtaccggcgtccgccgcagcccgtcccgtcgcagaacatgaagagcagtaagccatccatcggggatcaccaggggagcaagatgtcgactgccgccgccccaagattgcccgctcccagatcctgggcgagctatcactatcagacgaccgcggctccggtggccaacacgctctcctgtcgcg

SEQ ID NO: 30736 - DNA, 322 bp, Zea mays
gccacgcgtccgcccacgcgtccgatcagaccgaatgggcaccgcatcaccggactccggcgaccttatcgaggtggggccggcgaggccgggatctccggtagccgtggtgaccatcaaccggccttcggcgctcaacgcgctgacgaagcccatgatgatctccatggcggctgcgttccggcggctgggtgccgacgacgccgtggcagcggtggtgctcgcgggccgcggtcgcgcgttctgctccggggtggacctgacggcggcggcggatgtgttcataggcgatgtgaaggacgtcgccacggaccccgtcgtg

SEQ ID NO: 30737 - DNA, 324 bp, Zea mays
  unsure (1)..(324): unsure at all n locations
gaaaggttcatcattgtataactcactgattgttgccaggccatctgttgcttcagaaattaatcgctttggtcttctggctgaatcaatgccatctcttgatgacttagtggcaaggcagaatattcatattgagggcttgcctgctacaccatctaaaaaacgtgctgctggtcgagacgacaatgctgatcctcgatcaccaaagagaccatgcaatgaatctaggagcacagtagtagaacacaatttgcagacacctccacccaagcaatgccacatggtgttgactagtttgacagcaanatgccatccactccagtc

SEQ ID NO: 30738 - DNA, 321 bp, Zea mays
  unsure (1)..(321): unsure at all n locations
aaacaatcttcagaatactctggggggctggatttctgacaagattgtggagtactttgcattgtatgcagaagcttgctttgcaaattttggagacagggtaaagcattggataacaatcaatgaacctctccaaactgcaatcaatggttatgggattggaatttttgcacctggaggatgccaaggtgaaactgctagatgttacttggctgcccatcaccanatcttggctcatgctgctgctgttgatgtttatagaagaaaattcaaggctgcacaaggtggtgaagtanggctgcgttgtgattgtgaatgggc

SEQ ID NO: 30739 - DNA, 313 bp, Zea mays
  unsure (1)..(313): unsure at all n locations
tgctactgcagttgcaagataccgtacgaaatatcaggctgctcagaagggtaaggtcggaatagtcctggacttcaactggtacgaggctcttacaaactcacctgatgaccaagcagcagcccaaagagccagggacttccacattggctggtttgttgatccattgataaacggacactatccacagataatgcaagatctcgtgaaggagaggctgcccaggttcactcctgagcaggctaaactggtgaanggctcggcagactacatcggtatcaacgagtacacatccagctacatgacagggcag

SEQ ID NO: 30740 - DNA, 332 bp, Zea mays
ctctcttcgtcgcgccgccgtagcacgactccgactcggccatggcgacacccccagctctcctattcccttcgccctcttcggcatcttctccgccgtcatccgcgcaggtagaggcggtggtcctcttcaacgtctgcgacactacgtgcggcgaccggaccaggcagaccgtgtcatcggcaccctccttggatccctcctccccgatggcaccgtccacgtccgcaactcctacgtggtcccccacagcgagtcggccgaccaggtcgccatcgacatcgactaccaccataacatgtacgcctcgcaccagaaggtgaaccccaagg

SEQ ID NO: 30741 - DNA, 329 bp, Zea mays
cccacgcgtccggaagccaaccggctcgtccggccgttgcctgtcgtcgctatggccgccgtggaggtgtgcgtgaaggccgccgcggggaaccccgacacgctcggcgattgcccgttctcgcagagggtgctgctcacgctggaggagaagaaggtcccgtacgaggtgaagctcgtcgacctcggcaacaagcccgaatggtttctgaacatcagcccagagggtaaggtgcctgtgttcaacggtggagatggcaaatgcattgctgattctgatgtaatcatccaagtcattgaggagaagttcccgactccttctctggtcac

SEQ ID NO: 30742 - DNA, 178 bp, Zea mays
attggatatcaggctggaaaatttaccagaaattacctgattgaagagctcaatattcctgagtctcgattggtaccactaaatacaatccaggagtatgctgatgcccttaagcgtggaccaaaagatggtggtgttgttgcaattgttgatgagatgccctatgttgagatcttcc

SEQ ID NO: 30743 - DNA, 202 bp, Zea mays
cagctcctctcttttctcaagccagacacctttcagggtgccatcaaggcaatcaacgaaagaattctctctgtccttgatgctcctggttctggtcgtgttgatctgggtatgttcttcgccatcattgctccaatctgttcaggccctgtggataggcgcaacgtatcgtctttgatgcacttctttggcgtcctgctag

SEQ ID NO: 30744 - DNA, 271 bp, Zea mays
gtgggcgcggtgcggtcggagatcgcgggtcggcgcacgcgtccgcccacgcgtccgcgcacgcgtccgcccacgcgtgcgtcgacctgctgcagaagatgctcgtgttcgacccgtccaagaggatcagcgtcaccgaggcgctggagcacccgtacatgtctccgctctatgacccgagcgcgaaccctcccgcgcaggtgccgatcgacctcgacatcgacgagaacctcggcgtcgacatgatcagggagatgatgtggcaggagat

SEQ ID NO: 30745 - DNA, 326 bp, Zea mays
  unsure (1)..(326): unsure at all n locations
ccacacgttcacggtagcgagacttatcgtcgtcggcggtgaagatggtgtcgctgaagctgcagaagcggctcgccgctagcgtcctcaagtgtgggaaaggcaaagtctggcttgaccccaatgaagtcagcgagatctccatggctaactcccgccagaacatccggaagttggttaaggatgggtttatcatcaggaagcctcagaaggttcactctaggtcccgtgcaagaagggcacatgaggccaagcagaagggaaggcactctggatacggcaagcgcaggggtaccagngaggctaggctccccaccaagattctg

SEQ ID NO: 30746 - DNA, 167 bp, Zea mays
tcggggagagagagaagtgggagacccgcgagaggctgccgtgtagggactagggaccgtagagcaagcgacacgaaggagggagagggggatggccgggatcgggccgatcagacaggactgggagccggtggttgtgcggaagaaggcacccaccgccgctgcca

SEQ ID NO: 30747 - DNA, 235 bp, Zea mays
cagaacttcactcttaagactccaggccctgggtacacatgtgggcgtgccattgttggcaggcctacgaagtttttcaccgcggacgggcgcaaggcaacccaagctctaatgacatggaatgtgacctgcacatattcccaatttcttgctcagaagactccatcctgctgtgtatctctatcatcgttttataatgacacaattgtgaactgcaccacatgctcatgtggct

SEQ ID NO: 30748 - DNA, 314 bp, Zea mays
ggattttgttgacatcaacatctgaagtttatggtgatccacttgagcatcctcaaaccgaggcctactggggcaatgttaacccaattggagtcaggagttgttatgatgagggtaagcgtgtagcagagacgctgatgttcgactatcacaggcagcatggcattgaaatccgaattgccaggattttcaacacctatgggccaaggatgaacattgacgatggccgtgttgttagcaacttcattgctcaggctgtgcgtggcgaaccccttactgtccagaagccaggaacacagactaggagcttctgc

SEQ ID NO: 30749 - DNA, 316 bp, Zea mays
gagcaagttcttcgagacgttcgcggctccgttcaccaagagaggtctgctgctcaagttcctgctgctgggcggcggctcacttctggcctacgtcagcgcgtcggcgtcaccggacctcctgccgatcaagaagggacctcaggagccgccgcagccgggcccgcgcggcaagatctaagctcagcttctccatttgcatggtctagtagcttgctttgtactgctagcgccggtcgatccgtcgcaatcgtcatggatcatctctctatcttgttgttacgctgttcataatttggtatatttgccattcaaa

SEQ ID NO: 30750 - DNA, 304 bp, Zea mays
atcaccttgctgctaacgcaggagttccagttccgtgactgcctcagcctgtgggacacactgttgggcgacccagaggggcctcaggctacgttgttgcgggtctgctgcgcgatgctaattcttgtccggagaaggctcttggctggcgatttcactgcgaatctcaagcttctccagaactacccacccacaaacatcgaccacatcctacacattgctaacaagctgcgagggccgcttcctttctgaccagttggatcccttgcgtactttgttaccgtatacggttttgtgctagact

SEQ ID NO: 30751 - DNA, 313 bp, Zea mays
aacacgcgtccgcggacgcgtgggtttggtaccaagacagaatctgtttatattccacgtggtacacttcaggcaacctttcaacacaaaggatttgaagaaactcgacgtcttggcctccggaatgaaacggagcagatggtgcgtgtagtttctccagaaggcgagactggaatgctggttgtcgattcagtggtacctgaaggccctgcacataaacatttagaacctggtgatgttctagtacgcatcaatgaggaggttgtaactcagtttcttagattggagactttacttgatgatagtgttggca

SEQ ID NO: 30752 - DNA, 206 bp, Zea mays
ggtacacctgcaagtatcggtacggatatcacggatcgacacacgcatccgcaaagggtatctggactctggctttggttctggttctggtcttggttcgggtttaggctcaggctttggctctggttttggttcgggcttaggctctggctttggctctggttttggttctggcttaggctctggctttggttgtggctctggct

SEQ ID NO: 30753 - DNA, 164 bp, Zea mays
cccacgcgtccgcggagcaaaggtggtgaagaatgccgcggcggggcgtcgcggcgggggcggccccaagaagaagccggtctctcgctccgtgaaggccggcctccagttccccgtaggccgtatcggccgctacctcaagcagggtcgctactcccagcgtg

SEQ ID NO: 30754 - DNA, 164 bp, Zea mays
cacgttaatcctataggtgttaggagctgttacgatgaggggaagagaacagcagagactttaactatggactatcatcgtggtggtggtgttgaggtgcgtattgcccgtattttcaatacatatggtcctcgtatgtgcctcgacgatggtcgtgtggtcag

SEQ ID NO: 30755 - DNA, 250 bp, Zea mays
gggtgttcgcgatgactacgaatgtgaggtgattgaactcgtcctcagcctcctcgaggagctcatcgaggaggccgatgacgactcaagctcatcgctaaaatgattgaatgggatccatggggtgttcccgatgactacgaatgtgaggtgattgaagacgacaccccaattcctaagcactgttcctcagcaccggcctgttgctcttcctgaggagttcttcaaggcactagatgctgtcaaatct

SEQ ID NO: 30756 - DNA, 308 bp, Zea mays
gacaagtactttgccagggagaagaagcagaaggtgaagaagaccgagggcgagctttttgagacagaaaaggaggcatccaagtcactgcctgacttcaagaaggatgaccagaaggctgtggattctgctctgatcaaggctatcgaggctgtcctggagctgaaaacctatcttggcgcccggttctctctcagggatggtgacaagccccatgagatggtattctaagtttctagttttggagttcgtaggaagctgttttgtctgtgttcttgtacttctgagttttgtaccagtagcgaacg

SEQ ID NO: 30757 - DNA, 326 bp, Zea mays
cggacgcgtggcacatatgagattgtcactgaactatgtgaatatgctggaaatgttgatgtaccaattccaagagagtctatccgggcagttggaaaaatagcactgcagcagtatgatgttaatgccattgtggacaggcttctacaatttcttgaaatggataaggattatgtgactgctgaaactctagtcttggtgaaagatcttctcagaaaatatcctcaatggagtcatgattgtatagcagttgtgggaaataatcagcagcaaaacattcaggagcctaaaggataagcagctctcatatggatgttgggagaata

SEQ ID NO: 30758 - DNA, 250 bp, Zea mays
gcactcctgctttgttgcaaattctattactagctgcacaagggcgtgtttgagactagcggaccgaccttaaagttgaagttgaaaaggtcggcctgcgcggcgatggatgtcaagtgcctgcgtctggacgggaacgtggccatcgtgacggcgtccacgatggggatcggcctcgccatcgccgagcgcctcggtctggagagcgtcgccgtcgtcatctcctctcgcaagcagacgaacgtgaacg

SEQ ID NO: 30759 - DNA, 289 bp, Zea mays
cgcaacctcccgggccgccttctcttctccagcgtccgatctcccactcgcctccctcaccgcagctctcccacctccgccctccccccgcacgcgctcgccacctcgccctcccctccacgttgctcgcacccgcgcttatataagtgcaggaggagctcatggcggaagctccggcgagccctggcggcggcggcgggagcacgagagcgggagcccaggggaggcggagcggtggcacgtcagggacaggacaggttctgccatcgcaacatcatcggtcatgaag

SEQ ID NO: 30760 - DNA, 333 bp, Zea mays
  unsure (1)..(333): unsure at all n locations
aacatggaacagcctaggtggtggggcgaccttgatgtcaaccagcacgtgaataacgtcaagtacatcggttggattcttgaggtaatttcttcggggcctgcctcttttcatcgtattcaatggccactgctctggccatgtggtgggtgttgttggagagatctcgctggcatggcttgaaagtttataaagctctgtgtacttgtgcttgtgtaactccttgctgatgaatcatcaattggtagtctggctgggtctgtatttgaanaacagacgttgctagtacggttgatcagctgagctgcttcttgatctttgcctagtacgaac

SEQ ID NO: 30761 - DNA, 323 bp, Zea mays
tgtgaggcttattcccagtggaacacaaattgttctttctgtgaagtcacaacaacatgcgatgcaatgtgatgcgctggcagatgaaataagattgatagtcatcgtgaaacaaagattgagataaaagcaacagctgatgggcatgctcatgctattgtttcatggtgggtgcttcaactggattcttctggatcagtcttttactcaactgctcctagatgggtgagacaatccagtggtgtcgatttaccacaatatgccaatggcacgaaggattggtgtgatcattggaagcagtgtgtatggtatatacaagggac

SEQ ID NO: 30762 - DNA, 366 bp, Zea mays
agtacacgcagtacggccggatccgggtcgccacgctcgaccacgcgtccgggacgctggcgtacgcgtgggcggacgcgtgggctcgctcggctacggctcctcgtgcacggcctggacgccgccggaaacgcgtcctacgccttcaacatgtacttccaggtgcagaaccaggtggagggcagctgctacttccagggcctcgccgtgcccacggcgcagaacccgtccacggacgcctgcaacttcaccatacagatcactccgtcggcagcggggagacgacgcgccgccgccgcgacagctctgctcctcgtggttcttcttactgccgtgcatgtcgcgccatgactgagcccgtgactc

SEQ ID NO: 30763 - DNA, 320 bp, Zea mays
cgtcgtcacgggcgacttcgagaagttcacgagggtgacgatgatcctcccgctgacgggcgagcagtacgcggagaaagtgacggagaactgcgtggcgttctggaaggccgccggcctgtacacggacgccgagggcgtcgccgtggagaagttcagggaggtgttcaagccagagactttcgcgccgggcgcctccatcctcttcacgcactcgcccgccggagtcctcaccgtcgccttctccaaggactcgtcggtgccagcgagcagcagcgtggcgatcgagaacaagcgcctctgcgaggccgtgctggagt

SEQ ID NO: 30764 - DNA, 309 bp, Zea mays
gtgctctggctcgacattgagcacacagatggcaagcggtactttacatgggatcattctgccttccccaatccagaggagatgcagcggaagatagcagataaggggaggaagatggtcaccatcgtggatcctcatatcaagcgggacagttcattccacctccaccaggaggcaacagacaaggggtactatgtgaaagatgcaaatgggaatgactatgatgggtggtgctggcctggatcatcttcctatcctgacatgctgaatcctgagatacgcgagtggtgggctgacaagttctcctat

SEQ ID NO: 30765 - DNA, 327 bp, Zea mays
  unsure (1)..(327): unsure at all n locations
agctgttgtgcaggtttttgaaggaacttctggaatagacaacaaatacacaaccgtgcagtttacaggcgaggttttgaaaactcctgtctcactcgatatgcttgggcgcatttttaatggttctggaaaacctattgacaatggccccccgatattacctgaagcctacttggatatctctggaagttctattaatcccagtgagagaacctatccagaagagatgatccagactgggatatccaccattgatgtgatgaactccattgctcgtgggcaagaaatcnccctattttctgctgctggactcgctcacaatgaaat

SEQ ID NO: 30766 - DNA, 322 bp, Zea mays
gtcattcttactattagtccttgggattgtctatgttcaagaagctgagcgcaaaatacccctcaattatgcttctcgttacagcagtcgaactggggaacttcagcgatctgcatatttaccatttaaggtcaacagttctggagtcatgcctatcatattttctacatcttcactggctttgcctggtactttggcacggttttctggcttagactttcttaagaaggctgccatagcccttaatccaggaggtgctctctatcttccaactaatgtattacttatagccttcttcaactattattacacgtttctccag

SEQ ID NO: 30767 - DNA, 323 bp, Zea mays
gcctccgatccccaattcctccttcggatctcgcattcagcgcacgcaggtgtgaaggaagggggacgcggaggaagatggggctcgcgttcgggaagctcttcagccggctcttcgccaagaaggagatgcggatcctcatggtcggcctcgacgccgccggtaaaaccaccatcctctacaagctcaagctcggcgagatcgtcaccaccatccccaccatcggtttcaatgttgaaactgttgagtacaagaacattagcttcactgtctgggatgtcgggggtcaggacaagatcagacctctttggaggcattacttc

SEQ ID NO: 30768 - DNA, 297 bp, Zea mays
cagacgcgtgggcccaagttcaagaacctcacggccaaggccaagacggccatcctgctgtaccacgccgtaccggactactactccatgcagttcctcaagtccaacaagggcaaggtcaccacgctcgccaccaccagcgtcgccaagaaggactacacctacgaagcggagagcaaggacgacaccgtcacgctcgacaccaccgtcgtcacctccaccatccaggcctaccgtcaggacgacgacccgctcgccgtctacgcttgctccaagttcctgcagcctaaggagctg

SEQ ID NO: 30769 - DNA, 321 bp, Zea mays
ccggcgaggagatcacgcacacgtacaaccacatctacggactctccatcaccggcctccgcttcttcaccgtgtacgggccctggggccgccccgacatggcctacttctccttcacccgcaacatccttcaggggaagcccatcacggtttaccgcggcaaggaccacgtggacctggcccgcgacttcacctacatcgacgatattgtcaagggctgcctcgcctccctggaaacggccggcaagagcaccggcaccggcggcaagaagcgcgggccggcgccctacaggatcttcaacctcggcaacacctctcccg

SEQ ID NO: 30770 - DNA, 267 bp, Zea mays
cccacgcgtccgcggacgcgtgggccggaataagaaccccagaggaccttgacgccatgaagaacctcatgccacaggcctacgacgagcttgatgagaactgcaacatcctggagagccactacaaggaaatgcaggatatcgagttcactgtccaggaaaacaggctgtggatgttgcagtgcaggacagggaaacgtacgggcaaaagtgccgtgaagatcgccgtggacatggttaacgaggcttgttgagcccgctcagcga

SEQ ID NO: 30771 - DNA, 295 bp, Zea mays
cccacgcgtccgggttctacgtccgagtcgtcgcatcaggtcccctcgattcgccggcgggccaccaaccaagctcatacatctgaattgactagtcaaactcagtgatctctttggggactaatcaaactcaagaactaagtttcatgtctgatctcgacgtccagcttccatctgcttttgatccgtttgcagaggcaaatgctgaggactccagtgctggtgctggatcaaaggactatgtgcacgtgcgtattcagcagcgcaacggaaggaagagtctgacaactgttca

SEQ ID NO: 30772 - DNA, 304 bp, Zea mays
cccacgcgtccgcacccatccgatcccacccggcagcggcgctgcgcagatggccacccacgcagctctcgccgcctcccgcatccccgccggcgcccggctgcacagcagggcgccggcgtcgtccaggcacggcgtgcagaggctggacttcgccgacttctccgggctcaggccgtggtcgtgctccgtgagcgctgccgcgcgggaggcgtccttctccgacgtccttggcgcgcacgtcgtcgccaaggccaccggggagacggcgtgaggcgcccgcagagcgaactgaaggtggcga

SEQ ID NO: 30773 - DNA, 300 bp, Zea mays
gcggggtacgtgaccaagtgctctggcgagggcatctacttcgcggcgaagagcgggcggatgtgcgccgaggccatcgtggcgggctccgccaacgggacgcggatggtggaggagagcgacctgcgcaagtacctggccgagttcgaccgcctctactggcccacttacaaggtgctggacatcctgcagaaggtgttctaccgctccaacgcggcgcgcgaggccttcgtggagatgtgcgccgacgactacgtgcagaagatgaccttcgacagctacgtctacaagcgcgtcgtg

SEQ ID NO: 30774 - DNA, 328 bp, Zea mays
cggacgcgtggctgacgcgtgggcggacgcgtgggatgccattggtatcaacgttccaaggtcccgctatcctaccagttaaggcgacatcagcatttgcagctagtacagtctgatctatataccttggttgatggcttcgttacacgtaattcagccagaacaaatccatcaaatccatcaattgaacttggtcctgagttcaagaaggttgggagcttccttggtcgcttcaagtcgatacctagcattgttgagcttgacagcttgaaggtttccggtgatgtttggttcggttctggaatgtactgaacgggaaagtgaccat

SEQ ID NO: 30775 - DNA, 317 bp, Zea mays
cggacgcgtggcggacgcgtgggcggacgcgtggggaacgtgctaaaaagaagctgacaatagaagaagcgccgaatatactgactattgcactgaaaagatatcagtctggcaagtttggaaagatcagcaaagccatcagatttccagaaaccctcaacatagtttgctatatgaatccagatactgatgacatatcgccagtttacagcctctatgcagtggttgtccatcatgatgtcatgaatgctgccttctctggtcattatgtatgttatgttaaagatacacatggaaagtggttcaaggcagatgac

SEQ ID NO: 30776 - DNA, 316 bp, Zea mays
gagctggtcagttatagatgatgccacacctgttcgttctagctacgaggaatcttcatccattgttgctgatctgaagaaattcagaactcagctgcttgcctttgacaaagcttggtgtgcttatctttaccattttgtggcatggaaagcaaaagatgctaaatcattagaggatgaactcattagggctgcatgcaagcttgagctgtcaatgattcaaacatgcaaaataactgaaggtgaatctgataacctgggtggtgatttgaaagccatccggaaacaggtcgcagaagaccagaaacttttaagg

SEQ ID NO: 30777 - DNA, 197 bp, Zea mays
cggacgcgtggctcagtccctcacacactcactatacactgctctgctgcagcaagaaggaagaagctagcgcctccctagctctcgttgtcagcaatggccaccaccgccgcgtccagcctcctcaagtcgtccttcgcgggctcccggctcccttcggccacgcgcaccaccaccccgtcgtccgtggccgtggc

SEQ ID NO: 30778 - DNA, 171 bp, Zea mays
ccaccgccgtgggctctgggccatcaaggccaagaacggcggcgtcttccccaaggccgagaagcccgccgccgccgcggaacccaagttctaccccgccgacgacgtcaagcctcgtgttcccagcacccgcaagcctaatcccaccaagctcaggtcgagcatcacgcc

SEQ ID NO: 30779 - DNA, 306 bp, Zea mays
  unsure (1)..(306): unsure at all n locations
cggacgcgtggcctccgcctgccgtcctgtcctgcgcccttactcctcggaccacccccacgncancaaaccccaaccccccattccgcactcccctctccctgccccgccgcgcttccttcgctcctaaagcggctgcgatcgcgctctgggcgctgccggtcggcttccgcttccaccccaccgacgaggagctcgtcagccactacctcaagggcaagatcaccggccagatcaactccgaggccgaggtcatccccgagatcgacatctgcaagtgcgagccgtgggacctcccaggtaagt

SEQ ID NO: 30780 - DNA, 305 bp, Zea mays
agggaaggctccatcaccatcccgccatacgctccgcctcacaagataagagctcatatcgtcccgccagagacgcctcggtcgatcttcgtctacttccgcggcctgttctacgacaccgcgaacgaccccgagggtggttactatgcaaggggcgcccgtgcgtcggtgtgggagaacttcaagaacaacgcgctgttcgacatctcgacggagcacccgccgacgtactacgaggacatgcagcgcgccatcttctgcctgtgcccgctgggctgggcgccgtggagcccgcgcctggtgga

SEQ ID NO: 30781 - DNA, 266 bp, Zea mays
ggtgcttgtacaagatgaccggcccgaggcttctgacggcggaacaagaagtcgaattctcagaaggcattcaggacctcctgaaactggaagccatccaaaaggaggttgcgcagtataatgctggtgaaccaacgttttcccagtgggcggcagcagccggaaccgatgagaacactctgcggagacgcctgaatcatggagtctactgcaagaacaggatggtgaaatctaacgtgcggcttgtaatctcgattgcaaaagaa

SEQ ID NO: 30782 - DNA, 305 bp, Zea mays
cggacgcgtgggcgggccggtgtacgtggtgacggacccgtcggaccgcgaccccgtgaacccgtcccctggcacgctccggcacgccgccatccaggagggcccgctgtggatcgtgttcgcgtcggacatggccatccggctgaacgaggagctgctggtgaacagctacaagacgatcgacgggcgcggcgccgcgtgcacgtgggcggcggcggcgcgtgcatcacgctgcagtacgtgtcgaacgtgatcatccacaacgtgcacgtgcacgactgcgtgccggcggggaacccgacgtg

SEQ ID NO: 30783 - DNA, 311 bp, Zea mays
cccacgcgtccgcccacacgtccgcccacgcgtccggttatgatcaagtcaagcagtcaattttgaaactccctgggttcaaagatgatgtggtcacccacctttttgctggtcttggtgctggcttctttgctgtttgtgttggttccccagttgatgtggttaagtcgagaatgatgggtgactcagcctacaaaagcactctcgattgttttgtgaagacgctaaagaatgatggccctttggcattttacaaaggcttcctgccaaactttgcaagactgggatcttggaatgtgattatgttcttg

SEQ ID NO: 30784 - DNA, 308 bp, Zea mays
ggtaatgaaagtgaagcatctaggaggattaagactgaacttcttgtgcaaatgcagggtgttggtcataatgatgataaagttcttgttcttgctgccacgaatacgccatatgctctggaccaggctgtgcggcgaagatttgacaagcgtatctacattccgctacctgacacgaaagcaaggcagcatatgtttaaggtccatctcggggatacaccacacagcttaactgaaagcgatttcgagagcttggcccgtcgaacagatggattttctggttctgatgttgctgtttgtgttaagga

SEQ ID NO: 30785 - DNA, 308 bp, Zea mays
  unsure (1)..(308): unsure at all n locations
nccacgcgtccgcggacgcgtgggtcagccacaagttttggtgatgatctgtctgacttatttggagctcctgcatcttctgatgtttttcaagaagttgagggagaaagtgaagaaagaagacgtgctaggttagaacgtcatcagaggactcgtgaacgagcggcaaaagctctggctgagaagaatgaacgtgatatgcaagttcagagggagcaggcagagagagatagaattggagacactctagacttcgaaatcaagaggtggtctgctggtaaagagggcaacttgcgtgctttgttatc

SEQ ID NO: 30786 - DNA, 306 bp, Zea mays
gagccggtgacgtactaatgactttccttgggtctgtgatcatatcatttgcattctcgatcttcaagcagagaaagcttgtgaagaggcacgcaacagagattttcacatcaattgccatcgcgtcgacattctctctgtactcaactgctatcatagggcgcctgattgggctagagccatcgttaaccatatcaatactgccaaggtgtattactctggcgctggctttgagcatagtgtctttctttgaaggtgtaaactcttcggtaactgctgtcgtggttgtccttaccgggctcatcg

SEQ ID NO: 30787 - DNA, 303 bp, Zea mays
ggctcgcacgcaatctgccgtagcggtcgccgtggtggccgcggtgctgctgctggcagcggcggcgacgacctcggaggccgccatcacctgcgggcacgtgagctccgccatcgcgcgctgcctctcctaccccgcggcacggggtccggcccctccgcgtcctgctgtagcggcgtcaggaacctcaagagcgccgccagcaccgccgccgacagctcgccgcctgcaactgcctcaagaacgccgccaagggcgtcacgagcctcaacgccggcaacgcgccagcatcccctccaagtg

SEQ ID NO: 30788 - DNA, 303 bp, Zea mays
cggacgcgtggcacgcatactgcatacacaacgcagagcatcagaagcagctgcgatctgatcgacatggatgccgccaccatggctatcacctcccgcgcgctcgtcggcaagccggcggctggcacgagggacgtcttcggcgagggccgcatcaccatgcgcaagaccgccgccaagcccaagccggcggcgtccggcagcccatggtacggtgccgaccgcgtcctgtacctgggcccgctgtccggctcgcccccgagctacctgaccggcgagttccccggcgactacgggtgggac

SEQ ID NO: 30789 - DNA, 300 bp, Zea mays
gttcaactaccccatggcatggtccatgaccatgctcagctggagcgtgatcgagtacagggccaagtacgaggccatcggcgagctcgaccatatcagggagctcatcaagtggggaacggactatatcctcaagacattcaattcgtctgccgacacgatagacaggatcgtcgctcaggtgggtgtaggtgacacctctaaaggcagcagtcagcctaacgaccattactgctggatgaggccagaggacatcgactacaagaggccggttaccgagtgccactcctgctcagatct

SEQ ID NO: 30790 - DNA, 243 bp, Zea mays
cggacgcgtgggcgcgagccatggcgaagaactacccgaccgtgagcgccgagtacagcgaggctgtggagacggccaggcgcaagctccgagccctcatcgccgagaagagctgcgccccgctcatgctccgcctcgcgtggcactccgcggggacgttcgacgtgtcgtcgaggaccggcggtccattcggcacgatgaagcatcagtcggaattggctcacggcgctaacggggggctgg

SEQ ID NO: 30791 - DNA, 243 bp, Zea mays
cccacgcgtccgtccgttatgtgtggagatggcatggaagatgttatcattgcttgcaactcgaagaagatcaggagcagtagcaatcctgcaactggttttggagcccctggacctggaggtatcatatgcgctaaagcatcaatgttgctgcagagtgttccaccagcagtccttgttaggttcctgagggaacatcgatctgagtgggcagattataactttgatgcgtattcagcttca

SEQ ID NO: 30792 - DNA, 300 bp, Zea mays
agccacgcgtccgcccacgcgtccggcgcaccgcaagtgctgcgtgacaacatccagggcatcaccaagccggcgatccgcaggttggcgaggacgggcggcgtcaagcgcatctccgggctcatctacgaggagacccgcggcgtgctcaagatcgtcctcgtcgctgtgagctggttgggggctgtgtggatttggttttcttatcgcgggacatcagaggctgtgattcgagtgcgatggcatctgacactgatgagaaagctaagatggagagttgacatctgctgcagcctttgt

SEQ ID NO: 30793 - DNA, 365 bp, Zea mays
agtgagcgcagtctaggcggaattccggagtcaccacgcgtccgggacgcgtggacgagttgttccatacgagggtggtggtaatttggaagagatttcagaagttgaaggtagatcggaaaggtatgcagttcagaaagatgagagcttgtcagaaataaggacgcagctccttcagattgagaatcagcaaagcagtttactggatcttctccagaaatttatggggaagtccgagaacggtatgcattctttggagacaagagtgcatgggctggagatggctttggatgagatctctcgtgatttggccttctcttcgggaaggatgtcaagcagagagcttgatgcaaagacgtgctgca

SEQ ID NO: 30794 - DNA, 337 bp, Zea mays
  unsure (1)..(337): unsure at all n locations
cccacgcgtccgccgaccaccaatctccatgcgccgccttgtcaagtttatggaaggaaaggagaagaacattgctgtcattgttggcacagtcacagatgacaaaaggatccaggaggttccagcaatgaaggttactgccctgaggttcacggagacagcaagggccaggattgtcaatgctggtggcgagtgcctcacatttgaccagcttgctcttcgtgctccacttggcgagaacacggtcgtcttgaggggcgcgaagaatgcccgtgtagcagtgaggcactttggcaangctcctgnagtgctgcacagccacaccaagccgtatgtg

SEQ ID NO: 30795 - DNA, 334 bp, Zea mays
cccacgcgtccgaaaatatttgctgaatctgttgaggattcggtccgcagagctttcttgcgggctgaccttgcacttgctgatgattcagtcatcaaccgttcttctggcaccacagcgctgacagcattggtccttgggaggcaactgttggtagcaaacgctggggactgccgcgccgtcctgtgtaggaaagggacagcggtggaggtgtcaaaggatcacaggccgacatacgacgcagagcgtcaaagggttatcgagtgcggtggatacatcgaagatgggtacctcaacggcgtactctctgtgacccgggctttaggggactggg

SEQ ID NO: 30796 - DNA, 330 bp, Zea mays
actctctcgacccaaagccagatcggcacgacgagcagaggcccccccccggagcggcgcggacaatggcggcgggataccgggcggaggacgactacgactacctcttcaaggtggtactgatcggcgactccggcgtcggcaagtccaatctgctctcacgcttcacgcgcaacgagttcagccttgagtccaagtccaccatcggcgtcgagttcgccacccgctctctccaggtcgacggcacagttgtcaaggcccagatttgggacactgccggccaggaacgatatcgtgctattactagtgcatattatcgaggtgctgttg

SEQ ID NO: 30797 - DNA, 323 bp, Zea mays
ctttgagcagtttgggcgctgagcaagtccagtgagagagggagagcggcgagaggatggctgggatggcgtcgctgcagggcgccatggcgtcgctctccatctccgcgctaggtgcggcgacggcgagcagcagcagcttctggggcaaccggctcgccacctactccgcgccgcagcctggggtaaggtttatggtcaagatatgcccaattgaaatgagacttaagagatgggagcgcaagaagtgtaaaccagacagtcttcctgtgctgcacaagatgcatgttaggatcggggacacggtacaggttattgcaggc

SEQ ID NO: 30798 - DNA, 314 bp, Zea mays
cggacgcgtggcatctactacatcaacgatcggctggacaagcggacatggacgtacatcttcggcgcctgctgcgccaccacggtgttcatcccgtccttccacaactaccggatctggtccttcctgggcctcggcatgaccacctacaccgcgtggtacctcgccatcgccgcgctcctcaacggccatgccgaagcgtggcgcactccggcccgaccaagctcgtgctctacttcaccggcgccaccaacatcctctacagcttcggcggccacgcggtcacagtcgagatcatgcacgcgatgtggaag

SEQ ID NO: 30799 - DNA, 303 bp, Zea mays
  unsure (1)..(303): unsure at all n locations
cccacgcgtccgcggacgcgtggggcgagccatcgacacgatcgcgncgcaacacgtacgttgtcggaagctcaagttagaagaagcaccagtgcctgatcgatggcggcccaggctctcctctccggccggcagctgctgggccgccccgtgcagtcggccgtctctaggtcgtcggcgaggaaggcgcccttcgtcgtcagggccagctccagccctccagccaagcatagtagcgacagcagctgtggttcgcgtccaacagtccctctcctacctcgatagcacgctgcccggcgacta

SEQ ID NO: 30800 - DNA, 326 bp, Zea mays
atcaagcgtggttatgtggcctccaactccaaggatgaccctgccaaggaggctgccagcttcacctcccaggtcatcatcatgaaccaccctgggcagatcggtaacggttatgccccagtgctggactgccacacctcccatattgctgtcaagtttgctgagctcattaccaagatcgacaggcgttctggcaaggagcttgagaaagagcccaagttcttgaagaacggtgatgctggtatggtgaagatgattcccaccaagcccatggtggtggagacattctcgcagtatcctcccctgggtaggtttgctgtccgtga

SEQ ID NO: 30801 - DNA, 323 bp, Zea mays
ggagacaatattgttctgcttttgcaggttgcaaggattctaatgaagaccttatctcaattgacatctggaaaacaacctgttggtacaatggcttacatgggcaatgtacaatatctgatgcaatgcaaatgtgctgttaacacagctgaagattggcttaaccctgttgccatacaagaggcgtttgaagccagggctctcaggatggcagtaaactgtgcccagaacataggccaagcagcaaaccaagaagaaggtttctatgagcggtcccctgatttgctagaggctgcagtagctcacatccagttggtcattgt

SEQ ID NO: 30802 - DNA, 314 bp, Zea mays
  unsure (1)..(314): unsure at all n locations
cggacgcgtggcggacgcgtggggccgcgtctccgaggaggaggcgcacgcatgcgaggacaggtacaacaactccaagctcgtgcactccatcatgcgccacgtcgccgagacgctcgaggtcgacctcgagccgctctaccagcggattggctggccgctctaccgcaagtacggtcacgccttcgaggccttcaagctcatcgttgcggaccctgacgctatcctcgacgtactcacctatgagganaaggaggtcggccgagatggccaggatgtggctaaggtggtgcctgctgtcacacctgaggtta

SEQ ID NO: 30803 - DNA, 323 bp, Zea mays
cccacgcgtccgcccacgcgtccggtagtttaggatttcttttctgacacttcgattcttaccaatccccctggcctgctgctttcctgacaatcgaccagttccccagtcttgctccctgcagtcctccctcctccatctccagcgttgtgttctgactcacctgcaccaatggctgttctttctgctgctggtgctcccccggcctcagctatcgggtttgagggctatgagaagcgccttgagatcacattctctgaggcacctgtctttgtggacccccatggcagcggtttgcgtgcactctccaggtcgcagattga

SEQ ID NO: 30804 - DNA, 326 bp, Zea mays
  unsure (1)..(326): unsure at all n locations
cgttgggaaagatttttgtcggaggcgttgcttgggagacaactgaagaatcattctccaagcattttgagaagtatggggcaataactgattctgtaattatgaaggacaagcatactaagatgcctcgtggatttggatttgttacattttctgatccatctgttatagacaaggttttggaggatgatcacgttatagatggcagaacggttgaagttaagaggactgtcccgagggaagagatgatcaccagagacggccctaagacgagaaagatcttcatcggtgggctaccaccatctcttactngagatgaattgaag

SEQ ID NO: 30805 - DNA, 317 bp, Zea mays
gaacagaccgagaaggcttttctcaagcagcctaaggtgttcctcagctcaaagaaatctggcaagggtaagaagccaggcaagggtggcaatcgattttggaagagcattggccttggtttcaagactcccagggaagcaattgaagggacctacattgacaagaaatgtccattcactggaaccgtttctatcagaggcagaattattgctggaacatgccacagtgctaaaatgaacagaaccatcattgttcgcaggaactacctccactttgttaagaaataccagaggtatgaaaagaggcactccaacat

SEQ ID NO: 30806 - DNA, 312 bp, Zea mays
  unsure (1)..(312): unsure at all n locations
cggacgcgtggcgactccgccgccgctccgcctcagcgcatcgcccgccgcgacctcatcgatcaccttcagacttcaatcatggcggacgtcgatgtcgaaccggaggttgccgccggagctcccaagaagaggacgttccgcaagtacagctaccgcggcgtcgacctagatgcgcttctcgacatgtccacggacgaccttgtccagcttttccccgcgcgcgccaggagaaggttccagaggggtctgaagatgaagcccatggcgctcatcaagatactgcgcaaggcganaaaggatgctcctgct

SEQ ID NO: 30807 - DNA, 269 bp, Zea mays
cccacgcgtccgctgatagcttgctccaggacgtacgtacgtacgtagatcgatccatcgatcgctagctagctgacgaccatggcgtccctctcctctgccgccatcaccgcgccttccttcacggccgcgcccgctcgcgcagtggtcagcaggaggtccttcaccgtgcgtgcctctctccgcagagccactgccaccgccgccgtggccgttgccgccagcgtcctgcttgccggcggcggcgccatggcccaggaggtgctgct

SEQ ID NO: 30808 - DNA, 313 bp, Zea mays
  unsure (1)..(313): unsure at all n locations
cccacgcgtccgcccacgcgtccgcccacgcgtccggtgaaagttgcaacttcggtgccggttgtcatctttgagaagcccttgctgagcctcacatttgctgacctcttggcggcgacatcaaacttcgacaggggcaccttgttggcagaaggcaggtttgggccagtgtacaggggattccttcctggtggaattcaagttgctgtgaaggtgttggtccatggatcagcaatcggagaccaagatgctgcaagggagctcgagcggctgggacggatcagacatccanacttagttcccttgactggtt

SEQ ID NO: 30809 - DNA, 315 bp, Zea mays
gaaggacaaagtgcacccttcatttgttaaagaccgccgggccatgaagagagaatatgaagaattcaaaattagggtaaatggccttgttgctaaggcacaaaaagtccctgaggaaggatggatcatgcaagatggcacaccatggccaggaaacaataccagggaccatcctggaatgattcaggttttccttggtcacagtggtggtcttgatactgagggtaatgagctaccccgtttggtctatgtttctcgtgaaaaacgtcctggattccagcatcacaagaaagctggtgccatgaatgctcttgt

SEQ ID NO: 30810 - DNA, 316 bp, Zea mays
atatccccactcttcgcctcctttctggagcagctagggttccgtcctcgatccgatccgccgagtgcacaccacctttccccactccgatcgaatcgatggccgccgagggcgagaagaagatgataaccctcaaaagctccgatggcgaggagttcgaggtggaagaggcggtggcgatggagtcgcagaccatccgccacatgatcgaggatgactgcgccgacaacggtatccctcttcctaaggtcaactccaagatactatccaaggtaatcgagtactgcaacaagcacgtacatgcggccgccgcggc

SEQ ID NO: 30811 - DNA, 312 bp, Zea mays
caacgcgtccgggacctgggcaagcaagctcgatctactactactactagctggtacacatactagccagcctgccagccagcttgccatggcgcccaccgtgatgatggcctcgtcggcaaccgccgtcgccccgttccagggtctcaagtccgccgccagcctccccgtcgcccgccgcagcaccaggagcctcggcaacgtcagcaacggcggaaggatccggtgcatgcaggtgtggccggcctacggcaacaagaagttcgagacgctgtcgtacctgccgccgctgtcgacggacgacctgctgaa

SEQ ID NO: 30812 - DNA, 314 bp, Zea mays
gcgactacggctgggacaccgccgggctgtccgccgaccccgagaccttcgccaagaaccgcgagctggaggtgatccactcccgctgggccatgctcggcgcgctcggctgcgtcttccccgagctgctctcccgcaacggcgtcaagttcggcgaggccgtctggttcaaggccggctcccagatcttcagcgagggcgggctggactaccttggcaaccccagcctgatccacgcgcagagcatcctcgccatctgggcctgccaggtcgtgctcatgggcgccgtcgagggctaccgtattgccggcggg

SEQ ID NO: 30813 - DNA, 312 bp, Zea mays
ggacgtgggccccgctccgcctttccctttcctcccccttctcttcctctctcctctccataggggcgcggcgagatcgggcggaggagccctaccgccccccctcgccgcagcggaggcgggtgctcagctccgcggaaggttagaggtgcggggctgcgtttggaaccggcggtgggcgcgggagatccggccagcggggatgcagcaggaccagcggaacaagacttctgcagaggtcgacttcttcacagagtacggggatgcgaaccggtacaagatccaagaggtcatcggcaagggaagctacgg

SEQ ID NO: 30814 - DNA, 316 bp, Zea mays
accagtgagttcaaatattcccactggacaaattccttcaagcccaagccagcctcaggcaccatggccgaaaatcactcaagtagatgtcagaaaatacatgattgtatttatcaaggtagacagggatcgtgatgggaaaatcactggtgaagaggcaaggaatctatttttaagttggaggcttccaagagatgtcttaaggaaggtgtgggatttgtccgaccaggataaggatgggatgctatctttcaaggaattttgtattgctgtgtacttaatggagagacatcgagagcaccgtcctcttcctgac

SEQ ID NO: 30815 - DNA, 285 bp, Zea mays
ggacctggcggacgcggggcggaccgtgggcaaaatccgtacggtacctcttgaaattatggttgatggtgataaggcgcatgtatatggtgaaacacttgaagaacttggtcgctacaaggctcaaacaaaactccctttcaacgcttttggaacaatggctatggcaagaggagaatttgatgacaattctgcttctagccaagtattttggctcctgaaagagagtgagctaacacccagcaatgcccatatattggaccggcggtaccagtatttggatat

SEQ ID NO: 30816 - DNA, 316 bp, Zea mays
gcgtcgctccggcgctcctccgcatgcacttccatgactgcttcgtcagaggctgcgacggctcggtgctgatcgactccacggccaacaacaaggcggagaaggactcgatccccaacagcccgagcctgaggttcttcgacgtggtggaccgcgccaaggcgtccctggaggcgcggtgccccggcgtggtgtcctgcgccgacatcctcgccttcgcggccagggacagcgtcgtgctcaccggcggcctcggctacaaggtgccgtccggacgccgtgacggccggatatccaatgccacgcaggccctgaa

SEQ ID NO: 30817 - DNA, 311 bp, Zea mays
tgttgtctggtggattgctgcacagagcgtgttctaccacttatataaccaggtgtcctacatgtctctcgatcagatttctccattgacattcagcattggcaatacaatgaagcgtatatcagtgattgtttcatcaatcattatcttccacactcctgtccgcgctgtcaatgcactgggagctgccattgccatccttggcacattcctgtactctcaggcaaaggcgtgaggcgggccatgatgacgaacgtctgcagaatcagtagcaagcactaaatccaattttgcttgttccagtggcatgt

SEQ ID NO: 30818 - DNA, 319 bp, Zea mays
attttaaacttgaaaatgctttgcaaaaatcttattcatttacctttgactatgttgcaaaaaggactttgaaaaggatttacaaaaagaatttgcaaaaacaaaacgtgtggtgcaagcgtggtccaatatgttaaaaatgaagaaacaatccatgcatatcttgtaagtatttatattggctcaactccaagcaacctttgcacttacattatgcaaactagttcaattatgcacttctatatttgctttggtttgtgttggcatcaatcaccaaaaagggggagattgaataggaattaggcttacacctagttcc

SEQ ID NO: 30819 - DNA, 307 bp, Zea mays
cggacggtggtgtcgcctctacatttcttctctctctgctcctccgcctccgcctgatccatccaagacagggatcgccatgtcggactcggaggagcaccacttcgaatcgaaggccgacgctggggcgtccaagacctacccgcagcaggctggcaccgtccgtaagaacggcttcatcgtcatcaagaaccgtccctgcacagttgtggaggtttctacctccaagactggtaagcatggccacgccaaatgccactttgtcgccatagacatattcaatgggaaaaagcttgaagatattgtt

SEQ ID NO: 30820 - DNA, 339 bp, Zea mays
gctacctgcagtacggtcggaatccgggtcgaccacgctaccgacacggtccgggacctgcgagcggcccaactcgatctcgcacctagggtttcgtctcgccgcactcgtcctccgagaagatgccgaagaacaagggtaagggaggcaagaaccggaagcgaggaaagaacgaggctgacgacgacaagcgcgagcacgtcttcaaggaagacgggcaggagtacgcgcaggtgacccggatgctcggcaacgggcggtgcgaggccatctgcgtcgatggcacgcgccgcctctgccatatccggggtaagatgcacaagaaggtctggatcgcgg

SEQ ID NO: 30821 - DNA, 213 bp, Zea mays
gagatgatcgctatcttgagcaagtgcatgtccaatgaaatccactgtatcatcacttaaaccatattttgctataagttctctagttgtcaccctagtaaggtctaatccttgatgtgtccttggatcagcttcattgtaatcttggacataaatgaagaagttccttgctctgcgcttctcgaatagacccatcaaaggggacttcagagc

SEQ ID NO: 30822 - DNA, 304 bp, Zea mays
ggaccgtggcatgcgtgtaggacggcggagaagtcgaacatcccgtggagggagatgacgaaggaagtgctggagtcggacgtgtacgaggtgttcgagagaatccaagacccaaacctcgtgtaccctgactactatctcaacccgtttcatgcctacgacgaagggaatctatcatggctggctgcaacagaggccgagcctgcaacaatgtcgatcgcaaagagggccatacctgaggctacatcaatcgaagaggccaaccaaatcgtccgcggcaactggctgaatgtaattgaggagc

SEQ ID NO: 30823 - DNA, 307 bp, Zea mays
cggacgcgtggcgagacgcgtgggtgacttcccacgctgctgtggtcgcacgtgggtgggggaaatgctgcgtctcgggatgctcaggcattcgcgtaaacgatgcggagaagctcgtgacgatcggaggccatgtgctgcgcgaaggtgagtggctgtcgctgaatgggtcgactggtgaggtgatccttggaaagcagccgctttccccaccagcccttagtggcgatctgggaactttcatggcctgggtggatgatgttagaaagctcaaggtcctggctaacgccgatacccctgatgatgc

SEQ ID NO: 30824 - DNA, 307 bp, Zea mays
gccatcatggagatcgttcatgggctcgtagggttggtgaggtctccggtctctgcaactcttccacagattggatccaggttgttccttacgtggggtgtcttgtggagttttcctgagacccagtcacaccttcttgttactaccctggtcataagctggtctatcactgagatcatcagatactctttctttggaacgaaggaggcatttggctttgcgccttcctggttattatggcttaggtacagcacctttatgttgttgtatcctactggtatctctagtgaagttggtctgatctaca

SEQ ID NO: 30825 - DNA, 307 bp, Zea mays
accacgcgtccacccacgcgtccgcggaccgtggcgaatcagaaaattccccaccaaaatctcctcaccctgaagtcccgaagctcgcggaaggccgagatgtaccatcccacgagaggcggcgtccgcggcggcagagatcaattcaaatgggacgatgtgaaggttgacaagcatcgggagaattaccttggtcatagtgttaaggctccggttggtagatggcagaaaggaaaggatctttactggtatactcgggataagaaatccgacacggaagatgctcttaaggaagaaatcaggagag

SEQ ID NO: 30826 - DNA, 301 bp, Zea mays
cggacgcgtggcgtgacgcgtgggtcagtttgatgagcccactcttgtcctcgaccttgattctgacacattggctgcaatctctgctgcatacgcagaacttgaatctgtactttctggattgaatgtgcttgttgagacttactttgctgatgttcctgctgagtcctacaagaccctaacatccctgagcagtgtgactgcttatggttttgatcttgtccgtggaacccaaactcttgggcttgtcacgagtgctggtttccctgctggaaagtactctttgctggtgttgtggatg

SEQ ID NO: 30827 - DNA, 304 bp, Zea mays
gagattggctggatctatggttcagttacagaggatattctgactgggtttaagatgcactgccgtggctggagatccatctactgcatgccggtgagacctgcattcaagggatcagccccaatcaatctttccgatcgtcttcaccaagttctccggtgggctcttggttctgtcgagatcttcttcagtcggcactgcccgctgtggtacggttacggtggcggccgtctgaaatggctccagaggctctcctacatcaacaccatcgtgtacccgttcacttctcttcctctcgttgcct

SEQ ID NO: 30828 - DNA, 303 bp, Zea mays
ccgaaagagagtattttgctgttccaaggaatctgaaactgcttgctgttccactgtttgaactctacgacaatgttcagaggtacgggcctgtcatctctaccatcccgcagcagctttctaggttccagttcaacatggttagctcttagggtgatgatacaagaaaaccaatgtggccaaggcagctcttcggttgctgagctagctgatcaacgtaccctgactgattttatttcattgtgctggatttttttatatagactactactatctagacatgcatttctgattgtattgttg

SEQ ID NO: 30829 - DNA, 305 bp, Zea mays
gcctatgaagcagcgccagggcctgttggaacggaagtaaagcctgttaacgaagatcaagagcgtagttcatccgatgcactgctcatgtctgaccactttgtgtttccgccgagtgaacacgagaacctgccaatacaaaccagttttgatgagatacatgctgagaaggatgtgcagaaacctagtaccagtgtggaggattatagtatcaagaatgatgttgggtctgagagagttcagtttgacgatgaagggaaacacctctcagatgatgatgtggagatgaaagatgacacccctgg

SEQ ID NO: 30830 - DNA, 301 bp, Zea mays
cggacgcgtggtgaagatatgggtcctcgatcttttcctgtcaaggaggttcacaaaatagcagtaatagatattaggttagctaatgctgatcgtcatgctgggaatattctagtgtgcaaggagggagaaggtggcaactacaagctgattccaattgatcatggttattgcttgccagagaagtttgaagatgttacatttgagtggctctactggccccaagcccgtgagccattcagtgatgaaaccattgaatacatcaaatcacttgatgctgaagaagacatcaagcttctca

SEQ ID NO: 30831 - DNA, 301 bp, Zea mays
ctggagtacaacatctcgcaagctatctactgtgatgaactgaaagaacttacagtatggtggaaggatttccaatcacatatagatatgcgcttcacgcgggacagattggtggagcttcatttctggatgctcggagtgatacatgagccatattactcgtattcgcggatcatgatgaccaagttctacatattcgcaaactttttcgatgacctttacgacaactatggcaccacagaggagagcgatgtcttcaccgcagccatggaaaggtgggatgaacagatcgctcatcaac

SEQ ID NO: 30832 - DNA, 293 bp, Zea mays
cggacgcgtggcgagacgcgtggggtaaaactggcattttgtagtgataacccacttgcataccaggatggagacaaaactgagtggagttactacaaggtggtcatcccccttgctcaactgcgatcaattaattcatcaacaagcagaacaaatgcagcagagaaatacattcaggtggtttctgttgataaccatgagttttggtttatgggcttcgtttactatgacagtgcggtgaagaatctgcaggaagcacttcaggaggctcagaatttacgtgcttagtgatg

SEQ ID NO: 30833 - DNA, 300 bp, Zea mays
acgcaccagtacaggtccgggacctgggagtggggactgattaaccaagacaaaaacaagtacaataaacccaaatacacatttgttacccgatttaccaacaaggacatcacagcacaaatcatctctgctagtatagcaggtgatatggttcttgcttctgcttactcgcatgagttgccacgatggtcttgaagttggtctgaccaactatgcagctgcctactgcactggccttctgttggctcgccgtgtgctcaagaaccgtggtttagataaggcatatgagggcaatgttga

SEQ ID NO: 30834 - DNA, 308 bp, Zea mays
gagacgcgtggcggacgcgtgggcggacgcgtggggccgagttggaccagtggaatggctgaaaccgaccactgatgagactattattgagattgggcagaaaggggtaaagagcctgcttgctgttcccattagttttgttagcgaacacattgaaactttggaagaaatcgatgtggagtacaaagagttggctttggaatctggcatcaagcactggggacgggttccagcactaggttgcgaacccacattcatttcgtatcttgctgatgctgttattgaaacctaccttatgttggcgcatg

SEQ ID NO: 30835 - DNA, 163 bp, Zea mays
cccacgcgtccgcccacgcgtccggggcgcccaacatcaacgtgttccgggacccgcggtggggccgcgggcaggagacccccggcgaggacccgacgatgaccggcaagtacgccgccgtcttcgtccgcggcgtgcagggctacggcctcgccggccccgt

SEQ ID NO: 30836 - DNA, 310 bp, Zea mays
cggacgcgtggcggacgcgtgggctttctcagaggtgggttggcttctcctcccccaccggttcgtgtacaggttctggtacgtgggcgagagggaagagatggcggcgtcggacgttgagtaccgttgcttcgttggcggcctcgcctgggccaccgacgaccactccctcaacaacgccttcagcacctacggcgaggtcctcgagtcgaagatcatcctggatcgggagacgcagaggtcccgcggcttcggcttcgtcaccttctccacggaggacgcgatgcgcacggccatcgagggcatgaac

SEQ ID NO: 30837 - DNA, 328 bp, Zea mays
  unsure (1)..(328): unsure at all n locations
ggcgctcgtgtccatgaaccacgacacgcagtcctgcatggaccccaacgtcatggaggccaaggtcgtggtcagctcctgcggccacgacgggcccttcggcgccaccggcgtcaagaggctccaggacatcggcatgatcagcgccgtgccggggatgaaggcgctcgacatgaacaccgccgaggacgatatcgtgcgcctcacgcgcgaggtcgttcccggcatgatcgtcaccggaatggaggtcgccgagattgacggcgcccccaggatgngcccgacgtttggcgccatgatgatctccggccagaaggcggcgcacctg

SEQ ID NO: 30838 - DNA, 291 bp, Zea mays
cccacgcgtccggccaggggcgccggcagggccgcgctcgcggagtcccttcaggtcgccgggcacgccagcaagacctccttctccgccgggaggatgtcggtcaaggacagcaagccgaggcccctgtcgcgtacctcgaggccgccgcgccaggacagatgaacctgtcgttccccaaggccatgcggtggtgggagaaggggctgcaccccaacatgcgcgaggtcgagtccgcgcaggacctcgccgactcgctgctcagcgccggcgacaaactcgtggtcgtcg

SEQ ID NO: 30839 - DNA, 334 bp, Zea mays
cggacgcgtggctcggcagtcggcacgcaggctagcagcacagcagcagccagagccatcccctctcctcgctacgcttcgcttcctcggcgccgattcctcctcctcctcctccaccctcgtccgtcccgttccggcgcgcgagctcgcccgagatggcgaacgcgagatcgggtgtcgctgtgaacgatgagtgcatgctgaagtttggcgagctgcagtcgaagaggctgcaccgcttcataactttcaagatggacgacaagttcaaggagatagttgtggaccaggtcggggatcgcgctaccagctacgatgacttcacaaacagcct

SEQ ID NO: 30840 - DNA, 187 bp, Zea mays
gagagagagacggaaagggggagatgagccggagcctggggatcccggtgaagttgctccatgaggcagcgggtcatgtggtgacggtggagctcaagaccggcgaagtgtaccgggggtccatggtcgagtgcgaggataactggaattgccagctcgagaacattaccttcaccgccaaggttgg

SEQ ID NO: 30841 - DNA, 323 bp, Zea mays
cggacgcgtgggtgaagacactcactggcaagacaatcacccttgaggtggagtcttcggataccattgacaatgtcaaggccaagatccaggacaaggagggcatcccaccggaccagcagcgcctcatcttcgccggcaagcagctggaggatggccgcaccctggcggattacaacatccagaaggagagcactctccacctggtgctccgcctcaggggtggcatgcagatttttgtgaagacattgactggcaagactatcaccttggaggtggagagctctgacaccattgacaatgtgaaggccaagatgcaggac

SEQ ID NO: 30842 - DNA, 234 bp, Zea mays
cagctgccattgccatctactgacctgtgacctccgcatttccaaacagcgcgagcgagctagagctagcagagcggcaggcacctccctcctcaaggaacatggctcgcacgcagcagttggcagtagtggcgaccgccgtggtagccttggtgctgctggctgcggcggcgacctctgatgcggccatcagctgcgggcaggtggcgtcggccatcgcgccctgcatctcct

SEQ ID NO: 30843 - DNA, 327 bp, Zea mays
  unsure (1)..(327): unsure at all n locations
gccatggcctccctctcctctgccgccgtcaccgccccttccttcgccgcaccagcgccagcccgcgccgtggtcagaaggaggtccttcaccgtgcgcgcctctctccgcaaggccaccggcaccgccgccgtggcaatggctgccagcgccctgcttgccggcggtgccatggcccaggaggtgctgctgngcgcaggcgacggcgggttgttcttgacccagccgatttcagtgtagagggggagacactatcttattcaagaacaacgccggcttcccgcacaacgtcgtcttcgacgaagacgatgtgccgagcggcgtcga

SEQ ID NO: 30844 - DNA, 318 bp, Zea mays
gctgaggagctgatcctcaccggcgtcgccatcgtaatcgccttggacagcggcaccagaacctctgcctccgcaggtgcttgctggtatcattacaatctggtagttttagtggttgggcttgacttcctactattcagaaacacagtaccgagaagtctttaggtggggtcaaagatggtgtcgctgaagttgcaaaagcgccttgccgcgagctacctcaagtgtgggaaaggcaaggtgtggcttgacccaaatgaagttagtgagatctccatggcaaactcgcgccagaatatccggaagttggttaaagat

SEQ ID NO: 30845 - DNA, 326 bp, Zea mays
  unsure (1)..(326): unsure at all n locations
ggacgcgtggccgccgccgaatccgagactctgatctcgggttcaccgcagcgcacagagcacccccgactcccgtcccgatccgcgctctcctctacgacgcttcagtcatggcaggaatggcacccgaaggttctcagtttgatgctaagcactatgattctanaatgcaggagctgctgagcactggtgagactgaggagttcttcacttcatatgatgaagtttttgacaattttgatgacatgcgccttcaagagaatcttgtgagaggcatttatgcatatggttttgagacaccactgcaattcagcagagaggaattg

SEQ ID NO: 30846 - DNA, 163 bp, Zea mays
gagattggagggaggctcctgcccaaggcaagagaaaccgcggcgcgcggagaccggaggaagggcagacgcagacgcagacgggcgaacaagatgagggagatcatcagcatccacatcggccaggccgggatccaggtcggcaacgcctgctgggagctct

SEQ ID NO: 30847 - DNA, 333 bp, Zea mays
  unsure (1)..(333): unsure at all n locations
gcgaccgtcatcacataaaaccagtgcaagcagaagcagcgcaatggcgagcacaccatggccctctccgccacagccttcgccggcaagcagtgaacgtgccgtcgtctctcttcggcgaggccccgtgaacatcggcaaaacgcgggcgaggccaaacccgccggcaggttccggaagcccttgtgtaagccccgacgcgcgggctctacctgggccctctgtccggcgcgcccccgaggtacctgacgggcgatttcccgggcgactacggctgngacaccgcggggctgtcggcggacccggagacgttcgccaagaaccgggagctgg

SEQ ID NO: 30848 - DNA, 357 bp, Zea mays
caccaaggagagtacgtggaggagcagccatggcttcatcggtggccgccgcggcgagcacattcctgggcacccgcctggcggacccggcgccacagaacgggcgcatcgtggcccggttcgggttcgggttgggcggcaaggcgaactgactccgaagaaggtggcgaagacatcgacctcctctgaccggccgctgtggttccccggcgccgtggcgctcgactacctggacggctcgctggtcggcgactacgggttcgacccgttcagtctcgggaagctcgtagagtacctgcagttcgaattggactcggctggaccagaacctggccaagaatgaggccgcggcatcat

SEQ ID NO: 30849 - DNA, 362 bp, Zea mays
cagaccaccaaacaagtgccagcgccctctcgcagtcgccgcaatggagagcaccttcatcatgatcaagcctggcggctccagatgggcctcattggtgagatcatcagccgttttgagaagaagggcttctacctcaaggccttgaagcttgtcaacgtggagaggtcgtttgccgagaagcactacgccgatctcgcctccaagcccttcttccagggcctcgttgactacatcatctctggccctgtggtggccatggtctgggagggcaagagcgtcgtcacaactggccgcaagatcattggcgccactaaccccctggcttctgatcccggcacaatccgtggcgactttgctgt

SEQ ID NO: 30850 - DNA, 314 bp, Zea mays
gcggagtggcagatgtttcagagaaaaaagtagaagttcaagaccagaatgaagtgtgtgggatgcactcacgacaagaggaggaggcagcaattaagaaaaagtatggaggaatattgcccagaaagactccacttatatctaaggatcatgaacgtgcttactttgattctgctgattgggctctaggaaagcaaggtggtgttcccaacaagcctaaaggtcctcttgaggcactccgacccaagcttcagcctacgcaacagaatgcccgcgcccgccgaacttcatatgcgtctgctgacagtgacgac

SEQ ID NO: 30851 - DNA, 387 bp, Zea mays
gattcgtcaagtggcccaaggtcgtgcgcatccagcgcacggcgcatcctcaagcagcgcctcaaggtgcctccgcgctcaaccagttcacccgcaccctcgacaagaacctcgctaccaacctgttcaagatgcttcttaagtaccggcccgaagacaaggctgccaagaaggagaggcttctgaagagggcccaggctgagaatgaaggaaaaactgttgaatccaagacaccaattgttgtgaagtatggccttaaccatgtgacttacctcattgagcagaacaaggctcagctcgttgtcatcgctcatgatgtggatccgattgaactggtctgttggcttccagcgctgtgcaggaagatggaggtcccatactgcattg

SEQ ID NO: 30852 - DNA, 267 bp, Zea mays
gatgtgggctctcgaatatgatcctggcatttgctccacttatgaagaggataatactggggctgtggtccacaaaattgaaggaaaggtaaaatcaatacgtcagtttggtaagtacgagagggagaatatgaagaagagggcaaacgatggtgatggacctgtccctatttcggtcttcctggttgctagtgtcctaaaagagaacagtacaaagcttctgcaagaggctcgagggattgatgacattattaggatattgaataa

SEQ ID NO: 30853 - DNA, 264 bp, Zea mays
  unsure (1)..(264): unsure at all n locations
ccaagacctcctcagacccgagaagcgcagtgcgtgccatggacgccaccggcactggagctggagggaaggcgaagaagggagcggccggccgaaggccgggggccgaggaagaagtcggtgacgaggtccgttaaggccgggctccagttccccgtcggccgcatcgggcgctacctcaagaanggccgctacgcgcacgcgtcggcagcggtgcccgcgtctacctcgcggccgtcctggagtacctcgcgctgaagtctt

SEQ ID NO: 30854 - DNA, 310 bp, Zea mays
  unsure (1)..(310): unsure at all n locations
ggacgancattcatcaagaacatgatcactggtacctcccaggctgactgtgctgtccttatcattgacttcaaccactggtggttttgaggctggtatctccaaggatggccagacccgtgaacatgctctccttgcgttcacccttggagtgaagcagatgatttgctgctgcaacaagatggatgcaaccactcccaaatactccaaggcacgttatgaagagattgtgaaggaagtctcatcctacctcaagaaagttgggtacaaccctgataagattgcctttgttcccatttcttgttttgag

SEQ ID NO: 30855 - DNA, 315 bp, Zea mays
cggaggggcggtacgcgtggactcttggatgatcagctcccaagaaatgatcggcataacaactacggttggtgaagctctaatggcaccaaccttcatctatgttaagcaggtgcttgagattattagcaaaggtggtgtgaaaggactagcccacatcactggtggtggctttactgacaatatcccaagagtattcccctccggatgcggggcaaaaatttttactgggtcatgggaaatacctccaatcttcagttgccttcaacaggctgggaacattgatgtcacgcagatacggggaacattcaatat

SEQ ID NO: 30856 - DNA, 260 bp, Zea mays
acacggacgaggtggcggcgggcggcggcgccgtgacgctgcacatggacggcggcgtggacctgacgctgccgatggagaacacgctgatccacagcagcgccacgccgctggcgtgcctggccatggccgaggcgccgcagaacgtgaacgccgtcgtgaacgtggtggccaaccttcagcagcagaacgtgcgggtcgtcgtcgacgtcgccggctcgcgcgtcgggttcgcgagggagccctgcaactgaacccct

SEQ ID NO: 30857 - DNA, 260 bp, Zea mays
ggtttccaggttgtgagattgctggcatacatcagtgataaagacctgtttgccgagttctataggaagagacttgccagaagattacttttcgacaaaagtgctagatgatgagcatgagagcagtattctgacaaagctcaagcaacagtgcggggggcagtttacttccaaaatggaaggcatggttacggaccttactgtcgctaaacatcaccaaactaagtttgaagagtttgtagctgggcatccagagttga

SEQ ID NO: 30858 - DNA, 358 bp, Zea mays
cgacgctcctggtaccaccacgacaacttcatgccgttcctggtcagggtgaacagcctggagggaacttcatctacgccaccaggaccgtgctgttcctgcgcggcgacggcacgctggtgccggtggccatcgagctgagcctgcccgagctccgggacggcctgatcaccgccaagagctccgtgtacacgcccaagtcgaccaccggcgcgtaggcgtggatgtggaacctggccaaggcctacgccaacgtgaacgactactgctggcaccatctcatcagcaactggctcaacacacacgccgtgatggagccgttcgtgatcgccaacaaccgggagctcagcgtgacgca

SEQ ID NO: 30859 - DNA, 268 bp, Zea mays
cccacgcgtccgtgctcgcctcgggtcaaaccctaagcagggagttgatttatccgctgcagccatgagtaagttgcagtctgagtctgtcaaggatgccatctcccagattgttggggatgccaaggagaagaataggaagttcactgagactgtggaacttcagattggtctgaagaattatgatccacagaaggacaagcgtttcagtggctctgttaagttgccccatatccctcgtcccaagatgaaggtgtgcatgcttggt

SEQ ID NO: 30860 - DNA, 411 bp, Zea mays
  unsure (1)..(411): unsure at all n locations
agttcatccagtgaccgtactatcaaggtttgggatctacagacaggtttctgcaagagcaccataatgtccgcgagcaaccccaactcgctagctttcatcgatggtgacaccatctgttcgggtcacagggatgggaatcttcggctgtgggatatccgcagtgggaaatgcaccacacagatagctgctcatctggatgtcacctcggtctgcgtgtcacggagcaggaattttgttcttacaagtgggagagataacgtgcacaacctttttgatgttagaacgctggagatttgtggaacattcagggccatgggcaacagagtggtgagcagctgnggcaaaccttctattagccctgacgagaactgcatcgctgctggttcttctgatggatctgtgtacata

SEQ ID NO: 30861 - DNA, 262 bp, Zea mays
ggtttccaggttgtgagattgctggcatacatcagtgataaagacctgtttgccgagttctataggaagatacttgccagaagattacttttcgacaaaagtgctaatgatgagcatgagagaagtattctgacaaagctcaagcaacagtgcggggggcagtttacttccaaaatggagggcatggttacggaccttactgtcgctagagatcaccaaactaagtttgaagagtttgtagctgggcatccagagttgaatc

SEQ ID NO: 30862 - DNA, 236 bp, Zea mays
ccgaatctaatatattggaatgaggttcttcaatacttgggattgcgacgatagtttagaaggaagcctctctcctgatatgtgccagttaactggtctgtggtactttgatgtgaagaacaatagcttgacgggtgcaataccagaaaccatacggaactgtacgagctttcaggtcttagatttgtcaaacaatcatcttactggagaaatcgcgttcataattggtttcctgc

SEQ ID NO: 30863 - DNA, 336 bp, Zea mays
caaacacttgcgccgccgctgcctcacaggtaaggccgccatggtctccggttcgggcgtgtgcgcgaacatacgtggtcgacgcgcgccaccacatgctgggccgtctctcctcgatcatagccaaggagctgctcaatgggcagaaggtggtcgtcgtccgctgcgaggagatctgcacgtcgggcggcctcgtccgtcagaagatgaagtacctccgcttcctccgcaagcggatgaacaccaagccgtcccacgggcccatccacttccgcgcccccgccaagatcctgtggcgcaccatccgcgggatgattccgcacaagaccaagaggg

SEQ ID NO: 30864 - DNA, 339 bp, Zea mays
cccacgcgtccggctgctactgctgctgcgtgcagggctgtgatggcgacgaagaggagcgtgggcaccctcggcgaggcggatctgaaggggaagaaggtgttcgtgcgcgccgacctcaacgtccctctcgacgacgcccagaagatcaccgacgacacccgcatccgcgcctccgtccccaccatcaagttcctcctcgagaagggcgccaaggtcatcctcgccagccacctgggtcgtccaaaaggtgtcaccccaaagtacagcttgaagcctcttgttccacgcttgtctgagctccttggagttgaagtcgtgatggccaatgattgcatt

SEQ ID NO: 30865 - DNA, 324 bp, Zea mays
cggacgcgtggcgagacgcgtgggcggacgcgtgggattatatttggctttaatgtcagagcaccaggaacagttaaaaacactgctaagaagacaggtgttgaaattcggatgtacaaagtgatctatgatttgattgatgatttacggaaggccatggaaggtcttctcgaacccgctgaggaggaagtaccaattggttcggcaaaagttcgagctgtctttagtagtggcagtggaaatgtggccggatgcatgattacaacaggaagagttgttcaagattgtaatgtgcgggatcttcgtaaaggggaagaagtatat

SEQ ID NO: 30866 - DNA, 309 bp, Zea mays
gcaagccccaatctcgccgtcaccacccccaatccagcaaacgcgaacccgatatcgccgccgccgccgccgccgccgcgatgtctcgccgctatgacagccgcacgacgatcttctcgccggaggggcgtctctaccaggtggagtacgcgatggaagcgatcggcaacgccgggtcagccctcgggatcctagcggccgacggcgtggtcctcgtcggcgagaagaaggtgacctccgagctcctccagacctcgcgctccgccgagaagatgtacaagatcgactcccacctggcgtgcgcgtggc

SEQ ID NO: 30867 - DNA, 278 bp, Zea mays
cccacgcgtccgcgataatccgccggcgttgagatgttggtttatcaggatctcctatctggcgacgagctcctgtcggattcattcacctacaaggagctcgagaacggcgtcctgtgggaggtcgagggaaagtgggtcacccaaggtcctgttgatgtggacattggtgccaatccatccgccgatggtggtgaggacgaaagcgttgatgacacagctgtgaaggtggttgatattgttgacacattccgtctacaggagcaacctccctttga

SEQ ID NO: 30868 - DNA, 272 bp, Zea mays
cttggagaagaggaaagaaagaggtcgcttggagaagaggaaagaaaaataccgacaagacgagaagtcgaagtacccgttaccgccgccgcctctcgcctagccgccggagaagcgccgctcgctcaggaggacagccatggcgccggagccggaggatgatattatgaacgagaagaatccccgcccgctcgacgtagatgacatcgcgctcctcagaacctatggactggggccgtattcgaccagcattaagaaggtcgagaaggaga

SEQ ID NO: 30869 - DNA, 316 bp, Zea mays
cccacgcgtccgattaaaagcgcagaacctgcattcagtgttttggtgtcaaggttcttccttggggagacgtttccaattccagtatatctttctcttcttccaatcattggtggttgtgctctagctgctgtcacagagctgaactttaatatggttggatttatgggtgccatgatatccaaccttgcatttgttttccgcaacatcttctcgaagaggggcatgaaggggaagtccgtcagtggcatgaattactacgcttgcctgtctaatatgtccctggtcatactgactccaattgctatagctatgg

SEQ ID NO: 30870 - DNA, 248 bp, Zea mays
  unsure (1)..(248): unsure at all n locations
aaccgcccacgcgtccgcggaccgtggcgacgtggncccgataagaggcggcagtacgatacatcaggatttgatgcaatcgaatctgatagtacggaactggagctggacttgtcgagtctcaacactgtaaacacggtgtttgcagctctttttagtaagcttggtgtgccaattaaaacaactgtttcagctacagttttagaggaggcattgaatggttcggttatggtttctcaactccagct

SEQ ID NO: 30871 - DNA, 317 bp, Zea mays
cggacgcgtggtggtgctgctcactgggtacatgaagaacgcagaggttgcgctggacgccctctcaatatgcctcaacatcaacggctgggagatgatgatttccatcggctttctggcggcaaccggagtacgggtggcgaacgagctgggagccgggagcgcgaggagggccaagttcgccatctacaacgtggtggccacctcctccatcatcgggtccgtgctgttcgtgctgttcctcctcttccgcggaggcctcgcctacatattcaccgacagccaggcggttgcggacgcatcgccggcctctcgcc

SEQ ID NO: 30872 - DNA, 265 bp, Zea mays
  unsure (1)..(265): unsure at all n locations
cccacgcgtcctagctgcagtcaccactcccaagccagtaggcgcagtcctacgagcagtcgcacgcaagtgtcaagagacaaaacggtcgacatggctcgcacgcaatctgccgtagcggtcgccgtggtggccgcggtgctgctgctggcagcggcggcgacgacctcggaggccgccatcacctgcgngcaggtgagctccggcatcgcgcgctgcctctcctacgcccgcagcgacggggtcctgcacctccgcgtcctgc

SEQ ID NO: 30873 - DNA, 294 bp, Zea mays
  unsure (1)..(294): unsure at all n locations
ggacgcggcacgcatgcgcgccgagctggccagtggcgacgtggccgtgtgccccgagggcaccacgtgccgggagcccttcctgctccgcttctccaagctcttcgcggagctcagcgacaggatcgtgcccgtggcgatgaactaccgcgtggggctcttccacccgacgacggcgcgcgggtggaaagccatggaccccatcttcttcttcatgaacccgcggcccgtgtacgaggtgacgttcctgaaccagctcnccgcagatgcgacgtgcgcggcggggaagagccc

SEQ ID NO: 30874 - DNA, 293 bp, Zea mays
gttggttttgattatcgtcttcatatggctgtcgcagacaaatggattgaacttctgaagcaaagtgacgaatattgggaaatgggtgacatcgtgcacaccttaacaaatagaaggtggcttgaaaagtgtgtcacttattgtgaaagtcatgatcaagctcttgttggtgacaagacaattgcattctggttgatggataaggatatgtatgatttcatggctctggacaggccttcaacgcctcgcatcgatcgtgggatagcattacataaaatgattaggcttgtcac

SEQ ID NO: 30875 - DNA, 282 bp, Zea mays
atcaaatcaaatcagatctctccacccccagcccatccatggcgatcgtgtacgccctggtcgcgcggggcacggtggggctggccgagttcgccgccgtctcgggcaacgccggcgccgtggcccgtcggatcctcgagaagctgccgcccgacgccgagtccaggctgtgcttcgcgcaggaccggtacatcttccacgtcctccgatccgacgccgccggcatcaccttcctctgtatggccaacgacaccttcggaagaaggatcgctttctctacct

SEQ ID NO: 30876 - DNA, 319 bp, Zea mays
  unsure (1)..(319): unsure at all n locations
cccacgcgtccgcggacgcgtggcgacgacggagcgtacgcttacaacggcggcgacgcgccggagccgtacgggtccacgggacccgcaccgaagccgggctcgggatccgcgctgtttgatgactacgggaggtccattggctcagctgccgataggggtggccgtgggggtagcgcggccagccccaaggtggtgagggccgtgcccaaggcagagacatcagaggacgtcaggggtggggtgcagaagttcagggtcaagctgctgccggagggcgctgngagcccatggatgtgctctgtcaggttggtctgga

SEQ ID NO: 30877 - DNA, 317 bp, Zea mays
ttactacaatagttgcaggaacatttggctatcttgcaccagagtatatgcaatttggcagagccaccgagaagactgatgtctacagttttggggttttggtactcgaaatactcagtggaaagcggcctactgatgcatccttcattgagaagggactaaacattgttggatggttaaattttcttgctagtgagaaccgggagagggaaattgtcgacctgaactgtgaaggagtgcagactgagaccttagatgccctgctctctcttgccaagcaatgtgttagctcctcgccagaggagaggccgacaatg

SEQ ID NO: 30878 - DNA, 184 bp, Zea mays
gtcagaagactttatgttcagggcaaagagatcaatggtgctggtatcaatgctagctttgctgttcaccaggatgttgatggaagggcaacagatgtagctctagggtggtcagtagctttaggttctcctttcacatttgctactactctagagcaggagtaccggagtgacatttttggcg

SEQ ID NO: 30879 - DNA, 268 bp, Zea mays
gctcctcctcgcgattccaatccacgcacgcctcctccgcttccgcctcgctcaggcttatagtcagtgatggaacacaaggaggcgggctgccagcagccggagggcccaatcctatgcatcaataactgcggcttcttcggcagtgctgcgacgatgaacatgtgctccaagtgccacaaggagatgataacgaagcatgagcaggcccagctggctgcctcctccatcgatagcattgtcaatggcggtgacggcgggaaggacc

SEQ ID NO: 30880 - DNA, 314 bp, Zea mays
ggaagctccgtgcgttagtcaagcgtggtgctaactgttatggtcgttatatgcctcgtatggttataattcctccaggagttgaattcggccaattgattcatgattttgatatgtatggagatgaagataaccaatctccagcctcggatccatctatttggtttgagataatgcggttcttcacaaatcctaggaaacctatgatttgggctattgctcgtccatattctgaaaagaatattgcaacacttgtgaaggcatttggtgaatgccatccgttgagggaacttgctaaccttacactgataatg

SEQ ID NO: 30881 - DNA, 321 bp, Zea mays
gaccattactgctggatgagaccagaggacatcgactacaaaaggccagtcaccgagtgtcactcttgctcagatctagcgtctgaaatggctgctgccctggctgcagcttccatagtgttcaaggacagcaaaacctactccgacaagctcgtcaaaggcgcaaaagccctgtacaagttcggaaggctgcagcgcgggcgatacagccccaatggatctgaccaggcaatcttctacaattccaccagctactgggacgagtttgtgtggggtggtgcgtggatgtactttgccacagggaacaattcatacctcacg

SEQ ID NO: 30882 - DNA, 200 bp, Zea mays
gcagatgatttgctgctgcaacaagatggatgcaaccactcccaaatactccaaggcacgttatgaagagattgtgaaggaagtctcatcctacctcaagaaagttgggtacaaccctgataagattgcctttgttcccatttctggttttgagggtgacaacatgattgagaggtccaccaaccttgactggtacaaag

SEQ ID NO: 30883 - DNA, 181 bp, Zea mays
cccacgcgtccggcttcgcttccaagatgcaccgaggctctccctctccgtgcgaatgccgcttccgaggacacatcggcctccggcgacgagttgatcgaggacctcaaagcgaagtgggacgccgttgaggacaagcccaccgtcctctgttacgccggcggcgcgtcgtcgccctagg

SEQ ID NO: 30884 - DNA, 178 bp, Zea mays
ggacctgggcggtggcaaccgtggcggcggctacggcaactccgacgggaactggaggaactgagcggtggggcccgcgcggccaagttatcctgttcgctaccgtgatgtttaccctagtccagagggtttatcttcgttcgtctcgtttgttgttgcccatctgtgtttttgattg

SEQ ID NO: 30885 - DNA, 290 bp, Zea mays
gtgctactcttcgaacgcggaaaagtacttcaacgatgcaggtgtgcagacggcattccatgcgaatgccagtggagctcggaaatgggaagtttgcagtgattcaattttgaggtcatacaatttctcggtgctttctgtcttaccaatctactctaagctcatcaaagcaggactgagagtgtggctctacagtggggatgcagatggtaaggtcccggtgatcggatcgcggtattgcgtggaaccctgggcctgcgtgtcaagacgcgtggcgagcatggtacctg

SEQ ID NO: 30886 - DNA, 317 bp, Zea mays
gtcacgtcaccgttcgaggagctgcacggggcgactctgttccacgagagcatggggagcctcgacgcagatttccacgacatggcgagcgaggccttggacgcccacgacaacttcggcatcgagatagctatgcgggagttcagggacttgttcgaggggatccagtccatgacctactgctgcggtaacttcggtgatgacaagggtgccagggccattgtcaaagccttcccacacataaaatgcactgtgctggcccctcccaagatcattgccaccaaaccggccgatggagcgatgataaactatgtcga

SEQ ID NO: 30887 - DNA, 161 bp, Zea mays
cacatcctgcgatcctcgaagcctccgccgagcatcgatcatgtcggcctactgcggcaagtacgcggatgagctcatcaagaatgctgcctacatcggcacccctggcaagggtatccttgctgctgatgagtcaactggcaccattggcaagcgccttt

SEQ ID NO: 30888 - DNA, 316 bp, Zea mays
gaagcagaagtggaaggaagcaggcggccaccatggtgaagggacgcacgggacagcgcgtcaggctctacgtccggggcaccatcctcggatacaagaggtccaagtcgaaccagtacgagaccacgtcgctcatttagatcgagggggtgaacaccaaggaggacgtcgcgtggtacgctggcaagcgcatggcgtacatctacaaggctaagaccaagagcagcgagacccgctacaggtgcatctggggcaaggtcacccgcccgcacggcaactcgggcgtcgtccgcgccaagttcaagtccaacctccc

SEQ ID NO: 30889 - DNA, 192 bp, Zea mays
atgatgcagaccttggtccagtgatcagccgacaggaagaggatcgtatctgtaaattagttcaaagtggtgttgacagtggtgctcgtatattgcttgatggaagaaagatagtggttcctcgctatgaagatggagattttgatggccccaccattctggctgatgtaaaagtgacatggatgttacaag

SEQ ID NO: 30890 - DNA, 306 bp, Zea mays
gatcttgacccacaacagcaagggcatcaactaccagatcctttccaacccggagttccttgcagagggcactgctattgaggacctgttcaagcctgacagagtgctcatcggtggccgggagacccccgagggcaggaaagccgtccaggctctcaaggatgtgtatgctcactgggttcccgaggacaggatcctcaccaccaacctgtggtccgctgagctctccaagcttgccgccaatgcgttcttggcacagaggtctcctctgtcaatgccatctcggctctctgcgaggcaacggga

SEQ ID NO: 30891 - DNA, 312 bp, Zea mays
accaagaagctcaaaggccagcagcatcggccaccaagagatgcaccggtatcttggtatgcaactgatgctttggagacgatgaagaagtatggagctatatatttaagtccattttcacaccgtttggcagaagatattgataatccagagctccagagattgagatgcagagtgaattaccatgcactacgattcaagccaaatatcatgaaaacaagcagtgagatagtgaacaagctccgctcagaaggccatttcatgtcaattcatcttcgatttgagttggatatgcttgcatttgcagggtgc

SEQ ID NO: 30892 - DNA, 313 bp, Zea mays
gttgccaaacagctatttgtcagatgagctttgtgccatttcctcattagaagtatatcattcgatccattggggatctgtgaaccatgtacctgtttatgtaactggttaccagtgttatccatctatctatctatctgagaagactcaagtcttcacgcggaccaggtaagcagcagcaggaaccctagcaccgccgcatccgcagccatgggtatcgacctcgttgccggtgggaggaacaagaagaccaagcgcacagcgccgaagtccgacgatgtttatctcaagctccttgtcaagctctaccgtt

SEQ ID NO: 30893 - DNA, 311 bp, Zea mays
aagagttcttcttgtttaggcaaaggcaaaagcaggagcaaaaaggtttcgttggcgatggcgagctcgtggacgcttcctgaccacccgaagctccccaaggggaagccggtggctgtcgtcgtgctggacggatggggcgaggccaaccccgaccagtacaactgcatccatgtcgctcagactcctgtcatggactcgttaaagaatggtgctcctgagaaatggagactagtgaaggctcatggaacagctgtgggtctcccatctgatgatgacatgggcaacagtgaagttggtcacaatgcact

SEQ ID NO: 30894 - DNA, 155 bp, Zea mays
cggacgcgtgggtagggcggcaacatcaccctgttccgggggctcctgtactgggtggcgcactgctaggggtccaccgtggcgtgcttcctgctccgcttctcgacgggcgggcaggccacgggcaccgtcgggctgacgggcgtgtcggtgtg

SEQ ID NO: 30895 - DNA, 326 bp, Zea mays
aagaaaggaagttatgatcacttcatgcaaaaagaaatccatgaacagccacattcgttgaaaacaacaatgaggggtagattgaaggatggtggggttgttctaggtggactgaaggaatatctcaagacaattaggcgctgtagaagggtggtatttattggttgtggaacaagttacaatgctgccttagctgcaagaccttttgtggaagaactgactggtattcctgtgactatggaggttgcaagtgacttgctggacagacaaggtcccatctacagagaagacactgcagtttttgttagtcgatctggggagacagc

SEQ ID NO: 30896 - DNA, 318 bp, Zea mays
  unsure (1)..(318): unsure at all n locations
caacggtccgcgaccgtgggtttctttctttcttttctgtgtatgtatgtaccatgtaatgtatagtatagatcgatttcattgcattaacgcatgtttggttcccaaccaaacatgccttaatgcaatgaaatcgatctatactatacattacatggtactgcagctgtcgggagcaggcaatggcgccggatctaagcgaactcgccgccgccgctccagcccgtggcgcctacctcgccggcgtcggtgtcgcggtcctcctcgctgacatgttnctcccagtagcccggtcgtcctgcgtgcgagataactcat

SEQ ID NO: 30897 - DNA, 331 bp, Zea mays
cgtatcccgcagtacggccgaatccgggtcgaccacgaccgcacgagccgcgaccgtggcgacgtggtcaggacgcgtggggagacgacggcggccatggcgacctccttccaggggacgaccaccacgtgcaccgccagcgacaagacggtgtaccttgtggacaagctcaccgccgacaaccgcatctaccacaaggcctgcttccgctgccaccactgcagaggcaccctcaagctcgccaactacaactccttcgatggagtgctctactgcaggcctcacttcgaccagctgttcaagaggacagggagcttggacaagagcttcg

SEQ ID NO: 30898 - DNA, 329 bp, Zea mays
cccacgcgtccgcccacgcgtccgcccacgcgtccgttcttttctgcttccagacattgtccacgagctagtgcactggtgtcgctcgcaaccaaattaaggactgaggcatggcatccaagggcgtcctcttcttggctctcaacctcctgttcttcacagtggccaacgcctgcggcagctgcccgaccccaacgcccccggtcgagccaccgccgccgcctcctgctaccccacccccttcatcctccagtgggaagtgcacgctgaacgcgctcaagttcggcgtgtgcgtcaatgcgctcggcctcgtcaaaggcgaggctggc

SEQ ID NO: 30899 - DNA, 339 bp, Zea mays
cccacgcgtccgcccacgcgtccgtgcttatataccaagggaaaattctcaaggatgagaccactttggaaagcaacggagttgctgagaacagcttccttgttataatgttgtccaaggctaaggcatcgtcgagtggagcttctaccactactgctgcaaaagctcctgcaactctggcccaacctgctgcccctgtgccccctgctgcatcagttgcaagaacaccaacacaggctcctgttgccacagctgaaacggcacctccaagtgcccaacctcaggctgctccagctgctacggttgctgctactgatgatgctgatgtgtacagtcagg

SEQ ID NO: 30900 - DNA, 319 bp, Zea mays
  unsure (1)..(319): unsure at all n locations
gggcgctggatccgcgggcggcggtgaatcgcgtgcgggctgacgtgagcgctgagcgggattcgcggcgggggcagtctacgctccactcttaatagttgtagagatacttttataaaagtactttttatgacaaattgacgcatataaatatcaggttccaaaaactanataacaaaatagttatttgtagtcaaaattttataagtttgactcgaaccttatccagaacgacaactaataggaaaccggagggagtacgtgacgaaacaccaccattttaagaccgacggagaaccacatggacatggggcgtgtt

SEQ ID NO: 30901 - DNA, 317 bp, Zea mays
gtggatgatgaagccaccaagcctgagggatggttggatgatgaacctgaggagattgatgatcctgaggcagccaagcctgaggactgggacgatgaggaggatggtgaatgggaggcgccaaagattgacaaccccaagtgtgaagaggcacctggatgtggcgagtggaagaggccaatgaagcagaatcctgcttacaagggcaagtggcatgcacctatgattgacaaccccaactacaagggaatctggaagcctcaggagatccccaaccctgagtactttgagcttgacaagcctgactttgatccaat

SEQ ID NO: 30902 - DNA, 323 bp, Zea mays
cgagtctcgtccacccgtcatcctcctagctcctctactcgccagtcgccatgggcaagattaagatcggaatcaacggcttcggaaggatcggcaggctcgtggccagggtcgccctccagagcgaggatgtcgagctcgtcgccgtcaacgaccccttcatcaccacggactacatgacctacatgttcaagtacgacaccgtccacggccactggaagcacagcgacatcacactcaaggactccaagacccttctcttcggtgacaagccggtcaccgtctttggcatcaggaaccctgaggaaatcccgtggggtgag

SEQ ID NO: 30903 - DNA, 311 bp, Zea mays
ggaaatctgagagggactttgatgcgttttctgaaggctagagaatggagtgtgcctaaagcttataaaatgctaatggattgcttaaactggagagtacagaatgagattgacatcgtgttagctaaacccattctgccatctgatatatatagagttattcgggacacgttacttgttggattgacagggtactccaagcagggacaacctgtttatgcatttggtgtgggtcttagtactttcgacaaggcctcggtgaactactatgtgcaatcacacatacagatgaatgaatatcgagatcgtgt

SEQ ID NO: 30904 - DNA, 323 bp, Zea mays
  unsure (1)..(323): unsure at all n locations
cggacgcgtggcgagacgcgtgggcggacgcgtgggcggacgcgtgggcggacgcgtgggtgctgctagtggacatattgggnaagcctttgagtaattcaccaaaatctaagagagtggactaaagcttgatgtgtacatttacgaaacattgttgagagcatgttgcaaatcaggaagaatgcaaagtgccttagcagttacacgagagatgagctttcagaagataccgaggaatacatttatatataatattttgattgatggttaggctcagagaggagatgtctgggaggcagcagatttgttgaaacaaatgaaag

SEQ ID NO: 30905 - DNA, 327 bp, Zea mays
cccacgcgtccggacacgcgtccgcggacgcgtgcgcgggcggacaaggagcaggcggaggaggagttgtgccaagccacaatgggtatctcgcgtgactcgatgcacaagcgccgagccaccggtggaaagcagaaggcctggaggaagaagcgaaagtatgagcttggtcgccagccagccaacaccaagttgtcaagcaataagacagtgaggagggtccgtgttcgtggaggtaatgtgaaatggagggctcttcgccttgatactggtaactactcatggggaagtgaagctgttacccgcaagacccgtatcctcgacgtg

SEQ ID NO: 30906 - DNA, 327 bp, Zea mays
atcagagccatcccgttcaagagcaggtcttaagctgccgtggccgtgccgagacatgccagtccgaagaacgggcgtcttcctgtgatgtcttcttgtctgcccacgcctagtttctctgtcgattcctattcgtcgtctcttcagggctggtgctcactgctgcgccgttctgttaaccgaaacaagaactctgtgtattcctgtaccgagctgtgcatgttttttttttctttccatcgtggagaatttaagttattatccgtttgctgcacagtttgccgtctcattttatgcgttgggatgttggcaagaaaaggcagatgt

SEQ ID NO: 30907 - DNA, 314 bp, Zea mays
gtttccgcgcgcgagatcgccgccccgggtgggctctagatcccgatggcctcgcgccgccgcaccctgctcaaggtcatcatcctcggcgacagcggggttgggaagacgtctttgatgaaccaatatgtgaacaagaagttcagcaaccagtacaaggctacgattggggcggatttcctcaccaaggaggtgcagttcgaggacaggctcttcactctgcaaatatgggacactgctggtcaggaaaggtttcagagtcttggcgttgcattctaccggggagcagattgttgtgtcctagtctatgatgt

SEQ ID NO: 30908 - DNA, 315 bp, Zea mays
ggcaactgaatgtttccagaaagctgctgatgtggaacctgcaaatgagctgtacaggaagtcattagacttgtcagcgaaggcacctgaactgcactcggagatccacaggcaaatggcttctcaagcggcaacacaagcatcctcagcctcaaatccaacgcaatcaaggaagaagaagaagaagaaggacagcgagttctggtacgatgtttgtggatgggtgatccttggcgcgggcatttgtgcttgggttggattggcaagagcaagcatgcctcccccaccggcaccagccacgtgaagctgatcgag

SEQ ID NO: 30909 - DNA, 245 bp, Zea mays
ataaaaccagtgcaagcagaagcagcgcaatggcgagcagcaccatggccctctcctccacagccttcgccggcaaggcagtgaacgtgccgtcgtctctcttcggcgaggcgcgcgtgacgatgcgcaagacggcggcgaaggcaaagccggcggcgagctccggcagcccgtggtacggccccgaccgcgtgctctacctggagccgctgtccggcgcgcacccgagctacctgacgggcgag

SEQ ID NO: 30910 - DNA, 263 bp, Zea mays
  unsure (1)..(263): unsure at all n locations
accacgcgtccgcggacgcgtgggtggaacctcaagagcgccgccagcaccgccgccgacaggccgccgcctgcaactgcctcaagaacgccgccangggcgtcacgagcctcaacgccggcaacgccgccagcatcccctccaagtgcggcgtcagatcccctacaccatcagcacctccaccgactgctccagggtgaactaaaacctagaccacgcgcgacgacggccgcctgatcgatcgaccaaccattccgccgtcg

SEQ ID NO: 30911 - DNA, 322 bp, Zea mays
accagatccagcgggacctggccatgaacaagttcgactgggaccacccgatgcacctgcaaccgacgagccccacggccattaagcaggtgagctgcgtgtgggacgcgtacgaggccaccaagggcgcccacggggtgtgcatcctgaccgagtgggacgagttcaagaccctggactaccagaagatcttcgacaacatgcagaagcccgccttcgtcttcgacggccgcaacatcgtcgacccggagaagctgagggagatcggcttcatcgtctactccatcggcaagccgctcgacgcctggcttaaggacatgcc

SEQ ID NO: 30912 - DNA, 273 bp, Zea mays
cggacggtgggcgcatggtctacatctgggacacaacatcaaggcgcatcctgtacaagcttcccgggcacaacggttctgtcaatgagactgctttccatcccacagagccgatcattggatcttgcggcagcgacaagcagatctatcttggggaactttaagtgactatcagttccttttcagctagatgttcttgtgacactttgatgaggagaggaggcactgacaccctgttcctttgcctgagagatggaacactcagtttggctg

SEQ ID NO: 30913 - DNA, 304 bp, Zea mays
gtccgtaagatgcttatccgcgatcctacaaagaggttcactgctcatgaggttttatgtcatccatggattgttgatgatgctgtcgcacctgataagcctattgattctgctgttttgtcaaggctgaaaaacttttctgcaatgaacaagctcaagaagatggcattgagggtgattgctgaaagtctatctgaggaggagattgggggtttgaaggagttgttcaaaatgatcgatactgacaacagcgggacgataacttatgatgaactgaaggatggtctgaaaagggttggctcgg

SEQ ID NO: 30914 - DNA, 303 bp, Zea mays
cccacgcgtccggagttggtcttcttggataatgaaatcgtgttcaatgaggccatcattgaggagagggatcagggaatacaagagattcagcaccaaatcactgaagtaaatgaaatcttcaaagatctcgctgtgctagtccatgatcaaggagcaatgatagatgacattgattcccatatagagaacgccgttgtagcgacttcgcaggctaaaggccagctttcaaaggctgctaaaactcagaagtcgaactcttctctgatatgcttgttgctcgttattttcggagtggtcctg

SEQ ID NO: 30915 - DNA, 337 bp, Zea mays
atagccgcagtacggtcggaatccgggtcgaccacgcgccgccacgcgtccgccacggccgccacgcgtccgtctccttcgacatccgcggcacaagactaggccacaaaatcgcggtagcaagcagcagacaggtggggaagatgtcgtcgctgcggaatgcgatcccgcggcgcgctcacaaggagcgccccagccggagcgatggaagaagtttgggcttttggagaaacacaaggactatgtcgtccgggcgcgagcataccacatcaaggaggcaaccatcgctaaactgaaggaaaaggcggcattcaggaatccggatgagttctatttt

SEQ ID NO: 30916 - DNA, 307 bp, Zea mays
acaaagctgcgtgatacaagagagtcacggattaatgaaccgattctctatgtgaagatgcaaattgcagctattaatcttgagaaaggaaaccaaaaagagtgcaagaattcgttggaggatgggaaaaccaccctggatagtatgactgatgtcgatcccacagttcatgctagcttttactggatatcatctcaataccacaagtcatgccaagaatttgcagagttctataagaacgctcttctctatctggcctacacaactgtggagtctctatctgagtcattcaagctagacttggctt

SEQ ID NO: 30917 - DNA, 300 bp, Zea mays
cttcctgctgcgatggggggcgagacgcacctgagcgtgcaggagctggcggcgtcgctgggcgcgctaccgccggagttcgtgcggtctgagcaggaccagccgggcgcgaccacgtaccgcggggccgccgtgccggacgcgccggtgatcgacatatcggagcccgggttcggcgcgcgcatggccgcagccgccagggagtgggggctgttccaggtggtgaaccacggcgtgccgtcagcggcggtggcggactccagctcgtcgggcgagcttcttggcgttccggcggaggag

SEQ ID NO: 30918 - DNA, 309 bp, Zea mays
ccgacccactcgcccaaaaccgtagcgccctcgcctgctcgccgccgccgtcgttgcgagctccccatcttcctccgttaaccatggcgacccagatcagcaagaagaagaagttcgtcagcgacggcgtgttctacgccgagctcaatgagatgctgacgcgggagctcgcggaggacggctactccggcgtggaggtgcgtgtcacaccgatgcgcacggagatcatcatccgcgcaacgcgcacgcagaacgtgctcggcgagaagggccgcaggatcagggagctcacgtctgtggtccagaaga

SEQ ID NO: 30919 - DNA, 309 bp, Zea mays
caccaaagttattcatgattgtaaaagggacagtgaggctttgtattttcagtttggcataaaactgcataatgtgatggatacacagattgcttattctctgatagaagagcaggagcaggaaggaaaaaagatgacatctgatgattacaattacatatcttttgtcagccttcttgctgataaacgatactgtggcatactatatcctgaaaaggaagaagtccgtacccttctaaggcaggaccctaacttttggacaattaggcccttgtctgatatgatggttcgagctgccacagatgatgt

SEQ ID NO: 30920 - DNA, 262 bp, Zea mays
cggacgcgtggcgcgacgcgtgggcggcccagcccacggggatggtgctcagccgctgctccgtcaacggcatcgacgagtacatgtcgctgtaccgcgagaggcccggcgtgcaccacgtctacctgggccgcccgtggaaggagtactcccgcaccgtgtacgtcgggtgcacgctcgcggagatcgtgcagccgcaggggatggatgccgtggaacggggacttcgcgctccagacgctctactacggcgagtacgaca

SEQ ID NO: 30921 - DNA, 292 bp, Zea mays
cacgttcccaagccagccattggttggtagcgagccaagctggtcaagttagctttatgtacccgctcccgctcttcttccctccgacgaaggcagctgacgacacagcaggctagcttcggagttcggagcactcagccatggccattgccggcgctctcctcctcctgctcggactcctcgcgcgggaggccgctgccggcgggtggcagagcgcgcacgccacgttctacggcggcggggagccgtccggcacaatgggcggcgcttgcgggtacggcaacctgtacag

SEQ ID NO: 30922 - DNA, 267 bp, Zea mays
gttctagatcgcgagcgccttttttttttttttttttttttttgacatcactaacaacatcagaggagcgagcttgcggtcaaaaacacagatgggcaacaacaacaatgaacacgaaacgaaacaaacggacacgagacgaccacagacgaagataaaccccctctagactagggtgaacacggtagcagaagcgaacaagataactaggcctcagcggaccccaccgctcagttcctccagttcccgtcgttgttgccgtagccg

SEQ ID NO: 30923 - DNA, 300 bp, Zea mays
gcagattttgatttgtgtaagatgctaaaatggagaagaaaagttagagaagataaagcagttacttctccaggcaatgcttgtaaatatgtggctccagaagtcctgcgaaatgaagagtatgataccaaagtggatgtcttctcattcgctctgatacttcaggagatgattgaaggatgccttccttattatgataagaaaaatgatgaaattgagaaggcacataattctaaagaaaggcctccttttcgagctcctccaaagcattatgcacatgggttaagagagttgattgaa

SEQ ID NO: 30924 - DNA, 294 bp, Zea mays
gggcaagtacgccggcgactccgacctccagctcgagcgcatcaacgtctactacaatgaggccggcgggggccggttcgtcccgcgcgccgtgctcatggacctcgagcccggcaccatggactccgtgcgctccggcccctacggccagatcttccgccccgacaacttcgtcttcggccagtccggcgccggcaacaactgggccaagggccactacaccgagggcgccgagctcatcgactccgtgcttgacgtcgtccgcatagaggccgagaactgcgactgcctcca

SEQ ID NO: 30925 - DNA, 301 bp, Zea mays
ctagttctagatcgccgccgaaatcccgttgcgtctctcgcgcgttaccaagctctcaagttttctcgcgccgacggcaatggatgaggtcaccgaggccgtgaacaacctcaacatctcgggcgtaggggccgcgggcgttgccggggcggaagggcacaagaagaatcgcatccaggtctccaacactaagaagcccctcttcttctatgtcaacctcgccaagaggtacatgcagctgcacaacgaagtagagctgtcggccctcggcatggccattgcgacggtggtgacagtagca

SEQ ID NO: 30926 - DNA, 313 bp, Zea mays
agcagtagagggcggcggctgcctcctcttcctacccgcgtccgagctcgcccccttcctcgccaccttgggaggcgacgagcatcaccaggacaccaggttgcctatattttcttccccttcttgaaaatggatcatagttctgacgaagatacagaaatcagtgattctgagattgatgattatgaaggaaaaatttatgcaagactgatgtcaggagatttaaaattaaataagaatggagaaaattacatttgtcccttctgtagcagcaagaagaagaattacagtaaaagtagcctggttcaacatg

SEQ ID NO: 30927 - DNA, 286 bp, Zea mays
  unsure (1)..(286): unsure at all n locations
atagctcagcagttggttcaggctggaaatcagcaaacttgctataaaatctacagagattaccgtgcttcagcactagaggtgagccttcggaagttaggagtggaaaaacttactaaagatgatgtacaaaaaatgcaatgggaggctttggaggctaaaattggaaactggatacattttatgcgaatcgcggtcaaattattactagcaggggaaagaanaatctgtgatcagatttttgatggtgtgaattttaacaagggccattgttttgctgaactca

SEQ ID NO: 30928 - DNA, 291 bp, Zea mays
gcgtatcctaccaggagggtgggagacccagggagcggaggtgtgcgaactcgcctcgcaccacgcgctgcggcctgcggggcgagagatcggggcctgagctagggtctggtggcggagatgtcgacgccggcgaggaagcgcctgatgcgggacttcaagcgcctgcagcaggacccgcccgccggcatcagcggcgcgccgtacgacaacaatatcatgctctggaacgccgtcatattcgggccggatgacacgccgtgggatggaggcacgttcaagctgactctg

SEQ ID NO: 30929 - DNA, 294 bp, Zea mays
gaccaggccgaagaaaacaatcctgaaaccaagccatgggtctgcaggaggaatttgaggagcatgctgagaaggcaaagaccttgcctgagaacacgagcaatgagaacaagctgatcctatacgggctctacaagcaagccacggttggagatgtgaataccgatcgtccgggcatattctaccaaaaggacagggccaagtgggatgcctggaaggctgttgaaggcaaatcgaaggatgaggcgatgaatgactacatcaccaaggtgaagcagctccaggaggaggctg

SEQ ID NO: 30930 - DNA, 341 bp, Zea mays
aagacagtacaataagattctttgacttttcaagaaccaatgcgaggaaaacgttcagagttattcaagatactcataatgttagatctgtatgttttcatccttgtggggattaccttttagcagggactgatcacccagttgctcatttatatgatataaatacttttacatgctacttatcagcaaatgcacaggattctagttctcccattaaccaggtacgctactcttgtactgggagcttgtatgagactgcttctaaagatggttctctgcgcatttgggatggagtatctgctgaatgtgttcgacctattattggagcacatggatcatca

SEQ ID NO: 30931 - DNA, 329 bp, Zea mays
cggacgcgtggcggacgcgtgggccagctataatcatgtgtctccttaacaaaggggcaaatgtgtcacaactgacagcatgatggcaggagcgcaattggtatttgtcggaggttaacaagagcaaaagactacaatacaaagatggagcagggtcaagaatcaaataaagataggctgtgtatagatattctagagagggagatgatgcggaatcctatggcggtggaagatgccgtcacctcgcctttgttggcagatgatcttcacatgaagcttctctagcctgataacagagttgcatgtgctagattgttctgtcctgctga

SEQ ID NO: 30932 - DNA, 327 bp, Zea mays
cacgcgtgcacgggcgggcaagcaccagaaaggagaggcggaggccgcgcggcaggcgccagctgcagccaagagcccactagtagtagtagtagctagttcaccaccgcctgcttgcctcctttactttgccatatttgctagcgtttcctggattggggacgcttccgtttcgggaagccgtgaagggatcggccacgacgatggtgcgggggaagacggagctgaagcggatagagaacgcgacgagccggcatgtgaccttctcgaagcgccgcaacgggctgctcaagaaggccttcgagctctccgtgctctgcgatgctg

SEQ ID NO: 30933 - DNA, 330 bp, Zea mays
cccacgcgtccggttttgttctagaaggctatggtgagtcaattaactacaggatgggactgccattgctcaaggatgttgtccagtcaatggaagaagcaatcatagctagagaagaaaaccgtgctgatggtacgtttgaaaaggcaaggctccgatttgcacatgcagaaactgttgttcctttcagctgccttcttggtctttttcttgaaggtccagaaattgagaagatacagagagaggaagcattggacctaccccctttgccgccacaaggaagaaactggcaaggcagtggtgttgcgccttttgctggtaacaatatgc

SEQ ID NO: 30934 - DNA, 235 bp, Zea mays
gctggcttctcctcctgctccggttcgggttcggtctcgtgatgttctccggggttcggtttcgtgggtgtgcggatcgagatggcggcgtcggatgttgagtaccgctgcttcgtcggcggcctcgcctgggccacggatgatcactccctccacaacgccttcagtacctacggcgaggtcctcgagtccaagatcatcctcgatcgggagacgcagaggtctcgtggcttcg

SEQ ID NO: 30935 - DNA, 300 bp, Zea mays
  unsure (1)..(300): unsure at all n locations
aganccctatgcactggaatttggtataagaattgatgaacgtcttgctgcagttgaagctcgtgttctgccaccaccaagacttaaataccatgatagtggccgagagaaggatgttttgcccagagttgggcaatggaacatgatgaataaggggatctcaaaagggtatgtgagactgaactcggattggtctcccagtgttgtctgactaaacatgtttttaagatgagcaagcagtaccttgcaaatgttgcactgcaaataaatgttaaggttgggggaaggaatactgtactt

SEQ ID NO: 30936 - DNA, 341 bp, Zea mays
attcaacttcactggtgctggaggagttgccttgtctatgtacaacaccgacgagtcaatccgagcttttgctgaggcttctatgacaactgcttatgagaagaaatggccactctaccttagcaccaaaaacacaatcctgaaaaaatatgatggcaggtttaaggacattttccaggaggtctatgaagctgactggaagtccaaatttgaggctgctggaatatggtatgagcatcgtcttattgatgacatggttgcgtacgcgcttaagagcgaaggaggctatgtgtgggcttgcaagaactacgatggagatgtgcagagtgatttcttagctc

SEQ ID NO: 30937 - DNA, 258 bp, Zea mays
cagcggctacggcaactccgacgggaactggaggaactgagcggtggggcccgcgcggccaagttatcctgttcgctaccgtgttgtttaccctagtccagagtgtttatcttcgttcgtctcgtgtttgttgttgcccatctgtgtttttgattgaaggtcgctctgtgtcagttgttagtgctgtgttcatcctcggctccagcagacccatgcatcaaccagcatggactgcggatcgatgggtgctgttacccc

SEQ ID NO: 30938 - DNA, 327 bp, Zea mays
cttttctgcttccagacattgtccacgagctagtgcactggtgtcgctcgcaaccaaattaaggactgaggcatggcatccaagggcgtcctcttcttggctctcaacctcctgttcttcacagtggccaacgcctgcggcagctgcccgaccccaacgccgccggtcgtgccaccgccgccgcctcctgctgctaccccacccccttcatcatccagtgggaagtgcccgctgaacgcgctcaagttcggcgtgtgcgtcaatgtgctcggcctcgtcaaaggcgaggctggcacaggtacagctgagccatgctgcaacctcatc

SEQ ID NO: 30939 - DNA, 329 bp, Zea mays
  unsure (1)..(329): unsure at all n locations
ctgaacatagcatggaaatgcatttgccctaccttgctaaagtatttcaaggacataatgtgaaagtcgtccctatccttgttggtgcacttagctcccaaaacgaagccttgtatgggcagctgctctccaaatatgtggatgacccaaaaaacttcttttccgtgtcgtcagacttctgccattggggatccaggtttagctacacatactacgaaaagaagcacggtgccatccataaatctatcgaggccttggaccgtatgngcatggagatcatagagactggcgatcccgtagcggttcaagaatacctgcaagagtacgag

SEQ ID NO: 30940 - DNA, 326 bp, Zea mays
  unsure (1)..(326): unsure at all n locations
gtgacctgcagtacggtcggaatccgggtcgaccaacggcgggaccgggcggaccgtgggtgggcgcagagaatccccaagcaaacaaacagggtagatggaggggagacnagaggagagcagatgttgggtctgggacaccatggctccgatgaagctgtacggggcggtgatgtcgtggaacgtgacgaggtgcgcaacggcgctggaggaggctggctccgactacgagatcgtgcccatcaacttcgccaccgccgagcacaagagccgcgagcacgtcgtccgcaacacgtgtggatcagttccagctctgcaggatggtg

SEQ ID NO: 30941 - DNA, 232 bp, Zea mays
  unsure (1)..(232): unsure at all n locations
tggaanagggcaagagccagaaggcatcaccgccgcgacgacgatggcagcctcgctccaagccgctgccaccctgatgcatccggccaagatcggcggccgggcgccctttgcctcgctgccgtcccgcccgtcgtcgcaactcgcctgctgggcgttcggcgtcgacgcggcgccgcatgatcacgtgtccctgcaggacgtcgctacatgtgcgcgacgcgcgaactcg

SEQ ID NO: 30942 - DNA, 343 bp, Zea mays
cggacgcgtgggtaggagtgtctgcaaataaagaataccaagctgcagattggagattgaggcccttcctaatgaaatgatcaaatatgctagagaggatacacactatctgctatatatatatgacctgatgagattgagactagtgaatgggtcatcatgtgaaaatgatcttcttttagaggtttgcaagcgcacacacgaaatttgcttgcaactgtatgagaaggagcagctgactgatacatcatatctacatatacatgggttgaaagaaaacaagctgaatgcaacacagctgtcagttctttccagtctatatcgatggagagatggcattgcc

SEQ ID NO: 30943 - DNA, 320 bp, Zea mays
  unsure (1)..(320): unsure at all n locations
gtcggatctgagacgagacgacccccccctcncctcaaccggaacttgttttaccccatctcatcccactgactccagncacccaccagcccgctgcctccgccggatctcgtcggactcggatccgcccgaccacgaccaccccgcgccgccgccgcgcacagcagcagatcagagaagatggccggactcgacaccttcctcttcacctcggagtccgtgaacgagggacaccctgacaagctctgcgaccaggtctcagatgctgttctggacgcttgccttgctgaggaccctgacagcaaggttgcttgcgagac

SEQ ID NO: 30944 - DNA, 314 bp, Zea mays
ggacctggtgagtggaccagtggagctatggatcctaggtgcaaaatcctgatattaatgggacagacagatttttctgcacctaagcataagcagcagtccatgattttagtggacatcaacactcctggggtgcagataaagagaccattgttagtctttggttttgatgatgcacctcatggacacgcagagattacatttgaaaacgtgcgtgttccagtaacaaatatcctgcttggagaagggcgtggttttgagattgctcaaggaagacttggtcctggacagttacatcattgcatgaggctagt

SEQ ID NO: 30945 - DNA, 198 bp, Zea mays
cagcatgcagattatttgatgcacttgtcagtctgtgtgttcctgttatagccagtgattacattgaacttccattcgaagatattatagactacaataaaatatcaatatttgttgggacaagcaaagcagtacagcctggatacttaacttcaactcttcgaagaatcagttcagagaggattctggagtaccagg

SEQ ID NO: 30946 - DNA, 191 bp, Zea mays
attagttggtgctcgccttattgcacatggtggaagtttgttaaatttggccaagcagcctggtagcacaattcagatacttggtgcagagaaggctttattcagagctctaaagacaaagcattctacacctaagtatggcctcatctaccatgcatccttaattggcaaggcttctcaaaagcacaggg

SEQ ID NO: 30947 - DNA, 194 bp, Zea mays
cccacgcgtccgttcacactgatgcaagcgctcatcaaggctgatttctggcttctatttttctcccttctgctgggctctggatctggtctcactgtgattgataatcttgggcaaatgagccagtcattgggttacgaggaaacccatatatttgtgtcaatgataagcatctggaactttcttggacgtat

SEQ ID NO: 30948 - DNA, 161 bp, Zea mays
ggccccgtcgcctgggtctactgctccgagatctacccgctgcggctgcacgcgcaggctgctgccatcggcacggggctcaaccggatcatgagcggcgccaccaccatgtccttcctctcgctctccaacgccatcaccatcgcgggcagcttctacct

SEQ ID NO: 30949 - DNA, 195 bp, Zea mays
acctgacggagcggctgttccaggtgctccgctggtccacgggctccctggagatcttcttctcccggaacaacccgctgttcgggagcacgttcctgcacccgctgcagcgcgtggcgtacatcaacatcacgacgtacccgttcacggccatcttccccatcttctacacgacggtgccggcgctgtcgttcg

SEQ ID NO: 30950 - DNA, 195 bp, Zea mays
ttccctcgtagcagcagcaccagtagagtctccttcctctccggcggcgatgtctgggcgcggcaagggcggcaaggggctgggcaagggcggcgccaagcggcaccgcaaggtcgtccgcgacaacatccaagggatcacgaagccggcgatccggaggcttgcgaggaggggcggcgtgaacgcatctccggg

SEQ ID NO: 30951 - DNA, 151 bp, Zea mays
cacatctcctcgcatttcttcccatccgatccccccttcgcaaccaaaaccccaactcgccccgcatcgatggcgcccaaggccgagaagaaacccgcggcgaagaagccggcggaggaggagcccgcggccgagaaggcgcccgccggga

SEQ ID NO: 30952 - DNA, 150 bp, Zea mays
gcagtcaccactcccaagccagtacccacagtcctacgagcagtcgcacgcaagtgtcaagagacaaaacggtcgacatggctcgcacgcaatctgccgtagcggtcgccgtggtggccgcggtgctgctgctggcagcggcggcgacga

SEQ ID NO: 30953 - DNA, 218 bp, Zea mays
cgggacctcacagactccctcatgaaaattctcactgagaggggttactccttcacaacctcagccgagcgagaaattgtaagggacatcaaggagaagctagcatatatagcccttgactatgagcaagagttggaaactgccaagaacagctcttcagttgaaaagagctatgagctacctgatggacaagtaatcaccattggtgcagagagatt

SEQ ID NO: 30954 - DNA, 218 bp, Zea mays
cttcgtactcgcctacctccgcggctcaaacctttcccccttctcccaattccctccgtcggccgccgctccatcccgtacgacgacaccatgagggagtgcatttcgatccacatcggccaggccggtatccaggtcggaaacgcgtgctgggagctgtactgccttgagcatggcattcaggctgacggtcagatgcccggtgacaagaccatggg

SEQ ID NO: 30955 - DNA, 186 bp, Zea mays
attggatatcaggctggaaaatttaccagaaattacctgattgaagagctcaatattcctgagtctcgattggtaccactaaatacaatccaggagtatgctgatgcccttaagcgtggaccaaaagatggtggtgttgttgcaattgtggaggagtgcccctatgtggagatcttccggtcatac

SEQ ID NO: 30956 - DNA, 297 bp, Zea mays
cggccatgccagcggcatcatgtgctcctacaaccgcgtcaatggcgtgccgacgtgcgccgactacaacctgctctccacgacggcgaggcaggactgggggttttacgggtatatcacctcggactgcgacgctgtggccatcatccatgatgcgcaaggctacgccaagacggcagaagatgcagttgcagatgtgctcaaagctggaatggacgtgaactgcggcagctacgttcaaggacaagggcgcctctgcgctgcagcaagggaagatcacggagcaggacatcaaca

SEQ ID NO: 30957 - DNA, 305 bp, Zea mays
  unsure (1)..(305): unsure at all n locations
cggacgctggncgagacgcgtgggccggagactttcgccaagaaccgcgagctggaggtgatccactgccgctgggccatgctgggcgcgctcgggtgcgtgttcccggagctgctcgcccgcaacggcgtcaagttcggcgaggccgtgtggttcaaggccgggtcccagatcttcagcgagggcgggcttgactacctcggcaacccgagcctgatccacgcgcagagcatcctggccatctgggcgtgccaggtggtgctcatgggcgccgtcgtagggtacgcatcgccggtggcccgctc

SEQ ID NO: 30958 - DNA, 184 bp, Zea mays
cccacgcgtccgctgctctcccccgcctcccggtccggcagcagagatcgagatccggaggccgcgagtaggagcgccaccaccagcgactgcggcaatggcgggcacggtgacggtcccggggtcgtcgaccccctccacgccgctgctcaaggacgagctcgacatcgtgctcccgacgatc

SEQ ID NO: 30959 - DNA, 179 bp, Zea mays
agcggatcgaaggaagcgctggtgatgtgttagaagatgaccctgttgggaggctcaaggtctatgtctatgatctccccagcaaatacaacaagaagctgctcaagaaggatcctaggtgcctgaaccatatgtttgccgctgagatcttcatgcacggtttcctgttgtcaagcgct

SEQ ID NO: 30960 - DNA, 198 bp, Zea mays
caaaacttgagcaattgtatattgacagtgccggcctaagtggtcccctaccgtcatcgttttctagactaacaagaatgaagacactgtgggcatcagataatgattttactggggaaataccagattatattgggagctggactaatttaacagaactgcggtttcaaggcaattcatttcagggtccacttccag

SEQ ID NO: 30961 - DNA, 307 bp, Zea mays
cggacgcgtggcgcaagtaccagaagagcacggagctgctcatccgcaagctccccttccagcgcctcgtccgcgagatcgcgcaggacttcaagacggacctgcggttccagtcctcggccgtggcggcgctgcaggaggccgcggaggcgtacctggtggggctcttcgaggacaccaacctctgcgccatccacgccaagagggtcaccatcatgcccaaggacatccagctcgcccgccgcatcaggggcgagagggcttgagctgtcgcgctgctgctgttcgtcgttgtaatgtctgaagt

SEQ ID NO: 30962 - DNA, 319 bp, Zea mays
cccacgcgtccggcgacccgccagccagacccgatcccctccctcgctagggttttcgtccccgcgccgccgcgctcccggatcccaccgaaacaaccatggccggcggtcacgcggcggtgtcgttcctgaccaacatcgccgaagtggctgcggggctcggagccgcggcctcgctcgcctccgcgtcgctctacaccgtcgacggcggcgagcgcgccgtcatcttcgaccgtttccgcggggtgctcacggagaccgtcggcgacggcacgcatttcctcgtgccctggctgcagaagccttcatcttcgacatc

SEQ ID NO: 30963 - DNA, 295 bp, Zea mays
attcaaagggtttggatgaaataagcccacttggtcccggatatatccttgatgttactccagagaagattgaaaaaatgttcttcgatccattggattttggcattcctcgctgcacattggaagatctgaaaggaggcgatccagcgtttaatgcaaaagttctccaggatgttcttgctggtcaaaggggggcgattgcagatgcccttgttctaaatgctgcggcgtccctacttgtcagtggtagagtgaaaaattacatgacggtgttgcttagcacaggagacacagc

SEQ ID NO: 30964 - DNA, 304 bp, Zea mays
cccacgcgtccgcccacgcgtccggtgctctacaacatgaaccaggagatccagacggaggacatcgacctgcccctcacccgcacccgccccgtcaagaaggtggccctcgtggtcctgaccggcgagcgcggcctctgcgggagcttcaacaacaacgtgctcaagaaggcggaaacccgcatcgatgagctcaagcagctgggcctccagtacaccgtcgtcagcgtggggaagaacggcaacgcctacttccagcgccgccctacatcgcgttggagcgcgatctagacgtgagcagcgt

SEQ ID NO: 30965 - DNA, 104 bp, Zea mays
gacaaaacggtcgacatggctcgcacgcaatctgccgtatcggtcgccgtggtggccgctgtgctgcttctggcagcggcggcgacgacctcggaggctgccat

SEQ ID NO: 30966 - DNA, 307 bp, Zea mays
actgacacggtccgcgacctgggactgtcgtgagattccttgccccctttccccttcaccatcgtcgcaaacctagcccacgcctcgccgccggcacgccggatcggtcggtgccatgtccaaggccagggtctacgccgacgtcaacgtgctgcgccccaaggagtactgggattacgaggcgctcaccgttcaatggggtgagcaggatgactatgaagttgtcaggaacgtcgggagacgaaaatacagtgaagtatttgagggtattaatgttaacaataatgagagatgcatcattaagatc

SEQ ID NO: 30967 - DNA, 269 bp, Zea mays
ctccgcgctagctcatgacggtacatcggcacagatgtgcgacgtacgacgacgacgacgcaggcgccacacatggcatcccagctctccgccgccgtgccccggttccactgcctccgttgctactccgcgcccaggtccgcggtggcagctctgccgtccgtgatggtgggcaggaagatgtcgtcgtcgcagggcgtccgctgcgactacgtcggctccgccaccaacctgatcatggtgacgacgactgacgctgatgctgttcg

SEQ ID NO: 30968 - DNA, 315 bp, Zea mays
  unsure (1)..(315): unsure at all n locations
caacggtccgggacctggctgacgcgtggcggagcgtcctcctcctcccgtctatagattcccctcctttacttcctccaagtataggggccatcagatccaagaagagggaagagcaccaaggaccttcggcgcccgttcaggatccacatcttcccgagcgagttcttggttgacctcttcccccttcggaccacctccaaggctcttggtgtagcttgccactctcaccaatcaagttttcatgtctgatctcgacattcagatcncaactgccttcgatcccttcgctgaggcgatgcatgggactctggt

SEQ ID NO: 30969 - DNA, 320 bp, Zea mays
  unsure (1)..(320): unsure at all n locations
gcagcagcagcacgaaaccctgtagtagcctgccatgactacgcgctgctgcctggtcgtcgccactctcctcgcggcgctgctctcggtcagtgccagcctcgagttcggtttctacaacaagacgtgccccagcgccgagaccatcgtgcagcagaccgtggccgccgcgttcaccaacaactccggcgtcgctccggcgctcctccgcatgcacttccatgactgcttcgtcagaggctgcgacggctcggtgctgatcgactccacggccaacaacaacgcggagaacgactcgatcnccaacagcccgagcctga

SEQ ID NO: 30970 - DNA, 263 bp, Zea mays
cccactcgtccgcccacgcgtccgatgtgccattgccatctactgacctgtgacctccgcatttccaaacagcccgagcgagctagagctagcatatcggcaggcacctccctcctcaaggaacattgcccgcacgcagcagttggcagtagtggcgaccgccgtggtggccttggtgctgctggcggcggcggcgacctcggatgctgccatcagctgcgggcaggtggcgtctgccatcgcgccctgcatctcctacgctc

SEQ ID NO: 30971 - DNA, 317 bp, Zea mays
ggcacagggtgaggctaagagcgctgagttgattggccaagccattgccaacaaccccgccttcctggctctgagacagattgaagctgccagggagatctcccacaccatggcggcctccagcaacaaggtgttccttgattccagggaccttctgcttggtcttcagcagctgaacgtgggggccaagcaaaagaagtgaagcgctcgtccccaggccatcgtggatgagagtagtttcaggcgatggttttatctgttacagaatgcgcgtgcgcgggaatgaacaaagtggcaccatgttgcagtctgtatgt

SEQ ID NO: 30972 - DNA, 309 bp, Zea mays
caacaatagcatcgccaaggtacgtagaacgtagccatggtgtcgtccggaactggaagcattgccaacaggtggcgcgagctccagggcgagaagtcgtggaagggcctcctggagccgctggacatggacctccgcaagtccatcatctcctacggcgagctcgtggcggccaccggcgacggcttcaacaacgagccgcactcgacgcacgttggcctctgcaagtacggccacgacgacctgctgaccaagtcgggagtggccgccgccagccactacaacgtgaccaagttcgtgtacgcgtgg

SEQ ID NO: 30973 - DNA, 285 bp, Zea mays
ctcactcactctcgttccatttcgccatctcccagatccaattcgcgagttctccctcctctgcggccatggcgctctctgtggagaagacctcgtctggacgggagtacaaggtcaaggatctctcgcaggcggacttcggccgcctcgagattgagctggccgaggtcgaaatgcccggcctcatggcgtgccgcgccgagttcggcccgtccaagcgcttcgccggcgctacgatctcggggtctctccacatgaccatccagaccgccgtcctcatcgaga

SEQ ID NO: 30974 - DNA, 312 bp, Zea mays
gggacctggcgaattggctacaaacttgtggcgaaaagggagttgaatgatccagagaatgcactatatcggtgcttttgctggcgccatcactggagctataacaactccccttgatgtcatgaagacaagattgatggttcagggacaagggaaccaatacactggaattgtaagctgtgctcagacaatcctcagagaggaaggccctaaggcattcttgaagggcattgagccgcgagtgctgtggattggcatcggtgggtccatcttctttggcatgctggagaaaaccaagtcgatgctagccga

SEQ ID NO: 30975 - DNA, 308 bp, Zea mays
gggaatgtgacagcgggagaagatggtgttgttaatgtcaatattactgacagccagatacctcttgctggaccccactcgatcattggccgagctgttgttgtccatgctgatccggatgatcttggcaaaggtggacatgagcttagcaagagcacgggaaatgctggcggacgtgttgcctgtggtatcattgggctccaaggctaaagcagttaacctccgaggcaaacaccatagaaggtcgaagcgagcacctcaggatgttgctgttccatttcccctgtattggcaacacaatttgagta

SEQ ID NO: 30976 - DNA, 310 bp, Zea mays
  unsure (1)..(310): unsure at all n locations
cggacgcgtggcgagcaggaggcggacaaggtaagcagcaatcgcaggaaccctagcgccgccgcacacgctagaatgggtatcgacctcgtcgccggtgggaggaataagaagaccaagcgcactgcgcccaagtctgacgatgtctacctcaagctcctcgtcaagctctaccgtttcttggtcaggaggaccaagagcaatttcaacgctgtcattctcaagaggcttttcatgagtanaaccaaccgaccaccaatctccatgcgccgccttgtcaagtttatggaacgaaacgagaagaacattg

SEQ ID NO: 30977 - DNA, 310 bp, Zea mays
atcaggatcatccatatgggctgctggttcacacaataaggatggcagtgaaggaaaggataatggggacgacctggaactgccagtatatgatttcgagacaatagcagcagccacagagggtttctcagctgagaacaagcttggtgaaggcggctttgggcctgtatacaacggtaagcttgaggatggacaagaagtagctgttaaaacactttcaagaacatcaagacaaggtcttgaggaattcaagaatgaggttttgttgatagctagactccagcatcggaatcttgttcgactagttgga

SEQ ID NO: 30978 - DNA, 299 bp, Zea mays
  unsure (1)..(299): unsure at all n locations
actgtatctgtcgaaaatgctgggctgctcgctttgacacgcgttggtagtagacgtgttgtgcagatttctgctggatttatgatattcttctcaatccttggtaaattcggggctgttttcgcatcaattcccggcccagttatcgcagctgtatactgtcttctcttcgcatatgttggtatggcaggtgttgggttcctacagttctgcaacctgaacagcttccgaacaaagttcatcctgngattctccttgtatatgggtctgtcggtgccacagtatttcaacgaatacac

SEQ ID NO: 30979 - DNA, 313 bp, Zea mays
agaagaagcaaaaagtaagattaagaatattctaagagaatatattgagaatgaagacatagatgaagcctttaggtgtataagagagctcagccttccatttttccatcatgaggttgtgaagcgtgctctcacctttggtatagagaacgtatcctcgcaaccatcaatccttaagttattgaaggaggcagctgcaagttgcttgatcagtcctaatcaaatctcaaagggtttttctagactagctgagggtgttgacgacttgagtcttgatattccttctgctaaagttctttttgacaagctggtt

SEQ ID NO: 30980 - DNA, 311 bp, Zea mays
caatctgggtattcaacaatggaataagccacaatgatgaagttgatactgtagctattgccccttttgtaaaggatgtattggacagtctggaatttgcaagggggagtgcagattcaacatggggctctgttagggctgcaatggggcaccctgaacctttcctggtcaaacatgtcgcaattggaaatgaagattgcgggaaaaagttctaccgtggtaattacctcaaattctacaatgctataagagaggcctatccagacattcagatgatttcaaactgtgatggttcatctagaccacttgac

SEQ ID NO: 30981 - DNA, 191 bp, Zea mays
atttctcctccgacggcggtgcggctagctcaaccatggcggactccaaggccacctcggcggtcaccctccgcactcgcaagttcatgaccaaccgcctgctggcccgcaaacaatttgtgcttgaggttatccaccccggccgcgccaacgtctccaaggcggagttgaaggagaggcttgccaagatg

SEQ ID NO: 30982 - DNA, 304 bp, Zea mays
gcagaagatgcagctgagaaccttttgttttcaaagacaactactgcaaaggtgtggttaattggggatggtctagatgcttctgagcagtttaaggcacagaaagggacacagtttatcccatattcacagtttccaccaagaatggcacgcaaggacacctgcacctactcgacaactcctgcaatggttgtacctaaaacactacagaatgtgcactcctgtgagaattggctgccaaggagggtcatgagtgcatggcgcattgctggaatggttcatgcattggaagggatggaacgag

SEQ ID NO: 30983 - DNA, 309 bp, Zea mays
cccacgcgtccggcccggcctcatggcgtgccgcgccgagttcggcccgtccaagcccatcgccggcgctaggatctcggggtctctccacatgaccatccagaccgccgtcctcatcgagaccctcaccgcgctcggcgccgaggtccgctggtgctcctgcaacatcttctccacgcaggaccacgccgccgccgccatcgcgcgcgactcggccgccgtgttcgcctggacaggggagaccctcgaggagtactggtggtgcatcgagcgctgcctcgactggggcgaagctggcggcccgacctc

SEQ ID NO: 30984 - DNA, 141 bp, Zea mays
acgcaaaaggcggtggtgcccttagcgcggtcgcagcaacaaaaagtcctgttatattcattggaactggcgagcacattgacgagtttgaagtttttgatgtgaagccatttggtagtcgcctgttaggaatgggagatt

SEQ ID NO: 30985 - DNA, 231 bp, Zea mays
agcatggttaccaccttggctaatggcacaatatgctcgttatgcggaggttgtctcaggtcactggaatcaacatgggaaacctgctgtgcagaatgttttgcataaggcatcagaaaaatcagcacaggcaaagaaatgggctgaacctcatatcgagactgctaagatgaaatggattcctgttaaacagaaattggttttcctcaagaaaaatgcagaaccttatgt

SEQ ID NO: 30986 - DNA, 320 bp, Zea mays
cggacgcgtggccgctacccaacgagcaatcaagaatggaagttctaaaaatccatgcagctggtatatcgccaagcatggggaaattgattatgaagcagtcgtgaaactagctgaaggtttcaatggtgctgatcttcggaacgtgtgcactgaagctggtatggctgcaattcgtgcagagagagattatgtagtccacgaagacttcatgaaggctgtgcggaagctaaatgatgcgaaaaagctggaatcaagtgcgcattacagcgcagattttggccaagagtaatgtatgatgctggacagatgcataaggc

SEQ ID NO: 30987 - DNA, 293 bp, Zea mays
gcaccccagccagccgtccttctactacgtgtccctcacggggctcaccgtcggctccaccagggtcgcgctcccgagctcggccttcgcgatccaggacgacggcacgggcggcgtcatcgtcgactccggcacctccatcacgtacctggagctgcgcgcctaccgcgcgctgcgtgaaggcgttcgtggcgcacatgtcgctgcccacggtggacgcctccgagatcgggctggacctctgcttccagggcctcgtcgtcgctgtcgatcaggacgtgcaggtgcaggtg

SEQ ID NO: 30988 - DNA, 311 bp, Zea mays
ggactacatccacgtccgggcgaggcgcggcgaggcgacagacagccacagcctcgctgagagggtgagaagggagaagatcagccagcggatgaagcttctgcaggatctcgtcccgggctgcaacaaggtggtcggcaaggcggtgatgctggatgaaatcataaactacgtgcagtccttgcaacggcaagtcgagttcctgtccatgaaactggccaccgtgaatccccagctggacttcaacaacctgcctaacctccttcctaaagatatgcaccagtcctgcggcccgctgcagaactcgcatt

SEQ ID NO: 30989 - DNA, 308 bp, Zea mays
ctgaatctggtctgatcaaggttgacttgagtggttgcaagaacatcacagatgtggctgtctcctctctggtgaagcgacatggaaaatctctgaagaaagtcagccttgagggttgcagcaagataacagatgctagcctcttcaccatgtctgagagctgcaccgagcttgccgagcttgatctttcaaactgcatggttagtgactatggtgttgccatgctggcatctgcacagcacctcaagcttcgtgttctctcactgtctggttgctctaaggttactcagaagagtgtgccgttcttg

SEQ ID NO: 30990 - DNA, 304 bp, Zea mays
gtttgagtttgctgagcatcatttcagaagggcatttcagataaatcctcgctcttctgttctcatgtgctatcttgggatggccttgcattctcttaagaggaatgaagaggcactggaaatgatggagaaagctatagcagctgataagaagaatccactgcccaagtatcagaagtccttaattcttctaggactaatgaagtatgaagaagctctggatgagttggagcggctaaaggagattgcacctcatgagagtagtatgtatgcactgatgggaaagatttacaagcaactcaat

SEQ ID NO: 30991 - DNA, 196 bp, Zea mays
cccacgcgtccgctccttcccgagcaggaggcggacaaggtaagcagcaatcgcaggaaccctagcgccgccgcacccgcaggaatgggtatcgacctcgtcgccggtgggaggaataagaagaccaagcgcactgcgcccaagtctgacgatgtctacctcaagctcctcgtcaagctctaccgtttcttggtca

SEQ ID NO: 30992 - DNA, 197 bp, Zea mays
aggagcagacgaggcttgagaacgagcgacggagacctagccgaagcaggagctccccatggcgaccggcaacctggcgagcgtggtggtggctgtagacggcagcgaggagagcatgaacgcgctgcagtgggcgctcgacaacctccgcctgcgccccgacggcgagctcgtcgtgctgcacgtccagccgccgc

SEQ ID NO: 30993 - DNA, 161 bp, Zea mays
agacaacctgatcaagaacgacggcttcgagatcggtccccaggtgctcaggaactcgacggtcggcgttctgctgccccccaagcagaaggacgcgacgtcgccgctgcccggctggatcatcgagtcgctcaaggcggtgcggtttatcgacgcggccc

SEQ ID NO: 30994 - DNA, 306 bp, Zea mays
gctggcggtgctgctggacaggttctttgacatggagtatgctgagtgcgtgaaagcttttgaagcttatgcaagtgctgcaaagcagatcgatgagctctgtgcattctatgcatggtgtaaagataccggagttgcaaggtcatctgagtacccagaggtgcagcgtgtcaccgataagttgctggagacgctggaagaatttatgagggaccgggcaaagaggcccaagagcccatcaccggagcctgaacctgagcctgtcaaggaagaacctgagccggatatgaacagcatcaaggcgct

SEQ ID NO: 30995 - DNA, 196 bp, Zea mays
cccacgcgtccgcccacgcgtccgcgacttcatcaaggtcagcgacgacgaggtggccttcctcacgcgcggggacgccaacgacgagaagaacgtgctgtccctgtggtttgacgggctcaagctgctcgtcgtcaccgacggggacaagggatgcaggtacttcaccaaggacttcaagggcagcgtgcccggc

SEQ ID NO: 30996 - DNA, 123 bp, Zea mays
ctttcctattcgcgccgccgccgctgctgaacgccactcgccgtcgtccgaatagtacactctaacgccgccatggggcgtatgcacagccgcgggaagggtatctcgtcgtcggcgctgccg

SEQ ID NO: 30997 - DNA, 216 bp, Zea mays
gacagatatgaaccagtgaatgaaccatctcttgataattgctttgtctcgacaagctatgatgccaccacacattttgagacaactgtaacagatgttctgaacatgtatacaatgatcaccggaaagactgtagaccttagtgtggatttgagtgctgctagtgctgccgaagaatactgatttcagtcatagtgtcatgtttatccaagatca

SEQ ID NO: 30998 - DNA, 301 bp, Zea mays
cccacgcgtccgccttgttgacatgaggggagctgacgctgatgatcgccagcttcgagatgatcttatgacaatgcttattgctggacatgaaacaactgctgctgttctgacatggtctgtttttttgctagcccagagccctaccaggatgagaaaagcccaggcagaggttgattctgttctcagcaatggggcaattactgtcgaatctcttaagaaactggagtacataaaactgattattcttgaagctcttcgcttgtatcctcagccaccattgttaatcaggcgttctctc

SEQ ID NO: 30999 - DNA, 305 bp, Zea mays
cacatccctcgagaagacgcctgctcctcgccgatcgatacgatggccgtcttctccgacctccacaccgccgacggcctcaagtccctcgaggctcacctcgccggcaaaacctatgtgtctggtgactccattactaaggatgacattaaggtcttcgccgcggtgccgtcgaagcctggcgctgagtttcctaatgccgcagctagtacgagaccgctctgcggctgtagcatcagattcctggtaagctgtggtgtaatctgcctcggatcactctgcgcactgctcctcggatagctgag

SEQ ID NO: 31000 - DNA, 311 bp, Zea mays
  unsure (1)..(311): unsure at all n locations
cgagacgtggncgagacgcgtgggcggacgcgtgggctcagaattccaaccaaatgggcaggcaccgatctctagcacggacaagcaagtcccagcacaggtgaaccattccggtgacgtcaacacgttcgcggtgcctcggagactagagacagagagataccacacgtcgtcaatgacttccgggttgccgccagaaacgccatcaaagcaggctttgatggagtggagatcacgcggcaaacgggtactgttcgatcattcatgaaggacagcacaatgacgagacgactctacgggggcacttggag

SEQ ID NO: 31001 - DNA, 325 bp, Zea mays
cccttgcccacttctacagcccctctgctgcagcaagaaggaaagaagctagcgcttatagcttgtcagccatggccaccgccgccgcgtctagcctcctcaagtcctccttcgcgggctcccggctcccggccgccacgcggaccacaccggcgtccctcgtggtggccaccggaccgcgcggcgccggcgcggggcccatctgcgcgtccatgtccatgtcctcctccaacccgccctacgacctgacgtccttccggttcagccccatcaaggagtccatcgtgtcccgcgagatgacccgtcgctacatgactgacatgat

SEQ ID NO: 31002 - DNA, 319 bp, Zea mays
ggatgctaaagaccatgagaaatcgctctgaacagaacttcgttgcttatagaaagggtctcggtgttgtttgcaacaaaaaaggtggatttggtgtcgatgactttgttgtagagttctttggggaggtttacccttcttggagatggtatgaaaagcaagatggtattaaacatatacaaaacaacagtgaagatcaagctcctgagttttacaacattatgttagaaaggccacacggagacggagatggatatgacttggtttttgttgatgcgatgcacaatgccaactacgctagtagaatctgccactcctg

SEQ ID NO: 31003 - DNA, 319 bp, Zea mays
aaacccagcttctctactgaaggaagctatccatgttatcagctgtgggtacgaggacaaaactgaatggggaaaagagattggctggatctatggttcagttacagaggatattctgactgggtttaaaatgcatgcaagaggctggcaatcaatctactgcatgccaccacgaccttgtttcaagggttctgcaccaatcaatctttctgatcgtcttaatcaggtgctccgttgggctcttgggtcagtggaaattctgcttagcagacattgtcctatatggtatggctacaatgggcgattgaagcttttggag

SEQ ID NO: 31004 - DNA, 330 bp, Zea mays
  unsure (1)..(330): unsure at all n locations
cttttcaccactcgcgggtctccagcattcctatcctctccccgcacgcccgtgccgccgccgcggttcccttcctctaccgagccaagatgaatgttgaaaagctcaagaagatggcaggtgctgtgcgcaccggggggaagggtagcgtgcgcaggaagaagaaggcagtccacaagactacaaccacagatgacaaacggcttcaaagcaccttgaaaagaataggagtgaacagcattcctggtattgaagaggtcaacatctttaaggatgatgttgttattcagtttgtanatcctanagtgcaagcgtcaattggtgctaata

SEQ ID NO: 31005 - DNA, 308 bp, Zea mays
  unsure (1)..(308): unsure at all n locations
ctcaagtttgtgaatgactgccgccaaattggtattacttgtcccattgttcctggcataatgccaataaataactacaaaggtttcctgcgcatgactgggttctgcaaaactaagataccttctgagatcactgctgcactagatcctatcaaagacaatgaggaggctgttagacaatatggaatccaccttggaactgagatgtgcaagaaaattcttgctactggcattaagactttgcacctttacacactaaacatggacaagtctgctatangaatcttgatgaatcttggattaattga

SEQ ID NO: 31006 - DNA, 316 bp, Zea mays
cccacgcgtccgcccacgcgtccggccgcaacattggtttcgtgtcgaacgatgtcgggcttgacgctgaccactgcaaggtgcttgtgaacattgagcagcagtcccctgatattgctcagggtgtgcacggccacttcaccaagcgccccgaggagattggagctggtgaccaggggcacatgtttgggtatgcgactgacgagacccctgagctgatgcccctcagccatgtccttgccaccaagcttggtgctcgtctcacggaggttcgcaagaatggaacctgtccctggctcatgcccgataggaagac

SEQ ID NO: 31007 - DNA, 307 bp, Zea mays
  unsure (1)..(307): unsure at all n locations
cccacgcgtccggtctctcggccaggtctccctctccccggctctccgccttcctcttccagtcgccgcgcgcgagatcgccgccccgtgtgggccctagatcccgatggcctcgcgccgccgcaccctgctcaaggtcatcatcctcggcgatagtggggttgggaagacttccttgatgaaccaatatgtgaacaagaagttcagcaatcagtacaaggctacgatcggcgcggatttcctcaccaaggaggtgcagttcgaggacaggctcttcactctgcanatatgggacactgctggccag

SEQ ID NO: 31008 - DNA, 316 bp, Zea mays
cccacgcgtccgcatggatgttgttgctgcacaaacaaaagcaattgctgagaagatcaaggactggagcaacgtagttgttgcctatgaaccagtttgggctattggaactggtaaagttgccaccccagctcaggctcaggaagtgcacgcctccctgagggattggctaaagaccaatgccagccctgaggttgctgaatctactaggatcatctacggaggctctgtaactgctgcgaactgcaaagagctagcagcacagcctgatgtcgatggttttcttgtcggtggagcttctttgaagcctgagttc

SEQ ID NO: 31009 - DNA, 318 bp, Zea mays
  unsure (1)..(318): unsure at all n locations
agttccccgaccacaccgttcctccgagcccaggagcagccccgcgccaggaggaagtttgttcttttaacaatatgtcgagggaggagaatgtttacatggccaagttggctgagcaggctgaaaggtatgaggagatggttgagtatatggagaaggtggctaagactgtagatgtggaagagctcactgttgaggagcgtaaccttctgtctgttgcatacaagaatgtgattggggctcgccgcgcttcatggcgcattgtttcttccattgaancaaaggaggagtccgtaagaacgaagacatgtgaactta

SEQ ID NO: 31010 - DNA, 305 bp, Zea mays
gaacgaacggcgatcatttctcccaatatataaagatgcaaaattaagagtcacaagtaactctgaaagaaaatacaaaattaaccaaggtactacaaaggtggctttgatgaggtctcggaatgacacttagttccttttcagcgtttgccaccgccgccacccaacttggggcctttggaacccttctgaacagcacccttcgtctgcgccttctgggacttggacacctcagccttcttcgccttcttctcatccttggtcttcttgatgcgctccttgatctcacgaagagcagcttctct

SEQ ID NO: 31011 - DNA, 300 bp, Zea mays
gcttgcttgctgctgcagtgctgcctccccctcgcccagcagcagggagcagccatgccaggggaccacggctccaagggcgacatctccttcgccggacgcttcacggccagcgccatcgcagcatgcttcgcagagatatgtaccatcccgctcgacacggccaaggtcaggctccagctgcagaagaacgtcgtcgccgccgccgcctccggggacgccgcgccacgcttcccaagtaccgcggcctgctcggaactgccgccaccatcgctagggaggatagggccgcagcgctct

SEQ ID NO: 31012 - DNA, 307 bp, Zea mays
cccacgcgtccgcccacgcgtccgccgaggttccccaaacacgcacagcacacgaacacacaccgcgaccagctccgaggtgatcttccggcggccggcgagatgagccgtggcacaggcgcgggctatgaccgccacatcaccatcttctccccggaggacgcctgtaccaagtcgagtacgcgttcaaggcggtgaagtcggcgggtgtcacgtcgatcggcgtccgcggcgcgactccgtctgcgttgttacgcagaagaaagtcccggataagttgctggatcagacgagcgtgacacacctg

SEQ ID NO: 31013 - DNA, 319 bp, Zea mays
cccacgcgtccgatcatcaccagttcaccacccacctcccactcccagttcaccccgtcgtcctcggcgccaccactcctcgtcccccggcgctactcccccgctccacggtccaaggaaagatggcgtcccatattgttggataccctcgcatgggccccaagagggagctcaagtttgccttggagtctttctgggatgggaagagcagcgccgaggatttggagaaagttgccactgacctgaggtctagcatctggaagcaaatgtcagaagctgggatcaagtacattcctagcaataccttctcgtactacga

SEQ ID NO: 31014 - DNA, 246 bp, Zea mays
  unsure (1)..(246): unsure at all n locations
ctcgggtanagctatctcgagctagctagctgctgtaagccgttgccatggccaaaatggtgttgctctgcgtgctcgtctccttcctcctgatgcccttggcctccctagccctgacgcaggacttctgcgtcgccgacctgacctgcagcgacacgccggcggggtaccgtgcaagtccagcgtcaccgccaacgacttctacttccacggcctggccggccagggcaaaataaaccactcatc

SEQ ID NO: 31015 - DNA, 311 bp, Zea mays
ctagttctagatcgcgagcggccgccctttttttttttttttcaaaaaagaaggaagcaaaccgaaccgaacaacaatgatggctcagatcatttttacagtccccagcgtggggaatctagccacctagtgactccgtcttcttcacttggtgctgcgaggatctcaatgcagatgtccaatacagccgaaggatttctgcaattgataagcttgctaccctccagcaaggaaccgtccagcatccagctctcccaaacatcaaaagaatggcttgcaaacaccaactccatcttcctaataatctgtag

SEQ ID NO: 31016 - DNA, 237 bp, Zea mays
  unsure (1)..(237): unsure at all n locations
gccgcggcgatggcgtccgcgagccggtgctccagctgccggaagcgcgtggggctgacggggntccggtgccgctgcggcgatctcttctgcggcgcgcaccggtactctgaccggcactgctgcagctacgactacaggggcgccgtcgggacgccatcgcccgggataacccggtggtgcgcgcggccaaggtcgttaggttctgatccacgacgggaaggaatgacactacac

SEQ ID NO: 31017 - DNA, 270 bp, Zea mays
gccatggcgctctctgtggagaagacctcgtctggacgggagtacaaggtcaaggatctctcgcaggcggacttcggccgcctcgagattgagctggccgaggtcgaaatgcccggcctcatggcgtgccgcgccgagttcggcccgtccaagcccttcgccggcgctaggatctcggggtctctccacatgaccatccagaccgccgtcctcatcgagaccctcaccgcgctcggcgccgaggtccgctggtgctcctgcaacatcttc

SEQ ID NO: 31018 - DNA, 319 bp, Zea mays
cggacgcgtggcggacgcgtgggcggacgcgtgggcggacgcgtgggaaattcttgtctgcacacatatcattgaaagtggaatagatattgcacatgccaatacaatgattatccagtttgctgaactatatggacttgcccagctgtatcagttacgaggaagagtaggaagatcaggtacagaaggcttcgcataccttttctacactgataagtctttgctctcaagagttgcaacgactcggagctattgaggagcattcagagcttggccaaggtttccatgttgcagagaaggatatgggtatcaggggatt

SEQ ID NO: 31019 - DNA, 312 bp, Zea mays
gtccctcaacgcgctgcgcacgctggacatctcgggtaatgccgtcaccggcgacctgccgatcggtatcagcaggatgtttaaccttcgggagcttaacctgcgaggcaaccgtctcactggtagcctcccggacgacattggggactgcccgctgctcaggtcagtggatcttgggtccaactcgctgtccggcaacttacctgagtccctgaggaggctctccacctgcacataccttgatttgagctcaaatgagttcactgggagtgtcccgacatggtttggagaaatgacaagcctggaaatgct

SEQ ID NO: 31020 - DNA, 311 bp, Zea mays
  unsure (1)..(311): unsure at all n locations
cggacgcgtggcggaagagcgtcaccgtcagcccggagctgatgcagagccggaaccgcatctacctccggggcaccgtcagcaaggacctcctcacgcacaagcaggtcgtccagctctccaggaagatcaaggacggcatctggcttcagcaccaaagatccaagctgaaggagaaactgggcaacgagccgtcatacaagcagctggcgcaatcgctgcggataccagctcctgagctgcgagcgaggatgcgcgagtcgtttcttgcgnaggagattctggcgatgagcaacacccgtctggtgata

SEQ ID NO: 31021 - DNA, 310 bp, Zea mays
ggaacgctctgtaccgtgagcggattatcttcattggggacaatatagatgaagaattcagcaaccaagtgttggcaagcatgctctatcttgacagcattgataattccaaaaagataatgctatacattaatggaccaggaggagatcttactccgtgtatggcactatatgataccatgctaagtctaaaaagtcctattggcactcactgcttgggctttgcattcaacctggcaggattcatccttgcagccggtgaaaagggttcacgcactggtatgcctctatgccggatttcactccaatc

SEQ ID NO: 31022 - DNA, 309 bp, Zea mays
gtttacggcggcccaaaccccccaaatccagttccatcccaatcgccgagaaggggaagccaaatcgatggcggcggcggcggccggcggcgagaacagcggcgcgggcgcgggcgcgggcgagggcgagttctacctgcggtactacgtggggcacaagggcaagttcgggcacgagttcctcgagttcgagttccgccccgacggcaagctccgctacgccaacaactccaactacaagagcgacaccatgatccgcaaggaggtcttcgtctccccctccgtcctccgcgaggccaggaggatcat

SEQ ID NO: 31023 - DNA, 299 bp, Zea mays
gaaggagggagagagcacgggggcttgatcgaagatggatgccggagcaaaggtggtgaagaaggccgcggcggggcgtcgcggcgggggcggccccaagaagaagccggtctctcgctccgtgaaggccggcctccagttccccgtaggccgtatcggccgctacctcaagcagggtcgctactcccagcgtgtcggcaccggcgcccccgtctacctcgctgccgtcctcgagtacctcgccgccgagctcctcgagttggcggggaacgcagcgcgggacaacaagaagaaccgga

SEQ ID NO: 31024 - DNA, 314 bp, Zea mays
ggagaacaagctggaccagctacaatttgctcggcagaaactgacatattgctatctgtctgctgctgctaccgtattttcttctgaattgtctgacgctcgcatttcatgggccaaaaatggtgtcctcacaactgtggttgatgacttcttcgatgttggtggatcaaaagaagaattagaaaacctgatagcactagttgagaaatggcatgcgcaccatgcagttgagttctattcggaacaggtgaaaatagtattttctgctatttatacaacagtgaaccatcttggagcaatggcttctgcagcac

SEQ ID NO: 31025 - DNA, 304 bp, Zea mays
cccacgcgtccgctcttcaagtgccactcccatccaccacaaggcttggcttggtgggaagaagacaaacgccggcacgcgcacgcagacacgatggcgatctgcagcgcgcacactaccacctccctgcgctccccatgcacgaccgtctcgaacgcaggtctgaggcagaagcaagtcatcttcgtcaccagcaacaggaggagcggcggcggcaggaggcacggaggggcaaggagcttccaggtctcgtgctccgtcgacaagccggtggtgattggcctggcggcagactcagggtgcg

SEQ ID NO: 31026 - DNA, 298 bp, Zea mays
ggccaccaagggcgcccacggggtgtgcatcctgaccgagtgggacgagttcaagaccctggactaccagaagatcttcgacaacatgcagaagcccgccttcgtcttcgacggccgcaacatcgtcgacccggagaagctgagggagatcggcttcatcgtctactccatcggcaagccgctcgacgcctggcttaaggacatgcccgcggtcgcttaattcgtctgaggtgctccattggattggatccggggaggaaagagaactggttgaccattcttcattacagtttgtttt

SEQ ID NO: 31027 - DNA, 300 bp, Zea mays
cccacgcgtccgccaacacacacagcaacgctcgctcggcactgtcactagctagttgctctactagagggcgggtatagagctgcctgcaatccgccgctgagaagggaggatcggaagcgacgatgaggtcgtgtgctcctgtctttctgtcggcggtcgtggcctggctggagctggcgggcaccgcgcatggcggcaacttctaccaggacacagagatgacctggggcgatggccgcggcaaggtagtggacggctggcgcgggctggacctgacgctggaccgcacgtccggct

SEQ ID NO: 31028 - DNA, 306 bp, Zea mays
  unsure (1)..(306): unsure at all n locations
cgagcgtggcggcggcagtgactggcgtgtcgtcgtacgcgtacgcgtgcgcgaacgcgnatggtgactctgacggagaacgcggctgcggagctcggccagcacggcattcgcgtgaactgcgtctcccccgcgggggtcgccacgccgctgaccatgaggtacatgggcctcgaggcggaggcgttggagcaggcaatggagggcatggccaacctcaagggcgtgggcgcactgcgggtgcacgacgtcgccgccgccgtgctcttcgtggccagcgatgacgcgaggtacatcagcggccac

SEQ ID NO: 31029 - DNA, 297 bp, Zea mays
gggcccgctgtccggccagcccccaagctacctgaccggcgagttccccggcgacgacggctgggacaccgcggggctgtccgccgacccggagactttcgccaagaaccgcgagctggaggtgatccactgccgctgggccatgctgggcgcgctcgggtgcgtgttcccggagctgctcgcccgcaacggcgtcaagttcggcgaggccgtgtggttcaaggccgggtcccagatcttcagcgagggcgggcttgactacctcggcaacccgagcctgatccacgcgcagagcat

SEQ ID NO: 31030 - DNA, 296 bp, Zea mays
atctcattccactccgacattcacgtgcagctgtcgggagcaggcaatggcgccggatctaagcgaactcgccgccgccgctccagcccgtggcgcctacctcgccggcgtcggtgtcgcggtcctcctcgctgcctccttcctcccagtagccgagtcgtcctgcgtgcgagataactcattggtgagagacataagccaaatgccgcaaagcagctatgggattgaaggattgtcacatataacagttgctggtgcgctcaatcatgggatgaaggaggtggaagtgtggcttc

SEQ ID NO: 31031 - DNA, 292 bp, Zea mays
  unsure (1)..(292): unsure at all n locations
cccacgcgtccgcggacgcgtggcgacgtggncgtaggaggcaaatagctgtggcaacataccttatcgataaactagcccatagggctggcactgaaaaggacgacgatgaagctgatactgttggttgctgtacgctgaaggttgataatgttacatgtatgcctccaaatcagattcagtttgactttctgggtaaagattcaataagatactttaacaccgtagaggttgaagagcttgtgtacaaggcaattgagggtttccgtgctggaaagaagccaggacaaga

SEQ ID NO: 31032 - DNA, 298 bp, Zea mays
cccacgcgtccgcgatcttggattgccgcaaatagtacaaaacttgaaagctcaagcatggactgatgaggatctgttagatgctttgaatcaactagaggtgggactcaaagaaaacctcaagaagttgagttcctttgataagtacaaacagcaagttcttcttggtcatcttgactggtctccaatgcacaaagatccaagtttctggcgtgagaacattaacaattttgaagagaatgatttccagattctacgagttctcatgacaatcattgacacatcaagtgacaccaac

SEQ ID NO: 31033 - DNA, 307 bp, Zea mays
  unsure (1)..(307): unsure at all n locations
gccacgcgtccgcacacgcgtccgcggacgcgtggngagaagattgaagataacaacactctggtcttcattgttgacctcaaggcagacaagaagaagatcaaggctgccgtcaagaagatgtatgacatccaggcaaagaaggtcaacaccttgatcaggcctgatgggaagaagaaggcttacgtgaagctgactcccgactatgatgctcttgatgtggccaacaaaatcggaatcatctaagtgctgcattaggcatctgttgtttcctagttcaatctgttgtgtcctagttctatgtgaa

SEQ ID NO: 31034 - DNA, 365 bp, Zea mays
gcacgtgcaagacggtcggaatccggatcgaccacggtcgggacgctggcgacgttgctggactcgagagcgccaagcaagctctgcaggaggccgtcatattgacggtcaagttcccacagttcttcacgggcaagcggaggccttggagggcgtttcttttgtatggccctcctggaacaggaaagtcttacttggcaaaagccgtcgcaaccgaggctgattcaacatttttcagtatatcttcttcagatctggtttcaaagtggatgggtgaaagcgagaaattagtcgcaaatcttttccaaatggctcgtgaaaatgccccttccattatctttattgatgaaattgattctttatgc

SEQ ID NO: 31035 - DNA, 326 bp, Zea mays
ctcttaaccgaagctaacagggaaaaaatgacgcaaatcatgtttgaacccttcagtgttcctgctatgtatgttgctattcaagctgtcctttccctatatgctagtggccgtaccactggtatcgtcctggattctggagatggtgtcagtcacactgtcccaatctatgaaggctacgccctcccacatgccattcttcgtctcgatcttgctggcagggacctcactgattccctcatgaagatcctcaccgagaggggctactctttcacaaccactgccgagcgggaaattgtacgtgacatcaaggaaaagcttgcata

SEQ ID NO: 31036 - DNA, 294 bp, Zea mays
gccacgcgtccgcccacgcgtccgcccacgcgtccgcggacgcgtggaaggcatcgtgctagcatgaacttcacttgtgctgagatgagggacagtgaacagagttcagaggcgaaaagtgcacctgaggaactggttcaacagtgttgagtgccggatgagagaggctaaatttggcatgtgaaatgcactcaacgatatgatgaaagttacaacaccatctcaggaatgcagcctcaagctcaacaagatggcctcagacacagttgacgatcactactccggtactgatga

SEQ ID NO: 31037 - DNA, 329 bp, Zea mays
actggttgcatcatatggcacaacaagcatttcccatcatacgaagcaagagccatgaagctagtctgttcagttgaataagagaatttatatggtcttcgtttatggataaaggcaatgggggcatctgactcatgataccaggcgtttatggataaaggcaatgggggcatctgactcatgataccaggcgtttcgctcattctgcttaaaattgttttgatgttgttactcgtgcggagaaaaagatctgtgttctccactgtcttgaatgtttcattatttgcagaaatctggttaagcaactgattattttcctccaggagacg

SEQ ID NO: 31038 - DNA, 325 bp, Zea mays
ggtggatgtgccggccgtgcctgtgccggccaaggatccggggatggatcagctgctggtgatcgaaggcatcgagtacgagtcccaggcgaacaataagttcgacgtcgccatcaacctgcccgcggataaagcgttgcaggtaggcccacagtacaacgagtacgccggaagcttcgccgtcgtgccgggctccatcgccgggaagacgcggacagtgaagctctccctgtgcatcaccgaagtgctgttcgatatcgacgctgacggcgatatcagcgtcgacgtcgttatcgtgccgcgcacaaatgctaagatcacgctc

SEQ ID NO: 31039 - DNA, 327 bp, Zea mays
agatgctcctgcagctgttgtttccaatggaaaaagagcaatggaagatgaaattggccctgacggaaagaagattcgtcctggtatcaaccctgtcatgattgatgaacttacagagtgtaataccatgctttcagcacagcgtaagaaaagacaggttcctccaactctggcaccattagatgcactcgagagatacactcaaatctccagccatccccttcataagacaaacaaaccaggcattttgtccatggatgttcatccttcaaaggatgttgttgcaactgggggtatcgatacaaatgcagtaatctttgatcggtc

SEQ ID NO: 31040 - DNA, 308 bp, Zea mays
agcttctgctgaagctggaggcagcaagcatcaacccagtggactggaaggtgcagaaaggcatgctgaggcctttcctgcctcgtaaattaccttttatcccagtgactgatgtggcaggagtcgtggctgatgttggtccaggaatcaatgggttccaagccggagatcaagttgttgctatgctcaactcatttaacggaggtgggcttgcggagtatgctgtggcatcagaaaatctgaccgtcaagaggcctcctgaggtatctgctgccgaagcgcagggctgcccatcgccgccggcactg

SEQ ID NO: 31041 - DNA, 326 bp, Zea mays
cagcgagtcgcgcttccctgcgcaggtgcgggtggcaacgcggaagatctacgacccgctggaggaggacgccttccgccccatcctgcaccactacgacgggcccaagttccggctcgagctctccgtcaccgaggccctcgcgctcctcgacatcttcgccgacaaggacgacgcctgatccccatcggatctgtcgtcgggccactcgaagctcggatgcatgaatgaatgaatgaatgaatgaacaaacaataataacggatggatgggcatgtatatcgtcatgcgcatgtcgcacgacgagacgggagtataccacggtg

SEQ ID NO: 31042 - DNA, 324 bp, Zea mays
aatcaccaacagcgccttcgagccatcctccatgatggccaagtgcgacccccgccatggcaagtacatggcatgctgcctcatgtaccgtggtgatgtggttcccaaggacgtgaacgctgctgtggccacaatcaagaccaagcgcaccatccagttcgtggactggtgcccgactggcttcaagtgcggaatcaactaccagcctcccagcgtcgtccccggcggtgacctggccaaggtgcagcgtgccgtgtgcatgatctccaactccaccagtgttgtggaggtcttctcccgcattgaccacaagttcgacctcat

SEQ ID NO: 31043 - DNA, 306 bp, Zea mays
cgccgcgcgccggagatgaaggagaaggtggaggcgtcggtggtggacctggaggccgggaccggggagacgctgtacccggggatctcgcgcggggagagcgccctccgatggggcttcgtccgcacagtctacggcatcctcgctgcgcactgctcctcaccaccgccgtctccgccctcaccgttctccaccccaccctcaacgccacgctctccgactccccgggcctcgcgctcgtgctcgccgtcctgcccttcatcctgatgatccattgtatcaatatcagcaaagcaccacacaatt

SEQ ID NO: 31044 - DNA, 306 bp, Zea mays
accacgcgtccgcaacgcgccgggacctggcgagctgcgcgagaactccacctccccgtactactacgacggccgctactggaccatgtggacgctgcccaagttcggctgcaacgacgccacccaggtgtacaaggagctgcaggaggccatcaaatcctacccggacgccttccaccgcgtcatcggcttcgacaacatcaagcagacgcagtgcgtcagcttcatcgcctacaagcctccgggcagcgactagaccgcgcccgctggctgccccgccggctagctactactagctctgcgtga

SEQ ID NO: 31045 - DNA, 317 bp, Zea mays
gcctctacatttcttctctctctgctcctccgcctccgcctgatccatccaagacagggatcgccatgtcggactcggaggagcaccacttcgaatcgaaggccgacgctggggcgtccaagacctacccgcagcaggctggcaccgtccgtaagaacggcttcatcgtcatcaagaaccgtccctgcacagttgtggaggtttctacctccaagactggtaagcatggccacgccaaatgccactttgtcgccatagacatattcaatgggaaaacacttgaagatattgttccttcatcacacaactgtgacatt

SEQ ID NO: 31046 - DNA, 318 bp, Zea mays
cgaacaatttcaattacgataacaaggtcggcgagggtgggtttggcagtgtctattggggccagctctgggatgggtcacaggttgctgtgaagaggctcaagagttggagcaacaaagctgaaacagaatttgctgtcgaggtggagattctggcacgggtgaggcacaagagccttttaagcttgcgcggatattgtgctgaaggccaggaacgcttgatagtctatgattatatgccaaacctgagcatacacgcccaacttcatggacagcacgcagcagagtgcaatctcagttgggacagaatgatgaaga

SEQ ID NO: 31047 - DNA, 319 bp, Zea mays
tgatgttgttcgtgctaaaactttttatgctggaaaagcgggtgtgccagttactgaggtgaatgttcctgttgttggaggccatgcgggtattactattctgccactcttctcgcaggccactcctgcaagcaattcgttgtcccaagaagacattgaggccctcaccaagaggacacaagatggtgggacagaggtggttgaagcaaaggcgggaaaaggctctgcaacgttgtccatggcatatgctggtgctgtttttgcagatgcatgtttgaagggtctgaatggagttccagacattgtagagtgctctttt

SEQ ID NO: 31048 - DNA, 317 bp, Zea mays
gaccgtgctgagcactggcggcgcgggctacatcggtagccagcgcgtgctgcagcgcctcctcgcgggcttccgcaccgtcatcatcggcaacctcaacaactcctccgagcgggccgtccgccgcgtcgccgcgctcgcggtgtgaccactcacgcaacctctctttccacaagattgatctccgtgacaagggagcactgaaaatggtgtttgcttctacaagattgtaagctgtcattcacttcgctggattgaaaactgtgggtgaacacggaccaaagccagtactttattagtgcgacaacgtcattggc

SEQ ID NO: 31049 - DNA, 315 bp, Zea mays
gcacagaggaaaacctttatatctaagtcaagaaagatacacatccctgacgtatctggtggcatctcatagccttgaccgaacttctgaagttcttcggcaaacaacgattggcttttatggatctgattgagcccatttttcaaggaacaatgtgttcaaaggatcttgcggatgtgcatattttgggaactgtactgcaacttggtgtttgatcttctccggtggtaacgagagcgttacctcaaccaaggtggtgtagattctgcaagctcgccacccgtcgttgctctatggcgcactggccctctgctg

SEQ ID NO: 31050 - DNA, 317 bp, Zea mays
cccacgcgtccgcgatcttggattgccgcaaatagtacaaaacttgaaagctcaagcatggactgatgaggatctgatagatgctttgaatcaactagaggtgggactcaaagaaaacctcaagaagttgagttcctttgataagtacaaacagcaagttcttcttggtcatcttgactggtctccaatgcacaaagatccaagtttctggcgtgagaacattaacaattttgaagagaatgatttccagattctacgagttctcatgacaatcattgacacatcaagtgacaccaccgctcttgccgtggcctgct

SEQ ID NO: 31051 - DNA, 315 bp, Zea mays
caatactccaccctacgaatcttccaacccctccgacgatgccttccgcgccggcgctcgtccccgcgtgcgacatgcaggagccgttgctggcggagtcgtccgaccgcttctccatgttcccgatccggtacccgcagatttgggagttctacaagaaggcggtggcgtccttctggactgccgaggaggtggacctctccgcggacgcgcgccactgggacgcggccctctcccccgacgagcgccacttcatctcccacgtgctcgccttcttcgccgactccgacggcatcgtgctcgagaatctcgcct

SEQ ID NO: 31052 - DNA, 184 bp, Zea mays
gcacgtcgcttcatgatctacgttcactctaagatgatgatagtcgacgacgaatacatcatcgttggatctgccaaatcaacagcgctcaatggatggggaggatcggaatgcatgggggacagcgtgcactgaaacaagcgcgcggcagcagtcgatctgagactgatagaatctacggact

SEQ ID NO: 31053 - DNA, 316 bp, Zea mays
gagacgcgtggcggacgcgtgggcgccgccgccaccccggtttccttcgtaagcccgtcgtcctccgtacgcgactctgcgacgagaagcgagagtatggacacccaagtgaagcttgctgttgtggtgaaggtgatgggaaggaccggctccaggggtcaggttacccaggtcagagtgaagttcttggatgaccagaaccgtctcatcatgaggaacgtcaagggaccggttcgcgagggagacatcctcacactgctcgagtccgagagggaggctaggaggctgcgttgaggcggaatggtgtcttgctagt

SEQ ID NO: 31054 - DNA, 311 bp, Zea mays
cccacgcgtccgacgtgcgttgcgtcgtgagtgtgtgtgtttcagagctgagagtctgagactgagagagatagaggtgatgatggctctgcaggcgcaggggacgcgggtgccgctggtcctggcgctcttcctcctcctggccggttgcggcacgaggcgcacgcatggtgccggcgctgtttacgttcggtgactcgtcggtggacgtcgggaacaacgactacctccacaccatcatcaaggccaacttcccgccatacggcagggacttcgccaaccacgtcgccaccgggcagttctgcaatggc

SEQ ID NO: 31055 - DNA, 134 bp, Zea mays
cagacgcgtggaccggatctggtccttcctgggcctcggcatgaccacctacaccgcgtggtacctcaccatcgccgcgctcctcaacggccaggccgaagcgtggcgcactccggcgccacaagctctggtct

SEQ ID NO: 31056 - DNA, 327 bp, Zea mays
  unsure (1)..(327): unsure at all n locations
caaatagctagtggacatgaagacctgttaaatggaatggaaattgctgctgcaactgaagacaagganacacattcttttgagattgatccttctcaggttgagaatgtcaagcaacggtgcttaccaaatgcattgaactatcccatgctggaggagtatgatttcagaaatgacactgtaaacccagatttggatatggagctaaagccgcaagcacggcctaggccatatcaagaaaagagtctcagtaaaatgtttgggaatggacgagcaaggtctggaattattgtgctaccttgtggtgctggcaagtccttggttggt

SEQ ID NO: 31057 - DNA, 310 bp, Zea mays
tccagtgctgcccgctcgtgaagggcatcgccgggctctccgcggcggcgtgcctttgcaccgccatcaaggccaaggtgctcgacatctccgtctacgtgcccatcgcgctcgaggtgctcgtcaactgcggctgcgccgtcccgccaggctacaaatgcacttgaacgattccatcccattccatttccatttccacacagcacacgtgcacagcaaaacgtctccttttaccctcccgatgcaaagtttgaaaaggctcgtcgacggatttgggtggtagccgccgcgcgccgccgggctgttcagc

SEQ ID NO: 31058 - DNA, 289 bp, Zea mays
tcatgtacgccaagcgcgccttcgtgcactggtacgtcggtgagggtatggaggagggcgagttctccgaggctcgtgaggatctggctgcgctcgagaaggactacgaggaggtcggtgctgagtttgacgagggtgaggacggcgacgagggtgacgagtactagacgctctactggcgcggcgtcgtcgggcttgtgtgccactgctatcctgtgatctgccctgagtggctcctatcgtgttatgtttctgtcggttcttatctatctgtcgttgtgtggtttac

SEQ ID NO: 31059 - DNA, 321 bp, Zea mays
cccacgcgtccgcccacgcgtccgcggacgctggctatgcgcttatagcttgtcagccatggccaccgccgccgcgtctagcctcctcaagtcctccttcgcgggctcccggctcccggccgccacgcggaccacaccggcgtccctcgtggtggccaccggcccgcgcggcgccggcgcggggcccatctgcgcgtccatgtccatgtcctcctccaacccgccctacgacctgacgtccttccggttcagccccatcaaggagtccatcgtgtcccgcgagatgacccgtcgctacatgacggacatgattactacgcc

SEQ ID NO: 31060 - DNA, 323 bp, Zea mays
cccacatcactcatccacagctcgcagccgtattcctgtctcgaatcctctctcgccgctccgatggcccgcacgaagcaaacagcaaggaagtcgaccggcggcaaggccccccggaagcagctggccactaaggctgcgcgcaagtcggccccggccaccggcggcgtgaagaagccccaccgcttccgccccggcaccgtcgcgctccgcgagatccgcaagtaccagaagagcactgagctgctcatccgcaagctccccttccagcgcctcgtccgcgagatcgcgcaggacttcaagactgatctgaggttccagtc

SEQ ID NO: 31061 - DNA, 305 bp, Zea mays
atggcacctcaaagaagctctctctttcgcgcaatgtcatctgctccaagtgcaagggcaagggctcgaagtctggtgcctcaatgaggtgccctggttgccagggctcaggcatgaaagtcactattcgtcagctgggcccttccatgatacagcagatgcagcagccttgcaatgagtgcaatgggactggagagagcatcaatgagaaggaccgctgtccagggtgcaagggtgagacagtcattcaaagcagagaaggtcttgagggtcatgttgagaaggggatgcaacacacccagaag

SEQ ID NO: 31062 - DNA, 325 bp, Zea mays
acggcaccccggtgcgggacttcaagaaccacgaggcgcgcggggtggcgttcccgaggatgcagcccatgaggctgtacgccagcctgtggaacgccgacgactgggccacgcagggcgggcgcgtcaaggcggactggtccaaggcccccttcgtcgcctccttccgcggtttcagcgccgacgcctgcgtctgggacggcggcaggcagcgctgccctgagggcaccatggaggccgccgccgtcgctggtgccggctccggccgcggctggtggaatcatagctcagcgacatgagctaccgtcgcatgcgctgggtgcag

SEQ ID NO: 31063 - DNA, 316 bp, Zea mays
ctcgactcgaccgccgccgtcccagttcgcttcgcgtcaccgagagctcgtcggcctccgtccccgcgagaagcgagagcatggacacccaagtgaagcttgctgttgtggtaaaggtgatgggcaggaccggctccaggggtcaggtgacccaggtcagagtgaagttcttggatgaccagaaccgtctcatcatgaggaacgtcagaggccctgttcgtgagggtgacatcctgaccctgctcgagtctgagagggaggccaggaggctgcgctgaagcccttgttgtcttggatgtaattctgttaattttgt

SEQ ID NO: 31064 - DNA, 313 bp, Zea mays
atcaaatccctcccatctcttcccctccgccgccgtctctgctctccaagatcgcgatggcgtcagaaaagaagcagtcgaacccgatgcgggagatcaaggtgcagaagctcgtgctcaatatctccgttggagagagtggagatcgactcacccgcgccgccaaggtgttggagcagttgagtgggcagtctccggttttctccaaggcaaggtatactgtgaggtctttcggtattcgtcgtaatgagaagattgcatgctacgttacggtcaggggtgagaaggcaatgcagcttcttgagagtggctc

SEQ ID NO: 31065 - DNA, 312 bp, Zea mays
  unsure (1)..(312): unsure at all n locations
gcagttcgaaaccaaggatcggtccaggagcttccagaacgcgaggaggaagagggagaagggcgcgcgcgcgcgcagcgttcaagtggtgctggtgtcggccatggatcgggttcgcggatccgcgttcctgctcggcgtcctgctcgcaggatccctgttcgcgttttcagttgctaaggaggagaccaagaagctcggcactgtgattggtatcgatctcggaaccacctactcctgtgtgggtgtgtacaagaacggtcatgtcgagatcatcgccaatgaccnaggtaaccgtatcacaccctcatg

SEQ ID NO: 31066 - DNA, 311 bp, Zea mays
  unsure (1)..(311): unsure at all n locations
cacgaattgatctctgcgccgctgcaaccccggcccgtcgaagccatggggtccggggactggttcaagacgatcatcagcaagaaaaaatcgaagcggggaaagtcaaagcacgcaaagctctctggccaagtaacaaatggaggcaaccagacaaatcagaagttagacggcccttcttcaagtagtgaggaccacgaagacaatgcagcactagaggaatgggctgctactcgcattcagaatgcgtttcggaaatacaaggcaaggaagaccctgcgttgtctcaagnggagtcaaagattgcgcgt

SEQ ID NO: 31067 - DNA, 306 bp, Zea mays
gcgccgccgcaccctgctcaaggtcatcatcctcggcgacacggggttgggaagacgtctttgatgaaccaatatgtgaacaagaagttcagcaaccagtacaaggctacgattggggcggatttcctcaccaaggaggtgcagttcgaggacaggctcttcactctgcaaatatgggacactgctggtcaggaaaggtttcagagtcttggcgttgcattctaccggggagcagattgttgtgtcctagtctatgatgttaattctatgaaatcgtttgataatcttcacaactggcgtgaagag

SEQ ID NO: 31068 - DNA, 162 bp, Zea mays
ctggattatctgacccaaaccgtcctattgccagtttcatgttcatgggacctacaggagttggcaagacagagttagcgaaagcccttgcttcctttatgttcaacactgaggaagctgttgtcaggattgacatgagcgagtacatggagaagcattcag

SEQ ID NO: 31069 - DNA, 324 bp, Zea mays
ccacgcgtccgccacgcgtccgacacgcgtccgcggcgcggcggacaaggagcaggcggaggagagagctgtgccaagccacaatgggtatctcgcgtgactcgatgcacaagcgccgggccaccggtggaaagcagaaggcctggaggaagaagcgaaagtatgagcttggtcgccagccagccaacaccaagttgtcaagcaataagacagtgaggagggtccgtgttcgtggaggtaatgtgaaatggagggctcttcgccttgatactggtaactactcatggggaagtgaagctgttacccgcaagacccgtatcctcg

SEQ ID NO: 31070 - DNA, 205 bp, Zea mays
caaacacttgcgtcgctactgcctcacaggtaaggccgccatggtctccggttcgggcgtgtgcgcgaagcatcgatggtggacgcgcgccacgcacatgctgggccgtctctcctcgatcatagccaaggagctgctcaattggcagaatgtggtcgtcgtccgctgcgaggagatctgcatgtcgggcggcgtcgtccgtcag

SEQ ID NO: 31071 - DNA, 289 bp, Zea mays
gttggcttcgcctccccctccggttcgtgttcgggttcgtgaggttctccggggttcggtttcgtgggtggacggatcgagatggcggcgtcggatgttgaggaccgctgcgtcgtcggcggcctcgcctgggccacggacgaccactccctccacgacgccttcagcacctacggcgaggtcctcgaggccaggatcatcctcgatcggtggacgcacaggtcccgcagcgtcgagcttcggcagcttctccactgaggaggcgctgctgtacgtcatcgatggcatg

SEQ ID NO: 31072 - DNA, 313 bp, Zea mays
ccgcaatcagggacaggtagctcgagcgcgcgctccacctgctccgacgcgatgcgggccaagtggaagaagaagaggatgcggaggctcaagaggaagcgccggaaaatgaggcagagatctaagtaggcgcatcttgtgaccgaggatggcgagcttctcctgcaccatggctgagacgcgttgggatgattgtctccctttgtagacgtgctttgctgtagacgtaggcgatgtaaaccgtcctttttgattaattctagtatgttctgagactgggtttatattgtaatttgaggataattatatgatg

SEQ ID NO: 31073 - DNA, 311 bp, Zea mays
cctccctttcaccttccctccctccctctccccgcgggccgccagaggcaatttcgccctcgattcgaccccgattcgtccgcccgcgaccgggattccctccgccaagcgcggatctgaacgctgcgctccgtgtcgccgctcgaatccgccatgaagggggccaaatccaagggcgccgccaaggccgatgccaagctggcggtgaagagcaagggggcggagaagcccgccaagggcaggaaagggaaggccggcaaggaccccaacaagcctaagagggctcccagcgctttcttcgtgttcatgga

SEQ ID NO: 31074 - DNA, 310 bp, Zea mays
cggacgcgtggtttgagtagatatttgcaacaacttgtcatggaatctcttggaaaagaattcgacctggatggcaaccgtgttaatcaagggctaactgtatatggtaacaaaggaagcactgaccagcatgcttacattcagcagctgagagaaggtgtacaaaacttctttgttacgtttattgaggtcttgcgtgacaggcctgctggacatgattggagacttgaacctggagtcacgtgtggtgactatttgtttgggatgttgcagggaacccgttctgctctttatgcaaatgaccgggagt

SEQ ID NO: 31075 - DNA, 309 bp, Zea mays
cggacgcgtggggtgcgtcaagcctccgatcatctacggtgacgtgagccgccccaaccccatgaccgttttctggtcgaagacggcacagagcatgacgtctcgcccaatgaaggggatgctgactggcccagtcacaatcctcaactggtccttcgtccggaatgaccagccgaggtttgagacttgctaccagatcgctcttgcgatcaagaaggaagtcgaggatcttgaggctggtggtattcaggttatccaaatcgacgaggctgcactgagagaagggctgccgctccgcaaggctgagca

SEQ ID NO: 31076 - DNA, 286 bp, Zea mays
cgtactgtgtgcggtacgcgtgggtgtcgccctcgcgcatgcaagctgactggcgtcggtccgacgacgccggcgtgcctgactcgctgcggcggtggcgcactcgttcgcgctgttcgtggcggtgtcggttggcgcgtacatctccggcgggcacgtgaatccgtgcgtgaccttcggggccttcgtgggcggcaacatcatcctgttccgatggctcctgtactgggtgtcgcagctgctgtggtccgacgttgcttgcttcctgctgccgttctcgacgggc

SEQ ID NO: 31077 - DNA, 316 bp, Zea mays
cggacgcgtgggaaaaaaacagagagtagtagactacgacagcgtccgtcgaaccggagggtcggagacggaggcgaagatgaggaagaagctcggcacccggttccccgcggctcgaatcaaaaagataatgcaagcagatgaggatgttggaaagattgcattagcagtgcctgttttagtctcgagggctcttgaattgtttttacaagatttaattgaccggacttatgaaattactcttcaaagtggagcaaagacactgaattccttccacctgaagcaatgtgtgaagaggtacagttcttttgatttc

SEQ ID NO: 31078 - DNA, 315 bp, Zea mays
aaaggaataactgcattcataatcgagaaagggatgcccgggttcagtactgctcagaagttggacaaacttggcatgagaggaagcgacacgtgtgagcttgtttttgagaactgctttgtgccatgcgaaaatgtcctcggtgaagaaggcaaaggtgtttatgtcatgatgtcagggcttgatctggaaaggcttgtattagctgcgggccctattggccttatgcaggcatgccttgatgttgtacttccatatgttcgccagagggagcaattcggccgtccaattggtgaatttcagtttcatacaggg

SEQ ID NO: 31079 - DNA, 305 bp, Zea mays
ctacttcgtccaggccgagtccggcgccgccgccgccgccgatgacacccctttcctcttctggctcaccggcggcgaccgctgctccgtcttcagcggcctcgcctacgagatcggtcccatcagattcgtcctggaaccctacaacggcaccctgccgcgcctgcgatacaaccacaactcgtggtcaaaggtgtcacatatcctcttcgtcgattcaccggttggagctggattttccttctcgagagatcccaaaggctacgatgtcggagacatctcggcctcactgcagctacaggaat

SEQ ID NO: 31080 - DNA, 338 bp, Zea mays
tatacctgcagtacggtcggaatccgggtcaccacggacgacaggtcgaaacggtccgcggacctgggctccttttagaggcttcttgcaggaaaggttagacttgaaacaatctggggcagaaatgggcacttcaatccttttctttggatgcaggaaccgtaatatggactacatatatgaagatgagttgcaaactttccttgaggagggggcgctttctgagctaattgttgcattctctcgggaagggccaacgaaagaatatgtgcagcataagatggtggaaaaggccacagatatttggaacatcatctcaaatggtggttacttatatg

SEQ ID NO: 31081 - DNA, 303 bp, Zea mays
cagttacttgttcactaacaaggtcgggacggcatggcccttggagctgcgtaccatcactacctgcagctcgccggcgaccatggcaccgccacacacgcactgctcctcggcgtacttatcttcctcgtcatccgcctagtatccgcaaggcgaaccggcacaacctcagccaacaaacgtaagcagcaacagcggcttccgctcccgccttcgcccccgggcaagctgcccatcatcggccacctccacctcatcggcgccgagacccacatctcgatccgggacctggacgccaagcac

SEQ ID NO: 31082 - DNA, 296 bp, Zea mays
  unsure (1)..(296): unsure at all n locations
atccaccatcgaccttcaagtctcgctacgtagcagtgcaataaaaaaagcagccgcaatggcgagcagcaccatggccctctcctccacggccttcgccggcaaggccgtgaacgtgccgtcgtcgtccgccttcggcgaggcccgcgtgacgatgcgcaagacggcggcgaaggccaagccagctgcgtcgtccggtgacccgtggtacggccccgaccgcgtgctgtacctgngcccactgtccggcgagcaccgagctacctgactggcgagttcccgggcgactacggctg

SEQ ID NO: 31083 - DNA, 309 bp, Zea mays
ggcgtcgcctccttcaacgagggcgactcgtccacggcgcccacgctcacgctcaccggccggaagaaggaggccgacaagctgcagaccgccgacggctgggccaagttcaccggagggttcttcttcggtggtatctccggcgtgctctgggcatacttcctcctctacgtgctcgacctcccctactacttcaagtagaatacaaattcataaagatgcatatatataatatagctccgcctccgatcctcctctctgcgtgcaaaggtatgccatttcagcagtgacgagcatcgtggatacatg

SEQ ID NO: 31084 - DNA, 306 bp, Zea mays
cccacgcgtccgacgaccccggcgggcctgatcgcggcggcggtggcgaccgttcgcgctgttcgtggcggtgtctgtgggcgcgaacatctccggcgggcacgtgaaccctgccgtgaccttcggcgccttcgtgggcggcaacatcaccctgttccgggggctcctgtactgggtggcgcactgctggggtccaccgtggcgtgcttcctgctaccgttctcgacgggcgggcaggccacgggcaccttcgggctgacgggcgtgtcggtgtgggaggcgctggtgctggagatcgtgatgacc

SEQ ID NO: 31085 - DNA, 312 bp, Zea mays
gcaaaagaggacgtgttgacaatcttgatgatgatggcttaccttacgttggtgcaagtcttcagaccaatgacattgttattgggaaagtctcagaatctggagaagaccacagtattaagctgaagcatacagaaaagggaatggttcagaaagtattgctttcagcaaatgatgaagggaagaattttgctgtggttactctaagacaggttcggacaccttgccttggagataagttttccagcatgcatggccaaaaaggtgttgttggttttctagaatctcaagagaacttcccatttactcacg

SEQ ID NO: 31086 - DNA, 275 bp, Zea mays
cggacgcgtggcggacgcgtgggccgcagttcttcttcaccgtcgggctgggcgcggacccgtgccgcagccgcgtcaacggcacgtgccagggccccaacggcaccaggttcgccgcgtccatgaacaacgtgtccttcgccatgcccaggaccacctccctcctgcaggcgcactaccagcgccgctacagcgggtgctcgaggccaacttccccgccgtgccgcccacgcgtttcgtatacagggtcgcgctgatcaacaacactttcgtca

SEQ ID NO: 31087 - DNA, 149 bp, Zea mays
cggacgcgtggcggacgcgtggggcacgctggagcatactggtttggaagtccaaactacggagtgtactacctgggatgacaaacttccaggagctcaggttcttctcagcaggctgcgactcttcctaagtccagggtacccttacg

SEQ ID NO: 31088 - DNA, 267 bp, Zea mays
cagaattcacgagaacgcacccgcccgcctcctccttccgtccccatccagatgatgcttagggtttccgcgtctccggccgccgcggtggccaaccagctctctggtggggccgcggccccggctcctgccagggtgactgcgcacgcagcggcgtctcgctgtccgccgccgccgccggcaatgggaaggacgtgctcagcggggtggtgttccagcccttcgaggagatcaagggggagctcgccctcgagacccagtcccccg

SEQ ID NO: 31089 - DNA, 247 bp, Zea mays
ctcgagcgcccgctgtgcatcccgaagaggagctgctcccgcgtccgccggccggtgtgcgcgtggaggacaccctgctgctcgcgcaggttacaaagttcacatgtggtgggttttctgtgggcatttgcttcagtcacttggtgttcgacgggcagggtgctgcgcaatttctgaaagcagttggtgagatggctaggggccctcctgagccatcgatcaagcccatctgggctcgtgatgccat

SEQ ID NO: 31090 - DNA, 302 bp, Zea mays
acaccgggcacaccccccgagctcagcttagctccactccagctccaatcacagtcgtgaccagagcgcgagagctagctagagggccgtgaaaatgccgatcaataggatcgccctggggagccaccaggaggtgtaccacccgggcgccctcaaggcggcgttcgctgagttcatctccaccctcatcttcgtcttcgccggccagggctccggcatggccttcagcaagctgaccggcggcggcccgacgaccccggcgggcctgatcgcggcggcggtggcgcacgcggtcgcgctgt

SEQ ID NO: 31091 - DNA, 313 bp, Zea mays
ccaaggagctcgcgggaggcctgcagcagcggcgggccctgtaccagccccgcctcccgccatgcctccagggaccgacggtaagggcggagtacggtgacgcgaccacaaccatcgatcccacctgtgcccaagccgtcgcgcaggccttcccgcacacctttggccagccgctcgtcatcttcgtcgcgccggccgccggcgccggcgccgttagaggagcgccacccgatcagggtgggcgtggtgttctctgggaggcagtcgccgggatggcacaacgtcgtctggggcctccatgacgcacttaaag

SEQ ID NO: 31092 - DNA, 308 bp, Zea mays
atcaaaaaccgagctagggttttaaggggagacagagaagcagagggaggctccatggacaaccccgagatgcagcgattcattcagaaagagcagcagaaggcgatgatgaacgagatggtcggcaagctaacgagcgcgtgctgggacaaatgcatcaccagcgctcccgggagcaagttcagctccggggaatcaacctgcctgaccaactgcgctcagaggttcctcgacatgagcgtgctgattgccaaacgcttcgagatgcagtgaggcgtcgtcactcgaagctgttgcctggtcaatcg

SEQ ID NO: 31093 - DNA, 307 bp, Zea mays
caccgttcaccatacaagaagttggctatgccaaggtccactgaagcacagcgatttttgctgcctgtttctgaatgtgaatttaacatcacatctgcaatagaggacctgagctccatgtctgcatgtccacgtgggcaccgccctttaagggcaactggcgcacgatttctactgctattgctcttctagagggttgctgctcacccagtactggtggtcggattatggtctttacatctggtcctgcaacagttggtccagggtgtgttgtggaaactgatcttgggaaagcaattcgttctca

SEQ ID NO: 31094 - DNA, 169 bp, Zea mays
cccacgcgtccgagccgaacggctcgtacgtggtgcactacaaccactacgacggcagcaacggcaaggtcggcggcgagaagcggtcgttcgaggtggacgcgatcgtgggcgcggacggcgccaactctcgcgtggccaaggacatgggcgcgggcgactacgagta

SEQ ID NO: 31095 - DNA, 290 bp, Zea mays
cagctcgcccccacggaggccttcctcctccgcctcctcctcgacgtgcccaatccgatcgcgcgcgtcaatgcgctgcttttcaaggtgaactatggtgcggaggtcgcgcacatcaagcactcgcttcggacgttggaattggcgagccaggagctgaggacaaagggcctgttctttaagctgcttgaggcagtgctcaaggcgggaaacaggatgaatgccggaacgcacgtggcaacgctcaggccttcaaccttacggcgctccgaaagctctctgacgtgaag

SEQ ID NO: 31096 - DNA, 307 bp, Zea mays
tatgggaatacacgcttgtatgttggaagattgtctccccgcacccgttctcgtgacctagaataccttttcagcaaatatgggagaattcgagaagtggagttgaagcgtgactatgcattcattgaattcagtgacccccgtgatgctgatgatgcacagtacaacctagatggcagggacgtcgatggaagccgcattattgttgaatttgctaaaggggttcctcgtggttctggtggttcacgtgattacaacggaagaggacctccaccaggaacaggcccgtgttttaactgtggagttg

SEQ ID NO: 31097 - DNA, 308 bp, Zea mays
cgccgccatggtgtgcttcgacgccaacgtcctcgccgtcctgtccgaggtcctgtccgccgtcttctgcgaggtgatgaacggcaagcccgagtacacggaccaccttacccacaagctcaagcaccacccggggtccatcgaggccgctgccatcatggagcacatcctggatggcagctccttcatgaagcacgccaaggaggtgaacgccatggacccgctgctgaagccgaagcaggacaggtacgcgctcggcacttcgccgcagtggctcggcacccagatcgaggtcatccgcgccgcca

SEQ ID NO: 31098 - DNA, 298 bp, Zea mays
ggacctggtgcggatagagcagcgagccatcgacacgatcgcgagcgcaacacgtacgttgtcggcagctcaagttagaagaagcaccagtgcctgatcgatggcggcccaggctctcctctccggccggcagctgctgggccgccccgtgcagtcggccgtctctaggtcgtcggcgaggaaggcgcccttcgtcgtcagggccagctccagccctccagccaagcaaggtgccgacagcagctgtggttcgcgtccaagcagtccctctcctacctcgatggcacgctgcccggcg

SEQ ID NO: 31099 - DNA, 147 bp, Zea mays
cacgagatacctgtgctttgcacactgcacacctttcttgtgatactctggtggatttttggtcggctctgggtgaagaaactagatcatctcttttaaggatgaaagaagaggacttcattgaaagacttatgcacagattcgaca

SEQ ID NO: 31100 - DNA, 154 bp, Zea mays
accacgcgtccgcggacgcgtgggcttcgtcagctggcagctgctataataaggaaggaagaagataacggagggcaaggaaactcgctcccactctactcctatccactgcggcctggacgcgtgcgagagacttgaccaagcagcagcggca

SEQ ID NO: 31101 - DNA, 296 bp, Zea mays
agctggccgttgtccttttggccggtggtcagggtactcgactgggaagctcagatcctaagggatgtttcaatatcggacttccatcaggaaagtcacttttccagctccaagctgaaaggattctgtgcgttcaaaagctggctgctcaatctagcgaaagcccgagtaacactgtgccgatccactggtacataatgacaagcccctttacagatgctgccaccgccaaattctttgaaacccgtagatattttggcttagaccctgaccaagtgacatttttccaacaaggc

SEQ ID NO: 31102 - DNA, 250 bp, Zea mays
gcaaccggtccaacactttcacgctcaggcgctcagctctagcaatggctgcctccaccatggcgatctcctccacggcgatggccggtacccccatcaaggtgggctccttcggcgagggccgcatcaccatgcgcaagaccgtgggcaagcccaaggtggcggcgtccggcagcccctggtacggccccgaccgcgtcaagtacctcggcaccttctccggccgagccccgagctacctcaccggcga

SEQ ID NO: 31103 - DNA, 283 bp, Zea mays
ctccactcctcttggccgccgcattacctcctcttcgccgctgccgccaccgctccaccgggcagccagccagccatggatgaggagtacgacgtgatcgtgcttggcaggggctcaaggagtgcatcctcagtggtctcctttccgtcgacggcctcaaggttttgcatatggacagaaacgactactatggaggagattccacctcgctcaaccttaatcagctctggaagaggtttagaggggaagacaagcccccagcacatctaggtgcaaacagaga

SEQ ID NO: 31104 - DNA, 337 bp, Zea mays
agtacctgcagtacggtcggaattccgggtcgaacaagcatccgggacgcgtgtgcggacgcgtgggcggacgcgtgggctgcaacactacacgtgcatcagctggtggaacatgatactgagaagaggaaatcattgactcaagctgcatttgataaatttgatgttgacagagatggctacatcacacctgatgaacttagaatgcatacaggaatgaagggttctattgatcccctcctggaggaggctgacattgacaaagatggcaagataagcctagatgaatttcgccggctcttgaagactgcaagcatgagcgcacgcaatgtacaaa

SEQ ID NO: 31105 - DNA, 294 bp, Zea mays
cccacgcgtccggatcagtccttgcttggtattgatcgatcatggccattttcagtataattgcattagccttggacttacgctcggagcaattgctggtgttctgtcgaagaatgagcttgttggtgcatctctcttcactctcgcaatcaatcacaaacagatgagcctgtactttgcaccagctttttttagccatcttctggggaagtgcctcaaacagaaatatcctattgtcgaagtaacaaaacttgctttcgtggtcttgggaacttttgctcttgtctggtggcc

SEQ ID NO: 31106 - DNA, 329 bp, Zea mays
cccacgcgtccggcgcgggccccggccacggccttcatggcggcgcgcccggtctccgattccacggcggcgctcaccatcgagacatctgtccctttcacctcccacctcgtcgacccgccctcgcgcgatgtcaccaccacccccgccgagctcgtcaccttcttccgcgacatgtccctcatgcgccgcatggagatcgctgccgactccctctataaggccaagctcatccgcgggttctgccacctctacgacggccaggatgccgtcgccgtaggatggatgccgcatcagcgctccgattgatcatcactgctacgcgacac

SEQ ID NO: 31107 - DNA, 323 bp, Zea mays
cccaagaatgcccgtgcagcagtgaggcacgaagagcaagctggtcaaatgtgaggcactcgccaccagcattgacaatcctggcccttgctgtctccgtgaacctcagggcagtaaccttcattgctggaacctcctggatccttttgtcatctgtgactgtgccaacaatgacagcaatgttcttctcctttccttccataaacgtgggccgccagccgccagagccagacgccggccgtcctccaccgctctgcaggtctctatggagctgaagtgttatgtattggcagcgtgactggtacttgacaatactctagatt

SEQ ID NO: 31108 - DNA, 320 bp, Zea mays
aatcaaccgtgacagagttgccgttctttgcctccaaggttcggctcggcaagaatggagtggaggaagtgcttggtctgggtgagctcaacgacttcgagaagaaggggctggaaagcctcaaggtcgagctcaagtcttccattgaaaaaggtatcaagttcgcccacgggaactaggcaactcgcccggcttctaacagttgatatcccttgcattttttttgtttgactgcctttttcgccccgcaccgttatggttgacgaatgaggtttgtggccataataaacacagcgggtgtaaaaatgtcaccagagcag

SEQ ID NO: 31109 - DNA, 265 bp, Zea mays
cagcaatccacagcgagacacgcccgagcgagtgatccccgacccagccgccgccatgaggccgtcgctgctgaagtccacggccgagctcctccgccgcagccgcggctacgcgtccacggccaatccggagcggaaggtggccatcctgggcgcggcgggcggcatcgggcagccgctctcgctcctcatgaagctcaacccgctcgtttcctgcctctccctctacgatatcggcggcagccccggcgtcgcggccgacgtc

SEQ ID NO: 31110 - DNA, 276 bp, Zea mays
gatggttgaagttttgaattgctggatgccacaaagaagtggcttgaattctacagcctcattgtttgaggggcaccaactgtgtcttgactaccttgttggaaatcttctaaagctttatgtggatattgaattcactggctcccatacacaattttttgacaagtttaacattcgacataatattgctgagcttctggagtatttatgggatgttcctagtcaccgaaacgcatggagacaaatagctaaagacgaggagaagggtgtatactt

SEQ ID NO: 31111 - DNA, 324 bp, Zea mays
gtttgttgaaacattggacagatgcttcaagaatgtatgcgagcttgacatcgtatttaacttcaacaagctgcacaccattttggatgagatgatatccgggggacaggtgatcgaaacaagttcagaacagataatgaaatctgtggaagagattgaaaggctggagaaacaatcgagcacaaccagcttcatacccaagtcgattacagagcgttttacccgttgagcttccactcgtttccagaacaatgtgacatttaaggtgtgaacagaactgagatatactattcagtctcattgtagtctcggatagacgtgtat

SEQ ID NO: 31112 - DNA, 284 bp, Zea mays
ggcaaagattcctcaaaagcaactgattctctttctggtgcccccaaggctcatccagttagttctgaatcacgtcgagtccaagctgacatagagcaaactctagctctcgtgcgtaacttgatgctgagaagggcattgatggcaatgtactgtcaagtggtgatcatgacaagtcagatgtagacaaatcacacataggatctatggggcctatagttataatcagaggtttaacgactgtcaaaggcctggaagcgttgagctcctagacactatcttac

SEQ ID NO: 31113 - DNA, 274 bp, Zea mays
tggtgattgttacaggcgaatggcttagcgcgtgttaggttgggggccactgaaataatcgctagtgtcaaggctgaactaggaaaaccaagcattcttcaccctgacaaaggaaaagttgacatttttgtcgactgtagtccaaccgctgagcctctgtttgaggttggcgatttgctgtggctggatcggatgaaaataaccaacagtctaatatattacttgtgttcatcatatacccaatgtttggcactgtagtctggactgtacttct

SEQ ID NO: 31114 - DNA, 320 bp, Zea mays
  unsure (1)..(320): unsure at all n locations
gccacgcgtccgcccacgcgtccggtgggttccaagaagagagcttttctatcaaggattctaacatcagtgtttccaatgaggctttcttccaccaattcctcgcggtgcgagccatggatcctctggatgtcctgagccagaaccccgattcagtattcggaaagttctgcagaagcaagtacctatcgcttgtgcatcaaaaaatggaaggttctttctttggcaacgtggatcagangaactacgtcatgagcggcggcgatcgaaggacacctttctaccaggcattcctagagctagcaaagtcgatatggttg

SEQ ID NO: 31115 - DNA, 312 bp, Zea mays
ggaagcgggggtgcggaggagggcgtggagatcacttacgtgagctatggcggggcgcagcatctgccgctggtgatgtcgctggtggacgaggagctcagcgagccctattccatcttcacctaccgctacttcgtctacctctggccgcagctcaccttcctggcgttcgatgccagggatggcaagtgcgtggggacagtcgtgtgcaagatgggggagcataggggtgcattcaggggctacatcgccatgctcgtcgtcctcaagccctaccgagggacgggaatagcaactgagctagttactaga

SEQ ID NO: 31116 - DNA, 304 bp, Zea mays
cggacgcgtgggttccaggcatgaggcctgggggtcctcatatgccaaactattatgttccggttgtccagcagggccaacagggtccacgcccaggtattaggcgtggagctggagcccagggccagcaacctgtgccaccatttcagcagcagattcttccgcgtagacggatgtaccgttacccaactggtcgcaacatgcctgaagctccagcgatgccaggggttgctggaggtatgattcaggcatatgatatgggaggcttccctgtgagagatgctgcttatcacggccgctcaat

SEQ ID NO: 31117 - DNA, 313 bp, Zea mays
  unsure (1)..(313): unsure at all n locations
tcgaccttcaagtctcgctacgtagcagtgcaataaaaaaagcagccgcaatggcgagcagcaccatggcgctctcctccacggccttcgccggcaaggccgtgaacgtgccgtcgtcgtccgccttcggcgaggcccgcgtgacgatgcgcaagacggcggcgaaggccaagccagcggcggcgtccgggagcccgtggtacggccccgaccgcgtgctgtacctgggcccactgtcgcgcgagccaccgagctacctgacgggcgagttcccgngcgactacgagctggacacgcggggctgtcggcggac

SEQ ID NO: 31118 - DNA, 304 bp, Zea mays
gattttctcaaggctctccactccaagcatcacctgagctatgcactgcagcagttacggaagcacaaaaatggttggaagagaaaaggcacggactgggcttcaagcctgaagacaatggaccatgcacactaaatactgatatacttagttctcatgatgactctgtctctgacctgggttctccagttgatttagcagaatcatacatgcagtcgttacctccttggatatccccattcttaggccgtcagaagtctaacacaccacactccagatattttatctcatcagcagaggtaac

SEQ ID NO: 31119 - DNA, 307 bp, Zea mays
cgctactgtttttgagaacacattgatgcagcaccatgttgctcttccaccgggttctatggggaaaataagttacattgcaccagctggccagtacaacctgcaggacacagtgctagaattggaatttcagggcataaaaaagaaatttaccatgcttcagacatggcctgtgcgttcaccaaggcctgttgcatcgaagcttgctgcggatacacctcttctgacagggcagcgtgtactggatgcactattcgcctcggttctgggaggcacttgtgctattccaggagcatttggctgtggt

SEQ ID NO: 31120 - DNA, 306 bp, Zea mays
aagatctcgagtgcaacgcaacgttggcgcttggcggccagtagtagcagctaatttagcgtcgctccttcctactagacgagagatcgagaaaccatggccaagctccaagtcactcctggcgccgcgttcaccgagtgcaatgaactcaacttccagggcctgtacatgtaccacacgcccctgggtcccaaggccaaccaagctgcgatcctagagagcaaggccaagatcggcatcggtgccaccgtggttaacaactgggcagtgtatgacgggccagggccagcgctaagctgtcgccgt

SEQ ID NO: 31121 - DNA, 257 bp, Zea mays
cccagccgcacgaaaccctaacgctgccgccgcttcacaggtaagccgccgccatggtgtccggttccggcgtatgcgcgaacgatcgtcggtggacgcgcgccaccacatgctgggccgcctgtcgtcgattatcgccaaggaactgctcaatgggcagaaggtggtcgacgtccgctgcgaggagatctgtatgtcaggtgggctcgtacgccagaagatgaagtcctccgctttctccgcaagcggatgaacac

SEQ ID NO: 31122 - DNA, 183 bp, Zea mays
gccacgcgtccggccacgcgtccgcccacgcgtccgcggacgcgtggttcaaagtgatagagactgacccttctgaatattgtatcgttgccccagatactgaaatattttgtgatggggatcctattaagagagaggatgaggagcgtcttgatgaagttggttatgatgatgttggtggag

SEQ ID NO: 31123 - DNA, 186 bp, Zea mays
gagaccgtggccactgctaaagcacttggtgattctctgtatgatgaaaacctaggggaacccactgagctcaaatacttgtaatttgtgggcgtaataagaagctggtcaatcgattgcaatccataaattggaaagttccagttcaggtgaaaggctttgttacaaagatggaagaatgtatgg

SEQ ID NO: 31124 - DNA, 332 bp, Zea mays
  unsure (1)..(332): unsure at all n locations
gcagcttccccagccagctagggtttgcagatgacgaccgcggcgcgccccacctgggcgccggccaagggcggcaacgagcaggggggcacccgcatcttcggcccctcccagaagttctcctcccgcgacctcgccgcgcacacctccctcaagccaagaaaagacggtcaacagacccaagaggagttacagaagaggaatctcagggaggaacttgaggaacgtgagcgcaacactactcttccaaggataagtcctatgccgaagaaagagaccggcggaaaagctctagccatctactcttagaaggttcanagagagagacagag

SEQ ID NO: 31125 - DNA, 270 bp, Zea mays
agcatcgacatggaccgcggcacgacgacttcttctccatcgtggggtactcgccggaggacctgacgcagcacgaccggctcgtcaggctgttcgaggagtgggtggccaagtaccgcaatgcgtacggcagcttcgaggagaagctgcgccggttcgaggtgttcaaggacaacctgcaccacatcgacgaggccaacaggaaggaggtcaccagctactggctgggcctcaacgccttcgccgacctcacgcacgacgagttcaagg

SEQ ID NO: 31126 - DNA, 272 bp, Zea mays
ggcttctcctcccccaccggttcgtgttcaggttctggttcgtgggcgagagggaagagatggcggcgtcggacgttgagtaccgttgcttcgttggcggcctcgcctgggccaccgacgaccactccctcaacaacgccttcagcacctacggcgaggtcctcgagtcgaagatcatcctggatcgggagacgcagaggtcccgcggcttcggcttcgtcaccttctccacggaggacgcgatgcgcacgcctatcgagggcatgaacggc

SEQ ID NO: 31127 - DNA, 286 bp, Zea mays
acgccccgaccacggtccgcgacgctgggcgaccgtggcggcagacggcacacacaccacaccacacctcctcgcttccactcacgctcgtctaccatctcgtcccgtcctttcgtttcgaagcctcgcgagccccgacgatggccaccgccgcggtgtcggtcgacgagaagctcgacaagcttcgcgccgaggtcgccaagctcgaccagatcagcgagaacgagaagtccgggttcatcagcctcgtgtcacgctacctcagtggggaagcggacagatcgag

SEQ ID NO: 31128 - DNA, 233 bp, Zea mays
cgtccacgccgccggccgtcgcgtcccccgcctccgagcaaacaaaatccaagaagaagaagcacaagtccaaggatctccccgccactgacccgccgtcgctcgccgaggctgaggagaagactgatggctacctaatcaagccccagtccctggtgccgtccctggacacctcgacctggccgctcctcctcaagaactacgaccgcctcaacgtccggactggacactac

SEQ ID NO: 31129 - DNA, 320 bp, Zea mays
cggacgcgtggagccagaagctctccctggaagcatgcacccacgccgcccagaacgagaggctgccgtacgcgcgtggtggtgcaagtcctcttcttcgagcaactccagctaagaacctcgatcgcagggtgcctgctggtctcggacaacctcgaaggctccaggcctctgcggagggcattgccacatccggcgaggctggaggctgggccacggctgtccgagagaaccaggtcctgaaggtcggcatggacaacatgcggacgcggctggccgagctggagaaggagtgctcgagcatgcggcaagagatcgag

SEQ ID NO: 31130 - DNA, 241 bp, Zea mays
agttggcgcacacggaccagttccgctgcctcgacaaggcggccatcgtggcatccccggacgaggtgcgttccggcggcggcgcgcccgcggacccctggaggctctgcagcgtgcagcaggtggaggaggtcaagtgcctcatccgcatcgtgcccgtctggtccacggggatcatctactacgtcgccgtggtgcagcagtccacgtacgtggtgctctcggcgctgcagtccgaccg

SEQ ID NO: 31131 - DNA, 238 bp, Zea mays
ctttcgtgctctttgcactggagagaaagggtttggatacaagggatccagtttccaccgtgtcatcagcgactttatgatccagggcggagattttgacaagggcaatggtaccggtgggaaaagcatatatggacgcactttcaaagatgagaacttcaaattggttcacactggacctggagtggtcagcatggctaatgctggaccgaacaccaacggcagccagtttttcatt

SEQ ID NO: 31132 - DNA, 213 bp, Zea mays
gtccctcacacactcactatacactgctctgctgcagcaagaaggaagaagctagcgcctccctagctctcgttgtcagcaatggccaccaccgccgcgtccagcctcctcaagtcctccttcgcgggctcccggctcccttcggccacgcgcaccaccaccccgtcgtccgtggccgtggccaccccgcgcgccggcgtgggccccatccgc

SEQ ID NO: 31133 - DNA, 177 bp, Zea mays
ggcgtcgacgatcatggccgccacctcccgcatcgtcgcggccaagacgccgtttcttggccagggtcgcgccgccgccgccgccgccaatgccagccccctccgcgacgtcgccgccgccgctgctggcggccggatcaccatgggcaacgacctgtggtacggcccggaccgcgt

SEQ ID NO: 31134 - DNA, 202 bp, Zea mays
ccgcattcgttccaactcctgagcactttctcctcgtccccgacaagccaatcgaagccgagatacggccatggactccaccggcaccggagcagggggtaaggggaagaagggagcggccgggcgcaaggtcggcgggccaaggaagaagtcggtgtcgaggtccgtgaaggccgggctccagttccccgtcggccgcatc

SEQ ID NO: 31135 - DNA, 292 bp, Zea mays
tgaagactggaatagcaaagcttggttctcatcttgcggaatcagaagtacagatgctcattgaagctgtggacacaaacggtaggggggcactagactacggggaatttctggccgtctcgctccacctgcagaggatggcgaacgacgagcatctccggcgggccttcctgttcttcgacaaggacggcaacggtttcatcgagcccgaggagcttcgagaggctctggtggacgacggggcggccgacagcatggaggaagtggcgaacgacatactgcaagaggtcga

SEQ ID NO: 31136 - DNA, 289 bp, Zea mays
  unsure (1)..(289): unsure at all n locations
ggtgaccggaaaaccacggccggcgttcctgcttctctacccggtccgaattgctgaccggatcaacccgagaccttgcaggattatcgatctgattgcggcatgatccgcttcatcctgctgcagaaccggcnagggaagactcgactggccaagtattacgtcccgctcgaggacttggaaaagcacaaggttgaatacgaggtacaccggctcgtggtcaatcgggaccctaagttcaccaacttcgtcgagtttcgcacacacaaagttatctacaggagatatg

SEQ ID NO: 31137 - DNA, 221 bp, Zea mays
agacgtggcgtatggcgaaccctcgcgtcttcttcgacatgaccgtcggcggcgcaccggcgggccggatcgtgatggagctgtacgccaacgaggtgcccaagaccgcggagaacttccgcgcgctgtgcacgggcgagaagggcgtgggcaagtccgggaagccgctccactacaagggctccaccttcaaccgcgtcatccccgatttcatgtccaag

SEQ ID NO: 31138 - DNA, 216 bp, Zea mays
cggaatcgtcatttaccagtatcgaagagttccttgagccacttgagctgtgctacaaatcactgtgtgactgcggcgacaaggccatcgcggacgggagcctcctggacctcctgcgccaggtgttcacgttcgggctctccctgatgaagctggacatccggcaggagtcggagcggcacaccgacgtgatcgacgccatcaccacgcacctcg

SEQ ID NO: 31139 - DNA, 216 bp, Zea mays
cccacgcgtccgggcgttcgagaagatcaaggtctccaacccaatcgtcgagatggacggtgatgagatgaccagggtattctggcagtctatcaaggacaagcttatcctcccatttctggacctggacatcaagtactatgatttggggatactgcaccgtgaagcaactgatgacaaggtcacagtggaggctgcagaggctactctcaagta

SEQ ID NO: 31140 - DNA, 297 bp, Zea mays
agtaccacagtacggccgaatccgggtcgccacgcgccgccacgcgccgcgacgtgcgagcgcccaaagccccaccgccgctcccatcaagcggcgctaaagggactcctcgaccgcaacgcgatgccgaagaacaagggaaagggaggcaagaaccggaagcggggcaagaacgaggcggacgacgagaagcgggagctggtgttcccaagagacgggcaagagtacgcgcaggtgacgcggatgctgggcacggccgctgctagcgctctgcatcgacggcacaagcgcctctgc

SEQ ID NO: 31141 - DNA, 345 bp, Zea mays
attgactgaggttttcatgccttgtctatctggtatcggtctgcttagcaaaatcacaagtcacaaaatttgcaaagacattcctgtgattatgatgtctacgaatgattctatgagtatggtgtttaagtgtttgtcgaagggagcagttgatttcttggtaaaaccactacgtaagaatgagcttaagaacctttggcagcatgtttggaggcgatgccacagttccagtggaagtgaaagtggcatccagacacagaagtgtgccaaactaaatactggcgacgagtatgagaacggcagtgacagcaatcatgatgatgaagacaatgatgacggcgacga

SEQ ID NO: 31142 - DNA, 315 bp, Zea mays
cacgctcggcctccccatggtcctagaggagccgctgctccacacgttccacctcccgcctttcctcgtcaagggcgactacagggcgctgtacaagtacttctccacggtggcgaacaggcgctggacaccgccgagggcctgggcctgtcgcgcgaggaggcctggcacaagctcctcttgcgcagcaggttcaacagctacggcggcctcaacgtgctgttcccggagctgctggccaacgtggccagcggcggcgagaagctccactagcggctggtagccgagatccgcggcgccgttgccgacgccggc

SEQ ID NO: 31143 - DNA, 336 bp, Zea mays
gcctcgggtcaaaccctaagcagggagttgatttatccgctgcagccatgagtaagttgcagtctgagtctgtcaaggatgccatctcccagattgttggggatgccaaggagaagaataggaagttcactgagactgtggaacttcagattggtctgaagaattatgatccacagaaggacaagcgtttcagtggctctgttaagttgccccatatccctcgtcccaagatgaaggtgtgcatgcttggtgatgcccagcatgttgaggaggccgagaagatgggacttgactacatggatgttgaggctctcaagacaatgaacaagaacaaga

SEQ ID NO: 31144 - DNA, 222 bp, Zea mays
caaccagctgacgggcagcatcacggcgaggctggtgcaggggcagttccggtcgctggtcctgtcgtacaaccagctgacgggcccgatcccgcgcgacgacgccgcgacgagatcaacaccgtggacctctcccacaacaagctgacgggcgacgcctcccacctgttcgccgccggccggcccatcggcaaggtggacctgtcgtggaactacctcgac

SEQ ID NO: 31145 - DNA, 224 bp, Zea mays
cccacgcgtccgtaattgttctacacttcttggtgccataatatcgtggggtattctttggccatatatctccacaaaagctggggactggtatccagctgaccttggaagcaatgacttcaaaggactctatggatacaaggtttttatatctgtatctgtgatacttggggatggtctttataacctcatcgagatcatttatgctactatcagggaaatag

SEQ ID NO: 31146 - DNA, 229 bp, Zea mays
ctcacatccctcgagaagacgcctgctcctcgccgatcgatacgatggccgtcttctccgacctccacaccgccgacggcctcaagtccctcgaggctcacctcgccggcaaaacctatgtgtctggtgactccattactaaggatgacattaaggtcttcgccgcggtgccgtcgaagcctggcgctgagtttcctaatgccgcccgctggtacgagaccgtctctgg

SEQ ID NO: 31147 - DNA, 326 bp, Zea mays
  unsure (1)..(326): unsure at all n locations
gaaacaatcaaccagcaacactcttctcttataacatagtacagcgaaggtaactcacatggcaacttccatgggttgtctcgtcttgctctgccttgtttcttctctccttcccagtgccgtccttggccacccatggggtggcttgttcccacagttctatgaccattcgtgccccaaggcgaaggagattgtgcagtccattgtggcacaggctgtggccaaggagaccaggatggcggcatctttagtcagactgcatttccatgactgctttgtcanaggctgcgatgcttcggtgctgttggacaacagcagcagcatag

SEQ ID NO: 31148 - DNA, 311 bp, Zea mays
ctccgtatgacgcagcttgtgctcgttcgagactgagacacgccaacacgcctccctcagcgcagatctcgccgccgccgagatgctccgccgcggcgtgcttcttctcgcggccatcctcatcgccgtcgcacactcgcccctcgcgtacgcctcggaggccgagcacaagtatacaacagaagagcctgttaagctatgggtaaacaaggttgggccttacaataaccctcaagaaacttacaactattacagtctcccgttttgtcaaccatctgaaaacactgcacataaatgcggtggtctcggag

SEQ ID NO: 31149 - DNA, 317 bp, Zea mays
gaatcgcaatcctgcagattataggcctgatatcattcatcaggctctactagcaatatttgatagccctctaactaaggctggaaggttacaggctgtttatgtgagaactgaaaagggcgtattgtttgaaatcaaacctcatgtccgcatgccaagaacctttaaacgtttctgtggtttaatgtcacaattgttgcaaaaactgagcattacggcagttggaaagcgtgagaagcttctcaacgttgttaaaaatcctgtcactcgttatctacctgttggtgcacgtaagattggcctttcatttagtgctg

SEQ ID NO: 31150 - DNA, 225 bp, Zea mays
cggacgctggggttcgggagcatcatagcatgttctgatactggtttagaccttccattctctttacatgtgttgctgagcttctatcatcgtgtcttattgtgaagagggaactcttcactaatgttttgttatgtacttgttgtgttcaaaagttcttgtactgtaggctactgttatgatgcgcctagctcaatttgtcgatgcaattcgaaattttgtcta

SEQ ID NO: 31151 - DNA, 239 bp, Zea mays
cggacgctgggcactcccatccagccgccaccaggtgcagagtctttcgtcatctcttctccggcatagaacccccagtcgcccaccagatcacttgttaaactttgttgaggggtgatggcggtttctttcgcaaacctcaactccgaggcagggcttaaaaagcttgatgagtaccttctcactcgcagctacatcactggctaccaagcttccaaggatgacttggctgtctacac

SEQ ID NO: 31152 - DNA, 278 bp, Zea mays
catcatcagccaagtgtaaagagtgcgaagaagcagtagcaaaaggattccattctcgtgttcttggagtggtccatcgatcgagctccgtgaaagagagagagagagagcaagcaatggcgacagcagggaaggtgatcaagtgcagagccgccgtggcgtgggaggccggcaaaccgctgtccatcgaggaggtggaggtagcgccgccgcagccatggaggtgcgtatcaagatcctctacaccgcgctctgcaacaccgacgttctaattctgg

SEQ ID NO: 31153 - DNA, 324 bp, Zea mays
gaaggagagcaccctccacttggtgctgcgcctcaggggaggcatgcagatcttcgtgaagaccctgaccggcaagactatcacccttgaggtggagtcttcagacaccatcgacaacgtcaaggccaagatccaggacaaggagggcatcccaccggaccagcagcgtttgatcttcgctggcaagcagctggaggatggccgcacccttgcggattacaacatccagaaggagagcaccctccacctggtgctccgtctcaggggtggcatgcagatctttgtgaagacactcactggcaagacaatcacgcttgaggtgga

SEQ ID NO: 31154 - DNA, 327 bp, Zea mays
  unsure (1)..(327): unsure at all n locations
gacacgcgtccgcggacgcgtggggtcgggagttcacgacggaggacgagacggacagcgacgacatgggcgacgagtacaacgacgacggagaggaaggcgaagacgacggcaaaatgcagtacaggatacagttccagaggccgaacccgggcggcaccaacaccgcgccagcaccggcagcagcgacgacggctgcgccacgagtgccgacttcggctccgaccagcaccttcctcgccatggttcaataggggcgcgggcggcacccctctcaaaccgtacgtacgtatatgcgtccanaccanaaacctgcgcgcatcaccg

SEQ ID NO: 31155 - DNA, 361 bp, Zea mays
  unsure (1)..(361): unsure at all n locations
atacctgcagcaacgcggaatccgggtcgccacgcgcgggacctggcgagcgtgaaggttttcgggtcacccacctcggcggaggtcgcccgcgtgctcatgtgcctcttcgagaaggaggtggagttccagctgatccgcgtcgacgcctaccgcggcaccaagcgcatgccccagtacctcaagctgcagccgcaaggcgaggcgctcaccttcgaggacgagagcctcaccctctccgactccagggggatcctccgccacatctcccacaagtacgcgaacangggcaacccgtacctgattggcacgggcgcgctggagcgggcgtccatcgagcagtggctgcagacggaggcgc

SEQ ID NO: 31156 - DNA, 321 bp, Zea mays
cggacgcgtggcggacgcgtgggcgagaagggctgccgccccttcatgtgcgacaccagctcgcggcaatcgaactgctatgaccagtaccggaaggcatccaaggattcaaggacagagtgcagcgagtgccagcagcaggttcagctctcgtgcccactgtgccgtgggccggtcagcgattgcatcaaggactacagcgcgcggaggttcatgaacaccaaggtccggtcgtgcaccacggagtcgtgcgagttcaggggcgcctaccaggagctgaggaagcatgctagggtggagcatccaacaggaaggccaatg

SEQ ID NO: 31157 - DNA, 319 bp, Zea mays
gtcaagaagggcacaaggtggccttggtggacccaatggccctggttttccccttggttttggtcaatctagggccaagtttcagatggaacccaacactggtgttacatttgatgatgttgctggtgtggatgaagcgaacacagacttcatggaggtggttgagttcttgaagaaacctgaacagttcactgctgttggtgctcgcattcctaaaggtgttctgcttgtcggtcctcctgggactggtaaaactttgcttgccaaggcaattgcaggagaggctggcgtaccatttttctcaatttcaggttctgag

SEQ ID NO: 31158 - DNA, 315 bp, Zea mays
  unsure (1)..(315): unsure at all n locations
agactatgcggccaagccaacattcattgataactttttcactgattggagaaaagttcttggtaaaaatcatattattaagaactttgagctttgtgatttcacaccaatatatgaatggcacctcagagagaaggagaggaagaagcagatgacaacagaggagacaaaaacattgcgggaagacaaattgaaacaagaggagaagtacatgtgggctgttgtagatggtgttaaagaaaaggtcggaaatttcagagtagaaccgcctggcttgttcaggggacgtggagaacatccanagatggggaaact

SEQ ID NO: 31159 - DNA, 316 bp, Zea mays
cggacgcgtggcaagcagaccccagcagaagaagcgaagtcgtcgccggagcaggaggaagagcgaggaccaacatgtcgtggcaggcgtacgtcgatgaccacctgctgtgcgacatcgaaggccagcacctcagcgccgccgccatcgtcggccacgacggcagcgtctgggcacagtccgagaacttccccgagttaaagcctgaggaggttgctgggatgataaaggacttcgatgaacctggaactcttgcaccaactggtctttttgttggaggtacgaagtacatggtgatccaaggtgaacctggagt

SEQ ID NO: 31160 - DNA, 293 bp, Zea mays
gccgccgtcccagttcgcttcgcgtcaccgagagctcgtcggcctccgtacacgcgagaagcgagagcatggacacccaagtgaagcttgctgttgtggtaaaggtgatgggcaggaccggctccaggggtcaggtgacccaggtcagagtgaagttcttggatgaccagaaccgtctcatcatgaggaacgtcaagggccctgttcgtgagggtgacatcctgaccctgctcgagtctgagagggaggccaggaggctgcgctgaagcccttgttgtcttggatgtaattct

SEQ ID NO: 31161 - DNA, 307 bp, Zea mays
cggacgcgtggcgaggccgccgtctgcctctgcacggccatcaagggcaacgtcctcggcgtcgtctacgatgtccctatcaagttcaacgagctcgtctactactgtggcgactgcgagcagagtggggactggtgcgcgtaactccgcgcggatacacgctcgtagccgttcgcgtgcgtgattaagcatgctcctgcatggcacacatgtattgtgcgcctgcagatctctcctgtctcatttgtgcaccttaggtactacagtcctagaaccataaaccaggcagattcttgtcagttcacat

SEQ ID NO: 31162 - DNA, 318 bp, Zea mays
cacacgcgtccgcgtggatttctttaaccaagttaatatgctgtatggcacgctcacagaattctgcacacctgagagctgcccgacaatgacagctggcccaaagtatgagtacagatgggctgatggtgtgcagataaagaaacccatagaggtatcagcaccaaaatatatggagtatctgatggattggattgaaggccagcttgacgatgaatccatatttcctcaaaaacttggcacaccattcccaccaaacttcaaggaagtagtgaagacaatattcaagcgcttgtttcgtgtttatgcccacatcta

SEQ ID NO: 31163 - DNA, 317 bp, Zea mays
gcaactgcaaagcagcaagctctactcttcttctgtactgaacgtgtgactagataacaataagcgtgaaccatggcggacgagtacggccgcagcggctacggcaggtccggcgccggcgacgactacgacagcggctacaacagcaagtccggcactgatgactacggccgtggcgaaggtggctacaacaagtcgggcggcgatgacgactacggccgcagcggcggcgatgggtacggcaggtccggcggcgacgactacggccgtggcaccggcggcggtggctacaacaagtccggcggcggcgatgacta

SEQ ID NO: 31164 - DNA, 245 bp, Zea mays
ccactcccaagccagtacccacagtcctacgagcagtcgcacgcaagtgtcaagagacaaaacggtcgacatggctcgcacgcaatctgccgtagcggtcgccgtggtggccgcggtgctgctgctggcagcggcggcgacgacctcggaggccgccatcacctgcgggcaggtgagctccgccatcgcgccctgcctctcctacgcccgcggcacggggtccggcccctccgcgtcctgctgta

SEQ ID NO: 31165 - DNA, 309 bp, Zea mays
agcaaaattagcagcgaccacagcaagaggcaatagtggaatccatgtgctgtttgtgactgattgcttcccgattccgaacctcttctcttgcaaggacctagtgaagcgtgaaggcaatgcttggatgtacaaacctgacgtgaaggcgttgaaggagaagctcaggctgcctgttggttcctgtgagcttgctgttccactcaacgcaaaagcacgactctacacagtagacagacgcagagaagcatatgctacaatactgcattcagcaagtgaatatgtttgcggcgcgatcacggcagctca

SEQ ID NO: 31166 - DNA, 229 bp, Zea mays
gatgacaacacgttcatagaagacaactcgttgccatcattctcaaaggctgttaatcagcgcgacgctgaccttgtctacttctggcagaagtaccggaaattggcagacagctcacatgagaaaaatgaagctcggagggagttgcttgaagtgatggcccacaggtctcatgttgacagcagtgttgagctcattggaagccttctctttggctctgaggacggtc

SEQ ID NO: 31167 - DNA, 311 bp, Zea mays
gctccgtccagcgcgtccacctcccaaacccctactcccccaggaagcaatggcttcccccacccagggccaggtcatcacctgcaaagcggcggtggcgtacgagccgaacaagccactcgtgatcgaggacgtgcaggtggcgccgccgcaggccggcgaggtccgcgtcaagatcctcttcaccgcgctctgccacaccgaccactacacctggagcggcaaggatcctgagggtctttttccttgcattcttggccacgaagctgctggaattgtggaaagtgtcggtgaaggagtaactgatgtgc

SEQ ID NO: 31168 - DNA, 230 bp, Zea mays
cggacgcgtggcacatctatctgtcaagcgacgccgcggcctcgatcagagtcggaggcgaacacccccatggcggcggctggcggcggcgcaggagggaaggtatccttcaagatcatcctcacctccgaccccaagctccctttcaaagtgttcagcgtgcccgaagcggcgccctttaccgcggtgctcaagtacgccgcggaggagttcaaggtcccgccccagac

SEQ ID NO: 31169 - DNA, 312 bp, Zea mays
  unsure (1)..(312): unsure at all n locations
ccagatcttcagcgagggcgggctggactacctcggcaacccgagcctggtccacgcgcagagcatcctggccatctgggcgtgccaggtggtgctcatgggcgccgtcgaggggtaccgcgtcgccggcggcccgctcggggaggtggtcgacccgctgtaccctggcggcagcttcgacccgctcgggctcgccgacgacccggaggcgttcgccgagctcaaggtgaaggagatcaagaacggccgcctcgccatgttctccatgttcggcttcttcgtgcaggctatcgtcaccggcaanggccccct

SEQ ID NO: 31170 - DNA, 305 bp, Zea mays
gcaagccgcagcgggagttcgactacttcgcgctctccctccagtggcccggcaccatctgcgcctccacccgccactgctgcgccaccaacggctgctgccgctcggagcctctccagacgttcacgatccacgggctatggccggactacgacgacgggacctggccgtcgtgctgccgccgcacccaattcgagatggacaagatattgccactgaaggaggtgcttgacaagtactggccgtccctctactgctccaaatctggaacatgcttcagcggcaagggactcttctgggctcac

SEQ ID NO: 31171 - DNA, 299 bp, Zea mays
agtctcgctacgtagcagtgcaataaaaaaagcagccgcaatggcgagcagcaccatggccctctcctccacggccttcgccggcaaggccgtgaacgtgccgtcgtcgtccgccttcggcgaggcccgcgtgacgatgcgcaagacggcggcgaaggccaagccagcggcggcgtccgggagcccgtggtacggcaccgaccgcgtgctgtacctgggcccactgtccggcgagccaccgagctacctgacgggcgagttcacgggcgactacggctgggacaccgcggggctgtcgg

SEQ ID NO: 31172 - DNA, 301 bp, Zea mays
ccgcttccaagatgtcgaagcgaggacgtggaggttctgctggtaacaagttccggatgtcactgggtctaccagtggcagccactgtgaactgtgctgataacactggagccaagaacctttacatcatttctgtgaagggaatcaaggggcgccttaacaggcttccttctgcctgtgttggtgacatggttatggcaactgtgaagaagggaaagcctgaccttaggaagaaggtgatgccagctgtcattgtgaggcagcgcaacctatggcgccgaaaggatggtgtctacatgta

SEQ ID NO: 31173 - DNA, 299 bp, Zea mays
gccacgcgtccgcggacgcgtggggtcgggtactcgggtcggtcttgccgtgcgtgcgtggctgcgcgaaccagcccacgctcacactccccgcacgccaccgccgggtccctctagggttttgccgcgatgtcgctccggccgagcgagcgggagcagatgcggaagggcaactacaagcagacggtggacgccgaggagagccgccgccgccgcgagggccagatggtcgacatccgcatagccaagcgagaggaaagcctccagaagaagcgccgcgatgggttccccgccgccgg

SEQ ID NO: 31174 - DNA, 301 bp, Zea mays
ccgacaaggtccgggacgcgtggctgggaactcgttataaaggatatccaagatgcgtgcaaactttttgagcccatatacgatgagactgatagggctgatgggtatgtctccgtagaggtgtctcctaggttggcaaatgacactcaaggaactgttgaagcggcaaagtggttacacaaagtggtcaaccgccccaatgtctacataaagatcccagctactgcagaatgtgttccttccatccaggaagttatcgctaatggcattagcgtcaacgtcacgcttattttctcaattg

SEQ ID NO: 31175 - DNA, 298 bp, Zea mays
tgctgtcagcggtcgaatgcgggagcttcatgatgaacatcatatgaagtctttgggtctacaggtttcctctcctggatatgacagacaagctgttgctgatcatgcaaacaatcttgcctcgaaaatccgtatcaacttgactaactcaatgaaagctctaggagtggatatattgacaggtgttggcactattgtgggaaagcaaaaggtacgatatggaaaagctggtttcccagataaagaaatcactgccaggaacatcataattgccactggttcagttccttttgttccg

SEQ ID NO: 31176 - DNA, 322 bp, Zea mays
ccgcggcgccgctccgctcgaaatcgccaaaaaggcaagatcaaatcaaatcagatctctccacccccagcccatccatggcgatcgtgtacgccctggtcgcgcggggcacggtggtgctggccgagttcgccgccgtctcgggcaacgccggcgccgtggcccgtcggatcctcgagaagctgccgcccgacgccgagtccaggctgtgcttcgcgcaagaccggtacatcttccacgtcctccgatgcgacgccgccggcatcaccttcctctgtatggccaacgacagcttcggaagaaggatccactttctctacct

SEQ ID NO: 31177 - DNA, 341 bp, Zea mays
cccacgcgtccgcgttttcgtgctcacacacccaaaccttagtcgcgatcaggccccaatgactcgagatgaagtcgagggcacggtccaccgccggcgactccaggctctcggtgaggaagaccaaggctgagaaggacccaaacaagcccaagaggcctccgagcgcgttcttcgtcttcatggaggagttcaggaaggactacaaggagaagcaccccaatgtgaagcaagtctccctgattggcaaggctggtggtgacaagtggaagtccctgtctgatgccgagaaggctccctacgtgtctaaggcagagaagctcaaggctgagtacaccaag

SEQ ID NO: 31178 - DNA, 318 bp, Zea mays
  unsure (1)..(318): unsure at all n locations
ccgtggcgcggctacggcaactccgacgggaactggaggaactgagcggtggggcccgcgcggccaagttatcctgttcgctaccgtgatgtttaccctagtccagagggtttatcttcgttcgtctcgtttgttgttgcccatctgtgtttttgattgcaangtcgctctgtgtcagttgttagtgctgtgttcatcctcggctccagcagacccatgcatcaaccagcatggactgtggatcgatggatgctgttactcctgtcaggatttgttctaagttaatcctaaggaaaaaatggtgcttcttggtgctgc

SEQ ID NO: 31179 - DNA, 334 bp, Zea mays
agacgcggtgcgtcttgaaaggcgagagagagagagagaagagagagagaagagagagagagagagaggagtgggagacccgcgagaggctgccgtgtagggaccgtagactcagcgactgcgaaggagggataaggggatggccgggatcggaccgatcaggcaggactgggagccggtcgttgtgcggaagaaggcacccaccgccgccgccaagaaggatgagaaggccgtcaacgccgcgcgccgcgccggtgcggagatcgataccatgaagaagtacaacgctggtacgaacaaggcggcatccagcggtacatccctcaacaccaag

SEQ ID NO: 31180 - DNA, 328 bp, Zea mays
acggccgtcaccaccatcgtcaacctggcggaggaggccaagctcgcgcgcgagggggtcaaggcgcccggccaccagatcctcaccatctgcaagtcgctcgtcgccggcggcgtagcaggtcggagtgtctcgtactgctgttgctccacttgaacgattgaaaatattgcttcaggttcaaaatccgcacagcatcaagtacaatggtactgttcagggtctcaagtatatctggagaacagagggcctccgtggacttttcaagggcaatggtaccaattgtgcaagcatgttccaattctgccgtgaagttttttactacgag

SEQ ID NO: 31181 - DNA, 329 bp, Zea mays
gagatcatcagcatccacatcggccaggccgggatccaggtcggcaacgcctgctgggagctctactgcctcgagcacggcatcgagcccgatggcaccatgcccagtgatacctcggttggcgtcgcacatgatgccttcaacacgttcttcagcgagaccggttctggcaagcatgtgccgagggccatcttcgtcgaccttgaacccactgtcattgatgaggttcgcactggctcgtaccgccaactcttccacccagagcagctcatctcgggcaaggaagacgcagctaacaactttgcccgtggccactacactgttgggaa

SEQ ID NO: 31182 - DNA, 332 bp, Zea mays
cccacgcgtccgcccacgcgtccggcggccctcttcgagccccaggggttctgcaccaccggcggcaagcagatgcagatgatggagctctgcgccttcctcgggcacgtcggcgccaagacttcatgtgggtacggcgtggcgaccggcgggccgacggcgtgggggctgtgctacaaccacgagatgagccccgaccagacctactgcgacaagacctacacccagtacccctgcgtcgagggcgccgagtactacggccgaggcgcgattcctgtctactggaactacaactacggcgctgccggtgactggatcaaggcggatctgct

SEQ ID NO: 31183 - DNA, 331 bp, Zea mays
cccacgcgtccgcccacgcgtccggcggccctcttcgagccccaggggttctgcaccaccggcggcaagcagatgcagatgatggagctctgcgccttcctcgggcacgtcggcgccaagacttcatgtgggtacggcgtggcgaccggcgggccgacggcgtgggggctgtgctacaaccacgagatgagccccgaccagacctactgcgacaagacctacacccagtacccctgcgtcgagggcgccgagtactacggccgaggcgcgattcctgtctactggaactacaactacggcgctgccggtgacgggatcaaggcggatctgc

SEQ ID NO: 31184 - DNA, 294 bp, Zea mays
cccacgcgtccggatccttgtaatggcgaaatcatatggtttgctcaagaaatatatagtgtcatttgttctttttttttggctcgctaattttggatctttatccgtgggcagtcttttgttgacgttggcgctgaagttgataccgtcgcaggaacctgtaaggatgtaactttgtatgcacatacttgtatattattggcgtaaatttagttgtacactatcagcttaaaaaagagagagggaggtaggacgggagagggtgagtcatgagaaaagaaaaaaggggcggcc

SEQ ID NO: 31185 - DNA, 321 bp, Zea mays
gagagtaccaagtcggatggcaaacttgcctcccttgacgagtacatctcacggatgaagtcagggcagaaagacatcttctacatcacgggaagcagcaaagagcagctggagaagtctccattcctcgagaggctaaccaagaagaactacgaggtcatcttcttcaccgaccccgtggacgagtacctgatgcagtaccttatggactacgaggacaagaagttccagaacgtgtccaaggagggactgaagctgggcaaggactcgaagctcaaggagctcaaggagtcgttcaaggagctgactgactggtggaag

SEQ ID NO: 31186 - DNA, 300 bp, Zea mays
  unsure (1)..(300): unsure at all n locations
cggatcgtggacgagacgcgtgngctcgataaaataatctcttgttctagatcgcgagcgccaccctttttgtgtacaggtgtgtttttttgacaacagaaaacaattgatcaacgtgaacaaaattgtaatcaagtcgaccttcaagtctcgctacgtagcagtgcaataaaaagagcagccgcgatggcgagcagcaccatggccctctcctccacggccttcgccggcacagccgtgaacgtgccgtcgtcgtccgccatgcgcgaggcgcgcgtgacgatgcgcaagactgcggcg

SEQ ID NO: 31187 - DNA, 323 bp, Zea mays
  unsure (1)..(323): unsure at all n locations
tcatctcnctactcgatcggcagccgcaagagctgaccctccgcttcncccccaaaaaccctagccatcccaggttgctccggccgcatccccgccgaccgccgacgatgcctcccaaggccaagaaggacgctgcgccgtctgagcgccccatccttggacgcttctcctcccacctcaagatcgggatcgttgggttgccaaatgttggcaaatcaacttttttcaacatagtaacgaagtggctatcccagctgagaattttcctttctgtaccatcgaaccaaatgaagcacgggtgaatgttccagatgaacggtttg

SEQ ID NO: 31188 - DNA, 231 bp, Zea mays
  unsure (1)..(231): unsure at all n locations
ggaaaattttgtttctttacgtactgaattcagcaacgaagtcgcattactaacaaagtattgaacataagaacttggtccgattgcttggttatattgacaaacccaatgaacgaattctcataacagagtatgtaccaaatggncatcttagggagcatttggatggtaaggtcnacatggcctagttttgggattaatcagcgcttgaaatactatagatgtgcccag

SEQ ID NO: 31189 - DNA, 237 bp, Zea mays
cggacgcgtggcactgctgtctggaacgatgacgctgttcacggtgctctggaaagtgctgccttttactccaagggcttaccgtacgccaaatctctaagcggatactggaaattccttctgtcgccttcagcggaaagtattccggagagattctatgatgctcattttgatgattcaaactggtcggctttgccagttccctcaaattggcaaatgcatgggtttgaccgtcca

SEQ ID NO: 31190 - DNA, 242 bp, Zea mays
ggcaggtatgttgatccagagtaccaccagtgctaccagctgacggacaagagcgacgtgtacagcttcggggtggtcctggtggagctcatctcgtccaagccggccgtcgacatcacccggcaccgcagcgagatcaacctggccagcatggccatcagcaagatccagaagtgccagctggaggagctcgtcgacctcggcctgggctacgacaccgacccggccaccaggaagatgat

SEQ ID NO: 31191 - DNA, 306 bp, Zea mays
gaaccaagcagaccacagcaagaagcgtagtcgtcgccggaaggaaaggcgcggacaagatgtcgtggcaggcgtacgtcgatgagcacctgatgtgcgagatcgaaggacaacatctcagcgccgccgccatcgtcggtcacgacggcagcgcttgggcgcagtccgagagcttccccgagttaaagcctgaggaggttgctggtatcataaaggactttgatgaacctggtactcttgcaccaactggtcttttcgttggaggtacaaagtacatggtgatccaaggtgaacctggagttgtca

SEQ ID NO: 31192 - DNA, 196 bp, Zea mays
cggacgcgtgggtggctatctcgtctacttattatgataagctggcaacatacatgcgggatatatttagtataactgcaaaagctgtgaggggagatgaggagtcagttgcgctccaggctattgaattctggagttccatatgtgatgaggaaatcgacattctggatgagtacagcagtgaatttacagctga

SEQ ID NO: 31193 - DNA, 287 bp, Zea mays
cagacgcgtggcggacgcgtggggagaggagacctacactgccttcgaaaacatctatcctgtactgtatgagtttagaaatattcagcaatgatgacatgtgatgtgaaggtcacgttcttcaaattacaagcttcctcgaggattctcgtgtgaccatgaattctaaatgtacataaaagtctggcggaacttatagcatcctgtaatctctgtgagccgcggtctgtcagtattgggtgggcttgctgtggtaactggtggacatgtcgagttcatccatttgg

SEQ ID NO: 31194 - DNA, 215 bp, Zea mays
caacgcgcccctccgccccgcgcttcgcctgggtaccggcgtccgccgcgccccgtcccgtccaggaacaggaagagcagtaacccatccatcggggatcaccaggggagcaagatgtcgactgccgcccccaagattgcccgctcccagatccggggcaagctatcactatcagacgaccgcggctccggtggccaacaccctctccttcgccg

SEQ ID NO: 31195 - DNA, 231 bp, Zea mays
accacgcgtccgcggacgcgtgggggcgagcttgcctgcacctacgccgctctcatcctcagcgacgatggcatcgccatcaccgccgagaagatcgccacgatcgtgaaggcggccaacatcaaggtcgagtcctactggccggccctcttcgccaagctcctggagaagcgcaacgtcgaggacctcatcctctccgttggatctggtggcggagtgctccagttgctg

SEQ ID NO: 31196 - DNA, 225 bp, Zea mays
cccacgcgtccggcctgatgaaccttgggtgtgctactggccatcctagctttgtcatgtcctgctcattcactaaccaggtcattgcccaacttgaactgtggaaggagaagagctctggcaagtatgagaagaaggtgtatgtgctccccaagcaccttgatgagaaggttgctgctctccacttgggcaagcttggtgccaagctgaccaagctcaccaagt

SEQ ID NO: 31197 - DNA, 176 bp, Zea mays
  unsure (1)..(176): unsure at all n locations
accacccgtccgcgaccgtccagccacgcgtccgcggacctggccggtccaacactttcacgctcagccgctcacgctctcgcaatggctgcctccaccatggcgatctcccacacggcgatggccggtacccccatcaaggtgngctccttcggcgagggccgcatcaccatgcg

SEQ ID NO: 31198 - DNA, 205 bp, Zea mays
cggacgcgtggcggacgcgtggggcacgctggagcatactggtttggaagtccaaactacggagtgtttacctgggatgacacacttccaggagctcaggttcttctcagcaggctgcgactcttcctaagtccagggtacccttacgaagaaatactgaggacattccacaaccaaaccgacaacgtcatgtgctcgtatttac

SEQ ID NO: 31199 - DNA, 293 bp, Zea mays
cagacaaggcggaggaaaactcgaactgtgatggtggggaatgtgccacttggcagtgatcaccccataaggattcaaaccatgacgacttcagataccaaggatgttgcgaaaacagtagaggaggtgatgaggatagcagataaaggagctgatcttgttagaataacagtccagggtaggaaggaagctgatgcctgctttgagatcaagaacactctggttcagaagaattacaacattccactagtggccgatattcattttgctcctacggtagctctaagggtggc

SEQ ID NO: 31200 - DNA, 271 bp, Zea mays
actggggcgaggcgggcggccccgacctcatcgtcgacgacggcggcgacgcacgctgctcatccacgagggtgtcaaggccgaggaggagtacgagaagaccggcaagatccccgacccggagtccaccgacaacgctgagttcaagatcgtgctcaccatcatccgcgacgggctcaaggctgaccccaagaagtaccgcaagatgaaggagaggcttgtcggcgtctctgaggagaccaccacgggtgtcaagaggctctaccagatg

SEQ ID NO: 31201 - DNA, 346 bp, Zea mays
gcggttcaccaccacctagagatgaatccacaccaagaccaccaaggggtggtggtggcggcggcggcggcggctttgtcgattcagctaacaaggtctatgtggggaaccttgcgtggggtgttgacaactcgactctggagaacctgttcagtgagcaagggcaagtgcttgatgctaaggtcatctacgacagggatagcggcaggtcaagggggtttggtttcgtcacctatggctccgccaaagaggtcaacaatgccatatcagacctcgatggcatcgacttggatggtagacagatccgagtcacggctgcggagtcaaagcggagacgtcaattttg

SEQ ID NO: 31202 - DNA, 252 bp, Zea mays
ctcactaacacacaacttctccatacacgccttagccatggcttccgctgcgcagaagaagatgacaattgtttgcttgatgctgctggccgtcgtcggccaaatcgtcgctgatgatgatgttaccgtagaacatcccagccgcatctgcaccgaaacggtgattgatcctcgtgttcccaacaacgtgtgcatctgctccaagaactgcgcctgtgccggcaagtgtatccttgagtcggctgatgctgt

SEQ ID NO: 31203 - DNA, 343 bp, Zea mays
aggatccacatcttcccgagcgagttcttggttgacctcttcccccttcggaccacctccaaggctcttggtgtagcttgccactctcaccaatcaagttttcatgtctgatctcgacattcagatcccaactgccttcgatcccttcgctgaggccaatgctggggactctggtgcggcacagggtcaaaggactacgttcacgtgcgcatccagcagcgtaatggtcgcaagagcctgactaccgtccagggattgaagaaggagttcagctacagcaagatcctcaaagatctcaagaaagagttctgctgcaatggtacagtggtccaggacccagaac

SEQ ID NO: 31204 - DNA, 268 bp, Zea mays
tatggtcgtttctctattacactccctgtttgattttctggccttcaaaaatgatatccagttctggaacaagaacaagtccatggaaggtctatcggcaaaatctgtggttctgaattttgtgtgtcaactagttgttttcctgtaccttcttgacaatgacacttcatggatgatccttgctagctctggagttggtgtgtgcattgaattttggaagattggaaaggcaatgcatattgaggttgatagaagtggaaaaattccc

SEQ ID NO: 31205 - DNA, 247 bp, Zea mays
ccggcccgcccgtcaactacgagaaccgctggcacggctggaacaccaccgcgcaggcgcagaaggccgacctggacaggctcaagaagatgctggccagcatgtgcttcaagctctacagcatgaagggggacatcgccgtgtggcagaagtccgccgacgcctgctacgacaagctcaccccggtcaccacgcccgccaagtgcgacgacagcgtcgaccccgacgccgcctggtacgtgcccat

SEQ ID NO: 31206 - DNA, 339 bp, Zea mays
cgagtacccaacgcgctactagttctattgccgcaccccagatctccaggagggactcgttctttcagctaactacactgcacgcaatggccaccacggcgaccgacgcggcgccggcgcaggagcagcaggccaacggcaacggcgagcagaagacgcggcactccgaggtcggccacaagagcctgctcaagagcgacgacctctaccagtacatcctggacacgagcgtgtacccgcgggagccggagagcatgaaggagctccgcgaggtcaccgccaagcacccatggaacctgatgacgacctccgccgacgaggggcagttcctgaacatgc

SEQ ID NO: 31207 - DNA, 300 bp, Zea mays
caagtccctcagagggccaagggctggcatgatcttctacaggaaaggccctaagccccccaagaagggccagcctgagggtgctgtttatgattacgaagacaagatcaactttgcagtgttcccatctctccaaggtggccctcacaaccaccagattgctgcacttgctgttgctctacagcaaactatgtcgcctggcttcaaggcctatgcaaagcaagtgaaggccaatgctgttgcaattggaaactatctcatgagcacaggctacaagatggtgactgatggaactgagaa

SEQ ID NO: 31208 - DNA, 337 bp, Zea mays
gaggttcgagaaagaggctgccgagatgaacaagcggtcattcaagtatgcgtgggtgcttgacaagctcaaggctgagcgtgagacaggtattacaattgatattgccctgtggaagttcgagaccaccaagtactactgcactgttattgatgccccgggacaccgtgacttcatcaagaatatgatcactggcacttcccaagctgactgtgctgttcttatcattgactcaaccactggtggttttgaggctggtatctccaaggatggccagacccgtgagcatgctctccttgctttcacacttggtgtgaagcagatgatttgctactgc

SEQ ID NO: 31209 - DNA, 337 bp, Zea mays
agtcactctcctctcgaggtattagcagtcgaccggttcctcggagcacgatgaagtttgttgctgcctacctgcttgctgtcctcgctgggaacgccagcccctccgctgacgatttgactgccattctggagtcagttggctgtgaagttgacaatgaaaagatggaactcctgctgtcccaactgagcggtaaggacatcaccgagctcattgccgcgggcagggagaagtttgcttcagtcccatgtggtggcggcggtgtcgctgttgcggcagctgcacctgctgctggcggagtgctcctgcagctgaggcaaagaaagaagagaaggtg

SEQ ID NO: 31210 - DNA, 266 bp, Zea mays
cggacgcgtggcggaggcgccaccctcttcgcggacgtgctctccgtgaaggagttccccaggaacctactcctgagctcgctgccgcccggcttcgacgtgatctgcacgcaccccatgttcgggccggagtcggcgcgcgacgggtgggacggcctgccgctggtgttcgagcgggtgcgcgtcggggactgccccgcgcgccgcgcccgcgccgacgcgttcctcggcgccttcgagcgcgaggggtgccggatggtggagat

SEQ ID NO: 31211 - DNA, 326 bp, Zea mays
gtacgtcaagatgcagatcttcgtgaagaccctgacgggaaagaccatcaccctcgaggtcgagagcagcgatacaatcgacaatgtcaaggccaagatccaggacaaggaaggtatcccgccggaccagcagcgactaatcttcgcggggaagcagctcgaagacggccgcaccttggccgactacaacatccagaaggagtccacccttcaccttgttcttcgccttcgcggtggcatcattgaaccttccctccaggcgctcgcccgcaagtacaaccaggacaagatgatctgccgcaagtgctatgcacggcatgcaccca

SEQ ID NO: 31212 - DNA, 331 bp, Zea mays
cggacgcgtggcgagacgcgtgggtggttcaacatcacacaagaaaaacggtttctcaagaccactctagaaatgtgcagacgaggtcctactgaatggcgatgttgcaagtacatctgggaaatccattgcaagcttacaggtggaagcatctgatttggcaaacttccttaccatggatcggaatgggggttaccgaggttcacaaactcttctaagatctgtattatcagagaaacaagagctgtgcttctctgttgtctcattgctctggcagaagctcatagcttctcctgaaatgcagatgtctgcagaaagtacatcagctcac

SEQ ID NO: 31213 - DNA, 328 bp, Zea mays
  unsure (1)..(328): unsure at all n locations
cggacgcgtgggcccgaatgaatattcttcattcatgggcgatttctcaactgccaccggcatagctacatttacaatgatgttgttaggaagagtgatcctcagaaagtttgggtggggagttgcagctacgatcacgcctgcagtgttactcctcacaggagttgggttcttctcactgattttgtttggtgagccattgactcctcttatgaccaagtttgggatgacgcctttgcttgcggcagtctatgttggagcaatgcagaacattttcagtaagagtgcanaatacagtctgtttgatacttgcaaagagatggcatac

SEQ ID NO: 31214 - DNA, 327 bp, Zea mays
ctcctgctcacccaccggcaccgcatcctcgccgcccggaccctctctgtctccgcctccgccgcggcgggctcctcctccatccccgtcaagatgactgcgcggtcggcgctggacgaggtcaccgacacgggcgccttcgaccggtcgccgtccaccttccggagctccgtttccagggacgggcggttccccgccgtggcggggcggtaccacctctacgtctcgtacgcgtgcccctgggcgtcccggtgcctcgccttcctcaagctcaagggcctcgaccacgccatcggcgtcacggccgtgaagcccatcttcgagcgg

SEQ ID NO: 31215 - DNA, 333 bp, Zea mays
  unsure (1)..(333): unsure at all n locations
nccacgcgtccacccacgcgtccgcggaccgtggcagaaactacagcagtcaactttcagctttgattctagctacttctcaatgctcaaatctgacaagaagacgctattacttacctaatccatctctgtaccaagtttggagtaggtcatttgcctcagacagcggagacaagttcgaggctgttgtgcccttcatgggtgaatctgtaactgatggaactcttgctaacttcttaaagaagcctggagacagagtcgaggccgatgaacccatagcgcagattgaaactgataaggtcactatagatgtcgcaagtcctgaagctggtg

SEQ ID NO: 31216 - DNA, 283 bp, Zea mays
attcagaaaaggtgcaagaactatgtgatgctgctaatgacgaagtagatgaaaacgatagagttcaaatagcaaactttctgtgccctgggaattatgcagtttctggtggtgtaaaaggtattgaagtagtcgaagccaaagcaaagtccttcaaggccagaatgacggttcgcctagctgttgctggcgctttccatactagcttcatgcaaccagctgtttcaagattggaatctgcgttggctgccactgagattagaacacctagaattccggtcat

SEQ ID NO: 31217 - DNA, 283 bp, Zea mays
gactagttctagagcgtgacgcgtctcccacacggccgccgccctcgccttcgtgcgttccccgcgtagagtttagggttttgtcgccgccatggcgatcctctcggcgctcgccaccgaggtgttcatccccgtcgccgccgtcatcggcatcgccttcgccgtcgtgcagtgggtgctcgtgtcgcgggtgaagctctccccggctgcagccgcgtccggcggcagcaagaacggctacggcgactacctcatcgaggaggaggaggggctcaacgaccac

SEQ ID NO: 31218 - DNA, 329 bp, Zea mays
atcgcgagccgccgccctttttttttttttttaacaacaaaacgaaaggtcgacgattgaaggaaaggacacacgataattgtccttgtacaagcatggcatggcatggcatggcatgacgactactactgctcctcgtcaggcttatttgcatcccgcatttcatcgccaccatcctcctgcatgtcagaagtccacaaggtgaggttgtcacgaagaagctgcatgatgagggtgctatccttgtacgactcttccccaagactatccagctctgaaatagcttcgtcgaaggcctgcttggccagcgagcaggcgcggtccggcga

SEQ ID NO: 31219 - DNA, 278 bp, Zea mays
gcccaggaagttgctggtgatgttcgcatgactgatactcgtgcagatgaagccgagcgtggcatcacaatcaaatctactggtatctctctttattatgagatgactgatgagtcactgaagaactacaagggtgagagggatggtaaccaatacttgatcaaccttattgactcacccgggcacgtcgatttttcttcggaagtcacagctgctcttcgcatcaccgatggtgctctggttgtggttgattgtattgaaagtgtctgtgtgaaact

SEQ ID NO: 31220 - DNA, 324 bp, Zea mays
cggacgcgtggccgctccgcaaggctgagcatgcattctacttggactgggctgtccactccttcagaaacaccaactgcgagatccaggacaccacccagatccacacccacatgtgctactccaacttcaacgacatcatccactcgatcatcgacatggacgcggacgtgatcaccatcgagaactcgcggtccgacgagaagctgctctccgtgttccgtgagggtgtcaagtacggcgcgggcatcggccccggtgtctacgacatccactcgcccaggatcccgtcggccgaggagatcgccgaccgcatcgacaaga

SEQ ID NO: 31221 - DNA, 309 bp, Zea mays
cccacgcgtccgatgaccaaaacagatgctgctgtacagacactttctggaataaatcctgatgttgtgttggagagctactcattgaatattactacagtcaaaggtttcgaaacatttttggcaagtttaaaagcacaaagttctcatgagcgtacactggagttgatcttgtcttgagttgtgtcgataactatgaagctcgtatggttgtaaatcaggcatgcaatgagcttggtcaaacgtggatggagtctggtgtctcagaagatgctgtgtctggtcatatacaactgctggttcctggtg

SEQ ID NO: 31222 - DNA, 328 bp, Zea mays
ggaggtggtgtcgaactgtgcaaaaaggctggtgttaaggtacgaatggtaactggagataatactgaagacagctaaagcaatagctcttgagtgtggaatactcgatgactcagaggcatctgcacaagctataatagagggaagagttttccgtgcttacgatgatactgaaagggagaatgttgctgacaagatttctgtgatggcacgatcttctcctaatgacaaacttctcctagtaaaagctcttaagaaaataggccatgttgtagctgttactggtgatggaacgaatgatgctcctgcattgcatgaggcagatatt

SEQ ID NO: 31223 - DNA, 329 bp, Zea mays
gtcacttccaactcgtgcttctgcaaatagtctttcaagagccaataatcttagtggccctctgtcacttccaactcgtgcttctgcaaatagtctttctgctcctattcgatcttctgcaggttatgtaggctctttgggtgataaacctaagcgcactatggtggaaattagaggccgcttctcagtgacatctgagaatgtggatcttgcaaaggttcaagaaattccagggagcagtgcctcacgtagattgcaagaggggccttcactgagagaatcagccagtgttggtgattggtcagcgaatgataagacaacgtctacta

SEQ ID NO: 31224 - DNA, 328 bp, Zea mays
gcaagtttgacaacctgtatggttgccgccactcgctccctgatggtctgatgagggccactgacgttatgatcgccggaaaggttgccgtggtctgcggatacggtgatgtcggcaagggttgtgctgctgccctcaagcaggctggtgcccgtgtcattgtgaccgagatcgaccccatctgtgccctccaggctctgatggagggtcttcaggtccttcccttggaggacgttgtctctgaagctgacatcttcgtgaccaccactggcaacaaggatatcatcatggttgaccacatgaggaagatgaagaacaatgccattgt

SEQ ID NO: 31225 - DNA, 327 bp, Zea mays
  unsure (1)..(327): unsure at all n locations
cccacgcgtccgcggacgcgtgggttcaaactcttggccgccgcctcgctctctgttcgccgcgccccgccgcagaaatagcgctgccgactcagcaggttgtggattaccccagcttcaagctcgtcatcgttggcgacggtggaactggcaaaaccacatttgtgaagaggcatcttactggcgagtttgagaagaaatatgagcccaccattggtgttgaagttcaccctctcgattttagcactaactgtggcaaaattcgtttctattgctgggacactgctgggcaagaanagttcggtggcctcagggatggctactaca

SEQ ID NO: 31226 - DNA, 330 bp, Zea mays
ccgaagaggtagagctcgggagtgtcaggtaccaaataacagaagctgagggtaccatcatgcagctgatcgataccaacagtaagttatccaagaaggccgaggagttcacgtctcccgatggccccgatgcggagaacagtgacttgaggagcaggcatcagcgtaagatcttggagcgtgcaaggaagatgtccgagaagatcgggaggctggaggtggaaatgcagaaggtccagcaggctctgctcagatacgaggaggagcagagtaccaggagtacctcaaaagccctgcagcggcggtccaaagtgcagctcgtggagtatc

SEQ ID NO: 31227 - DNA, 308 bp, Zea mays
agaaattaaagaggctgttgagcttcccttgactcatcctgagttgtatgaagacattgggatcaggccacccaagggagtcatattatatggcgaacctggaactggaaaaactctactcgccaaggctgttgccaattcaacatctgcgactttcttgcgtgttgtcggtagtgaacttattcaaaagtaccttggggatggtcccaagctagtcagagaattgtttagggtggctgatgaactttctccctcaatagtcttcattgatgagattgacgcagtggaacgaagaggtatgatgctca

SEQ ID NO: 31228 - DNA, 318 bp, Zea mays
ctctcttccaccttccaccacaagcgccgccgcagccggtgcctgctccttcccgatccccgaggcaaagctgcgactccgcaaccgccgccatggcgttcgagaagatcaaggtctccaacccaatcgtcgagatggacggtgatgagatgaccagggtattctggcagtctatcaaggacaagcttatcctcccatttctggacctggacatcaagtactatgatttggggatactgcaccgtgaagcaactgatgacaaggtcacagtggaggctgcagaggctactctcgagtacaacgtggctattaagtgtg

SEQ ID NO: 31229 - DNA, 323 bp, Zea mays
ctcccgttccatttccccatctcccagatccaattcgcgagttctccctcctctgccgccatggcgctctctgtggagaagacctcgtctggacgggagtacaaggtcaaggatctctcgcaggcggacttcggccgcctcgagattgagctggccgaggtcgaaatgcccggcctcatggcgtgccgcgccgagttcggcccgtccaagcccttcgccgccgctaggatctcggggtctctccacatgaccatccagaccgccgtcctcatcgagaccctcaccgcgctcggcgccgaggtccgcaggtgctcctgcaacat

SEQ ID NO: 31230 - DNA, 323 bp, Zea mays
ctgaacaatgggagaagcttaattcttgctggccttgctgaaccaaaaagagcaaatggagaagagttgttgaataagttggctgttggatttgaggagcttcaaagaattgtggaagacagaaatagggatgcagtagctccaaagcagaaagagcttctccagtatgttggaactgtagaagaagacatggtcgatggctttccctttgaaataccagaagagtacagcaacatgcctcttctcaaaggaagagctactgtggatatgaaggttaagattaaggacaatcccaacatggaagactgtgtatttaagatagt

SEQ ID NO: 31231 - DNA, 323 bp, Zea mays
cccacgcgtccgcccacgcgtccgctggaaagcctagccgccatatctcacgatccactcgagcaccaagccgagggaatgtgaggagcgatggcgcgcggcgtggtgtcggcgataggcggcgcggtcgcgggcaagaagaaggggtcggtttccttcacgatcgactgcaccaagccagtggaggacaagatcatggaggtcgcctcgctcgagaagttcctgcaggagcgcatcaaggtcgccggcggcaaggctggcaacctcggcgacttcgtcaccatctctcgcgagaagaccaacgtcaccgtcacctctgacgg

SEQ ID NO: 31232 - DNA, 325 bp, Zea mays
accgagcggagtctagactcgagagcaacctcgacctcccggatctctctcccacccacgcctcgtcggcgccgtcgtctgctgcagcgatggcctcccccgacctgctcttcaatctgcggaacctcttctacctgggcgcctaccaggcagccatcaacaacagcgacgtcccgggcctcgacgccgacgccgccgctgagcgcgacgccatcgtcttccgctcctacatcgccctcggctcctaccagctggtgatcagcgagatcgactcgtcagccgctacctcgctgcaggccgtgaagctgctcgcgctgtacctcac

SEQ ID NO: 31233 - DNA, 303 bp, Zea mays
atcgtcaccaccatccccaccatcggtttcaatgttgaaactgttgagtacaagaacattagcttcactgtctgggatgtcgggggtcaggacaagatcagacctctttggaggcattacttccagaacacccagggtcttatctttgttgtggacagcaatgaccgtgaccgtgttgttgaagccagagatgagctccacaggatgctgaacgaggatgagctacgtgatgctgtgctgcttgtttttgccaacaagcaagatcttcccaatgccatgaatgctgctgagattactgacaag

SEQ ID NO: 31234 - DNA, 306 bp, Zea mays
cagacgcgtggcagacattgaggtcgtcgtcgttgacatctccaagccccgcattgaggcctggaacagagacaccctgccaatctacgagcctggtctcgatgatgttgtgaagcagtgcaggggcaggaacctcttcttcagcactgatgttgagaagcacgtcgctgaggctgacattatctttgtctcggtgaacacccccaccaagacccgtgggcttggagctggcaatgctgccgacctcacctactgggagagcgctgcccgcatgattgcggatgtctccaagtctgacaagattgt

SEQ ID NO: 31235 - DNA, 313 bp, Zea mays
cataattactgaaatcaatgaaaagattggtgctgctggtgtagtcagccaggagtgcaagactgttgtttctcaatatggacagcagatcctagatcttttgctagctgagacacaaccaacgaagatctgttcccaggttggtctgtgcacttttgatttcccagcttcatcatccactacgctccgaattccagcgctgacaccatgagtgccatcaaaagtgcacagaccaacctgggaacagatcttcgtagtcttccctgcgcttgctcgctccttcttgcccccatggcgctgctacgcgtccagg

SEQ ID NO: 31236 - DNA, 309 bp, Zea mays
tcctggccatctgggcgtgccaggtggtgctcatgggcgccgtcgaggggtaccgcgtcgccggcggcccgctcggggaggtggtcgacccgctgtaccctggctgcagcatcgacccgctcgggctcgccgacgacccggaggcgttcgccgagctcaaggtgaacgagatcaagaacggccgcctcgccatgttctccatgttcggcttcttcgtgcaggctatcgtcaccggcaagggccccctcgagaacctcgccgaccacatcgccgaacccgtcaacaacaacgcctgggcttacgccacca

SEQ ID NO: 31237 - DNA, 311 bp, Zea mays
cccacgcgtccgcccacgcgtccggattgacaaaggtgcttttgggtacggatcatacttctgtttgtctctgatggacaagttgtaccacccggacatgactgttgaggaagcagtagatcttgttgacaagtgcatcaaggagattcggctgcgattggttgtcgcgcctcagaactttgttatcaagattgtcgacaaggacggggcgagggagtacgccaggcgtgaactcgtcggtgacaatgcacctgctgaagctgcaaccgcagttgttgctgcctgaggcatgaactcgtttgaggttgaaa

SEQ ID NO: 31238 - DNA, 315 bp, Zea mays
cccacgcgtccgcattctcagtcgccgccaatcccttcccgtgctccgcaaccgctgagtgagaagaagagatggccggcaagggcgatggcccggctatcggcatcgatctcggcacgacgtactcttgcgtcggcgtgtggcagcacgaccgcgtcgagatcattgccaacgaccagggtaaccgcaccacgccctcgtacgtcgccttcaccgactccgagcgcctcatcggagatgcggccaagaaccaggtcgccatgaacccctctgtccctgggtctggagactgctggaggagttatgacagtgctg

SEQ ID NO: 31239 - DNA, 315 bp, Zea mays
cccacgcgtccgactagttctaagatcgcgatctagaaccggacgcgtgggcatgccctcacttcattcatgtggctatgcggtcctattgctggcttagtggtccaaccgctggtatgcctgtacagcgataggtgcacagcaagatggggaagacgcaggccatttatcctgataggatgcatgctcatctgccttgccgtcattgttgttggcttctcgtccgacatcggagctgctctaggggacacaaaggacactgcagttctaccacggcctcgttggcatgctgcgatcgtgtacgttctgggtttt

SEQ ID NO: 31240 - DNA, 236 bp, Zea mays
cccacgcgtccgcgatcaccgaccgacgcctctccgacgagcaactcaaccccccaccgcgcacgcgagagccggatccccacgatggcgacgatccagcaccaggcgaaaccggcggtggcggcggcgccgagcacgactactggcggtgggcagcgcgcgatggacctctacgagaagctggagaaggtcggagaggggacctacgggaaggtgtacagggcgcgggagaaggc

SEQ ID NO: 31241 - DNA, 233 bp, Zea mays
tggtattcttgtcgtgtcagctcctgatggcccgatgccacaaactaaggagcatattcttcttgcccgtcaggttggtgtaccttcccttgtgtgcttcttaaacaaagttgatgctgttgatgatccagagcttctggaacttgtagagatggagcttcgggagctcctcagtttctacaagttcaccggtgatgagattccgatcatccgtgggtctgcattctctgctt

SEQ ID NO: 31242 - DNA, 262 bp, Zea mays
atacgctgagtaccggcggaatccgggtcgaccacggaccgcacgcgacgccacgcgacgacacggtccgggaccgtggctcgcccgcaacggcgtcaagttcggcgaggccgtgtggttcaaggccggctcccagatcttcagcgagggcgggctggactacctcgggaacccgagcctcatccacgcgcagagcatccttgctatctgggcctgccaggtcgtgctcatgggcgccgtcgagggctaccgcatcgccggc

SEQ ID NO: 31243 - DNA, 235 bp, Zea mays
cttcgcacgagcgcaacaccatccacccaccagttcgaagcggaggcgaccggcaacctgcggcggagatgtcaggcaggggcaagggcggcaaggggctcgggaagggcggcgcgaagtacaccggaaggtgctgcgcgacaacatccaggggatcacgaagccggcgatccggcagctggcgaggaggggtggcgtgaacgcatctccgggctgatctacgaggagacccgcg

SEQ ID NO: 31244 - DNA, 236 bp, Zea mays
gtggggtgatcctctacgtgatgcttgttggctgccttcccttcgacgacaggaacctcgtcgttctttatcagaagattttcaagggagactgtcagatccccaagtggctttcgcctgccgcgcaggaccttctcaagaggatcctccaaccgaatccgatgaagaggatcaacgtcgcggggatcagggagcacgagtggttcaagaaggactacgtgcctgctgttccgcac

SEQ ID NO: 31245 - DNA, 249 bp, Zea mays
cctgcttccgcgtgcccaaggggcgcccgccgccgtcgggaggctcccgcccgtgaccctgctgttcaatggcgcgcagatgtcggtggcgggggacaggctgctgtacaaggtccccggagagcgccggggagccgacggcgtgtggtgcctgacgttcgggaacgcggacatggtgcccctgacggcgtacgtgatcgggcaccaccaccagatgaacctgtgggtcgagtacgacctggagcgcgg

SEQ ID NO: 31246 - DNA, 320 bp, Zea mays
gagacgcgtggctggcggcaaaacttgcgcccagatattcgaggaggctggttgtgatacaccagcacgtcctaattgcggcgcttgtctgggtggccctcgcgatacgtatgcacggatgaatgaacctacggtctgcgtgtccaccacgaacaggaacttcccgggcaggatggggcacaaggaagggcagatctacctggcgtccccctacaccgctgcagcctcggccctgacggggtacgtcacggaccccagggacttcctcatgtgaacgatcttgaaacagccacagagtgcctgcaccgctgttttttgtg

SEQ ID NO: 31247 - DNA, 322 bp, Zea mays
aaaatactgaaaggttttgagggaaaccatccattccataattacacagcacgtgccaagtataggaaggttcttgcgggaagacacagaagggccaaaggagcaagctcggcgttgaagtccatgtcctctgacacgggcatggcagacaactcttctgaagaaagcacttctccagatcacgatgaggacttgaatatttcatcaatctttgactctggtataccagaagacactcgtgtggatggtattctgaagctttctgaggatcgggtgcagattcaagctaggtggctgcatgagcctgacgaaagcgatagat

SEQ ID NO: 31248 - DNA, 315 bp, Zea mays
cagacgcgtggggcgcttgaggagtctggaggatggatggagaggacgacggtggaggacatggacaacgctgttcgagcgcacctcaaagggtggaagtttctctttctaaacgatgtcgagtgtcagtgtgaattgccagaatcgtatgaagcgtacagaaagcagcagcaccggtggcactcaggtcccatgcaattgtttaggctctgctttgtggatataatcaaatctaagatcggtttctggaagaagttcaacctcatattcctcttcttcctgctccggaagctgatactacccttctactccttc

SEQ ID NO: 31249 - DNA, 318 bp, Zea mays
acccacgcgtccgcggacgcgtggatcccgtcgcatcccatcccactaccacccatctcgtcgtccgccaattcgatccgactcttccaacccaggggctgtgatggcgacgaagaggagcgtgggcaccctcggcgaggcggatctgaaggggaagaaggtgttcgtgcgcgccgacctcaacgtccctctcgacgacgcccagaagatcaccgacgacacccgcatccgcgcctccgtccccagcatcaagttcctcctcgagaagggcgccaaggtcatcctcgccagccacctgggtcgtccaaaggtgtcacc

SEQ ID NO: 31250 - DNA, 215 bp, Zea mays
  unsure (1)..(215): unsure at all n locations
cggacgcgtggcgagacgcgtgggtcgtcggcggcatctcttgggagacggacgaggatcgcctccgcgacgtacttcggtacctttggcgaggtcaccgaggccgttatcatgcgggaccgcaacaccggccgcgtccgtaggttcgggttcgtcgtcttcgncgattccgggatcgccgaacgcgtccacctcgataagcacatgatcgacgg

SEQ ID NO: 31251 - DNA, 319 bp, Zea mays
gaaagagcggtgcttagccacccatgtcgctgcgtccgagcgagcgggtcgaggtacggcggaaccgctacaaggtggcggttgacgcggaggaggggcggcggcggcgcgaggacaatatggtggagatccgcaagagccgccgtgaggagagcctcctcaagaggcgccgtgaggggctccaggcccaggtccctgccccatcctcgcgggttgagaagaagcttgaaagcctcccagctatggttagtggggtttattcggatgataatcaacttcagcttgaggccacacacagttccgcaaattgctctctata

SEQ ID NO: 31252 - DNA, 242 bp, Zea mays
catcgctccgccgccgccgaaacagcacatcgctctctcgatctcagccatggcggaggtggagcagccccaggacgcggtgaagctcttcaaccgctggaccttcgacgatgtccaggtgaacgatatctcgctgaacgactacctggctgtgactgcggcgaacacgcgacattcctgccgcactccgcggggcgctactccaagaagcggttccgacaagcgcagtgcgccatcgtcga

SEQ ID NO: 31253 - DNA, 318 bp, Zea mays
  unsure (1)..(318): unsure at all n locations
cgaccccatctgcgacctccaggctctgatggagggtcttcaggtccttcccttggaggacgttgtctcggaagctgacatcttcgtgaccaccactggcaacaaggatatcatcatggttgaccacatgaggaagatgaagaacaatgccattgtctgcaacattggccactttgacaatgaaattgatatgctcggccttgagacctaccctggcgtcaagcgcatcaccatcaagccccagactgaccgctgggtgttccccgagaccaacactggcatcattgtccttgctgnaggtcgcctgatgaaccttgg

SEQ ID NO: 31254 - DNA, 310 bp, Zea mays
ggaacatggagtactatcactggaagctgtacagtagtcagggacgtgaaaactttgcttttccactcctatttttcacttatggatgaccttcgtcttcagaaacctcctgacggggagccatatgagataagattgcttgatattcctggtgcactaatagcggctgcatttgggcttctacttgatggaataatgttcacattaattgccttctataagtgccccgtgatgcttttcaaaggatggaaacgactgatccaggacatgattgggagagaagggcctttctggagactgctgtgtgcca

SEQ ID NO: 31255 - DNA, 215 bp, Zea mays
cgcccgggcccccgggaccgcgtacgtctgggtcggcaactccgccacgcatgccccgggcagtgcgcgtcgccgttccaccggcctctgtacggtccccagacgccggcgctcgtgccgccgagcggcgacgtcggcgcggacggcatggtgatcaacatcgccagcatggtcgccggcgcggtgaccaacccgttccgcgacgggttctacca

SEQ ID NO: 31256 - DNA, 260 bp, Zea mays
acgcacccgccacggtccgcgaccgtggcgacgctggttttttttttttttgttagctcaacaatgtgataatactcatcatacatcccttttcacatgaaccttaatctatcttattatttagaaaacatattgtctttccatttctaccgtagcgtacactacggtatgctgctagtgatgtttaggtaagcagctgacgatgaggacgtccacacatcatgggcccggcgcggccgtacgtgacgtcctgtttgttg

SEQ ID NO: 31257 - DNA, 311 bp, Zea mays
ccgacagggaaagccgtgttgcaagaaggggaattccgctgcgagatccgtgaacggttcagagatggcacagacggtgttcaccccctctttggaagcgatgaagcatgtcaaggcagagaacggagtcattctcaccaagcccttccttgatgtctgcaagcaaatattgcctgtcctcgataaatttggaggtgctatggcaattgtaaagagtgatatcggcggcaatatcacaagactggaaaacaagtatacttcagaaccatcaaagtatgaacacttgtacagcatggtttaggaagaagttc

SEQ ID NO: 31258 - DNA, 316 bp, Zea mays
  unsure (1)..(316): unsure at all n locations
nccacgcgtccgcggaccgtggcgacgtggnaagctcgatctactactactactagctggtacacatactagccagactgccagccagcttgccatggcgcccaccgtgatgatggcctcgtcggcaaccgccgtcgccccgttccagggtctcaagtccgccgccagcctccccgtcggccgacgcagcaccaggagcctcggcaacgtcagcaacggcggaaggctccggtgcatgcaggtgtggccggcctacggcaacaagaagttcgagacgctgtcgtacctgacagcgctgtcgacagacgacctgctg

SEQ ID NO: 31259 - DNA, 268 bp, Zea mays
  unsure (1)..(268): unsure at all n locations
gcacagatccatcggagtgacagcgagcgagcgagagcangagcangagagacagagagattatccgcgcgtcaccgactcccggcgaagacgatggggaaggggttcgcatcctacctggcgatgaagacggggccggagggcggcgacgcggcggcggcgcacaggctctgatcgacgcggacctgcgggagctcggcgtcgccgcgcggaagctcgccaaccacgcattcgtcctcggcggcgggctggggttcggcacctcctt

SEQ ID NO: 31260 - DNA, 240 bp, Zea mays
cggacgcgtggcgagacgcgtgggcaggactgcgagcaaggtgtagtgcacagggacatcaagccgagcaccgtcatgctggatgcctccttcaacgccaagctcggcgactttgggctcgcgaggctggtcgaccacgcccgtggagcgcacaccacggagctcgccgggacgatggggtacatggaccctgcatgcatcagcacaggcaggttcagcacccagtcggccatgtacagc

SEQ ID NO: 31261 - DNA, 200 bp, Zea mays
agcaagcaagcaagcagcgagtacatacatactaggcagccaggcagccatggcgcccaccgtgatgatggcctcgtcggccaccgccgtcgctccgttccaggggctcaagtccaccgccagcctccccgtcgcccgccgctcctccagaagcctcggcaacgtcagcaacggcgaaagtttccggtgcatgcaggtgt

SEQ ID NO: 31262 - DNA, 316 bp, Zea mays
cagccgctttggttgccagacagagctgtccccaattgatcatggcatgtgcttgccggagaacttggaggacccttacttcgagtggatccattgggctcaggcttctattccgttctctgaggaagagctcgagtacatcagaaatcttgatccaaggaaagatgtgcagatgctgcgccgggaacttccgatgatacgtgaggcctgcctacatgtactggccctgtgcacaatcttccttaaggaggctgcagctttcggactctgcttggccgagataggcgagatgatgaccagggagttcagagggatg

SEQ ID NO: 31263 - DNA, 194 bp, Zea mays
gccatttcgaaagatctcgctacttatatttcaatcaaccagcctatcttgcacaaatatgcaaatgaagacgtgtcgcttggatcatggttcattggtttggaagttaatcacattgatgaaaggaacatgtgctgtggaactccaccagattgtgagtggaaagggcaagctggtaatgtctgtgtagcgtc

SEQ ID NO: 31264 - DNA, 241 bp, Zea mays
ggcagtttgaagaagattccgaatctttcagatcctgcacaatattcaagactaggactagtgccaagaagagctgatctggacatgaaccaacatgtcaataatgttacttacattggttgggtccttgaaagtatacctcaagatataattgatacacacgagttacaaacaatcactctcgactatagaagagaatgtcaacacgatgacatatttgattctcttacttacgtagagg

SEQ ID NO: 31265 - DNA, 209 bp, Zea mays
gtgaagacgtcggcgcaggacatcatcaacctcaagccactcatcgacaagaaggcgtggccgtacgtccagaacgacctccgcctccgggcctcctacctgcgctacgacctcaagaccgtcatcgcttccaagcccaaggaggagaagcagagcctcaaggagctcaccggcaagctcttcagcaccatcgacgatcttgaccatgc

SEQ ID NO: 31266 - DNA, 304 bp, Zea mays
ctgtcattcacttcgctggattgaaagctgtgggtgaaagcgtacagaagccattactttattatgacaacaacgtcattggcacgataaatcttctagaagttatgtctgttcacggttgcaagaagttggtgttctcatcatcagctgcagtttatggatcacccaaaaactcaccctgcacagaaaattttcctcttactccaaacaatccatatggcaaaacaaagctcgttgttgaagatatttgccgggatatctaccgttcagatcctgaatggaagatcattttacttaggtactt

SEQ ID NO: 31267 - DNA, 317 bp, Zea mays
cggacgcgtggcggacgcgtgggcgacgaccctgaggccttcgcggactcaaggtgaaggagctcaagaccggccgcctcaccatgttctccatgttcgggttcttcgtccaggccatcgtcaccggcaagggcccgctcgagaacctcgccgaccacctcgccgaccccgtcaacaacaacgcatgggcctatgccaccaactttgtgcccggcaagtgagggggtggaggcgccacggcccaccggccaccgctgcggatatctaggtgttcggatgcacgtgagcgcgcactggttccagtttgtaccatgatg

SEQ ID NO: 31268 - DNA, 322 bp, Zea mays
cgtcaccatgccaagcaacggcgacgtgcctttcacccacgccaacgtcagccacgccgcgcacgacttcggctaccgccccaccacctccctcgaggccggcctccgccacttcgtcgactggttcgtcagctactacaagctcgacgccaagatcgccaagcccgccgccgccgccgacgacgacaagcccgcgaaaaagaagaagaagaacaaagccatgtcggcgtcgtcgtgatcgtacgttcatcgatcaagcacgggcacacagaaacagagcaccgccaccgccaagcacagtcaccaagtgtgtattctctag

SEQ ID NO: 31269 - DNA, 235 bp, Zea mays
cggacgcgtggctgctccgcacccacttccacgactgcttcgtcaggggctgcgacgcgtcagtgctgctcaccgcgacgggcggcagcgaggcggagaaggacgcggcgcccaacctgacgctgcgcggcttcggcttcatcgaccgcatcaaggcgctgctcgagaaggagtgccccggcgtggtgtcctgcgccgacatcgtcgcgctcgccggccgcgactccgtcagcgt

SEQ ID NO: 31270 - DNA, 256 bp, Zea mays
cggacgcgtggcggacgcgtgggaagaactcaagccctttgggaagcagctcagggacaaatacgtggagacacagcagcttcacctccagatcgctgggcacaaggatattcttgaaggcgatccattcctgaagcaggggctggtgctgcgcaacccctacatcaccaccctgaacgtgttccaggcctacacgctgaagcggataagggaccccaacttcaaggtgacgccccagccgccgctgtccaaggag

SEQ ID NO: 31271 - DNA, 273 bp, Zea mays
ggctggactacctcggcaacccgagcctggtccacgcgcagagcatcctggccatctgggcgtgccaggtggtgctcatgggcgccgtcgaggggtaccgcgtcgccggcggcccgctcggagaggtggtcgacccgctgtaccctggcggcagcttcgacccgctcgggctcgccgacgacctcggagcgttcgccgagctcaaggtgaaggagattaagaacggccgtctcgctatgttctccatgttcgccttcttcgtgcaggctatcg

SEQ ID NO: 31272 - DNA, 245 bp, Zea mays
cggacgctggacggacacgtgggcgcgcacccatcttctggcctttccagccgccaagccttctagaagctgcaagagctcgagtcgatcggaaccctcgccatggccgacgaggcgaaggcgaagggtaacgcggcgttctcggccggccgcttcgaggaggcggcgcggcacttcacggacgccatcgcgcttgccccagacaaccacgtcctctactccaaccggtcggcggcgctcgcctc

SEQ ID NO: 31273 - DNA, 274 bp, Zea mays
tatccatcccttcctcgccacgggggtcgcctgagatcacataaacaatggtgaaggctgttgctgtgcttggtagcagcgatggtgtcaagggcaccatctttttcacccaagtgggagatggccctaccactgtcaccggaagtgtctctggcctcaagcctggcctccatgggtttcatgtgcatgcgcttggtgacaccaccaatggctgcatgtcaactggaccacactacaatcctgcgagcaaggaacatggagcaccagaagatga

SEQ ID NO: 31274 - DNA, 200 bp, Zea mays
agcccgccgaagaagggccaccggaaggcgtgcccgccgcctccgtctcccccgacgcccacgcccacgcccacgccgtcctcggacaagtgccccatcgacgcgctgaagctcggcgcgtgcgtggacattctcgggaacgaggtgcacatcggcgacgccaacgtcaagtgctgcccgctcctaaagggcatcgccgg

SEQ ID NO: 31275 - DNA, 190 bp, Zea mays
cccacgcgtccgctcgcctatccgatctgccacctcctcccgtctcgcacgttccttcccaactccgcagcgtagctctccgcggcgcgatccagatccaggtttttcagcatgggcctggtgaaggaaggcatcgacatggaggagggacccttgagatcggcatggagtacaggactgtatctggtgt

SEQ ID NO: 31276 - DNA, 344 bp, Zea mays
aagactacaaatgttcctggctagttgtgcaagctcttgagcgtgctgctgagaaccaaaagagcattctgtttgaaaattacggaaagtctgatccagcgtgtgttgcaaaggtgaaggacttgtacaaagagcttaaactggaggaggttttccatgagtacgagagggagagttacaacaagctgattgccgacatcgaggcccagccgagcaaggcagtccaaactgttttgaagtccttccttcacaagatctacaagagggacaagtagacccagatcgtcgacaagctgctccatcgacgcttgcatcaatcaattactatacttgattgatgcgga

SEQ ID NO: 31277 - DNA, 339 bp, Zea mays
ggacgctggcggcgtgcttgtgatctcaacccaagtcgtgcctccgctccggtcacccgtcgctccacgcaaccatgtcgaggaggaagaccagggagcccaaggaggagaacgtcacccttggacccactgtccgtgaaggagagtatgtctttggtgttgctcacatctttgcatccttcaatgacaccttcattcatatcactgatttgtctgggagggaaactctggttcggatcaccggtggcatgaaggtgaaggctgaccgtgacgagtcgtcaccttacgctgctatgcttgctgctcaagatgtcgcacagcgctgcaaagagcttggca

SEQ ID NO: 31278 - DNA, 268 bp, Zea mays
cgagtctcgtccacccgtcatcctcctagctcctctactcgccagtcgccatgggcaagattaagatcggaatcaacggcttcggaaggatcggcaggctcgtggccagggtcgccctccagagcgaggatgtcgagctcgtcgccgtcaacgaccccttcatcaccacggactacatgacctacatgttcaagtacgacaccgtccacggccactggaagcacagcgacatcacactcaaggactccaagacccttctcttcggtga

SEQ ID NO: 31279 - DNA, 344 bp, Zea mays
  unsure (1)..(344): unsure at all n locations
ggagtttaatgaattcggtgctgatggtggaccagcagctaaggcccttcggcccaaattcaacgtgtttgtcaaaaatgtatctgctcatctgggagtagctgtgccacacattgagttgaagcatgtgattgctgctacaattggtcttaagggtcttggaagcctcctttttattttgagcagctctctcggtgcttatctcctgctgctgtaccttgctttgatcactcctatcatccatgacttctacaactacgatatggagaaggcagaatttgcaggcctctttgcgaagttcaccccagatttngcgctgatcgnagctctgctcttctttctgg

SEQ ID NO: 31280 - DNA, 330 bp, Zea mays
ccacggtcggccacggtccgcggacgcgtggcgcgcactccaagcagatgctccaggcgctgggcatcccgggcggcgtgatgccgtgcgggggctgaaggaatgcggctgggtgcgcgagaccgggttcgtgtggatgcggcagaaggccccctacgagcactacttccgcggcacgggcacgcgggtgcgctacgacgccgaggtcaccgcgtacgtggaggacggccggatgaagcgcatgaccggggtgcgcacaagcaggtcatgctctaggtgcccatcgtcgagatgagcctcgacggagagaagcgcgacaagatctacttc

SEQ ID NO: 31281 - DNA, 344 bp, Zea mays
cccacaaaccctctccctcccgtactccggcctacacatccaggggcgatgacgctgggtagctccggcgccggatcgagcgtcgtcgttccccgaaacttcaggctattagaggagctcgagcgtggagagaagggcattggtgatggaacagtgagctatggaatggatgatgccgatgacatctacatgcggtcatggactggtaccatcattggccctcacaatactgtacatgagggtcgcatctaccagctgaagttgttttgtgacaaggactatccggagaagccaccatctgtcagattccactcaagaatcaacatgacatgcgttaatcacga

SEQ ID NO: 31282 - DNA, 387 bp, Zea mays
atacgccgcagtacggtccgaatccgggatcgaccacgcgtccgcggacgcgtggcgagtaacagaattctgtaaacgaaacaaattgcagttgatcataagagcccatgagatgtgttatggatgggtttgagcgtttcgctcatggacaattgatcactttattttcagcaacaaattactgtggtactgcgaacaacgcaggggccatacttgttgtcggcaggggcttagttatcgtgccaaagttaattcatccacttccacctcctgttaattcacctgagtcctcacccgaacgtggggatgccacatggatgcaggagcttaacattcagcggccacctactccaaaccagaggcggccacaagctgcctgtgatagga

SEQ ID NO: 31283 - DNA, 310 bp, Zea mays
cggacgcgtggtggtgaacatgtgggccattacgcacgacccagacgtgtgggccgagccgacggagtatccagccggagaggttcatggggtccaccgagttcccgatcatggggtcggacctcaggctcgcgccgttcggggcgggccggcgcactgccccgggaagagcctcgccatggccaccgtggccttctggctcgcgacgctgctgcacgagttcgagctgctccgctcgcccgtcgacctgtcggaggtgctcaagctgtcgtgcgagatggccgtcccgctggcgctggccgtgacggcg

SEQ ID NO: 31284 - DNA, 332 bp, Zea mays
  unsure (1)..(332): unsure at all n locations
cacaggccgttccaggggctatggatttgtcaggtttggagacgacaacgacaaatctcatgccatgtctgaaatgaatggtgtatattgctctacgaggccaattcgtataggacctgcgactcccagaagatcttcaggtgattctggctcctcgactcctggtcattcagatggtgattcttctaacagaacggtatatgttggtgggcttgaccccaatgtcagtgaagatgaactgagaaaagcctttgccanatatgatcttgcctctgtgaaaattcctctaggaaagcaatgtggctttgttcaatttgttagcagaactgatg

SEQ ID NO: 31285 - DNA, 327 bp, Zea mays
cggaccgtggcgctgaatgtggcattgctgtccatcttcggcgaggaagagatgcggtacatagaggaactgaagcagtgctacctgaccctggagaaggggtacaactcgatgcccgtgaacctgccgggcaccctgttccacaaggccatgaaggcccgcatacgcctgggagccgtcgtggcccacatcatcgaggcccggcgcgagggcgagcggcacgcgggagcgacctcctggcctccttcctggacgaccgcgaggcgctcaccgacgcccagatcgccgacaacgtgatcggcgtcatcttcgccgcacgcgacacca

SEQ ID NO: 31286 - DNA, 332 bp, Zea mays
cccacgcgtccgagcctctctacctctacctaccggagcagggagcacgccgcacgagccctttccgccgcagccaaaatggtgaacgttcctaagaccaagaagacctactgcaagaacaaggagtgcaagaagcacactctccacaaggttactcagtacaagaagggtaaggatagcctgtctgctcagggaaagcgccgttatgaccgcaagcagtcaggatatggtggccagaccaagcctgtcttccacaagaaggccaagaccaccaagaaaatcgtgttgaagctgcagtgccagagctgcaagcactactcacagcacgcaat

SEQ ID NO: 31287 - DNA, 320 bp, Zea mays
ctcctccttcccttccttctctctcgcaccctcctcactagctctatctagctgagtgaactgaacagctcactggctcgtcttagctaagctcagctgtaaagctaaggttcggattagctagcgtggtggccggagagtgtagcgagcggcgttcagctcaccgggggctgcttggtgagtgagggagctagctagcgtcgtcagagctccacgatgattacggggacggacttctaccacgtcatgacggccgtggtgccgctgtacgtggcgatgatcctggcgtacgggtcagtgcggtggtggcgcatcttctc

SEQ ID NO: 31288 - DNA, 330 bp, Zea mays
  unsure (1)..(330): unsure at all n locations
catcttcgtccgattccatcncaccccaccccacctcaccggagcccctctccccctaactcctccggcagctgctccgatcccgaaccgtgattcgctcgatggcggcaaccgcgggcggcaacaagatccgcaacgccaagctggttcttcttggggacgtgggcgccggcaagtccagcctggtcctccggtttgtgaaaggccagttcgtcgagttccaggaatccaccatcggcgcggctttcttctcgcagaccctggcggtgaacgacgagacggtcaagttcgagatatgggacacggcggggcaggagcggtaccacagct

SEQ ID NO: 31289 - DNA, 333 bp, Zea mays
ggccgaaggctccaccaacaagaagcacgtggctgcgctcgggccagcgggggcaggttttacgcctcatcttatttttgtaaaagccggagaggacgtatcggcaaagatcatgtcgttctcgcagcacgggacacgcgcggtctgcatcctttcagcaaacggcgccatatcaaatgtgacgcttcggcaatctgctacttcgggtggaacggtgacatacgagggtcgtttcgagatactgtctctgtccgggtcgtttcttctgtcagagaacggtggccagcgcagtcgaactggtgggctcagcgtttcgctagcaggcaccgacgg

SEQ ID NO: 31290 - DNA, 325 bp, Zea mays
cggacgcgtggtggctgatgagatagcggacaggctgaattcttctccttcggaacgaacgacctgacgacagatgacctttgggtacagcagggatgatgtggggaagttcattcccgtctatcttgctcagggcatcctccaacatgaccccttcgaggtcctggaccagaggggagtgggcgagctggtgaagtttgctacagagaggggccgcaaagctaggcctaacttgaaggtgggcatttgtggagaacacggtggagagccttcctctgtggccttcttcgcgagagctgggctggattacgtttcttgctcccct

SEQ ID NO: 31291 - DNA, 307 bp, Zea mays
  unsure (1)..(307): unsure at all n locations
gaccaggtaagcagcagcaggaaccctagcaccgccgcatccgcagccatgggtatcgacctcgttgccggtgggaggaacaagaagaccaagcgcacagcgccgaagtccgacgatgtttatctcaagctccttgtcaagctctaccgtttcttggtcaggaggaccaagagcaacttcaatgctgtcattctcaagaggctcttcatgagcanaaccaatcgcccaccaatctccatgcgccgccttgtcaagttcgatggaagaaaggagaagaacattgctgtgattgttggcacagtcacag

SEQ ID NO: 31292 - DNA, 325 bp, Zea mays
aaacacgcgtccgcggacgctggggacacggttaaggaaactcaaggaaggagatgtgtctgctacattgtaggcgcaggctgagattaaggcggctaaatatggcagaaaatgcaacagctgtactatcagtggaagaaatgcttccggcagttgcccaaggtgctattggaatcgcttgccgaagcaacgatgacaaaatgatggagtatctgtcctcgttgaaccacgaggataccagactagctgtcacatgcgaaagagaattcttggcagttcttgatggcaactgccgaactccaattgcggcctatgcttaccgtga

SEQ ID NO: 31293 - DNA, 304 bp, Zea mays
cggacgcgtggggcagcaatggcctcattggtcactctggttgttgcgctcctcttgtgcccgtcgtcgtcgactggcaatggcatccggcgccggccctgcgcagtgggggaagaagctggacccgcacttctacgaccagtcgtgccctcacgcgcacacatcgtggcgtccatcgtggggaaggcgcaccaccaggacccccgcatggccgcctccctcctccgcctccacttccacgactgcttcgtcaagggctgcgacgcttcgctgctgctggacagcagcgggtccatcgtgagcg

SEQ ID NO: 31294 - DNA, 246 bp, Zea mays
gggaaatccagaagtacggagaatagttgagcagtctgttcaagaaaacttaacagagtacttagagcttcatccagatgttctggattcaatcctatcaaagtcccttaatgctctcaaggctgcgttggcagccaagcgtgctagggaactagtcaggacaaagagtgtgttgaaatcttcatcactccctgggaaacttgctgattgtgcatcagctaatcctgaagaatctgaaatctttat

SEQ ID NO: 31295 - DNA, 319 bp, Zea mays
caaagctattagccgtgctatccgccgtgctcgtgttggcctgaagaatccaaataggccaattgccagcttcatattctctggaccaactggagttggcaaatcagagctagcaaaggctctggcagcctactactttggctcagaggaggctatgattaggcttgacatgagtgagttcatggagagacatactgtctccaagcttattggatcacctccaggttatgttgggtacactgagggaggccaactaactgaagcagtccgtcgccgcccatacacagttgttctctttgatgaacgatgagaggcacat

SEQ ID NO: 31296 - DNA, 248 bp, Zea mays
acggaggcatgaagaaccactcggtgatcatcaccaagaagctgctggacttctacacgggcttcgagggcgtgtcgacgctggtggacgtgggcggcggcgtgggcgccacgctgcacgccatcacgtcccgccacccgcacatctccggggtcaacttcgacctgccgcacgtcatctccgaggcgccgccgttccccggcgtgcgccacgtgggcggggacatgttcgcgtccgtgcccgccggc

SEQ ID NO: 31297 - DNA, 324 bp, Zea mays
ccgtcttctcaccaccgctgcctccgcggtttcgcttccccccgtcttcccaagcctttgcttcgctcttcgcttcggattccctctgctcatggccgggagagggaaggcgatcggctcaggggccgccaagaaggccatgtccaggagctccaaggccgggctccagttcccagtgggaaggatcgccaggttcctcaaggccggcaagtacgccgagagggtcggcgccggcgcccccgtctacctcgctgccgtgctcgagtatcttgctgctgaggttctcgagcttgccaggaacgcggctcgggacaacaagaagac

SEQ ID NO: 31298 - DNA, 323 bp, Zea mays
  unsure (1)..(323): unsure at all n locations
gttccttcattttcttcttggcaggtatttggcgcgcttatcatagcaaagttgctctgcgtccctctggtaatgtcataccacacccacgttccaatttatatacccagatatactttcagctggcttgtcaagcccatgtggctaataataaaattcttgcaccgagctgcagacctcacactggtaccatctgttgctatcggcagggatcttcaagctgctcgtgttacagcagccaataaaatacgcctttggaacaagggtgttgactcagaaagcttccatcctcgtttccgcaacatgganatgcgttcaaggct

SEQ ID NO: 31299 - DNA, 320 bp, Zea mays
gcctcgcctcacctcacctcatctcacctcgccgactagggttttgtaccgccgtggatctcgccgtccccgccatggacgtctcgcacgcgggatcctccgtcgccggcgaggctccgaccaccggggagcaccggatggggactaccatcgtcggggtctgctacgagggcggcgtcgtcctgggcgccgattccaggaccagcactggaatgtatgtagccaaccgtgcttcagacaagattactcaactgacagacaatgtgtatgtctgtcgctctggatctgctgctgatacacaagtcatttcggattatgta

SEQ ID NO: 31300 - DNA, 359 bp, Zea mays
  unsure (1)..(359): unsure at all n locations
gacctgcacgtacgccgaatccgggtcgccacgcgtccgcggacatgaggaagtacgcgtcggaagccggcgggcttcgcgcggcgcggcagggcccccacgggcggtcgctgacggcgcgcacggcgcacagcatgtccacgacggcgctgcgcaccaagtccaagtcggccgcgtcgctgctgcgcagggtgcccttcgcgccgctccgccccgtcctcgccaacctgcaggangtgttcctcggcaccaagctcgccgtgctattccccgccgtgccgctcgccatcgccgcccagtgcgcgcagttcggccaggtgtgggtgtttacgctcagcctactcggcctcatcccctcg

SEQ ID NO: 31301 - DNA, 300 bp, Zea mays
cagacgcgtggcgagacgcgtgggtccacctctctcgctctgggccgccgccgccgccctaagccacgtactgaggctttacatggtctcttcgccggcgacgagcacccagcagttctgtagaaatggctgatggtgaggacatccagcctcttgtctgcgacaatggcactggaatggtcaaggctggttttgctggcgatgatgcaccaagggcggttttccctagcattgttggccgtcctcgccacactggtgtcatggtaaaggatggacagaaggacgcatatgttggcgatg

SEQ ID NO: 31302 - DNA, 337 bp, Zea mays
cgaagacaagatcaactttgcagtgttcccatctctccaaggtggccctcacaaccaccagattgctgcacttgctgttgctctacagcaaactatgtcgcctggcttcaaggcctatgcaaagcaagtgaaggccaatgctgttgcaattggaaactatctcatgagcaagggctacaagatggtgactgatggaactgagaaccaccttgttctctgggatctccgcccccttggcttgactggaaacaaggtcgaaaagctatgtgatctttgccacatcacattgaacaagaatgctgtcttcggtgacagcagtgcattgtcatcgggtggt

SEQ ID NO: 31303 - DNA, 335 bp, Zea mays
ggcaagaggtggctgctgctgctgccgctgtcgcggtgggttctcctcctcggcagcctccagctcccggcggccggcggccacgtcgtcacgcgcatgcgcggttcgacgggccacttccgttctacctcgaaaccgggtacgtggaggtggacgagcagcaaggtgtgcagctcttctactacttcgtgcgctcggagcgcgacccctacgaggacccgctgctgctgtggctgtccggcggcccaggctgctccggcatctccggccttgcctacgagataggacccttaaaatttgatgcccgagggcaaggtgaatttcgcactcttctc

SEQ ID NO: 31304 - DNA, 332 bp, Zea mays
ggacctggcgggctggacctgacgctggaccgcacgtccggctccgggttccagtccaagagcgaatacctgttcggcaagatcgacatgcagatcaagctggtgccaggcaactccgctggcacggtcaccaccttctacctgtcgtcccagggcgacgcgcacgacgagatcgacttcgagttcctgggcaacgtgagcggggagccctacacgctgcacaccaacgtgttcacgcgcggacagggccagcgggagcagcagttccgcctctggttcgaccctaccactgccttccacacctactccatcctgtggaacccgcagcacgt

SEQ ID NO: 31305 - DNA, 280 bp, Zea mays
cggacgcgtggcggacgcgtgggcggacgcgtgggtgtacccaatttctcgcgctcctaccgccgcttcgttctctaacctaggctcccgctcactccgcagagcatctcaacaccgccttgaggaccccccaactcgccggctgcagccatggtgaaatattcgacggagccaaccaaccccaccaagtcaaccaaggccatgggccgtgacctacgtgttcacttcaagaacacccgtgagacagcttttgcacttaggaagttgtcactcacgaggg

SEQ ID NO: 31306 - DNA, 331 bp, Zea mays
ctgataactacgagaaaattttctcgcacatgaaaccaaacagtattcttggtttgtcacatggatttctccttggacatttgcaatctctgggttttgatttccctaaaagcatcagtgtgattgctgtatgccccaagggaatgggcccatcagtcagaagactttatgttcagggcaaagagatcaatggtgctggtatcaatgctagctttgctgttcaccaggatgttgatggaagggcaacagatgtagctctaaggtggtcagtagctttaggttctcctttcacatttgctactactctagagcaggagtaccggagtgacat

SEQ ID NO: 31307 - DNA, 319 bp, Zea mays
cccacgcgtccgcccacgcgtccgcccacgcgtccgcgcctacgcgccctcccccttcggcatgccccactccaacggcgacctccacgacgaccctttcgccgcacctgctgactccaacggtgggcccatccttccgccgcccaccgagatgggccgcgaggagggattcctgctccgcgagtggtgccgacaaaatgctattcaccttgaggaaaaagagaagaaggagaaggagctgaggagccaaatcatcgttgatgctgaagagtttaagaaagcttttgttgagaagagaaagctcaatgctgagacaagc

SEQ ID NO: 31308 - DNA, 298 bp, Zea mays
agctagtagtaatttatatataagctcttgtttctacaagcagacaacccaacgcgacaccctaccttcgaggtctcatcacgagtaattgatacacagcaaagcacttacgcgcgcgcaccgagacgcacagtcacaggtaaaagtaaacgcacacgactcatgtccgaagccagcagcagcagccagcagcctattcctcttcctcgccgatgatgaacctgccattgccggggttgatggcggcgatgaagaagaagaggacgttgaagatgacgagcggctctatctcgttgat

SEQ ID NO: 31309 - DNA, 317 bp, Zea mays
  unsure (1)..(317): unsure at all n locations
acnacgcgtccgcggacgcgtggcgaccctgcgccggagcccatgtccggctaccgcaaccgggagctcgagactctgttcacacatgtaccagatactcgagtcctggctccgcgtcgcgtcgcagctgctcacccgcctcgacgagcggatcgaagacaagtgctgggaggcggcggccggcgactgctggatcctggagcgcgtgtggaagctgctcgcggacgtcgaggacctccacctgctgatggacccggacgagttcctacggctcaagagccagctcgccgtacgagcggcgccggggtctgagtccg

SEQ ID NO: 31310 - DNA, 327 bp, Zea mays
cggacgcgtggcgcgaagttaagccaccatgtggacgagggctttagcgacggtgctgttcgtggcaggcgacagcgctgatcggcgtcggcgtcggcggcgcagcgcgcagcagggcgtgtggagcatcatcactcgtcccatgttccagagcatgctgagccaccgcggcgatagcgggtgcctaggcgccttctacacctacgacgccttcatcgaggccgccagcaagttccccggcttcggcaccaccggcgacgagcagacgcgcaggcgggagctcgccgccttcttcggccagacgtcccacgaaaccaccggtggatg

SEQ ID NO: 31311 - DNA, 305 bp, Zea mays
cagaggtccgggacggcggggaaacgctagccgcgatatctcacgatccactcgagcaccaagccgagggaaggtgatgagagatggagcacggcgtggtgtcggcgaagggcggcgcggtcgcgggcaataagaaggggtcggtatccttcacgatcgactgcaccaagccagtggacgacaagatcatcgaggtcgcctcgctcgagaagttcctgcaggagagcatcaaggtcgtcggcggcaaggctggcaacatcggcgactccgtcaacatctctcgcgagaagaccaaggtcaacgtc

SEQ ID NO: 31312 - DNA, 314 bp, Zea mays
cctgagcagcgagtccccgattttatcaaggcaggtgctgatattgttagtgtccactgtgaacagacatcgaccatccatttgcaccgaacagtcaatcagattaaaagtctaggagcaaaggcaggagttgttttgaatccagcgactccactcactgcaattgattatgttcttgatgttgttgacctggtgctgattatgtctgtgaatcctgggtttggtggccagagctttatcgagagtcaagtaaagaaaattgcagaactgagagagttatgtgcagagaagggagtgaacccctggattgaggt

SEQ ID NO: 31313 - DNA, 319 bp, Zea mays
tctcattcgattacacacacacacggagagatcaaattgatacactgcgatctcgatcaaacaaatcaaaaaaaaaaaaaaaatcttgcgagacattactgaccgatgaagttcggcaagcgcctcaagaagcagatcgaggagagcctgccggagtggcggagcaagttcctcaactacaaggagctgaagcggcgcgtgaatgccgtgtcctcccgcgggtcggcggcggatccgtcgtcgtccagcgccgcggaggccgacttcctgacgctcctggacgccgagatcgacaagttcaacgccttcttcctggagg

SEQ ID NO: 31314 - DNA, 317 bp, Zea mays
  unsure (1)..(317): unsure at all n locations
ggtttgctgaattgcatgatacttccctaagaatggcagctaaaggtgtgattaagaaagttgtagactgggaagaatcacgctcgttcttctataaaaggctacggaggaggatcgcagaagatgttcttgcaaaagaaataaggcagatagtcggtgataaatttacgcaccaattagcaatggagctcatcaaggaatggtaccttgcttctcaggccacaacaggaagcactggatgggatgacgatgatgcttttgttgcctggacagacagtcctgaaaactacaaggggcatatccanaagcttagggct

SEQ ID NO: 31315 - DNA, 151 bp, Zea mays
cccacgcgtccgagtcccctgtcccgctaggattcccccgaaaccctcccccaaaaccccagagcggagaagagcgcaagatgttcggcttcgggcaccacggccaccacggccagaacccgccggcgcacggcggcgtgcaccagcccac

SEQ ID NO: 31316 - DNA, 306 bp, Zea mays
cccacgcgtccgatcaactttgcagtgttcccatctctccaaggtggccctcacaaccaccagattgctgcacttgctgttgctctacagcaaactatgtcgcctggcttcaaggcctatgcaaagcaagtgaaggccaatgctgttgcaattggaaactatctcatgagcaagggctacaagatggtgactgatggaactgagaaccaccttgttctctgggatctccgcccccttggcttgactggaaacaaggtcgaaaagctatgtgatctttgccacatcacattgaacaagaatgctgtc

SEQ ID NO: 31317 - DNA, 308 bp, Zea mays
cccacgcgtccgattggaagagaataaagtcaatgaggatgggtttctagttgtcatgcttagtaagggtaaaacatctggttcaactggaacttcatcttcccagcactcaaacactcctgcaacaaggcaggcacctcctctagaggccccacaacaagctcctcaacccccggtggcaccaattacaacttctcagcctgaaggacttcctgcacaggcacctaacacacatgacaatgcggcatcaaatcttctgtctggaaggaatgttgacacaataattaaccagctaatggagatgggtg

SEQ ID NO: 31318 - DNA, 307 bp, Zea mays
ccgcgatctgaagcgactagtcgaaggcggcggcggcggcgatggggagcgacctggagacggagaagaagaagaccccggtggcgctgatgcccatcgcgaacctctcgctggaaagaagctctgcaagcggaccctcaagctcgtgcgacgagcctctgaggccaagtgcctcaagcgcggagtcaaagaggtagtcaagagcattcgccgcgggaacaaagggttgtgtgtgattgctggaaatatttctcctattgatgtgattacacacgttccaatactatgtgaggaatctaatgttcct

SEQ ID NO: 31319 - DNA, 306 bp, Zea mays
cggacgcgtggcggacgcgtgggcggacgcgtgggcggacgcgtgggcggtggtgtccccgcggcagaacagcagcagcggcgcggcagagcagcagcagctggacccgcagaagtacgtggcgacgatgcagcagctgatgcagaacccgcagttcgtggccatggcggagctgctaggcagcgcgctgatgcaggaccccgccatgtccgccatgctggggggcctcaccaacccggcgcacaaggagcagctggaggcccgcgtcgcgcgcatgaaggaagaccccacgctcaagcccatcct

SEQ ID NO: 31320 - DNA, 319 bp, Zea mays
accgtccgggacctggttttcaaacaacaaacttattcatgatttgtcatagttctgggtagtacgcacacaacacacaaccggtccattattaaaccaacactgacacgaacagcagatacttcgacaacctccatatggagagggcaccagacgacgcaggcacatcggcagcttaaacgacccatgacttactgaccaccacggagacggagcacaaggtggagggtgctctccttttggatgttgtagtctgctagggtgcggccatcctccagctgtttgccggcgaagatcagacgctgctggtccgggggga

SEQ ID NO: 31321 - DNA, 299 bp, Zea mays
cattgacatcatttattgtcgtggaaagagatggctcaatcatagcgtgtgctgccctcttcccttttcttgaggataaatctggggaagttgctgctattgctgtatctgaagaatgtcgaggccaaggtcaaggagacaaattacttgattacgttgagaagaaggctttgtcccttggacttgagaaactattcttgcttaccacaaggacagcggattggtttgttcgtcgcggctttaaggagtgctcgttcgattccctgcctttggtgaggagaaaacgtatcgacctctcg

SEQ ID NO: 31322 - DNA, 297 bp, Zea mays
caacactttatgctaactcattgattggagttggaatagcttctagcttgtatcatacttcacggggaggcatcagaaaatatttgagatgggcagactatacaatgattgccacttcaactctatgcttatcaagagcccttcgggatgagaatccaaaatttctgatggcagcatcaacattgctcctaccatttcaacccctgatggtttcagctgtccacactgggataatggaggtttcatttgctaaacgagcatcaatagatccagagctcaagacggcacataacctac

SEQ ID NO: 31323 - DNA, 296 bp, Zea mays
cggacgcgtgggcggacgcgtgggcggacgcgtgggcggacgcgtgggcggtggtgtccccgcggcagcaacagcagcagcaagcgcggcagcaacagcagcagctggacccgcagaagtacgtggcgacgatgcagcagctgatgcagaacccgcagttcgtggccatggcggagcggctaggcagcgcgctgatgcaggaccccgccatgtccgccatgctggggggcctcaccaacccggcgcacaaggagcagctggaggcccgcgtcgcgcgcatgaaggaggacccacgc

SEQ ID NO: 31324 - DNA, 304 bp, Zea mays
cggacgcgtggcgagacgcgtggggccgcctcgtcgtcgatttcatcgcgcaggagttgggcctcccgctgccgccgccgtcacaaggccaagaacgccagcttcgagcagggcgccaacttcgccatcaccggcgccaccgcgctcgacaccgacttcttccggaagcgagggctcggcagcaccgtctggaactccggctccctccgcacgcaaatccagtggctgcgagacctcaagccatcgctctgcagctccgcgcaaggatgcaaggagttcttcgccgagtgcctgttcgtcgtag

SEQ ID NO: 31325 - DNA, 135 bp, Zea mays
gtcggagaagtcataaacagacatgtttcgatgtcaggtttatctgtggtgaaatcttattgtggccatggcataggggaactgtttcactgtgccccaaacattcctcattattcaagaaacaaggccgttggt

SEQ ID NO: 31326 - DNA, 304 bp, Zea mays
cggacgcgtggttttcaaacaacaaacttattcatgatttgtcatagttctgggtagtacgcacacacaacacaaccggtccattattaaaccaacactgacacgaacagcagatacttcgacaacctccatatggagagggcaccagacgacgcaggcacatcggcagcttaaacgacccatgacttactgaccaccacggagacggagcacaaggtggagggtgctctccttttggatgttgtagtctgctagggtgcggccatcctccagctgtttgccggcgaagatcagacgctgctgg

SEQ ID NO: 31327 - DNA, 287 bp, Zea mays
  unsure (1)..(287): unsure at all n locations
accacgcgtccgcggaccgtggcggcggccttcgttgaggacgtcgaggcctacctccgccaggtcgggctcgacgtcaacctccgcgctcagcttttctccaggaaaggttgcagcagtacaaaatagtggagatgaagcttctagcacaacaaagggatcttcaggcaaagattcctgatatagagaagtgcttggatattgttgcaacattacaagctanaaaggatttgggtgaggcactcatagctgatgtcgaattgtccgaggngatctactcccgtgcg

SEQ ID NO: 31328 - DNA, 307 bp, Zea mays
cttgtcgcgaaatatgctgcggatgagaaggctttctttgatgactacaaagaggcccacctcaagctctccgaactggggtttgctgatgcttaaatagaccctatcttggagtgatacattctgctgcctgtatggaatcatgtggtcatttgcatctggagtcaatgtgaacaagcagattgtcgtattgtctttctcgtaataaatttgtcgatgttgagcccttaggctgttgttggtacattggtacttcgtcgatgcttgaaatgggaccctttgtccgttttcctagactctgatgctg

SEQ ID NO: 31329 - DNA, 302 bp, Zea mays
cgtaaggcgaaggagtagcagcagcaggcggcgccgagtagcggctccccatctcgagcttgccaccatggctagaggattgaagaagcatttgaagaggctcaatgcccccaagcattggatgctggacaagcttggcggagcttttgctcccaagccatcttctggacctcacaagtctagggagtgcctgccactgatcctcatcatcaggaacaggctcaagtatgctcttacataccgtgaggtcatttccatcctgatgcaacgccatgtacttgttgatggcaaggtcaggacag

SEQ ID NO: 31330 - DNA, 293 bp, Zea mays
cggacgcgtggcggacgcgtgggcaaaaacggattcttgaaaaagttgacactaaagttcaaggacccaggagaacaccaagctgatcatccttgacaaatttgatgggaactccgaactagctgctgagcttgtgacagccaatggttacaaagctgcttttgcagtgaaggatggtgcagaaggaagccgaggatggaagagcagtaaccttccctggatagctccgccaaaaggattcagctttgacttgggcgaattatttggggatggttcagatggtttgcctgtga

SEQ ID NO: 31331 - DNA, 295 bp, Zea mays
ggaaataaagtagacaaggaaagtgagagggctgtcacgaaaaaggagggaaatgaatttgccagggaatacggttgtttgtttctagaatgcagtgcgaaaacaaaagtaaacgtagaacagtgttttgaggaactggttctaaagatcttagacacgccaagcctcctggcggatgcttcctcagcaggggtcagcaagaagaacatcttcaagcagaaggctccagaagctgacgccgccacaggcagctgctgttaacatggttttggtcctgtatattgctatatgtggt

SEQ ID NO: 31332 - DNA, 292 bp, Zea mays
cccacgcgtccggtgggcaccgtgaccgacgacaagaggatcagcgaggtgccggcgatgaaggtctgcgcgctcaggttcactgagacagcgagggccaggatcatcaatgctggcggagagtgcctcaccttcgaccagctcgcgctccgtgccccacttgggcaaaacacggttctgctgaggggtcctaagaacgctagggaagctgtcaggcacttcgggcctgcaccaggagtgcctcacagccacaccaagccttatgttcgctcgaagggtaggaagtttgaga

SEQ ID NO: 31333 - DNA, 282 bp, Zea mays
  unsure (1)..(282): unsure at all n locations
cctccatgggctttacagaagatggaggggggaagcggtgtgaacaccttggatgcaccaaaagtgcggaaggccggactgatttctgcatagcccatggcggcgggcggcgctgcagccatgaagggtgcaagagggcagcacgaggcaaatcgggcctctgtatcaagcacggtggtgcgaagaggtgcgaaaagccanacttgcacaagagcgccgaaggcgttcaggcatgtgcattgcccatggtggcgggcgccgctgccagtacgctggctgcgg

SEQ ID NO: 31334 - DNA, 301 bp, Zea mays
cccacgcgtccgccgtgcccgatgccgccccgatcgtctggggccgtcagctccgcccggcgctcctcctacccgcggcgctgctcccttcgttgcagcccgccaggaggcacacgctgcagccgcccgccgcagccgccgagtccgcatgggaggccaagtctgtgggtttcctggagaagtacccggccctggtcaccggcttcttcttcttcatgtggtacttcctcaacgtcatattcaacatcctcaacaagaagatctacaactacttcccatatccatactttgtgtccttgat

SEQ ID NO: 31335 - DNA, 291 bp, Zea mays
cccacgcgtccgggcgccgtggccgacgccggcggcaaggtcaccctcgcggcggtggagaggatggagcaggccaagtcggtggtgtgggagtcgctgcgcctggacccgcccgtcaagttccagtacgggcacgccaagaaggacctgctggtggagagccacgacgcggtgttccaggtgaggaagggcgagatgctgttcggctaccagccgtgcgccaccaaggacccccgcgtgttcggcgacaccgccggggacttcgtgcccgaccgcttcctcggcgaggag

SEQ ID NO: 31336 - DNA, 294 bp, Zea mays
gacggcgacggccgcccgctctcctgccccgccggcaccgaccgctggatgagccgccagctcgacgccgccgagtggggcaccgtcgcctgggccaggcagaactacatgcactacaactactgcgacgacggctggcgcttcccgcaggcttccccgccgagtgctcccgcaactgattcattggtttgtttgttatccccgatccgttcgcgcggtcgccgtccgtcccacacagtgccctgccctgcccccccgacgatttcttgcttcctgttcctcatctaattaatc

SEQ ID NO: 31337 - DNA, 293 bp, Zea mays
accacgcgtccgcggacgcgtggtcctccttccccgctcctcgtccacacgctccgctccgattccgcccgcgtccgcggaaccagatctggcgcccgcgcccatggcgacgcgcaggcgaatgctcctcaaggtcatcatcctcggcgacacggggtcggcaagacctcgctgatgaaccagtacgtcaacaacaggttcaacaaccagtacaaggccaccatcggcgcggatttcctcaccaaggaggtccagatcgacgaccgcctcttcacactgcagatatgggatac

SEQ ID NO: 31338 - DNA, 288 bp, Zea mays
cgttgctcgcctcgggtcaaaccctaagcagggagttgatttatccgctgcagccatgagtaagttgcagtctgagtctgtcaaggatgccatctcccagattgttggggatgccaaggagaagaataggaagttcactgagactgtggaacttcagattggtctgaagaattatgatccacagaaggacaagcgtttcagtggctctgttaagttgccccatatccctcgtcccaagatgaaggtgtgcatgcttggtgatgcccagcatgttgaggaggccgagaa

SEQ ID NO: 31339 - DNA, 294 bp, Zea mays
ctcctcatcccgcccaccacgctgctcatcatcaacatcatcggcgtcgtggccggcatctccgacgccatcaacaacgggtaccagtcgtggggcccgctcttcggcaagctcttcttcgccttctgggtcatcgtccacctctacccgttcctcaaggggctcatggggcgccagaaccggacgcccaccattgtcgtcatctggtccgtgctgctggcctccatcttctcactgctctgggtcaggatcgataccttcatcgtcaggaccaaggggcccgacgtcaggcag

SEQ ID NO: 31340 - DNA, 203 bp, Zea mays
cccacgcgtccgcccacgcgtccgcccacgcgtccgatcccccagaaaatcaactcctccccaaatccacgctgccaccaactcgccgtcctccgcgccaagcaccaaagctccgatggcccgcactaaacagacggcgcgcaagtcgacgggcggcaatgcgcccgcaagcagctggcgaccaaagcggcgcgcaagtctgc

SEQ ID NO: 31341 - DNA, 289 bp, Zea mays
cccacgcgtccgtgaaaattcagggtgtcaaacccaaccccatcacctactgctcgctggttaacgggtacagcaaagccgggcttcttgataaggttgcgggggtcattcgacagaccgagaacactaatgttgtcttggacacaccattctttaactgtgtgataagcgcatatgccaagtctggggatatcaaaatcatggaggagatgctgcagcttatgaaggagaagaggtgcaagcctgacagaataacttatgccaccatgattcaggcatacactgcaca

SEQ ID NO: 31342 - DNA, 289 bp, Zea mays
cggacgcgtggcggacgcgtgggagcgggatcaccaagccgaagcccatctctacagagctgcgggagttcgtcggcggcgcacgcggactgccccggactgaggccatcaagctggtatgggcgcacatcaagggcaacaacctccaggatccaaacaacaagaagataataatctgcgatgagaaactgaagaagatattcggagggcgtgaccgcgttgggtttctcgaaatatccgggctgctgaacccccacttccagaaatgatagggctttttgttttgttt

SEQ ID NO: 31343 - DNA, 281 bp, Zea mays
aagaagacgagtgtcaagtgaacctgaaacttgcggtgtcactggctggtagcctgagtgtgagtgagtgatcgagctagctgagctccgatcctcgctagctaggataccgccataccacaagtcttcttcacaagtttaggagtgacagcaacaagagatcgatggcctctgccaccgtgctcaagtcctccttccttcccaagaagtccgaatggggcgcctacaggcaggccgccgcgcccaggccgcccaccgtctccatggtcgtccgcgcctcc

SEQ ID NO: 31344 - DNA, 288 bp, Zea mays
  unsure (1)..(288): unsure at all n locations
cccacgcgtccgctcctctcagaggacaagccggcgagggtggaggacgtcatgcccatcgccacggggctcgagcgggaggagctagaggccgagctccaggggaagaagcggtttgacatggattccccggtcggccccttcggtaccaaggaggaaccagctgtcattgagtcatactataacaagcggatagtcggttgtcctggtggcgnaggtgaggacgaacatgatgttgtatggttctggttgacaacagacgagccgcatgagtgtccagtctgctcg

SEQ ID NO: 31345 - DNA, 283 bp, Zea mays
gcgccactgtccagtgcgcgcgtcaagcttgcttagctagccgccatggcctccctcgccgccgtctccgtgaagcccgtggccatcaagggtctcgccggcagctccatctccggaaggaagctcgccgtcgccaggccgtcggcccgctccatccgcagccccgcgcagcgccgtggtggccaagtacggcgacaagagcgtctactttgacctcgacgacatcggcaacaccaccggacagtgggacctctacggctctgacgcgccctcgccctacaac

SEQ ID NO: 31346 - DNA, 293 bp, Zea mays
atccgcccacgcgtccggagagagagaggggagacccattaccaatgccaagaacaagaaaccagagaggacagccgcgaatacaatccgaatcccctccaaaaacccaccataccgtctcccccatctgcaagaacaagatcaggagagcatcctagggggaagaaacaggagggggaaaaagaagcccagaaagaccaactgaccaaacaaaaaggtggcatctttgtgtcaccgaggcaccgccgatcacagaccaaagcccgctcctctggtccatcccaagcgtacag

SEQ ID NO: 31347 - DNA, 317 bp, Zea mays
taacacgcgtccgggacctggcgagttctcctcaaccaaattcaaggtcacagcggcgaacctctcggctataatgtctggccgcggcaagggcgggaagggtctgggcaagggcggcgccaagcgccaccgcaaggtgctgcgcgacaacatccagggcatcaccaagccggcgattcgcaggttggcgaggaggggcggcgtcaagcgcatctccgggctcatctacgaggagacccgcggcgtgctcaagatcttcctcgagaacgtcatccgcgacgccgtcacctacaccgagcacgcccgccgcaagactg

SEQ ID NO: 31348 - DNA, 313 bp, Zea mays
ggacgtggcgcagctccaaagccactcccaaacccccgcttccagaaccttctcgaaactccccgccgcctcctccactcgcaccgatggcgaaggaaccaatgcgcgtgctcgtcactggcgccgcagacaaattggatatgccctggttcccatgattgctaggggtgttatgcttggtgcagaccagcctgttattctgcacatgcttgacattccgccagcagctgaagcccttaatggtgttaagatggagttggttgatgctgcgtttcctcttctgaagggagttgttgctacaactgatgttgtg

SEQ ID NO: 31349 - DNA, 304 bp, Zea mays
actagttctattgccgcaccccagatctccaggagggactcgttcgttcagctaactacactgcacgcaatggccaccacggcgaccgaggcggcgccggcgcaggagcagcaggccaacggcaacggcgagcagaagacgcggcactccgaggtcggccacaagagcctgctcaagagcgacgacctctaccagtacatcctggacacgagcgtgtacccgcgggagccggagagcatgaaggagctccgcgagatcaccgccaagcacccatggaacctgatgacgacctccgccgacgagg

SEQ ID NO: 31350 - DNA, 306 bp, Zea mays
  unsure (1)..(306): unsure at all n locations
cccacgcgtccgaaatagagctaatgctacacaggaggctactccatgatgatgggaaaggcgtcgccgaggcgctaaatgaaacagtctgtctcgataagcaatgtgaaggactcattatacaaggaaaatactatgtcaaaatagacccacaaggagaaggagctcggtggcgtcggacatttggccaggaaatatactcccctctccttcttgctttcacagagcaggatggaggcaactgggcgaattcacatgttgcanaattctctgcgatggattcaacttacagcttgcctgataatg

SEQ ID NO: 31351 - DNA, 312 bp, Zea mays
gctctgtccacctctctcgctctgggccgccgccgccgccctaagccacgtgctgaggctttcgttggtctcttcgccggcgacgagcacccagcagttctgtagaaatggctgatggtgaggacatccagcctcttgtctgcgacaatggcactggaatggtcaaggctggttttgctggcgatgatgcaccaagggcggttttccctagcattgttggccgtcctcgccacactggtgtcatggtagggatgggacagaaggacgcatatgttggcgatgaggcacagttcaagagaggtattcttacgc

SEQ ID NO: 31352 - DNA, 314 bp, Zea mays
cccacgcgtccggcgatttccaggagatcctgcgctatctggatgaactaactctttctgatcatatgtgggatgatggaaattctctgggccccaaagagatccacagttatttgacaagagtgatgtacaacagacgcaacaagtttgatcctctctggaactcactcgtacttggtggagtgaaaaagggtccaaagggtgatgagaagtatcttggcatggttaatatgattggtacccacttcgaggaaaaccatgtcgcaactggatttgcagatcatctggcgatcccgatactccgtgctgaatgg

SEQ ID NO: 31353 - DNA, 306 bp, Zea mays
ccataaaattggaacgatacagagaagattagcatggcccctgcgcaaggatgacacgcacaaatcgagaaatggtccaaatttttgtgacaacttatttggttttatccactttaagtccatttaatgtttaagtggcagtgtttgcccaattatgatgtgctgtgtcttctttgatatgactgtatggtatatgcgtgatcttagactgtaagacagtggggttgtaatcatgtgatgtttatctgatgactgtggtttcgagtctgagactaggaattgcttagggcagaaccgtccaatttt

SEQ ID NO: 31354 - DNA, 304 bp, Zea mays
aacacgcgtccgcggacgcgtgggttcggagcgcacacacacacaaccagatctcccccaaatccaccagtcggaacctacgcttcaagatgcagatctttgtgaaaaccctgactggcaagactatcaccctcgaggtggagtcgtctgacaccattgacaacgttaaggccaagatccaggacaaggagggcatccccccagaccagcagcggctcatctttgctggcaaacagcttgaggacgggcgcacgcttgctgactacaacatccagaaggagagcaccctccaccttgtgctccg

SEQ ID NO: 31355 - DNA, 299 bp, Zea mays
tgctccccgtgctgttttcccaagtatagttggtcgtccacgccacactggtgtcatggttgggatgggacagaaggatgcttatgttggtgatgaggcccaatccaagaggggtatcctgactttgaagtatcccatcgagcatggaatcgtaagcaactgggatgacatggaaaagatctggcatcacaccttctataatgagcttcgtgtagcaccagaagagcatccagttcttcttacagaggctcctcttaaccctaaggctaacagggaaaagatgacacaaatcatgtttg

SEQ ID NO: 31356 - DNA, 303 bp, Zea mays
gcctttggctcttccgtggccaggatgttcccaagtttgtaatggacgaggtctatgacatggagctctacgagtggaccaaggtggacatctctgatgaggcccagaaggagcgtgtcaatggcccttcagcttgaagggtggctcagagcctatcacgagcaatgtagatgtgtgtctaccttggtcttgtaggattctaactgtccacctttcctgtccatgctatagtcgcagacgagagtggtttttttgttcttccctttatacagtcacacttgagtatctggtgctttcttgttt

SEQ ID NO: 31357 - DNA, 301 bp, Zea mays
cacacacactcgggtaaagctatctcgagctagctagctgctgtaagccgttgccatggccaaaatggtgttgctctgcgtgctcgtctccttcctcctgatgcccttggcctccctagccctgacgcaggacttctgcgtcgccgacctgacctgcagcgacacgccggcggggtacccgtgcaagtccagcgtcaccgccaacgacttctacttccacggcctggccggccagggcaaaataaacccactcgatcaagccgccgtgaccccggccttcgtgggccagttcccgggcgtc

SEQ ID NO: 31358 - DNA, 307 bp, Zea mays
aaatatccccaaaccctagctcccgatctcgatggcgaaccctcgcgtcttcttcgacatgaccgtcggcggcgccccggcgggccggatcgtgatggagctgtacgccaacgaggtgcccaagaccgcggagaacttccgcgcgctgtgcacgggcgagaagggcgtgggcaagtccgggaagccgctccactacaagggctccaccttccaccgcgtcatccccgagttcatgtaccagggcggcgacttcacccgcggcaacggcaccggcggcgagtccatctacggcgagaagttccccgac

SEQ ID NO: 31359 - DNA, 308 bp, Zea mays
cggacgcgtggcattgctgacttggatatcccaattaaaaggggtacattcatagagttccgaagtgagatgattaatgtatctcctataggaagaaactgtagccaagaagaacgggatgaatttgagaagtacgataaggtgcataacatccgacctaaaatggtgtcagtgcttcgtgaaaagtttgcacacatgaacttgacattttctatcggagggcagattagttttgatgtatttccccaaggttgggacaaaacttattgcttgagatatcttgaggaatttcaagaaatccatttctt

SEQ ID NO: 31360 - DNA, 219 bp, Zea mays
gacaacgcgtccgggacctggtggaaagaacgtggcacaggcactgtgaagctgcttaagcacaaggagaccgcacaagaacgcctcgacatgcgtcaggcgaagacgcttaagatctgtgctaaccatcttgtggtggcgacgactaagatgcaggagcacgcagggagcgacaagtcgtgcgtgtggcacgcgctggacttcgccgacggtgagctc

SEQ ID NO: 31361 - DNA, 232 bp, Zea mays
cacagcagctaaatctaatgcattggacaaagttgaatctgagattaaagctattgtagaggcttccaagaagagcccgttgttttctcaattcataaaggacttgtcagttccaaaagcgaccagggtgaaggctatagccgaaatatttgctgacgctgggttttcagatgttacaaagaatttcttggctgtcctggcggacaatggcaggctgaaatatattgaacgc

SEQ ID NO: 31362 - DNA, 208 bp, Zea mays
cgcaccatggcgaagaactacccgaccgtgagcgccgagtacagcgaggctgtggagaaggccaggcgcaactccgagccctcatcgccgagaagagctgcgccccgctcatgctccgcctcgcgtggcactccgcggggacgttcgacgtgtcgtcgaggaccggcggtccattcggcacgatgaagcatcagtcggaattggctca

SEQ ID NO: 31363 - DNA, 208 bp, Zea mays
cccacgcgtccgggacaaatgataggttgaggcgtgcagacagagaggacagcgttaggcgaactgtttatgtctctgaacttgatcatactgtgacagaggagagacttgctgatatctttgctacctgtgggcatgttgttgattgccgaatttgtggtgatccccactcagttcttaggtttgcatttattgagttctctgatga

SEQ ID NO: 31364 - DNA, 250 bp, Zea mays
gagacgcgtgggtcgcgggcacgcgcaggccttcaagctctacgaggatgatatgtgcttgtgcatacaggatgctaaacctctaacaagcgggcattcccttatcattccaaaaagtcattatccatcagtgcaaacaacaccaccaactgtactagcagctatctgctctaaattgccactcctgggtactgcaatcatgaaggctactcaatgtgatgcatcaatgtgctaatcaacatggagagaa

SEQ ID NO: 31365 - DNA, 206 bp, Zea mays
  unsure (1)..(206): unsure at all n locations
acgcataaatacacacgtccgcggacggtggcgagcgtcngagtacgcgtgggcggacgcgtgggtttccccatatcccagatccacttcgcgaacactccctcctatgcggccatgacgctctctgtggagaagacctcgtctggacgggagtacaaggtcaaggatctctcgcgagcggacttcggccgcctcgagattgagct

SEQ ID NO: 31366 - DNA, 229 bp, Zea mays
aagaatttgcgttacgccaccctaacctgttaaagaatatgacactgccttatctgagggacatcacaaccgtcttccctagtttcgtcttcaacacggcggtggaagattagtcgctccaattgaaggcaataaagcagtactggggattgcttgaggtgcacaaggttcctgaaacctgacggctgttggtcgccttcaaccactgagaatccgatgtgttctgagc

SEQ ID NO: 31367 - DNA, 311 bp, Zea mays
gttctgaaaatcagctcgaagtttgaactgagaagattctgccgtactactggggctgttgcaattttgaaacttagccaacccaatgcggatgaactagggtacgcagactctgtttccgtggaagaaattggtggtactcgggttattgtcatcaagaacgaagaaggtggaaattcagtggctactgttgtcttgagaggcagtactgacagtatactagatgatcttgaaagagctgttgatgatggcgtcaatacgtacaagtcaatgtgcagggacagtaggataattcctggtgctgctgcaac

SEQ ID NO: 31368 - DNA, 149 bp, Zea mays
tcgccctctcgctccagccgcttcacagcgccgccgctcgcctctccgaccgccgcgagaatgccgttcaagaggttcgtggagatcgggcgcgtggccctggtgaactacggcaaagactatggccgcctcgtcgtcatcgtcgatgt

SEQ ID NO: 31369 - DNA, 210 bp, Zea mays
cggacgcgtggttgcaatcacaacgaacagaagctctcgatctcaccgacaccgaggaagaagagatcaaacgcgtccgagcagggagtcgtgatcgcgtgccacagcaaggctgagttcgacgcccacatgaccaaggcccaggaagccggcaagctggtggtcatcgacttcactgccgcctggtgcggtccatgcggcgcaatcgcc

SEQ ID NO: 31370 - DNA, 184 bp, Zea mays
agctccttcgcctcgaaccctctcgcgcttggcttgctttcactctccagggccccactcccacctcgccgccgcagccatggcgatcacagcgccaactcccgacatcctcggcgagcgccagtccggccaggacgtccgcacgcagaacgtgatggcttgcggggcggtggccacatcgtca

SEQ ID NO: 31371 - DNA, 306 bp, Zea mays
acgccaccacgcaccccaccaacccatacccataccagaggctctctgattttacttctcagcggtagatcggctgagcgagcgagcgagcgaggcacacggagctagctaaacagagcacacggatagaaaagcaagatgtcggacggcacggcgacctgcatcgacatcatcctcgccattatcctgccgccgcacggggtcttcttcaagttcggctgcggggttgagttctggatctgccttatcctcaccttcttcggctacctccccggaatcatcaacgccgtctgggccatcaccaag

SEQ ID NO: 31372 - DNA, 313 bp, Zea mays
aatggccgccgccgccgccgccgccgccaccgcgctcctcctcctcctgtgcgccgcgtctttcgcgtccgcagccgccgacgacgggttgacgaccttcaaggtgtacttccacgacgtcgtggcggggacgaacccgacggcggtgcgcatcggcaggcggcgtcctccaacacgtcgtccaccaacttcggcgcggtggtggccatcgacgacccgctgacgacgggtcccacgcgctccgcgggcacggatgtgggccgcgcccagggcacctacacgttcgcacaccagcagacgttcgggctcctca

SEQ ID NO: 31373 - DNA, 200 bp, Zea mays
cggacgcgtggttttttttttttttttttttttggaaacaaaaaccaccactattgcacaaacatggttcaccttagtgtacaacgccaactcatcatctcgacttgcctatgcaatgcaacgtgaaacaaaagacacacatgcatctcgcagcatcaatcaatccaggtacgtacaccctctccgatccgaaagacaat

SEQ ID NO: 31374 - DNA, 305 bp, Zea mays
ctccttcacaacctcagccgagcgagaaattgtaagggacatcaaggagaagctagcatatatagcccttgactatgagcaagagttggaaactgccaagaacagctcttcagttgaaaagagctatgagctacctgatggacaagtaatcaccattggtgcagagagattcaggtgccctgaggtcctcttccagccgtcgatgattggtatggaggctgctggaatccatgagacaacatacaattcaatcatgaagtgtgacgtggatatcaggaacgacctctatggtaacattgtgctca

SEQ ID NO: 31375 - DNA, 253 bp, Zea mays
ggtcagttacaggtaaataatatcagcggttatctccctgggaggattgtcttcatcttggtgaactctcatcttacaccacgacctattttgcttaccaggcatggtgagagtttacataatgttagaggaagagtcggtggtgatacagttctaagtgaaactggcgaactttatgcaaagaaactagccaactttatagaaaagcggctcaaatgtgagaaaacagcaactatatggaccagtacccttc

SEQ ID NO: 31376 - DNA, 311 bp, Zea mays
cggacggtgggcgagacgcgtgggtgaagctggaaaattatccctgtactccgatagtaagaatatggttcaagcacactttgagcagaaatacaagtattatattggacaggatggaaatggaagtgatcctcaggcttctggagcatacatattccgccctaatggcacagttccaatcagtactgatgggcaggtttctctcacagttctgcgtgggcccatattggatgaagtgcaccagcagataaattcatggatttttcagattaccagggtttacaaggagaaggactttttggaaactgaat

SEQ ID NO: 31377 - DNA, 310 bp, Zea mays
agcctcagttcgcatccacgcgcgccgccgccgcctcgccggtcgacgctcaccgcgcaccatggcggaacagactgagaaggctttcctcaagcagccaaaggttttcctcagctcaaagaaatctggcaagggtaagaagcctggcaagggcggcaaccgattctggaagagcattggccttggcttcaagactcccagggaagcaatcgaagggacctacattgacaagaaatgcccattcactggaactgtttctatcagaggcagaattattgctgggacatgccacagtgctaagatgaacaga

SEQ ID NO: 31378 - DNA, 310 bp, Zea mays
gttcggcctgactgtgatcgagtccatgacgtgcggtctgccaacgatcgcgacctgccatggtggccctgctgagatcatcgtggacggggtatctggcctgcacattgacccttaccacagcgacaaggccgcggatatcctggtcaacttctttgacaaatgcaaggcagatccgagctactgggacaagatctcacagggcggcctgcagagaatttatgagaagtacacctggaagctctactccgagaggctgatgaccctgaccggcgtgtacgggttctggaagtacgtgagcaacctggag

SEQ ID NO: 31379 - DNA, 311 bp, Zea mays
cccacgcgtccgcgcacaagctgttgggcgcttcaggggagcctggtgaccgggtgcagtttacggagttcatacagaagaacctccacctgtaccagttccgcaacaccatcccgctgtcaaccgccgctgccgccaacttcacacgcggcgagctcgccacagcccttcgtaagaatccatacatggtcaatgttattctcggtggttacgataaggatgttggcgcctcactgtactacatcgactacattgcgaccttgcacaagatcgacaagggcgcttttgggtacggatcgtatttctgcctg

SEQ ID NO: 31380 - DNA, 301 bp, Zea mays
agagaaacaaggcatttcttcttccattctaaatagcaaaggacaacttgcagcaggacacatacacatacaagcacattcgtcccatctgcagcctacgcatcaccgcatactggtaacaaggtactgctaaacatcagatcactccggacagtcagtctatgccttcttaggggacttggcggccttcttgggcgactttgcctccttgctcccgccactggacgccttctccgccgtcttcttgggcagcagaacagggttgatattggggagcacacctccgtgagcgatggtcacg

SEQ ID NO: 31381 - DNA, 237 bp, Zea mays
gcactgtactcaagcgtgaggtacaactcccatggtggggcctcattttcgcatgtggcatggcattcctcttcacacttcccatcagcatcatcaccgcgaccaccaaccagtcgcctggcctgaatgtgatcaccgagtatgccatgggtctgattatgccgggctctcctatcgccgtcgtctgcttcaaagtctatggctacatgagcatgtcgcaggccgttgccttcctct

SEQ ID NO: 31382 - DNA, 138 bp, Zea mays
cgtgacgctggcgtgacgcgtgggtccgaaaaaagctgtgatctgatcgacatggccgccgccaacatggctctcacatcccgcgcgctcgtcggcaagccggcgaccagcaccagggacgtcttcggcgatgggcgt

SEQ ID NO: 31383 - DNA, 302 bp, Zea mays
ggaccgtgggcacccgccgccgtcgcctcccaaaacccaaccaaaccctagattcgccgcccagcagctccggtcagaccctccccccttcgaagatgccgaacctcgagtgccggatgtatgagcagcggttcccggaggtggatgccgcggtgatgatccaggtgaagcacatcgctgacatgggcgcgtacgtctccctgctcgagtacaacaacatcgagggcatgatcctcttctccgagctctcccgccgtcgtatccgctccatctcctccctcatcaaggttggtcgccaggag

SEQ ID NO: 31384 - DNA, 297 bp, Zea mays
cctcagccgcgtcgcgtcgcatcctacgatccaaagctctctctgctcgcagccatggcgaagaactacccgaccgtgagcgccgagtacagcgaggctgtggagaaggccaggcgcaactccgagccctcatcgccgagaagagctgcgccccgctcatgctccgcctcgcgtggcactccgcggggacgttcgacgtgtcgtcgaggaccggcggtccattcggcacgatgaagcatcagtcggaattggctcacggcgctaacgctgggctagacatcgcggtgcggctgctcg

SEQ ID NO: 31385 - DNA, 302 bp, Zea mays
gtaagcctcagttccgccggcgtgcgaggggttcgatctgggttagcctctcacgatgccgccagcccccaagtccggcgacgccctcttcgccagcgtggatcgcgtcaatgcggactgttcacgctcacgtacggcgccatagtgcggcactgctcacggatctggaggaggtcgaggaggtcaacaagcagctcgatcaaatgggttacaacattggaacacgattggttgatgagttcttagcgaagtcaaatgtatcaaggtgtgttgacttcaaggagactgccgatgttattgcg

SEQ ID NO: 31386 - DNA, 307 bp, Zea mays
cccacgcgtccgcacatggtgatgacaaaggcttagtattaccaccaaaggtagcgccaatccaggtaattgtgattccagtgccttataaggatgctgacacaactgccataaagggagcctgcgaatcaactgtttacacactcgatcaatctggaattagagcggatcaggacacccgtgaaaattactctccaggttggaagtattcccactgggaaatgaaaggtgttccattgagaattgagattggtccaaaagatctggcaaacaaacaggtgcgtgttgtccgccgggacaacggtgc

SEQ ID NO: 31387 - DNA, 139 bp, Zea mays
gccggcattaaaggtggtgcgcttgatctcgcaactgtactactgggaaatcgtataatcttcattggccaatatattaactcccaggtggcccaacgtgtgatatcacagcttgtaacacttgctgccatcgatgaag

SEQ ID NO: 31388 - DNA, 309 bp, Zea mays
ggacctggctttttttttttttttaataatacaatagccatgcgttctttttatttcattatatatctgcggttacatttattaaagatatcacaggcggtccatcgttgcgtgtgcaacaacaaactccaaaacttacaataagatgcatgccatttgtacgacgacgacgacactcatttgggaattctaggaacaaggtaaagtttctgcgtccggcgaacgtcatcccgaactgatcggacatgtccaccttggccccggtgcgctccatctcggcgggcatctcccagtcgaaatggtagatga

SEQ ID NO: 31389 - DNA, 294 bp, Zea mays
gggatatgtcgaggccgcccaacaggagcgacgcgcacctctccgccgaggacgaggcggcgctggaggccgaggtgcgggagtactacgacgacgcggcgccaaagcgccacaccaagccctcccgcagcgagcactccgccgtgtacgtcgacgcgctcgtcccggacgtcggcggcaactcccacccggagctggacaagttccaagagctggaagcacacaccgagaggttggtgtacgagggcgccaatgtgggaaatgagttcgtggagacggagtactacaaggacc

SEQ ID NO: 31390 - DNA, 297 bp, Zea mays
cccacgcgtccggccagcagaaatcaagcatggtagtgttgttatagcagcaataactagctgcacaaacacctcaaatcctagtgttatgcttggtgctggtcttgtagctaagaaagcttgcgagttgggtcttgaggttaaaccatgggtgaagacaagccttgcccctggatcaggagttgtcacaaagtacttgcttcagagtggtcttcaagaatacctcaaccagcaaggattccatatcgttggctatggctgtaccacttgcattggaaactctggtgatctcgatga

SEQ ID NO: 31391 - DNA, 297 bp, Zea mays
gtggccatggcgtcgtccatgctctccgctaccaccgtgccactccagcaggggggcggcctgtccgagttctccgggctcaggagctccgcgtcgctgcccatgcgccggaatgccacctccgacgacttcatgtccgccgtctccttcaggacccacgcggtcggcacgagcggcgggccgcggcgggcgccgacggaggcgaagctgaaggtggccatcaatgggttcggccgcatcgggcgcaacttcctgcggtgctggcacgggcgcggcgacgctcgcccctcgacgtca

SEQ ID NO: 31392 - DNA, 297 bp, Zea mays
cccacgcgtccgcccacgcgtccgcccacgcgtccgtcttgctctgatagcttgctccaggacgtacgtacgtagtagatcgatccatcgatcgctagctagctgacgaccatggcgtccctctcctctgccgccatcaccgccccttccttcacggccgcgcccgctcgcgcagtggtcagcaggaggtccttcaccgtgcgtgcctctctccgcaaggccactgccaccgccgccgtggccgttgccgccagcgtcctgcttgccggcggcggcgccatggcccaggaggtgctg

SEQ ID NO: 31393 - DNA, 298 bp, Zea mays
gaagggcgggagcaaggccgtcgtggtggcgcacaagcacgccggtgtcttcatctccaagtccaaggaggatgcgctctgcaccaagaacatggtcccgggagagtccgtgtacggagagaagcgtgtctccgttcagaatgaggatggaacaaaagtcgaatacagggtgtggaaccccttccgttccaagctggctgctgctgtgcttggtggtgttgacaacatctggattgctcctggtacccgtgtgctgtatcttggtgctgcttctggcacaactgtatctcatgtgtct

SEQ ID NO: 31394 - DNA, 297 bp, Zea mays
cgatctgatcgacatggctgccgccaccatggctatcacctcccgcgcgctcatcggcaagccggcggctggcacgagggacgtcttcggcgagggccgcatcaccatgcgcaagaccgccgccaagcccaagccggcggcgtccggcagcccctggtacggtgccgaccgcgtcctgtacctgggcccgctgtccggctcgcccccgagctacctgactggcgagttctccggcgactacgggtgggacacgcggggctgtcggcggatccggagaccttcgccaagaaccgcgag

SEQ ID NO: 31395 - DNA, 298 bp, Zea mays
cccacgcgtccgatagcaaccggtccaacactttcacgctcaggcgctcagctctagcaatggctgcctccaccatggcgatctcctccacggcgatggccggtacccccatcaaggtgggctccttcggcgagggccgcatcaccatgcgcaagaccgtgggcaagcccaaggtggcggcgtccggcagcccctggtacggccccgaccgcgtcaagtacctcggccccttctccggcgagcccccgagctacctcaccggcgagttccccggcgactacggctgggacaccgccgg

SEQ ID NO: 31396 - DNA, 129 bp, Zea mays
cacacgcgtccggcagcatgggccagctctgcatgtccggcagcctgatcccggataaggtggccggtaagatcgtcctttgcgaccgcggcaccaattccagggtccagaagggcttcgtcgtcaaag

SEQ ID NO: 31397 - DNA, 187 bp, Zea mays
cccacgcgtccggtttggcgcatcacagcaaccaattagcaagcagcaggagtccatctcctccgtcaccaagatcggactatggggcggacagggagggtcggcacaggacatcacggcagagcagccaccacggcgtctgcacagcatcaccgtccgcgctggcgttgccgtcgactccatcgag

SEQ ID NO: 31398 - DNA, 216 bp, Zea mays
gcaatagccaacccagccaaacctggcgagttcagagtcttcaaccagttcaccgagcagttctctgtcaatgagctagccaaactggtgactgcggcaggagcgaaacttgggcttgaagtggagaccaaatcgatacccaacccacgagtcgaggctgaggagcactactacaacgccaagcacacgaagcttattgagctcggcctggtgccc

SEQ ID NO: 31399 - DNA, 315 bp, Zea mays
aggccggcagtcgccgtcatcgatcgatcgccggaaaactaacccctaacgatgtctggagccggcgaggaggacaagaagcccgcggagggcggcgcccacatcaaccttaaggtcaagggacaggatggcaatgaggtgttctttcgcataaagaggtccacccagctgaagaagctgatgaacgcttattgtgaccgccagtctgtggacatgaatgccattgcgttcctgtttgatggccgcagcttcgcggcgagcagacccctgatgagctggagatggaggacggcgacgagatcgacgccatgcttt

SEQ ID NO: 31400 - DNA, 223 bp, Zea mays
ggacgcgcaaggccggaaaggatgtcgtggcagacctacgtcgacgagcacctcatgtgcgaggtcgagggccaccaccacctcacctccgccgccatcatcggccacgacggcaccgtctgggcccagagcgccgcattcccgctgttcaagcctgaggagatggccaacgtcatgaaggacttcgacgagcccgggttcctggctccgaccggcctcttcc

SEQ ID NO: 31401 - DNA, 221 bp, Zea mays
caagcacttcggcgcccgttcaggatccacatcttcccgagcgagttcttggttgacctcttcctcttcggaccacctccaaggctcttggtgtagcttgccactctcaccaatcaagttttcatgtctgatctcgacattcagatcccaactgccttcgatcccttcgctgaggccaatgctggggactctggtgcggcacagggtcaaaggactacgta

SEQ ID NO: 31402 - DNA, 224 bp, Zea mays
atcccactgttgttgacagagtgattgaggatgaacatgttatcaatggaaaaccggttgaaattaagagaacgatccctaagggagctgctcctttgaaagatttcaagacgaagaagatttttgttggtggattaccctcagctctaaaagaagatgaattcaaggaattcttttccaagtttgggaaggttgtggagcatgaaatcatccgtgaccatgca

SEQ ID NO: 31403 - DNA, 215 bp, Zea mays
ggcgacatcaagcccagcaacatcatgctggacgacgcgctcggcgccaagctcggcgacttcggcctggcccggcttggcgaccacggcgggcgctggcacaccaccaacgccgtgctgggcaccgcgggctacatcgacccggagttcgtcaacacgcggcacccgagcacccactccgacgtctacagcttcggtatcgtcctcctcgaggt

SEQ ID NO: 31404 - DNA, 312 bp, Zea mays
  unsure (1)..(312): unsure at all n locations
ttcgtctcctatcctgcggtcgccaagatactaaggacccgaatgggactgccgttgccgtcggtgagggagaccatcgcgcactagtcgtatactctctagtggaggattacctcagctactggatgcaccgtctgctgcacacccagtggtgctacgagaagatccaccgcgtccaccacgagttcacggctcctacaggcttcgccatgtcgtacagccactgggccgagaacgtcgtcctttctatcccggccttggccggcccagtgctcgtgccatgccatgtcaccacgcatgcntcatggttct

SEQ ID NO: 31405 - DNA, 220 bp, Zea mays
ggacggggcggacgcgtgggctccattctcagccgccgccaatcccttcccgtgctccgcaaccgctgagtgagaagaagagatggccggcaagggcgatggcccggctatcggcatcgatctcggcacgacgtactcttgcgtcggcgtgtggcagcacgaccgcgtcgagatcattgccaacgaccagggtaaccgcaccacgccctcgtacgtcgcc

SEQ ID NO: 31406 - DNA, 307 bp, Zea mays
cccacgcgtccgccatcgtcaaggaaggaacacggccctaactaaaccctagctaagggaagggaaacaagaccatggatgcctccaagctccgcgagcttcgcgacttcgtcgaggcgtgcaagaagaatccttcgctcctcgccgaccccaacctctccttcttccgggattacctccagagtttgggtgacaaaattcccgccgccgccccctctttcgaaagtcccaagagatcttccatggacgacattgatgacgacggtgatgacgacgacgatttggatatgagggatcccactcctga

SEQ ID NO: 31407 - DNA, 308 bp, Zea mays
gtgaagtctttgagggtattaatgttaacaataatgagaaatgcatcattaagatcctcaagcctgtgaagaaaaagaagatcaaaagagaaattaaaattcttcagaatctttatggaggccctaacattgtgaagctgcttgatattgttagagatcagcattcaaaaacaccaagcttgatctttgagtatgtcaacaacacagttttcaaagggtggacccggccattaccagattatgacatccgatattacatctatgagtaactcagggcattagattactgccattcacaaggtattatg

SEQ ID NO: 31408 - DNA, 283 bp, Zea mays
cccacgcgtccgggcactagcacctcctcgcctccacctccgtcctcttcgatcccgtccaatcccccgcgccccggcgcccctctccgccggcggctttgctgggtcccgcgctcctcctcctcctaggctgttctggttggggctgcggcggagggaactaggtaagggggaaggaaaggggaggtttgagggagagcgcagatcagcggcagcagcgatgccatcgcacgcggatctggaccgccagatctcgcagctgcgggattgcaagttcctgcct

SEQ ID NO: 31409 - DNA, 304 bp, Zea mays
cccacgcgtccggcggcaagcaacgaaatgacaaatggtgaattgggaggcgtgcaacctctccctgggacagctgggcagttcggcggcatgcagcaggcactgcaaccacaagttaaccacatgggagttccacaaaggcagccaatgtacagcaaccagccaggggttggggtggcgccaacacagatgcaggcaggcttggggaaccagcagttgggttcgacatccatgatgggcatgcctccacagatgtatggcggcggatcgcaggcagccatgatgtacccgcaacaaatgccag

SEQ ID NO: 31410 - DNA, 306 bp, Zea mays
gcacgacgcacgcagagccgcagagatccgtcacactgcaagttttgaaaactgaactgtaagatggcatcagcagagctttcccgtgaggaaaatgtgtacatggcgaactcgccgagcaggcagagaggtacgaggaaatggttgagttcatggagaaggtagcgaaaactgttgactcggaggagctcactgtggaggagcgcaacctcctgtctgttgcatacaagaacgtcattggagcccgccgtgcctcatggcgcatcatctcctccatcgagcagaaggaggagggtcgaggcaatg

SEQ ID NO: 31411 - DNA, 213 bp, Zea mays
ggacgggtcggcggcatgatcttcgccctcgtctactgcaccgccgagatctccggcggcacatcaacccggcggtgaccttcgggctgttcctggcgaggaagttgtccctcaccagggcggtgttttacatcatcatgcagtgcctgggcgccatctgcggcgcgggcgtcgtcaaggggttccagcaggggctgtacatgggcaacggcg

SEQ ID NO: 31412 - DNA, 305 bp, Zea mays
tgttactgaagacggaaaggaaaagaaagttactattgattttgagccattcaagcctatcaatgtgtcactctacctttgtgacaacaagttccacactgaggctttaaatgagctcttggaatctgatgacaagtttgggttcattgttatggatggtaatggtactctttttggcacactaagtggcaatacccgtgaagtgcttcacaaattcactgttgacctcccaaagaagcatggtagaggagggcagtctgctctgcgttttgctcggcttcggatagaacaacgtcataactatg

SEQ ID NO: 31413 - DNA, 217 bp, Zea mays
gtgatgtctactcaacaaatgagccacaaattgcattcaactccaggattgcgttctgcctcaacatgcacaatgaggcggtcaaggcgatgagattcccccctaattctcacaaggaaaaggagagtgctgagaagcgccgagagaggcttcagcaggaggaagaactggctaagcacatggctgaggatgatgacgacgacttctaagttagctg

SEQ ID NO: 31414 - DNA, 217 bp, Zea mays
caccgccgcgtccagcctcctcaagtcgtccttcgcgggctcccggctcccttcggccacgcgcaccacctccccgtcgtccgtggccgtggcaccccgcgcgccggcggcgccccatccgcgcgtccatctcctcctcccccaccccgccctacgacctgacgtccttccggttcagccccatcaaggagtccatcgtgtctcgcgagatgacccg

SEQ ID NO: 31415 - DNA, 267 bp, Zea mays
ggatggcaagccttttgtcgatgtcctcaaggagggaggcgtcctccctggcatcaaggtcgacaagggcaccattgaggttgttggcaccgacaaggagaccaccacccagggccacgatgacctcggcaagcgctgcgctaagtactacgaggccggtgcccgctttgccaagtggcgtgctgttctcaagattggccccaacgagccgtcacagcttgccattgacctgaatgctcagggtctggctcgctacgccatcatctg

SEQ ID NO: 31416 - DNA, 154 bp, Zea mays
cccacgcgtccggaagcgtgggtatgtggcctccaactccaaggatgaccctgccaaggaggctgctagctttacctcccaggtcatcatcatgaaccaccctggccagattggcaatggctatgccccagttctggactgccacacctcacac

SEQ ID NO: 31417 - DNA, 335 bp, Zea mays
  unsure (1)..(335): unsure at all n locations
atacactgcangtaccggtccgcnagtcgactcacgcgtccggccgtcgtctgctgcgtactccggctccagtttggtctggttcttgcaagttgctcttgcggtagttcccccaactgtcaccatgcagaacgaggagggtaagactgtggacctctatgttcccaggaagtgctcggccacaaacaggatcatcactgccgaagaccatgcctctgtccagatcaacattggccacttggatgcgaatggcctgtatgatggtcacttcacaacatttgctctctctggggtatgtccgtgctcaagggcgatgcagacaactcttttgacaa

SEQ ID NO: 31418 - DNA, 314 bp, Zea mays
ggtgctgagaggatgtgcatgcctgcaccctctgtcgagcagtttattgatgcagtaaaacaaaccgttcttgcaaataagagatggattcctcctactggtaaaggttctctgtatattaggcccttacttatgggaagtggggctgttcttggtcttgcacctgctcctgagtatacattcattatatttgtctctcctgttggaaactactttaaggaaggtttagcaccaataaatttgatagttgaagacaagttccatcgtgctactcctggtggtactgggggtgtgaagaccataggaaattatgc

SEQ ID NO: 31419 - DNA, 315 bp, Zea mays
gaagcacgccaagaaggtgaacgagctggacccgctgctcaagcccaagcaggacaggtacgcgctccgcacgtcgccgcagtggctcggcccccagatcgaggtcatccgcgccgccaccaagtccatcgagcgcgaggtcaactccgtcaacgacaacccggtcattgacgtccaccgcggcaaggcgctgcacggcggcaacttccagggcacccccatcggcgtgtccatggacaacgcccgcctcgccatcgccaacatcggcaagctcatgttcgcgcagttctccgagctcgtcaacgagttctacaa

SEQ ID NO: 31420 - DNA, 288 bp, Zea mays
gatccgtcctgtatgcaagaaatttatgcaagatccgatggaaatatatgttgatgatgaggcaaagttgaccctccatggtcttgtacagcactatataaaacttagcgaggcagagaagaaccggaaactgaatgatctcttggacgctcttgatttcaaccaagttgtgatattcgtgaagagtgttagcagagctgccgaactgaataagttactttgtgaatgcaacttcccatcaatctgcattcattctggaatgactcaggaagaaaggctaacaagata

SEQ ID NO: 31421 - DNA, 305 bp, Zea mays
catggatctacccgcagtccaagtaccgctacaaccgcgtcttcttctccaacgacacgtacctccccagccagatgccggcggcgctgaagccctaccgcgacgacgagctccggaacctgaggggcgacgaccagcagggcccgtaccaggagcacgaccgcgtctaccgctacgacgtctacaacgacctcggcctgcctgacagcgggaacccgcgccccgtcctcggcggcaccaaggagctcccctacccgcgccgctgccgcaccgggcggaagccaccaagagcgacccaacagcga

SEQ ID NO: 31422 - DNA, 142 bp, Zea mays
tgctgctgagattactgacaagcttggattacactccctgcgccactggcactggtacatccagagcacttgtgccacaactggcgagggtctgtatgaaggcctggactggctgtccagcaacattgcgagcaaggcttga

SEQ ID NO: 31423 - DNA, 311 bp, Zea mays
cccacgcgtccgaaactcggcccccgcagatcttttgttccggaccccgtgagtcgctgccacgatcgaggcagggcgccaattgcggtggccaccacttccaatccactccccgcgttcgcctcgccgagctgttcttgctctgtcctctctccaactccacgatttgttccacacccggttcccgagcctccgcagcgcatcttgctgaaaaagggaactccgagttctccagctctggatcggcagagagcggtggatccttttgcggactctgaggtccagttcttgtgtttgatttgtctcatcaa

SEQ ID NO: 31424 - DNA, 304 bp, Zea mays
cccacgcgtccgcggacgctggcgtccgcaaggtctacggcatcctcgctgcgcactgctcctcaccaccggcgtctccggcctcacacgttctccaccccaccctcaacgccacgctctccgactccccgggcctcgcgctcgtgctcgccgtcctgcccttcatcctgatgatcccattgtaccattatcagcacaagcacccacacaatttcgttttcctgggtctgttcacgttgtgcttgagcttcagcatcggcgtggcttgtgctaacacccaaggaaaaatcgttctggaggcttt

SEQ ID NO: 31425 - DNA, 297 bp, Zea mays
ctgcttgctccctgttgaccattgggtattctgaaccatcgagccatggctgccaagctgactcgcctccacagtcttcgcgaacgccttggtgccaccttctcctcccatcccaatgaactgatagcactcttttccaggtatgttcaccagggcaagggaatgcttcagcgccatcagctgcttgcggagtttgatgccctgtttgatagtgacaaggagaagtatgcaccctttgaagacattcttcgtgctgctcaggaagcaattgtgctccccccatgggttgcacttgct

SEQ ID NO: 31426 - DNA, 300 bp, Zea mays
agaaataaagcagctcctccgcggggcggcgaactactacccatcgccaaaaccctagccccgatccggtcgaggagcactacttcttggcatggcgggcacccctagccaggcaagcctcctgctccagaagcagctcaaggatcttgcgaagaaccccgtggatgggttctccgctaggcttgtagacgatagcaacgtcttcgagtggcaggtcaccatcatcggcccgcccgacaccctatatgatggaggctacttcaatgcaataatgaccttcccccagaactatcccaacag

SEQ ID NO: 31427 - DNA, 302 bp, Zea mays
  unsure (1)..(302): unsure at all n locations
cggacgctggncgtgacgcgtgggtcaaagcaagccatgtggaggagggctttagcgatggtcctgattcatggctggcaccgcgctgctcgccggggctgccggcgccggcgcgcagcagggcgtgtggagcatcatcacccggcccatgttccagagcatgctgagccaccgcggcgacagcgggtgccagggcgccttctacacctacgacgccttcatcgaggccgccagcaagttccccggcttcggcaccaccggcgacgagcagacgcgcaggcgggagctcgccgccttcttcg

SEQ ID NO: 31428 - DNA, 298 bp, Zea mays
  unsure (1)..(298): unsure at all n locations
accacgcgtcgacacgcgtccgcggacgctggtgcaaaagtgaaggaagttgtcgtggggatgactgacccaaatcctatcgtggcatacaaagggattgagaagctccaaggtgctgggataagtgtgagggtgggtgtggaggaagcgttatgccgcaaactaaacgaggcttatatccatcgtatgctcaccgggaaggcttttgcaactctgagagctacactctcaatgaatggaatcatcacgaaccagattgggaagggagctgatcagtcangtgggtactactcgcagc

SEQ ID NO: 31429 - DNA, 293 bp, Zea mays
cggacgcgtggtggcaatattacttcttgcaaggttatgcgggattcttatggtgttagcagagggactggatttgttgcattcaaatctgctgaagatgctaaccgagctcttaccgagatgaatggcaaaatggttggaagcaagcccctttatgtagctcttgcacagcgtaaagatgacagaaaggcaaagctacaggcacagttttcacaaatgcgtcctgttgcaatggcaccttcagtaggtcctcgcatgcccatgtttccacctagtgttcctggagttggtca

SEQ ID NO: 31430 - DNA, 292 bp, Zea mays
ctgctcgtagccggctgcccccgcggccccggccagtccatcccctcgctcgctccccaactccagcaggcagatcagatacatccatccattcgcggaccggaaggaaaggaaagggttgaactatgagcgccgtggcggtttcgtcgtcgctgaacccggacgcgccgctcttcatcccggcggcgctgctgcaggtggaggacttctcgccgcagtggtgggacctcatcaccaccactgcctggttccgcgaccactggtcccgcgagcgcgcccacctggacgagat

SEQ ID NO: 31431 - DNA, 242 bp, Zea mays
  unsure (1)..(242): unsure at all n locations
cccacgcgtccggctcagatttctttcctgggcttggatggatgttaacaaagtccacttggattgaattgtcaccaaagtggcctaaagcttattgggatgattgggtgaggctanaggaggtacatggacatcggcaattcatacgcccggaaatttgtagaacatacaattttggcaagcatggatcaagcttgggacagttcttcgagcaatacttggagcccattaagtaaacgatg

SEQ ID NO: 31432 - DNA, 296 bp, Zea mays
  unsure (1)..(296): unsure at all n locations
acgtgatcttcgcggtggacggcaccccggtgcgggacttcaagaaccacgaggcgcgcggggtggcgttcccgaggatgcagcccatgaggctgtacgccagcctgtggaacgccgacgactgggccacgcagggcgggcgcgtcaaggcggactggtccaaggcccccttcgtcgcctccttccgcggtttcagcgccgacgcctgcgtctgggacngcggcatgcagcgctgccctgagggcagcatggaggccgccgcgtcgcgggtagcggctctgccgcggctggtggaa

SEQ ID NO: 31433 - DNA, 337 bp, Zea mays
gaagccgcagtacggtccgaattccgggtcaccacgcgccgcacagcgagcgagggaccggggcggaagaacagagagaagacgtctctctcctctcggcgtccccgttccccaacctctcgtctgctgcctgcctgcctgcctgcctgcaaaaaggagtttgtcatggcgtctaagcgcatcctcaaggagctgaaggacctgcagaaggacccccccacatcatgcagtgcaggtcctgctggtgaggacatgtttcattggcaagcaacaattatgggaccactgacagtcctatgctgtggtgttcctagtgacatcatttccgcagattacc

SEQ ID NO: 31434 - DNA, 296 bp, Zea mays
  unsure (1)..(296): unsure at all n locations
aacctacctagcaaaaatgaggcatcaggttcctggtcctcttacaacaataacagcacaagcagtgcaagcagcacaggaagcactaatagcagtgctctctacaaagtagatcatgaagcggattgtctggattatgagatcttatgggaagaccttgtcattggagaacaaatagggcaaggctcttgtgggacagtatatcatgctttgtggtatggttcggatgtggctgttaaagttttctcgnagcaagaatattcagaagatgtgatactgtcctttcgacaagaggt

SEQ ID NO: 31435 - DNA, 345 bp, Zea mays
gatgagataggcttcagtcctgatgatctgcaggagctggtgcattcgctctcttatgtgtaccaaaggagcacaacagccatatcagtcgttgctcccatctgctacgcacatctggcagctgctcaggttggccagttcataaagttcgatgagatgtcggagacgtcctccagtcatggcgggcatacttcggcgggcagcgttccggtccaggagctgccgcgcctgcatgagaaagtgcagagctcgatgttcttttgctgagccgtggttttactattttggtggatggtgaaccctctagttatgtcggtagacgctcttggatgacgctcaagttgt

SEQ ID NO: 31436 - DNA, 346 bp, Zea mays
ttttgctgctctccgacaccgagctccgaagccgcagcatcaggcgcgccccccctcgcgtgtgaccgagatggcgctgccgaatcaggggaccgttgattaccccagcttcaagctcgtcatcgtcggcgatggtggaactggtaaaactacatttgtgaagaggcatctcactggagagtttgagaagaaatatgaaccaaccattggtgtggaagttcatccgttggatttcaccactaactgtggtaagatcaggttctactgctgggataccgcaggcaagagaagtttggtggcctcagggatggatactatatccatggccagtgtgcgatcatcatgt

SEQ ID NO: 31437 - DNA, 311 bp, Zea mays
  unsure (1)..(311): unsure at all n locations
ccacgcgtccggcacgcatacacagcacagagtgaggtaagcatccgaaaaaagctgtgatctgatcgacatggccgccgccaccatggctctcacctcccgcgcgctcgtcggcaagccggcgaccagcaccagggacgtcttcggcgaggggcgcatcaccatgcgcaagactgctggcaagcccaagccagcggcgtccggcagcccctggtacggggccgaccgcgtcctgtacctgggcccgctgtccggccagcccccaagctacctgaccggcgagttccccggcgactacggctgngacaccg

SEQ ID NO: 31438 - DNA, 320 bp, Zea mays
  unsure (1)..(320): unsure at all n locations
gtcttcacactcctcgccatcacataaaaccagtgcaagcagaagcagcgcaatggcgagcagcaccatggccctctcctccacagccttcgccggcaaggcagtgaacgtgccgtcgtctctcttcggcgaggcncgcgtgacgatgcgcaagacggcggcgaaggcaaagccagcggcgagctccggcagcacgtggtacggccccgaccgcgtgctctacctgggaccgctgtccggcgcgcccccgagctacctgactggcgagttcncgggcgactacggctgggacactgcggggctgtcggcggctcggagac

SEQ ID NO: 31439 - DNA, 351 bp, Zea mays
ctgagtttgctaagaagctagcatctgttgctgacctttatgtcaatgatgcttttggcacggcacacagagctcatgcttcaaccgaagagttaccaagtatttgaacgcctgctgttgccggcttcctcatgcagaaggaacttgactaccttgttggagctgttgccaacccaaagaagccatttgccgctattgttggtggatccaaggtctcaagtaagattggtgtcattgagtccttgctggcgagagtcgatatcctcatccttggtggtggtatgatctacacattttacaaggcacaaggatattctgttggaaaatctctcgtggaagaggataaacttg

SEQ ID NO: 31440 - DNA, 276 bp, Zea mays
cccacgcgtccgcccacgcgtccgagcccctgtacgcgcaggtcgagccgtacgactccgggttcctcaaggtctccgatgtccacaccatctactacgagcagtccgggaacccgcagggccatgcggcggtgtttctccacggcggtcccggagccggcacgtcgcccggcaacaggaggttctttgacccgcagttctacaggatcgttctgtttgaccagaggggtgcaggcagaagcactccccatgcttgtttagagcagaacactactt

SEQ ID NO: 31441 - DNA, 302 bp, Zea mays
cccacgcgtccgtaaagcatggtgtgcttcaaagggaaacatcgcctactttgagacgtcggctaaagagggcttcaatgtagaggctgcatttgagtgtatagcgaggaatgctgtaaaaaatgagccagaagaagatatgtatcttcctgatacgattgatgttgggggcgctggaaggcaacagcgttcgtcaggttgtgaatgctagaagatatggagcactgcgaattgctcggttggttggtctgattctctagggcttgttgtttgggtggcctgtgtcatcatttcatatatgt

SEQ ID NO: 31442 - DNA, 299 bp, Zea mays
gatggttgcagcatctgcaaataccctcaaccaggtgtttgacataaaaaatgatgctaaaatgaaaaggacaatgcgatgccccctgccatctggtcgcattagtcctgcacatgctgcgatgtgggctacaagtgttggagttgcaggaacagctttgttggcctggaaggctaatggcttggcagctgggcttgcagcttctaatcttgttctgtatgcatttgtgtatacgccgttgaagcaaatacaccctgttaatacatgggttggggcagtcgttggtgccatcccaccac

SEQ ID NO: 31443 - DNA, 294 bp, Zea mays
ggacgctggaagcgaaggagaaaagcagttcttcagctaggcaggagggcacaggaagagcggagatggcgtcaaaggggattcagaaggagctcaaggatctgcagaaggaccctcccacctcgtgcagtgcaggtcctgttggtgaagacatgttccactggcaggcaacaataatgggtccatctgatagcccatattctggtggagttttcctagtcacaatccattttcctcctgattatcctttcaaaccaccagaggtggcatttcgtactaaggtgttccatccaa

SEQ ID NO: 31444 - DNA, 268 bp, Zea mays
ctccttccccacttcggcctcggcagttccgcgtgccggccggagcctcgtctcgcttcgcatctcgcacttcgcgccttcgccgctgcgattcctcagcagctcctcgaccgctccacccacccctgcgccggcgagatggagctcaagcccggcatgtcggcgctcgtcaccggcggcgcctccggcatcgggaaagcactttgtattgcttttgcaaggaggggtttatttgtgactgtcgttgatttctcagaggaaaatggaa

SEQ ID NO: 31445 - DNA, 295 bp, Zea mays
cggacgcgtggcacaggatacccatgtcacaacagctgttcgtggaacaattgggcacattagctcccgagtacctatctaccggcaagtcttctgagaagactgatgtttttggctatgggatcatgcttctggagcttattactggccagagggcatttgatctagctcgtcttgcaaatgatgacgatgttatgcttcttgactgggtgaaaggactgttgaaggagaagaaggtggagatgctggtggacccagatctgcagaaagcctacgaggaggtcgaggtggagag

SEQ ID NO: 31446 - DNA, 299 bp, Zea mays
aatttttgcagttattcctaaggcaaagactgcaaaaattgtccgtggaataattgatgctgtcgccaagatacctggaacatcagatcttcagatttcactcagcaaggaaatggtagaatggacccgggcagagaagcgtactttcctccggcagcgtgtggaggcaaggttggcagctctcctgttagagaatcaggagtatactgaagcccttaccctgcttactagtcttatcaaggaagtcaggagacttgatgacaagttacttcttgtggacattgaccttttggaaagca

SEQ ID NO: 31447 - DNA, 302 bp, Zea mays
cggacggtggtcgagtacgcgtgggtaagaacgtcatcttcaaggtggacgacctcttcgtgcagtgcttcaagcggaacccggacctggcgtacccgggcgggaagcacatgtcggtgcacgccacgctgtgggacggcagctactgggccacgcagcaggggaaggtgaaggtggactggtccgccgcgcccttcgccgtctcctaccgcggctactccgccgacgcctgcgtgcccgacggcgacggccgcacgctctcctgccccgccggcacagacagctggatgagccgctagctc

SEQ ID NO: 31448 - DNA, 296 bp, Zea mays
cccacgcgtccgctcttttaatcttttttttctggtgacgcgtgacaagcaagcagctggcatcttgaaatcgttatcgcagctatttcattgcgtttgtaattcctactaagacaatagaaaagaatagaaaaagaaacaagtaaataatgtgccctgccgttccccccacccacctcaaccgcaggctgcgacgccgccgtcctgatcgcgtccaagaacaacgacgccgagaaggacgcgccggacaacgagtcgctcgccggcgacggcttcgacaccatcaaccgggtcaa

SEQ ID NO: 31449 - DNA, 266 bp, Zea mays
cggacgctgtcgcctgattgtttccgagacgaagctcatcacggtgcactcctgcgctgggagccctaggggactctcgcaaggtgttcgaaggaatggcgtgcagggacctgctcgcctggtcggccatgatcggtgcctacgccatcaggggcctgtacgaggaggtcgtcacgctcgcggtggccatggtcagggaaggggtcatcccggacaggttcctgatcacccggattctacaggcctgtgcgtacacagaggacctg

SEQ ID NO: 31450 - DNA, 293 bp, Zea mays
ggacctggtgttgaagtattctcatacaattgaagatcttggtaataccctagtttcaagagctgcgtcaggaccgaagcccatatcttgctctccatctaaggtacgagaaggacatgctagcttttactggttgcagccataacttgacatcagaagaagaggaggaactgcgtaaaatgcggtatgaagtcagtcactggaaagagaaagaaatcaatgctactgagagaagaagccttggtggctgtcctttgacgccaagggaaacttcaattttactcaaaggactg

SEQ ID NO: 31451 - DNA, 263 bp, Zea mays
ggtgtctgtctcgcttggtggctggttgcaacggtcttggcgacgtcgtctcgtcgggtgcccttgctgctgctttgccttggcgtgctggtgtcctgctccttcgcggcgggcagcttggaccaggagctggacatcacgtggggcgacgtgcggggcaaggtccttgacaacgggcggctgctgacgctgtcgctggaccgcacgtccggctccgggttccagtcccggttcgagtacctgttcggcaagatcgacatgca

SEQ ID NO: 31452 - DNA, 293 bp, Zea mays
gattttagccgccgccgctgctcatctcacatccctcgagaagacgcctgctcctcgccgatcgatacgatggctgtcttctccgacctccacaccgccgacggcctcaagtccctcgaggctcacctcgccggcaaaacctatgtgtctggtgactccattactaaggatgacattaaggtcttcgccgcggtgccgtcgaagcctggcgctgagtttcctaatgccgcccgctggtacgagaccgtctctgcggctgtagcctcaagattccctggtaaggctgttggtgt

SEQ ID NO: 31453 - DNA, 294 bp, Zea mays
cctcgcatgggccccaagagggagctcaagtttgcacttgagtctttctgggatgggaagagcaccgcatgaggatctggagaaggttgctaccgacctcagggccagtatctggaagcagatggctgatgctgggatcaagtacatccccagcaacaccttctcgtactatgaccaggtccttgacaccactgccatgctcggcgctgtccccgaacgctactcatggactggaggagagattgggtttgacacctacttctccatggccaggggcaacgccactgtccctgc

SEQ ID NO: 31454 - DNA, 294 bp, Zea mays
cgaagaacctgaagcttggcatccatgaggactccacgaacaggaacaagattgcggactgctgaggtaccactccaccaagagcggagatgagctgacaagcctcaaggactatgtgacgaggatgaaggagggccagaatgacatctactacatcactggcgagagcaagaaggccgtggagaactcccccttcctcgagaagctgaagaagaagggctatgaagtcctgtacatggtggacgccatcgatgagtatgctattggccagctcaaggagttcgagggcaagaa

SEQ ID NO: 31455 - DNA, 292 bp, Zea mays
cggaacgaggcggcaacctgaatccctgggagtgctcgcccaagtgcgggtcgcggtgctccaagacgcatacaggaaggcctgcctcaccttatgcaacaagtgctgcgccaagtgcctctgcgtgccaccggggttctacggcaacaagggcgcctgcccctgctacaacaactggaaaaccaaggaaggatggcccaagtgcccctagaataagatccaccgcagctcccgtccgccattgtccccccttctccgaatctggaacgtgttgttcatcttcgaccacccc

SEQ ID NO: 31456 - DNA, 296 bp, Zea mays
gcctggactacggcttcaagggcacgagatcgccatggcctcctactgctccgagctccagtacctgggcaaccctatcaccaaccacgtgcagagcgcggagagcacaaccaggacgtgaactccctgggcctcgtctcggccaggaagaccgccgaggcgatcgacatcctgaagctcatgtcgtccacctacatcgtggcgctgtgccaggccgtggacctgcgccacctcgaggagaacatcaaggcgtcggtgaagaacaccgtgacccaggtggccaagaaggtgctgac

SEQ ID NO: 31457 - DNA, 292 bp, Zea mays
tccgagcctcagttcgcatccacgcgcgccgccgccgcctcgccggtcgacgctcaccgcgcagcatggcggaacagactgagaaggctttcctcaagcagccaaaggttttcctcagctcaaagaaatctggcaagggtaagaagcctggcaagggcggcaaccgattctggaagagcattggccttggcttcaagactcccagggaagcaatcgaagggacctacattgacaagaaatgcccattcactggaactgtttctatcagaggcagaattattgctgggacatg

SEQ ID NO: 31458 - DNA, 289 bp, Zea mays
cgctgtcccccaacgtggtgcgcgtggccatcgtgctcaacgagaagggcctcgacttcgagatcgtctccgtcgacctcaccaccggcgcccacaagcagcccgacttcctcgccctcaaccctttcggccagatcccggctctcgtcgacggagacgaagtcctcttcgagtcccgtgcgatcaaccggtacatcgccagcaagtacgcgtcggagggcacggacctgctccccgcgacggcgtcggcggcgaactaggaggtgtggctagaggtggagtcgcacca

SEQ ID NO: 31459 - DNA, 288 bp, Zea mays
cggacctggtgcagagcacagcccaaggctaatgatcaatacttgcccccatttgtgatagttgatgtcagcggcaaagctgttggacctgtattagatggtgatgcagttgtcactatcaacttccgggctgatcgcatggttatgcttgcgaaacactagagtatgcagattttaacaactttgaccgtgtacgtgtccccaaaattcgatatgctgggatgcttcagtatgatggtgagttgaagcttccaagtcgctaccttgtttccccaccagagatagata

SEQ ID NO: 31460 - DNA, 329 bp, Zea mays
agctgcagtacggtccgaattccggatagaacacgcgtccgggacctggtgatgtctcctagagaggtgattggtgctgttctgaagcatctgggctcatcatacaacacagttgatatggaaatggaccattgaaatcctcccggcaagctcgggcctccacaaatcctcccaatcctgtattggcttcaaattatgtcttttgaacttgtctttcttgtaagcaatgaccatggtgccccatctgtatggaactccccatattgtaccattaggatctgcttctccgttctggttcctgcacaaatggaccttccatctgtcactca

SEQ ID NO: 31461 - DNA, 147 bp, Zea mays
gaaacaattgacccaatggcaaccattgaattcaaacccaacacagctgatgatccccatatgagaaagccagatatcaccaaggctaagcaactgctacattgggagccaaaggtctctctcaaagaaggccttccgctaatggtt

SEQ ID NO: 31462 - DNA, 96 bp, Zea mays
cccacgcgtccgcgaaccccaaaccctagcttcgctcgttgcagcggcgagccggcgatggcgaagtctctgcgatccaaacgcgagaagcggctt

SEQ ID NO: 31463 - DNA, 228 bp, Zea mays
  unsure (1)..(228): unsure at all n locations
cccacgcgtccggtttagaacctctaaaatttcccccactcgccagtcgcagcagcacctgtagcagccatggacgccagcggagccggtagcaacgggaagaagggggcggccgggcgtaaggcaggcggccccaggaagaagtcggtgacgcggtccgtcaaggccgggctgcagttccccgtcggccgnatcgggcgctacctcaagaanggccggtacgcgcag

SEQ ID NO: 31464 - DNA, 224 bp, Zea mays
  unsure (1)..(224): unsure at all n locations
cggacgcgtggcaaggatacccatgtcacaacagctgttcgtggaacaattgggcacattgctcccgagcacctatctaccggcaagtcttctgagaagactgatgtttttggctatgggatcatgcttctggagcttattactggccagagggcatttgatctagctcgtcttgcagatgatgacgatggtatgcttcttgactgggngaatgactgttgaag

SEQ ID NO: 31465 - DNA, 145 bp, Zea mays
  unsure (1)..(145): unsure at all n locations
atacgcgcagtacggtcggaatccgggtcgacccgcaccgcaagcgtccgcgacctggcgagtggntggcattcaggctgacggtcagatgcccggtgaacagaccattggcggaggtgcacatgctttcaacaccttcttcagt

SEQ ID NO: 31466 - DNA, 194 bp, Zea mays
cttctcccaatgggcctcacatctgagaatgttgcacaccgttttggcataacacgactggagcaagatcaagctgctgttgagtcacatagaaaggctgctgccgcagcagctgtcggtgaactcaaagaggagattgtgccagttcatacgaagattgttgatccaaaaactggtgaggaaaagaacatcgt

SEQ ID NO: 31467 - DNA, 221 bp, Zea mays
cccacgcgtccgcccacgcgtccgacctgggctgcgtcgtcgtcgaccgcaagatcttcatgtggaccgtcggcaccatcctcggcctcggcgtcttcatcggcttcatcatggtgatcgtcaagctcgtcccgcacaagcgcccgccgccgccgccgcccgaccagtacacgcaggcgctgcacaaggcgctcatgttcttcaacgcgcagcatccggtc

SEQ ID NO: 31468 - DNA, 265 bp, Zea mays
agcaaaacctactccgacaagctcgtcaaaggcgcaaaagccctgtacaagttcggaaggctgcagcgcgggcgatacagccccaatggatctgaccaggcaatcttctacaattccaccatctactgggacgagtttgtgtggggtggtgcgtggatgtactttgccacagggaacaattcatagctcacggttgccactgctccaggaatggcaaagcatgctggagcctactagtttggaagtccaaactatggagtattta

SEQ ID NO: 31469 - DNA, 110 bp, Zea mays
aaaccctagccgccgccaccgaagcggcctcccaggtaagcaagagcgtccaccccgccgccgccatgaagcgcaatccccgcgtcacgagctctcgccggaagtgccgc

SEQ ID NO: 31470 - DNA, 242 bp, Zea mays
cgtcgctccgccgccgccgaaacagcacatcgctctctcgatctcagccatggcggaggtggagcagccccaggacgcggtgaagctcttcaaccgctggaccttcgacgatgtgcaggtgaacgatatctcgctgaacgactacctggctgtgactgcgacgaacacgcgacattcctgccgcactccgcggggcgctactccaacaagcggttccgcaagcgcagtgcgccatcgtcgac

SEQ ID NO: 31471 - DNA, 162 bp, Zea mays
ccgagagcagcgcatcgacctgtggttcgaccccacggccgacttccacacgtacgccgtgctgtggaaccccagccaggtggtgttcatggtggacgagacgcccatccgggggtacgagaacgccacgctgcaccaaggccacggccactgccaccaccg

SEQ ID NO: 31472 - DNA, 312 bp, Zea mays
gcaaattcccaagccgccccttcccccatctctttcgcgccccatttgatcgattcctgatggcgcccaaggccgagaagaagcccgcggagaagaagccggcggaggagaaggccgagaagaagccaagggcggagaagcgcgtgccgagcaaggagggcggcgagaagaagggaaagaagaaggcgaagaagagcgtcgagacgtacaagatctacatcttcaaggtgctcaagcaggtgcacccggacattggcatctcgtccaaggccatgtccatcatgaactccttcatcaacgacatcttcgaga

SEQ ID NO: 31473 - DNA, 196 bp, Zea mays
ctctgcttccgagatctctccccacctcccggtccgctagcagatagcgggggccagagagatcgagatccggaggcgctagcgccacccatcagcgtctgcggcaattgcgggcatggtgacggtctcggggtcgtcgaaaccctccacgccgctgctcaaggacgagctcgacatcgtgatcccgacgatccgc

SEQ ID NO: 31474 - DNA, 305 bp, Zea mays
ggcaacaaccgggcacatgctttcttcaagcagcatggatggactgatggtggcaaggttgaggcgaaatacacatcaagagctgctgaactgtacaggcagatgctcaacaatgaggtcgctaagagtgccattaccgataatgccctgccgtcctcacctgtcactgcgtctgaggcttccaagccatctgatgactttcctgaattcaagctctcagacgcaccagcaccgccggcggagaatctgaatgggaagcatgaacccaagtcccccgatgctgctccacgttcaccaaaagctgc

SEQ ID NO: 31475 - DNA, 194 bp, Zea mays
gtcgccgctttcctcctctccgcctaccaggagtttaatgaattcggtgctgatggtggaccagcagctaaggcccttcggcccaaattcaacgtgtttgtcaaaaatgtatctgctctgggagtagctgtgccacacattgagttgaagcatgtgattgctgctacaattggtcttaagggtcttggaagcct

SEQ ID NO: 31476 - DNA, 303 bp, Zea mays
agacagtcaaaaccatcaagttcttgggactacatgaagagactcaaatacctaagggttgttcgagcccatttgatgtgatttgccagcgaatggaacagaggatggcctatggccacaatgagcaagacatggtactgctccaccacgaagtcgaggtggaatacccggacgggcaacccgccgaaaagcaccaagcgacgctactggagttcgggaaggttgaaaatggcaggtccaccactgccatggcgctgaccgtcggcattccagcagcaataggggcactgctattgctaaaga

SEQ ID NO: 31477 - DNA, 304 bp, Zea mays
gggagccttatcagggatctgcaggagcccgccgagtccgtgctcctccggatggacatcatgggtgagcccaaggatgccaaggaaagggccacacatgcagttgaggcttttaagaactacatccaggaggacaaacttttcggttgggtgctggacgactgcggggattgctcagttgccgagggatgccttatggacacaaacaatgatcccatcgatgttgatgcacacatgtacagagcaaaactatacgacgagaatcagagagcagtaggcatggtccacattcgtcaaagcgtgc

SEQ ID NO: 31478 - DNA, 309 bp, Zea mays
  unsure (1)..(309): unsure at all n locations
cggacggtgggtgtccgtcctaccaccacagctcaccgcggtttggctttctcccctcttccgcaccgcttactcgctccggattccggattccctctgctctttcccnaacgaaggtagccatggctgggagaggtaaggcgatcggctcaggcgccgccaagaaggccacgtccaggagctccaaggctggcctccagttccccgtgggaaggatcgccaggttcctcaaggccggcaagtatgccgagagagtcggcgccggcgcccctgtctacctcgctgccgtgctcgagtatcttgctgctg

SEQ ID NO: 31479 - DNA, 274 bp, Zea mays
gaggattgagctatctgcactccagaaagattgtacatcgggatgtgaaaagcgaaaacatgctgcttactccacagagaaaccttaagattgccgatttcggtgttgctcgtgttgaggctcagaatccaaaggacatgactggtgcaacaggcacacttggttatatggctccagaggttcttgatggtaagccatataacaggaagtgtgatgtttatagttttggcatttgtttatgggaaatctattgctgtgacatgccttacccaga

SEQ ID NO: 31480 - DNA, 304 bp, Zea mays
cggacgcgtggcttcagccagacagttctaagtccacacaagcacaacagcgggtgaccgtagagggtcaactgaattttggggagagcaactctagtccacccagatagggtcttagtggctctggaaccacaatcgacccatcgccctgctgaaaattctctagaatgcaaactatcagacgaggcaccgccactgttgtagcgttgagcgtgtggacgaactgcgtagggcctgaggcagctcccttcgctttcttggtgctcgttgatggaggctccgagggtaatgggcggtaacggat

SEQ ID NO: 31481 - DNA, 186 bp, Zea mays
gcacggtccgggacctggctcctatccactgcggcctggacgcgtgcgagagacttgaccacgcagcagcaacagggatagcgcctctgaagctgtacgggatgccgctgtcccccaacgtggtgcgcgtagccaccgtgctcaacgagaagggcctcgacttcgagatcgtccccgtcgacctca

SEQ ID NO: 31482 - DNA, 238 bp, Zea mays
ttaaagcattcaatcttcatgctgttttcaaagaagtgatgggtttcattaaaccaattgcatctatcaagaggctatctgtatcggttatgttggcaccagatttgccgttatgtgccattggtgatgaaaagagactcatgcaaactattctgaacatctctggcaacgctgtaaagtttaccaaggagggacacatcacacttgtagcttccattgtgaaggctgactctttgag

SEQ ID NO: 31483 - DNA, 220 bp, Zea mays
gaggtgggttggcttctcctccccctccggttcgggttcgggatcgtgaggttctccggggttccgtttcgtgggtgggcggatcgagatggcggcgtcggatgttgagtaccgctgcttcgtcggcggcctcgcctgggccacggacgaccactccctccacaacgccttcagcacctacggcgaggtcctcgagtccaagatcatcctcgatcgggag

SEQ ID NO: 31484 - DNA, 236 bp, Zea mays
gtcaagaaggaagaaaggggtgaccgtaaggttgcagggtttatattcatgtgcaatgcaaagactaagaaggagtgctaccagagtcgcttgtttgggatgcctagtgggaagattgacatggtcaagaagattaggccaggggtcaagctgttcctgtatgattttgacttgaagcttctgtatggcgtgtacaaggcagcatcacatggtgggctgaaccttgtccatgaagc

SEQ ID NO: 31485 - DNA, 229 bp, Zea mays
ccccgtccatttgatttgcgttcactgcgttgcgtttccttggaggggattgttctctcctctcctttggattggaggtccctccttcttctcctctctctctcagaggaaggcctgaggatccaggaagaggacagcaatgggggaaggtgcaggtgaccgtgtcctgagccgcctccacagcgtcagggagcgcatgggcgactcactctctgcccaccccaatgag

SEQ ID NO: 31486 - DNA, 194 bp, Zea mays
cttcttcgtccaggccatcgtcaccggcaaggggcccctcgagaacctgctcgaccacctcgacgaccccgtcgccaacaacgcctgggtctacgccaccaagttcgcaccagggtcttaagctagctaccgggccgcggcgtgccaggacattgtgttgtacactactcgtttctgtcgtgatctgtaccatg

SEQ ID NO: 31487 - DNA, 148 bp, Zea mays
ctcacccgccgcagccaatccctccccagcagccgtcgtcgccaccgctgcagcgcggaggcgaccccccatcgccgccaagatgcagatcttcgtgaagaccctgacggggaaaacgatcacgttggaggtggagtcctcggacacc

SEQ ID NO: 31488 - DNA, 233 bp, Zea mays
ggtactaccacaacataacgtcaaacacattgacagttcttgaggcaatggcagcacataatgtaaatactctgatttactcgagtacgtgtgcaacctatggtgaacctgatacaatgccgattgtagaaacaactcctcagaatcctatcaatccatatggtaaggcaaagaagatggcggaggacatcatcttagattttacaaaatcaaagaagcaatcaaatatggct

SEQ ID NO: 31489 - DNA, 157 bp, Zea mays
cccacgcgtccgcacaggctcaccccaccaacagcaagcgaaaatctcccgatcccctctagtctccgcggcgaagatgtcggggcgcggcaagggcgggaagggcctgggcaagggcggacgaacgccaccggaaggtgctccgcgacaacatcca

SEQ ID NO: 31490 - DNA, 233 bp, Zea mays
caacgctgcagttgcaaccatcaagaccaagagaactgtccagtttgtggactggtgccccactggattcaagtgtggcatcaactatcagccaccctctgttgtccctggaggtgacctggcaaaggtccagcgtgccgtgtgcatgatcagcaacaacaccgccgttgccgaggtgttctcacgcatcgaccacaagtttgaccttatgtacgccaagcgcgcattcgttc

SEQ ID NO: 31491 - DNA, 232 bp, Zea mays
cggacgcgtggcaagaattaaaggcaaatccacataggaatgcgaagggcactgttattgaagcaagccttgacaaggccaaagggcctcttgctaccttagttgttcagaatggaaccctaaacaaagctgatattattgtgtgtggtgaagcttatggaaagatccgtgcattgtatgatgactgtgggaagctcgttgacaaagcaggaccatccaatgcagtgcaggt

SEQ ID NO: 31492 - DNA, 233 bp, Zea mays
ggtatgagcaccgccttatcgatgacatggtagcatacgcacttaagagtgaaggagggtatgtctgggcttgcaagaattatgatggagatgtgcagagcgatttcttagctcaaggttttggctcattgggtttgatgacttcggtactggtgtgccctgatggaaagacgatcgaagctgaagctgcccatggtactgttacccgtcattaccgtgttcaccagaaagga

SEQ ID NO: 31493 - DNA, 157 bp, Zea mays
cgagccgtgtgatccaggagacgatgcgggtggcgtccatcctgtccttcaccttccgggaggccgtggaggacgtggagtaccaagggtacctgatccccaagggctggaaggtgatgcccctgttccggaacatccaccacagccccgaccactt

SEQ ID NO: 31494 - DNA, 229 bp, Zea mays
cccacgcgtccggcaaccggtccagcactttcacgctcagctccagcaatggctgcctccaccatggcgatctcctccacggcgatggccggcacccccatcaaggtgggctccttcggcgagggccgcatcaccatgcgcaagaccgtgggcaagcccaaggtggcggcgtccggcagcccctggtacggccccgaccgcgtcaagtacctcggccccttctccggcg

SEQ ID NO: 31495 - DNA, 225 bp, Zea mays
ctatcccgctcttggcctattgcacattgcctgccatctgcttgctgacagggaaatttatcacgccagagcttaacaatgttgccagcctgtggttcatgtcacttttcatctgcatttttgctacgagcatcctggaaatgagatggagtggtgtaggcatcgatgactggtggagaaacgagcagttttgggtcattggaggcgtgtcttcacatctctttg

SEQ ID NO: 31496 - DNA, 218 bp, Zea mays
cccacgcgtccgcccacgcgtccgcacagaaaaccctagccgccgccaccgaagcggcctcccaggtaagcaggagcgtccaccccgccgccgtcatgaagcgcaatccccgcgtcacgagctcccgccggaagtgccgcaagggcactttacggccccgtcctccgtccgccgcgttctcatgtccgccgggctgtcgacggagctccgccacaagt

SEQ ID NO: 31497 - DNA, 224 bp, Zea mays
cccgccggcacgcgcgtcatcgtcaacgcgtgggcgctcgccagggacccgacgtgctgggacaaggccgaggagttcttcccggagcgcttcctggaacaaggccgcgacgccgaggtcgacatgtacggcaaggacatccggttcgtgccgttcggggcggggcgcaggatctgcgcgggggccacgttcgccatcgccaccgtcgagatcatgctcgcgaa

SEQ ID NO: 31498 - DNA, 226 bp, Zea mays
ttcgtgacgctcagggagggcgcggccggcagcgtgcgcgccgaggaggtggtggcgttctgccaggcgcgcctgccgcggtacatggcgccccggacggtggtgttcgtggccgagctgcccaagacagccacggggaaggtgcagaagttcgcgctccgggagcaggccagggccatgggcagcatctccagctccgagcagcaggatggggcagggacgagga

SEQ ID NO: 31499 - DNA, 229 bp, Zea mays
ctttactcaaagtctagagctagctttttgctttgctcaccagacaaaccgcagcagatggcgtcgacgatcatggccgccacctcccgcatcgtcgcggccaagacgccgtttcttggccagggtcgcgccgccgccgccgccgccaatgccagccccctccgcgacgtcgccgccgccgctgctggcggccggatcaccatgggcaacgacctgtggtacggcccgg

SEQ ID NO: 31500 - DNA, 225 bp, Zea mays
gtggaaagggaggacatgctgcacttcctcatcacactatagatccgatattggctgcctcaaatgttattgtgagccttcagcaacttgtttctcgagaagctgatcccttggactcacaggttgtgacagttggaaagtttcaaggaggtggagccttcaatgtgatccctgattcggtaactataggtggcaccttccgagcctttctgaaagagagtttta

SEQ ID NO: 31501 - DNA, 195 bp, Zea mays
ggtcttctggggtttagataaaaagctcgctcaaaggaagcatttcccatctgtgaattggctcatttcctattcgaaatactccaaggcccttgagtctttttacgagaaatttgatccagatttcattgatattaggacaaaagcacgtgaggtgttgcagagggaggacgatctgaatgaaattgtgcagct

SEQ ID NO: 31502 - DNA, 327 bp, Zea mays
ggtcggcgaggagggcaggaagaccgaagaccgagccgtgcgggggctcgggacgggaaagggacaggacctcaaaatctcagatccttcctgcccgcccgcccgtgcccgtcgacgcgtcgttcttgccggccgcgccccacctccgccctctcctcctccagggggatcggatacgccacaggctgcgcgatggtgctgtgggtcttcggctacggctccctcatctggacacccggcttcgacttcgacgacaaaatcctcggcttcatcaagggctacaagcgcacctttaatctcgcttgcattgaccacagaggcacaccg

SEQ ID NO: 31503 - DNA, 328 bp, Zea mays
  unsure (1)..(328): unsure at all n locations
cacaaacctcaccccacctatattatcccgtgccccttgtctttcttcctccacaagcagcgaaatccaatctagaagctcccctnnnnnnnnnnnnnnnnnnnnnnnnnnnntcgccgtccgaagctccgcacccaatctaatcgacacctcaccgagatgggccgcaagttcttcgtcggtggcaactggaaatgcaatggaaccacagatcaggtcgagaagattgtcaaaaccctgaatgaaggacaggttcccccttcagatgttgtcgaggtcgttgtcagccctccttatgtcttccttctgtggtcaagagccagtgcgc

SEQ ID NO: 31504 - DNA, 331 bp, Zea mays
caagaagcttgctcctgagtatgaaagacttggtgcaagttttaagaaagctaaatctgtcttgattgctaaggttgattgtgatgagcacaagagtttgtgcagcaagtatggagtttccgggtatccaacaatccaatggttcccgaaaggatccttggagcccaaaaagtatgaaggacaacgcactgcagaagcccttgctgaatttctcaatactgaaggaggcacaaatgtaaagctggcaaccattccttcaagtgttgtggttctcaccccagagacctttgactcaattgtccttgatgaaaccaaagatgtccttgttgag

SEQ ID NO: 31505 - DNA, 325 bp, Zea mays
ctcgccgcaaccgcaacccgcagccatggggacggaggcggacagccggacatggacagccaccgaaacgacggcgtcgtggtggtgccagcgccgcgcccgcgtaaggggctcgcctcctgggcgcttgacctgctcgagtccctcgccgtgcgcctcggccacgacaagaccaagccgctccactggctctccggcaacttcgcccccgtcgtcgaggagaccccgccggccccaaaccttaccgtccgcggacacctcccggagtgcttgaatggagagtttgtcagggttgggcctaatccgaagtttgctcctgttgcgg

SEQ ID NO: 31506 - DNA, 328 bp, Zea mays
cgacaacgtcttcggcagctgccgccctctccataacgggcccgtcagcctgatgcactggtccgggaagggcaagccatgggaccgtctcgacgccggcaagccttgccccctcgaccacacctggaggtcgtacgacctctacattggcgagaatgattcttcaccagcatcagggccgtcccggtcagccttgtcatcgttggtggcatggtagaagttcatatacacaataattctttgatctcgggtgcccgtggttcttggccggtaatggaattgccttgcgatgcattcccactgccggctgccgccacagctgctgccg

SEQ ID NO: 31507 - DNA, 329 bp, Zea mays
aggaagaggagagcctaaaaccctaaccccccgaatcggatccggccgccggagcgcggaaccccaccccggccgccatggagatgggagggatgagcgacgctgagcggctgttcttcttcgagatggcctgcaagaactccgaggtcgcgtacgagcagaaccccaacgacgccgacaacctgacgcggtggggcggcgcgctgctggagctgtcgcaggtccgaaccggccccgacagcctcaagcttcttgaagatgcggaagccaaactggaggaggcacttcaaattgataccaacaagtccgatgcactctggtgcttggga

SEQ ID NO: 31508 - DNA, 333 bp, Zea mays
atcatcaacgagccaacagctgcagctatcgcctatggtcttgacaagaaggctaccagtgtcggtgagaagaatgtcctcatctttgatcttggaggtggtacctttgatgtctccctcctcaccattgaggaaggaatctttgaggtcaaggccacagctggtgacacccatcttggtggtgaggactttgacaacaggatggtcaaccacttcgtccaggagttcaagaggaagaacaagaaggatatcactggcaaccccagggctctccggcagctgaggaccgcttgtgagagggcgaagaggactctgtcttccactgcccagacc

SEQ ID NO: 31509 - DNA, 325 bp, Zea mays
ccgggagcaccaagaacggccgcgactccaagggacagcgcctcggggtcaagatatacggcgaccagctcgccaagcccggggccatcatcatccgccagcgcggcaccagggtctatcctggaaataacgttggaatgggcaaggatcacacactcttttctttgatagatggactcgtcaagtttgagaagtatgggccggacaagaaaaaggttagtgtttacccatatgagaaggagcctgaaaacccaaacagttacagagcaaggaagagagagtacttccgcatgcggcgtgaacggaagaaggcgagagcggaggg

SEQ ID NO: 31510 - DNA, 320 bp, Zea mays
gtcaactggagttcaaggctgttctctttgttcctaagagggccccctttgatctctttgacaccaagaagaagcaaaacaacatcaagctctatgtgcgcagggtgttcatcatggacaactgcgaagagctgatccctgagtggctgagcttcgttaagggtattgttgactctgaggaccttcccctcaatatctctcgtgagactcttcagcagaacaagatcctgaaggtgatcaggaagaaccttgtgaagaagtgtgttgagctcttctttgagattgctgagaacaaggaggactacaacaagttttacgag

SEQ ID NO: 31511 - DNA, 253 bp, Zea mays
ccacgcgtcgacaacggtccgggacctggtcgggccgtctctggtcgccctctacaacccactccaaccggcatgctctaccttgcactcgaccatgtttcttggaactccaatttatgttggaagtgtgattgggggactcttcatcatcgctggcctttacctggtcacttgggctcgctacaaagaggctcagagcgctctggtagccggttatctgcgacctcttcttctgccgaccaccaaggcagaa

SEQ ID NO: 31512 - DNA, 319 bp, Zea mays
cccacgcgtccgtggattccagcatcacaagaaagctggtgccatgaatgctcttgttcgtgtctcagctgtgcttaccaatggacaatacatgttgaatcttgattgtgatcactacattaacaacagtaaggctctcagggaagctatgtgcttccttatggatcctaacctaggaaggagtgtctgctacgttcagtttccccagagattcgatggcattgacaggaatgatcgatatgccaacaggaacaccgtgtttttcgatattaacttgagaggtcttgatggcatccaaggaccagtttatgtcggaact

SEQ ID NO: 31513 - DNA, 293 bp, Zea mays
ccactccacagcagtagcaagagggatagagctaggccacacacacacacacaccactaggctatgttagccttttaatcgtcgtcgagaagcaagacgggcgcgcacgcaagcaggcaagcaagaagagagccgatcgatcgagagctagcacgcgatggcgaggtcttccaagatgatggtggcggcagctctgctggccttggccctggccgtgtcgaccgccgacgcgaggcacatcaagaccacgacgacggagaagaaggacgacgcggtggtgcagcgcagacctt

SEQ ID NO: 31514 - DNA, 324 bp, Zea mays
cacacacacacaaccagatctcccccaaatccacccgtcggcacctccgcttcaagatgcagatctttgtgaaaaccctgactggcaagactatcaccctcgaggtggagtcgtctgacaccattgacaacgttaaggccaagatccaggacaaggagggcatccccccagaccagcagcggctcatctttgctggcaaacagcttgaggacgggcgcacgcttgctgactacaacatccagaaggagagcaccctccaccttgtgctccgtctcaggggaggcatgcagatctttgtgaaaaccctgaccggcaagactatca

SEQ ID NO: 31515 - DNA, 278 bp, Zea mays
  unsure (1)..(278): unsure at all n locations
nctccccctccggttcgggttcgggttcgtgaggttctccggggttcggtttcgtgggtgagcggatcgagatggcggcgtcggatgttgagtaccgctgcttcgtcggcggcctcgcctggggcacggacgagcactccctccacaacgccttcagcacctacggcgaggtcctcgagtccaagatcatcctcgatcgggagacgcagaggtcccgcggcttcggcttcgtcaccttctccacggaggaggcgatgcggaacgcgatcgagggcatg

SEQ ID NO: 31516 - DNA, 311 bp, Zea mays
ccttcttccgcaagcccaccggccgctgctccaacggccgcctcgtcgtcgacttcctggccgagcatttcgggctgccactgccgccaccgtcgcaggccaagggcaaggacttcaagaagggcgccaacttcgccatcaccggcgcgacggccctggagtactccttcttcaaggcgcacggcatcgaccagcgcatctggaacaccggctccatcaacacccagatcggctggctccaggacatgaagccgtccctctgtaaatcggagcaagactgcacagattacttcagcaaatccctgttcgtc

SEQ ID NO: 31517 - DNA, 310 bp, Zea mays
cggacgcgtggagacaatgctggagtgattgtgaacccaaagggagagatgaaaggttctgccatcactaggcccatcggaaaggagtgtgctgatctctggcccaggattgctagcgcggcaaatgcgatcgtctaaaggaagcagtttgtcgaagtttcatttaaaatggggacttgagaagggagttcttagttagacgagcttttgattgccctgaatgtgtttccccggctaatgcttgtgctgctggaccgtttcctgatagctttgctttgatgacatcctccccgttatcgataaagttgct

SEQ ID NO: 31518 - DNA, 312 bp, Zea mays
atccggagcagccgcagtcccaccgaccccgccgccggtcgccctccatctcctcgccgatgcctctcgtttctcttttcaataatcaagatgagccgtggtggtagtgccggtggtggtcaaagttctctgggttatctctttggaagcggtgagccccccaaaccagcagtggcaccagctgcaagtgctccacctgttgagaaaccatctgctgcaaagactgatgcggccaagcaggttgctgctggggttaccagccaaaccaataactaccacagggctgatggtcagaacactggcaacttcctt

SEQ ID NO: 31519 - DNA, 313 bp, Zea mays
ctgaactctgatcagagatcaaagaggtagccgttaagttaacgatggcttccgccgacctcgcagagccatggagcccgggaagaagagcaacgtcaagtatgcttccgtctgtgccatcatggcctccatggcctgcgtcatccttggctacgacattggtgtgatgagtggagcggcgatttacatcaagaaggacctgaagatcacggacgtgcagctggagatcctgataggcatcatcagtctctactcgctcatcggatccttcgctggcgcgcggacgtccgactagatcggcctgcgcttgacc

SEQ ID NO: 31520 - DNA, 320 bp, Zea mays
aatcagcataggaaagatagtctttcaaggatgcaaccttttgttattcttctcgtcataaccaacgttcccatggctttatatatgtccttattccatcaaaggggaacagaagacgctatgtattatttgtcaaaagaagcccatgatggaagagtgaggagtgttctctttctcatgccttgtcattcaacaccttactactcaaccttacattacaatctacctatgcgttttttggactgcactcctagtgatagcaaagggaccttggatgagtcagatcgtttccttacaagtccatctgagtttgtcggcga

SEQ ID NO: 31521 - DNA, 320 bp, Zea mays
accacgcgtccgcggacgcgtgggtcaacaacgtctccttcgtgctccccaccaaggcgctgctgcactcgcacttaaccggcatgtccagcggcgtctactcgccggacttccccgtcgcgcccctggcgccgttcaactacacggggacgccgcccaacaacaccaacgtggccagcgggaccaagctcatggtcgtcccgtacggcgccaacgtggagctcgtcatgcagggcaccagcatcctcggcgtcgagagcctaccgctgcacctgcacggcttcaacttcttcgtggtcggccaagggtacggcaactac

SEQ ID NO: 31522 - DNA, 318 bp, Zea mays
ccccggcagccgcaaacgccttcgccgtcgcgtcccgctcctccgcccgcccgaagcgacccctaggacctggagagagaggtcggcatggctgccgcagtggtcgacgacgctggtatggacgccgtccagaagcgcctcatgttcgaagacgaatgcattttggtggacgagcaggacaatgttgttggccatgagtcaaagtacaactgccatttgatggaaaagattgattctgagaatctgctacatagggcattcagtgtgttccttttcaactcaaaatatgagctgctacttcagcaaaggtccgcgaca

SEQ ID NO: 31523 - DNA, 298 bp, Zea mays
ggaccgtgggaaggagcacgtcatcaagccagtcatccccgagcagtacctcgacgagacagccaatcttccacctcaacccgtctggccgcttcgtcatcggcggacctcacggcgacgctggcctcactggccggaagatcatcatcgacacctacggtggctggggagcccacggcgggggcgccttctccggcaaggacccgaccaaggtggaccgcagcggggcctacgtcgcgaggcaggctgccaagagcatcgtcgccgccggcctcgcccgccgcgccattgtccaggt

SEQ ID NO: 31524 - DNA, 280 bp, Zea mays
cccacgcgtccggcagcttccccagccagctagggtttgcagatgacgaccgcggcgcgccccacctgggcgccggccaagggcggcaacgagcaggggggcaccgcatcttcggcccctcccagaagttctcctcccgcgacctcgccgcgcacacctccctcaagccaagaaaagacggtcaacagacccaagaggagttacagaagaggaatctcagggaggaacttgaggaacgtgagcgcaagcactactcttccaaggataagtcctatgccga

SEQ ID NO: 31525 - DNA, 307 bp, Zea mays
ggagtaccgaaagcaggcaaacacaatgcctggtggaaagcctgttactttaatggatcaagatattttggagatgattttcttcccagttgtgaatgaggcatgcagggttatggatgaaaatgttgtaattcgagcttccgatcttgatattgcttctgttcttggaatgggctttcccaaaaacaggggtggtcttgtcttctgggctgacactgttggagcgccttacatacattcgaagctaagcaagtgggccgaaatgtatggtcccttcttcaaaccttcatcgtatttggaacaacga

SEQ ID NO: 31526 - DNA, 308 bp, Zea mays
ggtggaagcagcaggggaagaaggcaaaggaggggagaagatgtagttcacccacttaaagtttctctggaagatctttacaatggcacctcaaagaagctctctctttcgcgcaatgtcatctgctccaagtgcaagggcaagggctcgaagtctggtgcctcaatgaggtgccctggttgccagggctcaggcatgaaagtcactattcgtcagctgggcccttccatgatacagcagatgcagcagccttgcaatgagtgcacagggactggagagagcatcaatgagaaggaccgctgtccagg

SEQ ID NO: 31527 - DNA, 289 bp, Zea mays
ggaccagcctacgttcacgctcaacttctccaaaggttcctgtcagatcattgcgcagtactatcaactcattcgcctaggcttcgaggtactactgttcttcgatcggttcttcctcctcttgatcgaacattctgaatatatatgtgcaggggaacaaaagggggtgctgtctgatacgtttcttgagggcgagtcgtttttgtttctgttctcgctttgtgctgccgtaacagcctcccaatctggtcgggttttttttttttttggtgccgcttctatctggtgt

SEQ ID NO: 31528 - DNA, 302 bp, Zea mays
cccacgcgtccgatccgctccacaggatcctctgcgccaccgcaaccgtgtgaccgcccgtgccgccggcgatcccgatccgccgacccgtcccagccccgctcgcagccatgtcgccgtcggagccgacgcgggaggagagcgtgtacatggccaagcttgcggacaggcggagcggtacgaggagatggtcgagttcatggagcgcgtcgcgcgctacgccgggggcgccggcggcggggacgagctctcggtggaggagcgcaacctgctgtccgtcgcctacaagaacgtcatcggcg

SEQ ID NO: 31529 - DNA, 306 bp, Zea mays
cccacgcgtccgctgggttcgtggtcgctgtaccgcgcggtgatcgcggagttcatcgcgacgctgctgttcctgtacgtgacggtggcgacggtgatcgggtacaagcaccagacggacgcgtctgcgtcgggggccggggcggaagcggcgtgcggcggcgtgggcgtgctgggcatcgcgtgggccttcggcggcatgatcttcgtgctggtctactgcaccgccggcatctcggggggccacatcaacccggccgtcaccttcggcctcttcctggcgcgcaaggtgtcgctggtgcgcgcg

SEQ ID NO: 31530 - DNA, 313 bp, Zea mays
accagtgcaagcagaagcagcgcaatggcgagcagcaccatggccctctcctccacagccttcgccggcaaggcagtgaacgtgccgtcgtctctcttcggcgaggcccgcgtgacgatgcgcaagacggcggcgaaggcaaagccggcggcgagctccggcagcccgtggtacggccccgaccgcgtgctctacctgggcccgctgtccggcgcgcccccgagctacctgacgggcgagttcccgggcgactacggctgggataccgcggggctgtcggcggacccggagacgttcgccaagaaccgggagc

SEQ ID NO: 31531 - DNA, 312 bp, Zea mays
gagaaagggatgtttaaacaacggaaatgaagatgataaatctgttgaatcattgacggttgacaaggctgagaaatatatgctgtcacattcaaaaaggcgcttacagttgcctgaaccaatagaaaaggagaaaggagttagcctttggtcaatgatcaaagacaatgttggaaaggatctaacaagagtctgtcttcctgtttactttaatgagcctttgtcttctctccagaagtgctttgaagagttggagtattcttatttgttggatcgtgcatatgaatgtggtttaagggggaatggtctgat

SEQ ID NO: 31532 - DNA, 300 bp, Zea mays
cggaccgtggcgtcaacgtcgccaaggacgactccatcttccacaacgaggagggagccgacgaaggcgtcgccggcgccggtggtgtcgacggtgtcgaccttgaagccgggcacgctgcccttgaagtccttggtgaagtacctgcatcccttgtccccgtcggtgacgacgagcagcttgagcccgtcaaaccacagggacagcacgttctcacgcgcgaggtcgtgcccggcatgatcgtcaccgggatggaggtcgcagagatcgacggcgccccgaggatgggcccgacgttcg

SEQ ID NO: 31533 - DNA, 300 bp, Zea mays
aatgagaggtatgttgatgctgtcatgacaatccccaagggaaccttgttccccatgtgtggcatgaaccttgccttcgacagggatctcattggccctgctatgtactttggtctcatgggtgatggccagcccatcggtcgctacgacgacatgtgggcaggatggtgtgtgaaggtcatctgcgaccacctgagcctgggagtcaagactggcctgccatacatctggcacagcaaggctagcaaccccttcgttaacttgaagaaggaatacaagggcatcttctggcaggaggac

SEQ ID NO: 31534 - DNA, 301 bp, Zea mays
cgagactcacctccccaaccgtttgcctccgtctcgcgtgacttcatgcccatcggccggcggcgccctccacgtggtgccattcgccggcagcgagcacccgcacaccaggatccaggtttgtgctgcgagagcgcctatccattcaccatgattaatttcgtgctcctgatcagccgccagggcaaggtgaggctcaccaagtcgtattctccttacacccaggaagagaggaccaaagtcattcgcgaactcagtggactcattcttacacgacggccgcgactctgcaattttgttg

SEQ ID NO: 31535 - DNA, 300 bp, Zea mays
gataatggttatggttgggcaattgctaaggctcttgctgctgctggtgctgagattcttgttggtacatgggtgcctgcgttgaacatatttgagacaagcttgagacgtggaaagtttgatgaatcacggaagctacctgatggatctcttatggagattgctaaagtatatccactggacgcagtttatgacacccctgaggatgttcctgaagatgttaaagcaaacaaaagatatgctggagcttcaaactggactgttaaggaagttgttgagactgtaaagaatgactttggt

SEQ ID NO: 31536 - DNA, 306 bp, Zea mays
ctccctctcgtcgccgtcctctcccgttcgcaacgccacgctccccaccgccgaaatggccccgaagcgaggtggcagggcaccggtgccggccaagaagaagacggataaagtgacgaaccctctgttcgagaaaaggccgaagcagttcggcatcggcggcgcgttgcctcccaagaaggacctgcaccgattcgtcaagtggcccaaggtcgtgcgcatccagcgccaggatcgcatcctcaagcagcgcctcaaggtgcctccggcgctcaaccagttcacccgcaccctcgacaagaacct

SEQ ID NO: 31537 - DNA, 297 bp, Zea mays
ggttgccgcagcctccaaagccactcccaaacccccgcttccagaaccttctacaagctccccgccgcctcctccactcgcaccgatggcgaaggaaccaatgcgcgtgctcgtcactggcgccgcaggacaaattggatatgccctggttcccatgattgctaggggtgttatgcttggtgcagaccagcctgttattctgcacatgcttgacattccgccagcagctgaagcccttaatggtgttaagatggagttggttgatgctgcgtttcctcttctgaagggagttgttgc

SEQ ID NO: 31538 - DNA, 296 bp, Zea mays
cccacgcgtccgcgactccgccgccgcccgccgctccgcctcagcgcatagcccgccgcgacctcatcgatcaccatcaactttcaatcatggcggacgtcgatgtcgaaccggaggttgccgccggagctcccaagaagaggacgttccgcaagtacagctaccgcggcgtcgacctagatgcgcttctcgacatgtccacggacgacctcgtccagctcttccccgcgcgcgccaggagaaggttccagaggggtctgaagaggaagcccatggcgctcatcaagaagctgcgc

SEQ ID NO: 31539 - DNA, 290 bp, Zea mays
cacacgcgtccgcgacgcgtggctcctatccactgcggcctggacgcgtgcgagagacttgaccaaacagcagatgcaaggatggcgcctctgaagctgtacgggatgccgctgtcccccaacgtggtgcgcgtggccaccgtgctcaacgagaagggcctcgacttcgagatcgtccccgtcgacctcaccaccggcgcccacaagcagcccgacttcctcgccctcaaccctttcggccagatcccggctctcgtcgacggagacgaagtcctcttcgagtcccgtgc

SEQ ID NO: 31540 - DNA, 295 bp, Zea mays
cccacgcgtccgtttttttttttttttgcggaaaagctaaaacattttataatttggaacggagtatttgacttccgcgagcagatgttctccttcctgcgcgacgccggcgacgcgccgctggagaaacaccccaagctcaaggcccacgccgtcaccgtcttcgttatggcatgcgagtcggcgacgcagctgagaagcaccggcgacgtgaaggtgagggaggccaccctgaagcggctgggcgcgacgcacgccagggcgggcgtcgccgacgcgcatttcgaggtcgtca

SEQ ID NO: 31541 - DNA, 114 bp, Zea mays
aacctaagcccgaacctaagccagagcctaagcccggacctaaaataaaaccggagccaaaacctgaaccagaaccagagcctaagccagagcataaacctgagccaaagccag

SEQ ID NO: 31542 - DNA, 316 bp, Zea mays
cacgtgctgaggctttcgttggtctcttcgccggcgacgagcacccagcagttctgtagaaatggctgatggtgaggacatccagcctcttgtctgcgacaatggcactggaatggtcaatgctggttttgctggcgatgatgcaccaagggcggttttccctagcattgttggccgtcctcgccacactggtgtcatggtagggatgggacagaaggacgcatatgttggcgatgaggcacagtccaggagaggtattcttacgctcaagtacccgattgagcacggtattgtgagccactgggatgacatggag

SEQ ID NO: 31543 - DNA, 290 bp, Zea mays
cggagcgtggatccagccgacgagcccgacggccgtgaagcaggtaagctgcgtgtgggacgcgtacgaggccaccaagggcgcccacgggctgtgcatcctgaccgagtgggacgagttcaagaccctggactaccagaagatcttcgacaacatgcagaagcccgccttcgtcttcgacggccgaaacatcgtcgactccgagaagctgagggagatcggcttcatcgtctactccatcggcaagccgctcgacgcttggctaaaggacatgcccgcgagtcgataat

SEQ ID NO: 31544 - DNA, 324 bp, Zea mays
tgccgctcgacgagaaccagaacatcaccgacgacacccgcatccgggccgccatccccaccatccagtacatcctcagcaagggcgccaaggtcatcctctcaagccacttgggtcgccctaagggttttacacccaagtttagcttagctccccttgtaggacggttgtctgagcttcttggcattcaggtgcaaaaagccgacgatgttattggccctgaagttgagaagctggtggcggccttgcccaacggtggggttctgctgcttgagaacgtaagattctacaaggaagaggagaagaatgacccagagtttgcac

SEQ ID NO: 31545 - DNA, 268 bp, Zea mays
ccaacgacgaagcgcgcacaaagagcaggacctcggagctgtgatggcacaagccatggcgtcgatgacaggcctctcgcagcgcgtcgtgtgcagcatgcgcgccgacagcagaaccaggacggccgtcgtcgtcgtcagggcgttcgtagaggtcgacaccgttccgcatgcgaggctgccgcgccgtgatcaggcttgtagccactgggatcgtcagcggcgcgttgtcgcacgcggcgcgctcgagaccgtcaaaaccatcaat

SEQ ID NO: 31546 - DNA, 300 bp, Zea mays
agaaggcaaaggaggggagaagatgtagttcacccacttaaagtttctctggaagatctttacaatggcacctcaaagaagctctctctttcgcgcaatgtcatctgctccaagtgcaagggcaagggctcgaagtctggtgcctcaatgaggtgccctggttgccagggctcaggcatgaaagtcactattcgtcagctgggcccttccatgatacagcagatgcagcagccttgcaatgagtgcaaggggactggagagagcatcaatgagaaggaccgctgtccagggtgcaagggt

SEQ ID NO: 31547 - DNA, 319 bp, Zea mays
cccacgcgtccgcccagctcgcgcacacggaccagttccgctgcctcgacaaggcggccatcgtggcgtcccaggacgagttgcgccccggcggcgccgcgcccgcggacccctggaggctctgcagcgtgcagcaggtggaggaggtcaagtgcctcatccgcatcgtgcccgtctggtccacggggatcatctactacgtcgccgtggtgcagcagtccacgtacgtggtgctctcggcgctgcagtccgaccgccacctcggcggcgcgggcttccagatccccgccgcgtccttcaccgtcttcgccatgctcgc

SEQ ID NO: 31548 - DNA, 310 bp, Zea mays
gaaaggaagaccctcactgtttgttcttgacatttccagaggggatgtggtagcggttaaaggcgtcccaacatcgttgagcgttgggcaagttgtttgggctccggaatcaccaggcaggcacaagtatctggttttcgatggatggtcagagcgcaacgggttcttccagaacactgctagaaaactcggcatcaagtactgctccaacaggccatgtgctctctatgcagccccttgccctatcctaggaccagagccgcgaccggttacgaccagcagcagtgatggtaaatcaggctccggcggt

SEQ ID NO: 31549 - DNA, 316 bp, Zea mays
aacacgcgtccgcggacgcgtggtctgtatccacacaacccacaagtgttgctgaatgaactcaaatcgccatctgatttgctcgattttggcgagttctcagattgcatgaatttcagtactcaggatggcagccccttgctaaatgttgccaacccaacatttgactatgtgccaccgaagcttgggagcctattcatcactgacaccggggggcacagtccgtcttatatgtatcggcttattgctgagtattactcagctgatgatctggtagtgagactgaaggcaacatcttgaaagaagacgaaagcac

SEQ ID NO: 31550 - DNA, 320 bp, Zea mays
ggaagaaccagttcaggggtatccgccggcgcccgtggggcaaatgggctgcagagatcagagatcctcgcaagggcgtgcgcgtctggctcggtacattcaactctcccgaagaagctgccagagcttacgacgccgaggcacgcaggatccgcggcaagaaggctaaagtcaacttcccggatgaggttcctacggcggtttctcagaagcgccgtgctgctgggcttgcctctctgaaagcgcctaagatggacgttgaggaggagaagccgatcatcaagctcgcagtgaacaatatgaccaactcaaacgcatat

SEQ ID NO: 31551 - DNA, 316 bp, Zea mays
cactaaaggtcatatcagctactatgttactagtaaggagggtgaagatccagcggtcttcaccggagataccttgttcattgctgggtgtgggaagttttttgagggttctgcagagcaaatgtatcagtcccttattgttacactgggttcgctgccaaagtcaacccgagtttactgtgggcatgagtacactgtgaagaacctaaaattcatgctgacactggagccagagaatgagaagacgaaacagaaactggaatgggctgaaaagcagcgcgaacgaatcagccaacagtgccctcgactataggag

SEQ ID NO: 31552 - DNA, 202 bp, Zea mays
cccacgcgtccgcccacgcgtccgggcttctcctccccctccggttcgggttcgggttcgtgaggttctcaggggttcggtttcgtgggtgggcggatcgagatggcggcgtcggatgttgagtaccgctgcttcgtcggcggcctcgcctgggccacggacgaccactccctccacaacgccttcagcacctacggcgagg

SEQ ID NO: 31553 - DNA, 312 bp, Zea mays
cccacgcgtccgaacaagctcctgggcgtcacctgcgcggtgggcgtgaccaagacgttcttcatcctggtggccacgttcctgctggaccgcgcggggcgtcggcctctgctgctgatcagcacgggcgggatgatcgtctcgctcatctgcctcgggtcggggctcaccgtcgcggggcatcacccggacaccaaggtcgcgtgggccgtcgccctgtgcatcgcgtccaccctgtcctacatcgccttcttctccatcggcctcgggcccatcacgggcgtgataacctcggaaatattcccgctgcag

SEQ ID NO: 31554 - DNA, 305 bp, Zea mays
atgcaagatgaaaccgttctcaagaattttcaagacgaaggtgaatacatcatacacaagagaggggtgaagtttcagttatacaagacttcttcatctagtttctttaagtacaacagaccacttccattccttcctcctacaccaaaagccatgtttcccacgtacgacgactgcccaactcgccagcagcgatgtgcaagcacaggtgcagcagctagtagtagccgatgtccttgtcgtcgacgacgaggtctccgttgatgagctcgcggtaggccgcgacgggccagatgaaccccctg

SEQ ID NO: 31555 - DNA, 311 bp, Zea mays
cggacgcgtggcatgttcggagccccctacgacttccgctacgcgccgccgtcccccggccagacgtccgaggtgtactcccgctacttcaaggagctgatggagctggtcgaggccgcgagcgagaggacccggaagaaggccgtcatcctcggccacagcttcggcggcatggtcgcgctcgagttcgtccggaacactccgccggcgtggcggcgcgagcacatcgagcgcctcgtcctggtcgcgccgacgctccccggcgagttcctggagccggtgcgcaacttcgcgtccgggacggacatcct

SEQ ID NO: 31556 - DNA, 312 bp, Zea mays
cccacgcgtccgccacgcgtccgcccacgcgtccgcgcacgtgggtgggggaaatgctgcgtctcgggatgctcaggcattcgcgtaaacgatgcggagaagctcgtgacgatcggaggccatgtgctgcgcgatggtgagtggctgtcgctgaatgggtcgactggtgaggtgatccttgggaagcagccgctttccccaccagcccttagtggtgatctgggaactttcatggcctgggtggatgatgttagaaagctcaaggtcctggctaacgccgatacccctgatgatgcattgactgcgcgaaac

SEQ ID NO: 31557 - DNA, 274 bp, Zea mays
gccggaatcatgcagcattcaagctcacaaaggtgacaaggttaaagttcactaccgtggaaaacttactgatggaacggtttttgattcaagctatgaaagaggtgacccgattgaatttgaattgggcactggacaagtgatcaaaggatgggatcagggtctcctgggaatgtgcgttggtgaaaagcggaagttgaagatcccatcaaagcttggctatgggcctcaaggctcgccacctactattcctggtggagcaacctcatattga

SEQ ID NO: 31558 - DNA, 299 bp, Zea mays
caacagcgccttcgagccatcctccatgatggccaagtgcgacccccgccatggcaagtacatggcatgctgcctcatgtaccgtggtgatgtggttcccaaggacgtgaacgctgctgtggccacaatcaagaccaagcgcaccatccagttcgtggactggtgcccgactggcttcaagtgcggaatcaactaccagcctcccagcgtcgtccccggcggtgacctggccaaggtgcagcgtgccgtgtgcatgatctccaactccaccagtgttgtggaggtcttctcccgcattg

SEQ ID NO: 31559 - DNA, 69 bp, Zea mays
cgacgtggtgagtggccgcggtgctgctgctggcacagcggcgacgacctactaggccgccatcacctg

SEQ ID NO: 31560 - DNA, 294 bp, Zea mays
gctagactagcatagtcgtctctttcttttctgcttccagacattgtccacgagctagtgcactggtgtcgctcgcaaccaaattaaggactgaggcatggcatccaagggcgtcctcttcttggctctcaacctcctgttcttcacagtggccaacgcctgcggcagctgcccgaccccaacgccgccggtcgtgccaccgccgccgcctcctgctgctaccccacccccttcatcatccagtgggaagtgcccgctgaacgcgctcaagttcggcgtgtgcgtcaatgtgct

SEQ ID NO: 31561 - DNA, 289 bp, Zea mays
gctgctgtcgaacagcgcgcggagcgggcgcgccaagtaccggctgctccacacggtgcgcacccacaaagccgccaccgacgagtgcttcaactgcgtgtaccagcgcgaggacgaggtgggcaaggtgggcgtgtcgctggcgcgggagctcatggccgtggccggcgacgcgctcaagaccaacatcacgacgctgggccccctggtgctgcccctgagcgagcagctcaagttcctcaagtccctcatgatgcgccgcgtgttccgcgtcaacggcgtgcgccct

SEQ ID NO: 31562 - DNA, 294 bp, Zea mays
cctccctggacgaggagaaagaagaatcaagtgtttctgctgccacatcgacctcagcgggcaaggaattgagcaagaaagtatactttacgaagcagactgttggtaatgcttgtggaacagttggtgttattcatgcaataggaaatgcaacatctcaaatcaagctagttgaggggtcctattttgagaagttctataagcaaacggctgatatggatccagctcagcgtgctgcctttctcgaggaagatgatgagatggaagatgcacattctgttgctgcatctgctg

SEQ ID NO: 31563 - DNA, 294 bp, Zea mays
ctcagcgtggtgcatcccgtgcacaagctgctgagcccgcactaccgtgacacgctgaacatcaacgccctggcacgccagacactcatcaacgccggcgggtcttcgagcgcaccgtgttccctgcaaagtacgcgctggggatgtcggcagacgtgtacaagagctggaatttcaacgagcaggctctcccagcagatctcgtcaagagaggtgtggctgtgccggaccagtcaagcccatatggtgtccgactgctgatcaaggactacccctatgccgttgacgggctcg

SEQ ID NO: 31564 - DNA, 293 bp, Zea mays
aatggctgtacgttcacttgagcgtcttctgcagtatggcgagcagaatataagacgggcagtccctcttgctcttggtatactctgcatatctaatcccaaggtaaacgttatggacacactaagcagattgagtcatgatgcagacgccgatgtgtcgatggctgcaattatctcattgggtttgattggtgctggcacaaacaatgccagaatagctggcatgcttcgcaatctttcaagttattactacaaagaagctgctcatctgttttgtgttagaattgcccagg

SEQ ID NO: 31565 - DNA, 291 bp, Zea mays
caacaacctgacaagttagctacccgcgcagccgcgcgccatggccacgatgaaccaccgcattgtgcccctcctgctggtcgcagccacactgctcgcgcaggccgcggcctgcccctactgcccgacgccgaagccgccgccgcctccgccgccgtcgtcgtcgtccacgccgtgccctcccccgccctactcgccgtcgccgtccacgccgacgggtaagtgccccgtgaacacgctcaagctgctcgcgtgcgtggacgcgctcaacggcctcgtgcacgccgtcat

SEQ ID NO: 31566 - DNA, 290 bp, Zea mays
caatcgcccacaaatgagagccagccaaatcttccacctcctccatttccagccccgtccccacaccagctcgcgtaacctcctgcccatggctggaggcggcggcgcaggcgcgggctcgtcgtccggcggcggcggagggggcggcagggagggcgactgggactgcggcagctgcggcaaccgcaactacgccttccgctcgctctgcaaccgctgcaagcagccgcgcctcctcgtcgactccaacaccccgcgcgactccaagtggctaccccgcgccggggact

SEQ ID NO: 31567 - DNA, 285 bp, Zea mays
ggacgcggtgcacttcttgccatattggtctctggtggaattgtattgcaaatcttggcttgtgctctctataacaactggtggccaatgctaacagttctcatgtatcttatcctaccaatgcccctcatatttttcctgggttctgatacttcctccatgatgtccaatgggggagacggctgggtgaacttcacgaaattcttgacgggcgcatcaatagtagggagcatcgccattccgtcgatcctgaagcatgcgggcgtcattggatggggagccctg

SEQ ID NO: 31568 - DNA, 291 bp, Zea mays
ggcgagttccccggcgactacggctgggacaccgccgggctgtccgccgaccccgagaccttcgccaagaaccgcgagctggaggtgatccactcccgctgggccatgctcggcgcgctcggctgcgtcttccccgagctgctctcccgcaacggcgtcaagttcggcgaggccgtctggttcaaggccggctcccagatcttcagcgagggcgggctggactaccttggcaaccccagcctgatccacgcgcagagcatcctcgccatctgggcctgccaggtcgtgctc

SEQ ID NO: 31569 - DNA, 290 bp, Zea mays
cccacgcgtccggaacgacttcccctttgttgctgtcggcgcattacttctatatgtcggtgcttaccaggtctcatttggtccaattagttggctaatggtatctgagatctttccactccggacaagagggcgtgggatcagcctcgcagtactaacaaatttcggctcgaacgctctggtgacatttgcgttttcacccttgaaggagctcctcgggccagccaatatatttttcctgttcagcgtcatagcagtgctctccctcgtttttgtgatcctcgtcgttc

SEQ ID NO: 31570 - DNA, 284 bp, Zea mays
cccacgcgtccgacacgcgtccgggataagttgctggatcatacgagcgtgacacacctgttcccgatcaccaagtacgtctgattgcttgccactggccttacagctgatgctatgtcattggtttcccaagcaatgaacgaagcagctgagtttcgtttcgaatggggctacgagatgccagttgatgtgttagcaagatggattgctgacaaagctcaagtttacacgcagcatgcatacatgagaccccttggagtagttgctatggtcttgggctacga

SEQ ID NO: 31571 - DNA, 286 bp, Zea mays
ctcacgcgtccgcccacgcgtccgacaatatgcagatcttcgtgaagacgctgacagggaagacgatcaccctcgaggtcgatagcatcgacaccatcgacaatgtcaaggccaagatccatgacaaggaagggatcccgccggatcagcagcggctgatctttgccgggaagcagctggatgatggccgcacccttgcggactataacatccaaaaggaatctacgctccatctcgtgctcaggctccgcggtggcatcattgagccctcgctgcaggcgctcgc

SEQ ID NO: 31572 - DNA, 281 bp, Zea mays
ggagcaggcctgcgacttcatgaggcaactgtaccagcaaggggccaggaggatcgcggtcctggggatgccgccggtcgggtgcgtgccctcgcagcggaccctcgccggcggcctggccagggactgcgaccccgctcgcaaccacgcggcgcactgtacaactccaggctgaaggaggaggtcgtgctgctccagaaggagctggcgtgccagagaatcggctacgtggatatctacgacgtcctgcaggatatgatcacgaacccctgcaaatacgg

SEQ ID NO: 31573 - DNA, 283 bp, Zea mays
gcacgtacgcacgcaccgggacaccagcaacccccaacagcgccactgtccagtgcgcgcgtcaagcttgcttagctagccgccatggcctccctcgccgccgtctccgtgaagcccgtggccatcaagggtctcgccggcagctccatctccggaaggaagctcgccgtcgccaggccgtcggcccgctccatccgcagccccgcgcaccgccgtggtggccaagtacggcgacaagagcgtctactttgacctcgacgacatcggcaacaccaccggacag

SEQ ID NO: 31574 - DNA, 296 bp, Zea mays
atcacgctgacgctctgcctgctggcggtgctggagatcaattggtcggggatcagtctggaggagtggtggcggaacgagcagttctggctgatcggcggcacgagcgcgcacctggcggccgtgctgcagggcctgctgaaggtggtggcgggcatcgagatctccttcacgctgacgtccgagtcgggcggcgacgacgtggacgacgagttcgcggacctgtacatcgtcaagtggacgtcgctgatgatcccgcccatcgtgatcatgatggtgaacctgatcggcatcgc

SEQ ID NO: 31575 - DNA, 284 bp, Zea mays
tcgactccaagccgttccgctccccctgttccgcgcgacgccgatgcaccccaagctgccgcgggccgcgcgcaggctcctctgctgcggcggggccgccgcgtccccggaggaggacctgtctgacgaaggaaggcgatcgttgaggtgggtgttctcgttgagagaacttcgatcagcaacaaacagcttcaattacgataacaagatcggagaagggccacttgggagcgtgtattgggggcaagtctgggatggttctcagattgctgtcaagaggttaa

SEQ ID NO: 31576 - DNA, 283 bp, Zea mays
ctctggtccgtggccatggcgtcgtccatgctctccgctaccaccgtgccactccagcaggggtgcggcctgtccgagttctccgggctcaggagctccgcgtcgctgcgcatgcgccggaatgccacctccgacgacttcatgtccgccgtctccttcaggagccacgcggtcggcacgagcggcgggccgcggcgggcgccgacggaggcgaagctgaaggtggccatcaatgggttcggccgcatcgggcgcaacttcctgcggtgctggcacgggcgcg

SEQ ID NO: 31577 - DNA, 185 bp, Zea mays
gagagttgatattccgcgagatactggaatatcacccacaactgctgagtagctacattaatggcacagagaggacaacctttctctacacaagtgctgttgatcaatttaagaagcaattttctcatcttgaagagagtggtggtaacggtccatcagttccaacggacaggaaacatgcatcc

SEQ ID NO: 31578 - DNA, 311 bp, Zea mays
cttgatgcgatctcagctggaaagtactattattttgttcgtctgatgggacgaaaagcatctcatgttgcctttgaatgtgcacttcaatcacatccaaacatgctcatcttaggcgaggaggtagcattgtcaaaactcacactgatggaaattataagcaagatttgtgatggagtacaagcaagggcaaaattagggaaatatcatggtgtgcttgttattcccgaaggacttatagaaagcattccagaaatgtatgctcttattcaggaaatcaatatccttcacaacagtaatgttcctgtggc

SEQ ID NO: 31579 - DNA, 302 bp, Zea mays
gcatcaccatgcgcaagactgctggcaagcccaagccagcggcgtccggcagcccctggtacggggccgaccgcgtcctgtacctgggcccgctgtccggccagcccccaagctacctgaccggcgagttccccggcgactacggctgggacaccgcggggctgaccgccgacccggagactttcgccaagaaccgcgagctggaggtgatccactgccgctgggccatgctgggcgcgctcgggtgcgtgttcccggagctgctcgcccgcaacggcgtcaagttcggcgaggccgtgtgg

SEQ ID NO: 31580 - DNA, 313 bp, Zea mays
gaacgcgccgctcttcatcccggcggcgctgctgcaggtggaggacttctcgccgcagtggtgggacctcatcaccaccaccgcctggttccgcgaccactggtcccgcgagcacgcccacctggacgagatagccgagcagctcgagttggtcgccctccttgcctacgatgaggatgaggacctcttctacggcgagcaggcccccgccgccgccgcccttaagacagattcggtgctcaaggcgctgaacttgggttccccgaagagcggcgacccccgcgggggttccgggagaaacccaggcactccg

SEQ ID NO: 31581 - DNA, 316 bp, Zea mays
cccacgcgtccgcccacgcgtccgaccacgtctcggtggccatgacgttcactatctcgaactactgcccccacccgatatggccggagacgctcgccggggccggcacgtcgcagctttccacgacggggttcaagctggagcctgggcagacggcccagctcgcggcgccggcggggtggtcggggcggatatgggcgcggacagggtgcgtgttcgacgcggaaggcgcgggcgtgtgccagacggacgactgcggcgggcgggtggagtgccgcgggtccggcgccacgcgccggccacgctgttcgaggtc

SEQ ID NO: 31582 - DNA, 185 bp, Zea mays
gaaagcgggaaggatcttattgtgactgtccagtctgcgatgggggaggagcagatctgcgcgctgaaggatgttggccccaagtaacttccttggctttggagacggaaccctactctatctcaacttaaatcggaaaagaagtgtatcaccaaaggattgctaccgagacattcacctggctt

SEQ ID NO: 31583 - DNA, 181 bp, Zea mays
ggcctcaccgccaccagcagccgcgagcggctcgagatcctggacgtcgagcgccgcgtgctcagcttccgcgtcgtcggcggcgagcaccgcctcgccaactaccggtcggtcaccaccgtgcacgatgccggcgccggcgccggcaccggcaccgtcgtggtggagtcgtacgtggtgg

SEQ ID NO: 31584 - DNA, 309 bp, Zea mays
gtccaccgtgatgagccggctcctggcgcggcccaacgtgaagctgttcaacgccgtggcggtggaggacctgatcgtgcggcgggggcgcgtcggcggcgtggtcaccaactgggcgctcgtgtccatgaaccacgacacgcagtcgtgcatggaccccaacgtcatggaggccaaggtggtggtcagctcctgcggccacgacgggcccttcggcgccaccggcgtcaagaggctccaggacatcggcatgatcagcgccgtgcccgggatgaaggcgctcgacatgaacgccgccgaggacgagat

SEQ ID NO: 31585 - DNA, 308 bp, Zea mays
gagacctgcgcaggcgcccacgcagctgccgccggggttccggttccaccccaccgacgaggagctggtagtgctgtacctccgccggaagccctggctcgcccgctgccggcagccgtcatccccgtcgtccacgacgtcgccgggctcgatccatgggacctccctggggcaagcgaaggggagggttacttctttagcctgcggcgagcgccggcgaccggccgtggcagccgcaggaggagagctgggagcgggtactggaaggccacgggcaaggaggagccggtgttcctacagtgcggcgg

SEQ ID NO: 31586 - DNA, 306 bp, Zea mays
acaacgcgtcgtacagcgtccgggacgctggaatccagactcggatcaatatgacatgtgtgaaccaagaaactagattggttgaaccaagtctatttcctatgcttggaaagtgggaaagggaacatacgatggaggacattctgaccagcttaaaaagggagatgtcaactccacagaatcgcaggctgtaccaacctcatgaaggcaatgaagaccaaagagtagagcagaaaggggtgtctcttagatgtgtcatcatgtaatctatgtgcgttgcaatgtacagcattattgaattgagca

SEQ ID NO: 31587 - DNA, 180 bp, Zea mays
tcgttcggcagcagcaacgaggtgctggatgggacgccgacgggagatggggcaccggggcaggggcagcggggagcgagcaccgtcagcatcacggtcgtcggcgcctccggcgacctcgccaagaagaagatcttcccggccctcttcgccttgttctacgagggctggctcccggag

SEQ ID NO: 31588 - DNA, 315 bp, Zea mays
ccgcgtgcgaaccaagcagaccccagcagaagaagcgaagtcgtcgccggagcaggaggaagagcgagcagcaagatgtcgtggcaggcgtacgtcgatgaccacctgctgtgcgacatcgaaggccagcacctcagcgccgccgccatcgtcggccacgacggcagcgtctgggcacagtccgagaacttccccgagttaaagcctgaggaggttgctgggatgataaaggactttgatgaacctggaactcttgcaccaactggtctttttgttggaggtacgaatacatggtgattcaaggtgaacctggat

SEQ ID NO: 31589 - DNA, 176 bp, Zea mays
gcgagagacagacgcgtatacccaggcggcggttgaggaggaggagaagaagaagaagtagatggcttcctccgcgtacgcctcatggtccaagcggtggatccgtcccgaggtgtacccgctgttcgtgccgatggccgtggccctgggtatctgctcgtaccagcttgtgcgca

SEQ ID NO: 31590 - DNA, 303 bp, Zea mays
cattcacggtggatgcatttcggtatggacaagttgaggggtgctcggcctatttccttagccactttcatcatgaccattacggtggattaaccaagaaatggtgccatggccccatctattgttctgcactcactgcacgcctagtgaagatgtgcttgtcagtaaattccgagtatatctgtcctttggagcttgataccgagtatgtcatagagggagtgacagttaccttgttggaggccaaccattgccctggtgcagctctaatccacttccgactaagtgatggaaagacctgtc

SEQ ID NO: 31591 - DNA, 302 bp, Zea mays
cgaggagttcatccacgcaaggacattgtcagctgccgaccttcgtgatcctgaaatttcagctctggtggcttccaaactgagggagttccacaaccttgacatgcctggtcccaaatctgtgctcatttgggacagacttaggaactggctcagaactgccaagagcttgtgtccacctgaagaagccaaggaatttcggttggacggtctggagaaccaggttactgcattggagaacgagtgttcaggtgattaccagtggattggtttctgtcacaatgatcttcagtatggcaata

SEQ ID NO: 31592 - DNA, 301 bp, Zea mays
catgtccatgcttatgaacgtgcggacgagtctacaattccagacctgatccttgtggcgctgtccacataactatcgagcgacggtgggaaccgtgaaggcttggcccgcagtaccgtaacccgaagccagcgtggtcggtcttcagggaagcgagctttgggcacggcgagctaaagatcgtgaactccacccatgcccactggacctggcacagaaacgacgacgaagagccggtgagaaccgatgacgtgtggataaactctcttgctggttacaggtgcatccaggagggcagccg

SEQ ID NO: 31593 - DNA, 304 bp, Zea mays
atcgaccttcaagtctcgctacgtagcagtgcaataaaaaaagcagccgcaatggcgagcagcaccatggccctctcctccacggccttcgccggcaaggccgtgaacgtgccgtcgtcgtccgccttcggcgaggcccgcgtgacgatgcgcaagacggcggcgaaggccaagccagcggcggcgtccgggagcccgtggtacggcaccgaccgcgtgctgtacctgggcccactgtccggcgagccaccgagctacctgacgggcgagttcccgggcgactacggctgggacaccgcggggc

SEQ ID NO: 31594 - DNA, 310 bp, Zea mays
ctcaacgtgcgggtcgtgggcagcggcgaccgcgtggtggtgctgtcccacgggttcggcacggaccagtcggcgtggagccgcgtgctcccctacctcacccgcgaccaccgcgtggtgctctacgacctcgtctgcgccggcagcgtcaacccggagcacttcgacttccgccgctacgacacgctagactcgtacgtcgacgacctcctcgccatcctcgacgcgctccgcatcgcgcgctgcgccttcgtcggccactccgtctccgccatgatcggcatcctcgcctccatccgccgccccgagc

SEQ ID NO: 31595 - DNA, 314 bp, Zea mays
gagctcaagacgtcgaatccgggtcaccaccgtcgcgagggacggacgcgtggggagattatagctgtctgcaagaaatacaagacttacacatatcagcatgaggcccatagcattggtgctgttggacagtctggccgcggtgtttgtgaactccttggggttgacccagctgatgtagatataatgatgggtactttcaccaagtcttttggatcatgtggtggatatattgccgcatcaaaggagataattaagcacctgaagcatagttgcccagcccatctgtacgctacttccatgtcaccaccagc

SEQ ID NO: 31596 - DNA, 282 bp, Zea mays
ccacggtgcagcagctgctccaggacttcttcaacggcaaggagctgtgcaagaacatcaatcctgatgaggccgttgcctatggtgctgccgtccaggccgctatcctcagtggtgagggcaacgagaaggtgcaggacctgcttctgcttgacgtcactcctctctctctgggtctggagactgccggaggagtgatgaccgtccttatcccgaggaacaccaccatccccaccaagaaggagcaggtgttctccacctactcggacaaccagcctggtg

SEQ ID NO: 31597 - DNA, 280 bp, Zea mays
ggccatcgtgctgggcagctgctgatcctggccgtcctggaggtgaagtgggcgggcgtgacggtgttcgagtggttcaggaacgggcagttctggatgacggccagctgctccgcgtacctggccgcggtgtgccaggtgctggtgaaggtggtgttcaggcgggacatctcgttcaagctgacgtcgaagcagcccgctggggacgagaagaaggacccctacgcagacctgtacgtggtgagctggacctggctcatggtgacgcccatcatcatca

SEQ ID NO: 31598 - DNA, 278 bp, Zea mays
tacctgtgctagcgctgccgtacaaggacagacacaaacacctcttactggtagccagcaagcttatgagcattcatcctccaaacctaaaaaggtaatggttattggtggagatggatactgtgggtgggcaacagcacttcatctctcaaacaaaggttatgaggttgcgattgttgataatcttgtccgccgtgcttttgataaccaactcggtcttgattcgcttacccccataacctccatccagaatcgtgtccgtagatcggagtctctca

SEQ ID NO: 31599 - DNA, 280 bp, Zea mays
cccacgcgtccgagccgccaccaggtgcagagtctttcgtcatctcttctccggcgaagaacccccagtcgcccaccagatcacttgttaaactttgttgaggggtgatggcggtttctttcgcaaacctcagctccgaggcagggcttaaaaagcttgatgagtaccttctcactcgcagctacatcactggctaccaagcttccaaggatgacttggctgtctacacttcgttttcgtctgctccctcgtccaagtatatcaacgtagcaaggtggtt

SEQ ID NO: 31600 - DNA, 280 bp, Zea mays
caactcccaaggtccctttttttttctcgatctggaagcgccgcagtagcagccatggacgtgagcggacaggcggtaaggcgaagaagggcgcggcggggcgcaaggccggcgggccgacgaagaagtcggtgtcgcggtcctccagggccgggctgcagttccccgtcagccgcgtcgggcggtacctcaaaaagggccggtacgcgcagtgctaggcacgggtgcccccgtctacctcgccgccgtcctggagtacctcgcggccgatgtgctcgag

SEQ ID NO: 31601 - DNA, 271 bp, Zea mays
cccacgcgtccgcccacgcgtccgctccagcactgaacacttgattgattcagtaggtagctagctagctgaatcacaatggatcctaccaagttccgtccgtccagtagccacgacacgacggtgacgacgacgaacgctggcgctcctgtgtggaacgacaacgaggcgctgactgtggggcctcgcggtcccatcctgctggaggactaccacctgatcgagaaggtggcgcacttcgcgcgggacgcatcccggagcgcgtggtgca

SEQ ID NO: 31602 - DNA, 154 bp, Zea mays
cccacgcgtccgggaataacaagattcctgatctcaacctgcaggatggccctatggtgctctccccgccaagaaagttacgtagggtgacagcgcatgaagggatggaaggatgttcgtccactttatctgtcctctagttcttagatcgcga

SEQ ID NO: 31603 - DNA, 271 bp, Zea mays
gacctgcagccaaccatctaccagcgactcagcgagcgagatcagcacacacgcagctagctatgagcagcagcagagcagcggcgatggcggcctccatgatctcctcgtcagctctggcggtggcgcctcatggcctgccgcccctcgtccgccgcgcctcctccttcgccgtcgtctgctccaagaagaagatcaagtccgacaagccctacgggattgggggtggcctgaccgtcgacgtcgacgccaactggagaaagggcaaggg

SEQ ID NO: 31604 - DNA, 271 bp, Zea mays
ggacgtgaactcgcatgggccccaagagggagctcaagtttgcacttgagtcattctgggatgggaagagcaccgctgaggatctggagaaggttgctaccgacctcagggccagtatctggaggcagatggctgatgctgggatcaagtacatccccagcaacaccttctcgtactatgaccaggtccttgacaccactgccatgctcggcgctgtccccgaacgctactcatggactggaggagagattgggtttgacacctacttctc

SEQ ID NO: 31605 - DNA, 276 bp, Zea mays
cccacgcgtccgtatagcaaccggtccagcactttcacgctcagctccagcaatggctgcctccaccatggcgatctcctccacggcgatggccggcacccccatcaaggtgggctccttcggcgagggccgcatcaccatgcgcaagaccgtgggcaagcccaaggtggcggcgtccggcagcccctggtacggccccgaccgcgtcaagtacctcggccccttctccggcgagcccccgagctacctcaccggcgagttccccggcgactacgg

SEQ ID NO: 31606 - DNA, 276 bp, Zea mays
gtttcgaacaagttacatacccaagacattttgttctgtttccagcactagatttcaaagctaagcattgcataactatgctgttttgttggaagtatgtgagtaacatcacatattagataagattatacccggtccagcactttcacgctcagctccagcaatggctgcctccaccatggcgatctcctccacggcgatggccggcacccccatcaaggtgggctccttcggcgagggccgcatcaccatgcgcaagaccgtgggcaagcccaa

SEQ ID NO: 31607 - DNA, 276 bp, Zea mays
cagctcgctcccaccaaacccacacccgaacaatggcgtcggcgtccaaggaggaggtgatcgggaagctcaacgtccgcgtggtgcggggcaacaacctggtcatcgccgacccgctcacccacaccagcgacccctacgtcgtcctccagtacggcgctcagaaggtgaagactagtgtccagaagaagaaccccaatccagtgtgaaacgaagtactgcagctctcagtaacaaatcctacgaagccagtgcaccttgaagtttttgatgaag

SEQ ID NO: 31608 - DNA, 278 bp, Zea mays
gtggaggagggctttagcgatggtcctgttcatggctggcgccgcgctgctcgccggggctgccggcgccggcgcgcacagggcgtgtggagcatcatcacccggcccatgttccagagcatgctgagccaccgcggcgacagcgggtgccagggcgccttctacacctacgacgccttcatcgaggccgccagcaagttccccggcttcggcaccaccggcgacgagcagacgcgcaggcgggagctcgccgccttcttcggccagacgtcccacga

SEQ ID NO: 31609 - DNA, 275 bp, Zea mays
accatgtacggcgtcgcctccttcaacgagggggacccgtccactgcgccctcgctcacgctcaccggcatgaagaaggacgccgacaagctgcagaactccgacggctgggccaagttcaccgggggattcttcttcggcggcatctccggcgagctctgggcatactttctcctctacgtgctcgacctcccctacttcttcaagtagggatcatctaagatgcgtatatatatagctccggccgatactcctctctagctgcatggtatgta

SEQ ID NO: 31610 - DNA, 269 bp, Zea mays
ggacgtggacacccgcaccgagacgaacagatctatcgatcgatagctagatccaaggctgccggcggcgacgacaccaccatcgcgcaggtccacatcggcatcgacagcagcaacaagacgctgctcaagagcgaggccctctacaagtacgtgctggacacgtcggtgctgccgcacgagccggagagcatgcgtgagctgcggctggtgaccgacaagcacgagtgggggttcatgcagtcgtccccggacgaggcgtcgctgct

SEQ ID NO: 31611 - DNA, 263 bp, Zea mays
catgattcttgggttcagcacgatatggggggcatatgccaaaaagttcagtccggtgataatgacccctgttgtttgtgttgttggtcttggactattccaacttggctttccccaggttgggaaatgtgtggagattgggcttccaatgctaattcttgcggtggttgtgcaacagtatgtgccaaattacttcagttatatccatcaacgggtcaccttcttgtttgagaggtattcgttgcttctttgtatcggcatcg

SEQ ID NO: 31612 - DNA, 268 bp, Zea mays
tgctgactggcccagtcacaatcctcaactggtccttcgtccggaatgaccagccgaggtttgagacttgctaccagatcgctcttgcgatcaagaaggaagtcgaggatcttgaggctggtggtattcaggttatccaaatcgacgaggctgcactgagagaagggctgccgctccgcaaggctgagcatgcattctacttggactgggctgtccactccttcagaattaccaactgcgagatccaggacaccacccagatccacac

SEQ ID NO: 31613 - DNA, 269 bp, Zea mays
cagaaaacccagccgccgccgcatcggcctcccaggtaagcaggagcgtccaccccagccgccgccatgaagcgcaacccccgcgtcacgagctcccgccggaagtgccgcaggcgcacttcacggccccgtcctccgtccgccgcgtgctcatgtccgcggcgctatcgacggagctccgccacaagtacaatgtgcgttccatcccgatccgcaaggacgacgaggtgcaggtcgtgcgcggcacctacaagggccgtgagggcaaa

SEQ ID NO: 31614 - DNA, 264 bp, Zea mays
agacgcggttcgccctcgattcgaccccgattcgtccgcccgcgaccgggattccagtgcgcgaagcgcggatctgaacgctgcgctccgtgtcgccgctcgaatccgccatgaagggggccaaatccaagggcgccgccaaggccgatgccaagctggcggtgaagagcaagggggcggagaagcccgccaagggcaggaaagggaaggccggcaaggaccccaacaagcctaagagggctcccagcgctttcttcgtgttca

SEQ ID NO: 31615 - DNA, 148 bp, Zea mays
  unsure (1)..(148): unsure at all n locations
cggaccgtggtgagagaatgccttcggctcctacggcgagatcctcgactccaaggtcatcaccgaccgtganaccgagatgtcccgcggcttcggcttcgttaccttctcctccgagaactccatgctcgacgctatcgacaacatg

SEQ ID NO: 31616 - DNA, 219 bp, Zea mays
cccacgcgtccgatcatcaacgtgtacaatcaggagtacgagagtgctgctgcgttctggcctcaggtgcactcccggataatagctagcctactcatctctcatgtaactctgtttgggttgatgagcacaaaggaagctgcgtactccacccctctgctcatcttcctgcctctgctgacgatctggttccacaaatactgcaagagccggttcgaa

SEQ ID NO: 31617 - DNA, 275 bp, Zea mays
cgccactcactccctgatggtctgatgagggccaccgacgttatgatcgccggtaaggttgccgtggtctgcggatacggtgatgttggcaagggttgtgccgctgcactcaagcaggctggtgcccgtgtcattgtgaccgagatcgaccccatctgcgccctccaggctctgatggagggtcttcacgtccttcccgtggaggtcgttgtctcggaagctgacatcttcgtgaccaccactggcaacaaggatatcatcatggttgaccacat

SEQ ID NO: 31618 - DNA, 168 bp, Zea mays
cttctctctctgctcctccgcctccgcctccgcctgatccatccaagacagggatcgccatgtcggactcggaggagcaccacttcgaatcgaaggccgacgctggggcgtccaagacctacccgcagcaggctggcaccgtccgtaagaacggcttcatcgtcatca

SEQ ID NO: 31619 - DNA, 315 bp, Zea mays
gatcgatgcattcaggaagactgttcgtcatgaaggagttggtgctctctacaagggtcttgtgccgaactcagtcaaggtggtgccctcaattgccattgcatttgtgacttacgaggttgtgaaggatgtgctaggagtagagatgaggatatcagactgaggatggccgttttcaactgctatttttgtaggctttgggaagttgtgtttttttttgtaggcagggcgggtagaaggatatgaccgcggctccattcagcatcaggccctctctggcttcaggtcctagaatgtgttgcggggccgtcaaaa

SEQ ID NO: 31620 - DNA, 209 bp, Zea mays
cgtttgcctcttctccctcttgccggtcccgaataaagagcagcagcgcaagaggtcggtagagcgagaagaaggcaatggcggccgagagcttccttttcacctcggagtccgtgaacgaggggcaccccgacaagctgtgcgaccaggtgtcggacgccgtgcttgacgcatgcctcgcgcaggaccccgacagcaaggtggcctgc

SEQ ID NO: 31621 - DNA, 317 bp, Zea mays
cccacgcgtccgacgctccactaaccctagcgacacctcgggtcgtcgtttgatccccgcggggagctctagttccgccaagcgtgcgtaccggcgtccggatccgggaccgaagatgacggagtccctggtgcggaacaagccggggatggccagcatcaaggagatgccggtggtgcaggacgggccgccgccgggcggtttcgcgcccgtgcgcttcgcccgccggatccccacctcggggcccagcgccaccgccatcttcctcaccaccttcggtgctttcgcatatggcatgtaccaggtcggccagggga

SEQ ID NO: 31622 - DNA, 274 bp, Zea mays
ctggctccgactacgagatcgtgcccatcaacttcgccaccgccgagcacaagagccccgagcacctcgtccgcaacccgtttggtcaggttccagctctgcaggatggtgacttgtacctcttcgaatcacgcgcaatctgcaagtacgctgctcgcaaaaacaagccagagctgttgagggaaggaaacctcgaggaggcagcaatggtggatgtttggatcgaggtggaggctaaccagtacaccgctgcactgaatcccatcctcttcca

SEQ ID NO: 31623 - DNA, 318 bp, Zea mays
ctcccatatccgctcccctacctctccagcatcctcccgtctccgtcgtctcgtctccgctcctcacctcgccagccatgggcaagatcaagatcggaatcaacggtttcggaaggatcggcaggctcgtggccagggtcgccctgcagagcgaggatgtcgagctcgtcgccgtcaacgaccccttcatcaccacggattacatgacgtacatgttcaagtacgacaccgtgcacggccaatggaagcacagcgacatcgccctcaaggactccaagacgcttctcttcggcgagaagcggtcaacgtctttggcat

SEQ ID NO: 31624 - DNA, 300 bp, Zea mays
gacaacccgtcagcccctctcgtttttcatccgccttcgcctccaaccgcgtgcgctccacgcctcctccaggaaagcgagagcctctgcataagaacaacaaatcaaaagcgtgatcagctcggtgccaacaaaacctcaacaaccaagtttcatgtctgatctcgacgtccagcttccatctgcctttgatccgtttgctgaggcaaatgctgaggactctggtgctggtcctggaacgaaggattatgtgcatgtgcgcatccagcagcgcaacggcagaaagagtctgactacagt

SEQ ID NO: 31625 - DNA, 295 bp, Zea mays
gcaaccggtccagcactttcacgctcagctccagcaatggctgcctccaccatggcgatctcctccacggcgatggccggcacccccatcaaggtgggctccttcggcgagggccgcatcaccatgcgcaagaccgtgggcaagcccaaggtggcggcgtccggcagcccctggtacggccccgaccgcgtcaagtacctcggccccttctccggcgagcccccgagctacctcaccggcgagttccccggcgactacggctgggacaccgccgggctatccgcagaccccgaga

SEQ ID NO: 31626 - DNA, 309 bp, Zea mays
cggacgcgtggcggacgcgtggggcaaacaatgctacagtgagggaggctcttgggattcacaagggaacagttcccctatggttaagatgcaacacggacataccgtatttgaaagatattaagagttcagtgaagtaccatttggatgtgaccaccaaaggatacaaaagtctagtttacagtggtgatcatgacatgggtgtaccttatattggcacacaatcctggattaggtcacttaatttctctattgtggatgactggagaccatggtatgttgatgggcaagttgcaggatatacagtgt

SEQ ID NO: 31627 - DNA, 296 bp, Zea mays
cggacgcgtgggtacaagcagatgcccgacgacacgggcttcttccggcgcgagggcacttggagcaccgagtacgggcatttcttcctggcgtggtattcaggcatgctgctggagcacggcgaccgcgtccttgccgcggccgaggccgtgttcggcggcacgggcgcaacgctctccgccaaggtcgccggcatccactggcactaccggactcggtcccatgcggcggagtcacggccgggtactacaacacgcgggaccgcgacgggtacgcgccgatcgcgcgcatgctg

SEQ ID NO: 31628 - DNA, 307 bp, Zea mays
ggacctgggcggcagacggcacacacaccacaccacacctcctcgcttccactccgctcgactgacatctcgtcccgtcctttcgtttcgaagcctcgcgagccccgacgatggccaccgccgcggtgtcggtcgacgagaagctcgacaagcttcgcgccgaggtcgccaagctcgaccagatcagcgagaacgagaagtccgggttcatcagcctcgtgtcacgctacctcagtggggaagcggacagatcgagtggagcaagatccagacccctacggatgaggtggtggtgccctacgatacc

SEQ ID NO: 31629 - DNA, 312 bp, Zea mays
cccacgcgtccgcccacgcgtccgcccacgcgtccgatcagcatctgttgtttgccaattgatggcagccgggcatctgattttggcctaatgaagatagacgacactggaagggtaatttcattcagtgagaaaccaaaaggagacgaattaaaggcaatgcaagttgacaccacagtgcttggcttatcaaaggaggaagcagaaaacaaaccttatatacctccaatggggatctatatttttaagaaagacatactcctaaaccttctaagatggcgttttcccactgcaaatgattttggttctgaa

SEQ ID NO: 31630 - DNA, 313 bp, Zea mays
cccacgcgtccgcccacgcgtccgcccacgcgtccgcaatcgccgtggtcaagtcctggaagttgatggcgaaaaagctgttgtgcaggtctttgaaggaacttctggaatagacaacaaatacacaaccgtgcagtttacaggcgaggttttgaaaacttctgtctcacttgatatgcttgggcgcatttttaatggttctggaaaacctattgacaatggccccccgatattgcccgaagcctacttggatatctctggaagttctattaaccccagtgagagaacctatccagaggagatgatccaaact

SEQ ID NO: 31631 - DNA, 300 bp, Zea mays
  unsure (1)..(300): unsure at all n locations
atcaatccttcaagcgcaactgcctcctcctcgtcgtccggtcgtgagaagggatggcgggccgtggcaaggctatcggcgctggcgccgcgaagaaggcaacgtcgaggagctccaaggccggactccagttccccgtcggcaggattgctaggttcctcaaggcgggcaagtacgctgagcgcgtcggcgccggcgcccccgtgtacctcgccgccgtcctcgagtacctcgcggctgaggttctcgaacttgccgggaacgccgcgnaggacaacaagaagacccgcattgtgccgc

SEQ ID NO: 31632 - DNA, 302 bp, Zea mays
gatccaccaggaaaagagggtgctctcttctcctcgtgcgggtgttgtaattttgtcaagccggaagggcagcagtacttgtagagttgttccaccatggccaatgatggagacgatggacaaagccaggattatctcttcaaaattgtcctgatcggggattcctctgttggtaaatcgaacttgctagcaagatttgcaaggaacgagttctacccaaactccaagtccactataggaggggtctaccacacacaggtgttggtcatcggtgggaaggagattaaggctcagatatggga

SEQ ID NO: 31633 - DNA, 302 bp, Zea mays
cacacgcgtccgcggacgcgtggggcggcggcccgacgaccccggcgggcctgatcgcggcggcggtggcgcacgcgtacgcgctgatcgaggcggtgtcggtgggcgcgaacatctccggcgggcacgtgaacccggccgtgaccttcggcgccttcgtgggcggcaacatcaccctgttccgagggctcctgtactgggtggcgcactgctggggtccaccgtggcgtgcttcctgctccgcttctcgacgggcgggcaggccacgggcaccttcgggctgacgggcgtgtcggtgtggg

SEQ ID NO: 31634 - DNA, 124 bp, Zea mays
ctccaggaggcccttcctggtgacaatgttggcttcaatgttaagaatgttgctgtgaaggatctgaagcgtgggtatgtggcctccaactccaaggatgaccctgccaaggaggctgctacct

SEQ ID NO: 31635 - DNA, 294 bp, Zea mays
cccacgcgtccggagacatgctctctccatagagcatcgtcctccggtacaactgcacttacagcaatggtttttggaaggtctcttctggtcgctaatgccggtgactgtagggcggttctttcccggtgtggcaccgcagtcgaaatgtccatggaccacaggccttgcagtctcagcgaaaaactgcgcgtagaatcgcttggtggctacgtggacgatggctatctgaacggtctgctaggagtcaccagagcacttggtgactggcatctcgagggcatgaaaggagct

SEQ ID NO: 31636 - DNA, 208 bp, Zea mays
ccacgcgtccgccacgcgtccgcggacctggccgtccgtcgaccaccgatggaaccagcacggcctcggcggggacaactaccgcggactctgccggacctgcacgccggcgccgtcagcctgctgcactggagcggcaaggggaagccctgggaccgcctggacgccggaaggccgtgcccgctcgacgccgtctgggccaagtacg

SEQ ID NO: 31637 - DNA, 217 bp, Zea mays
agcgcttatagcttgtcagccatggccaccgccgccgcgtctagcctcctcaagtcctccttcgcgggctcccggctcccggccgccacgcggaccacaccggcgtccctcgtggtggccaccggcccgcgcggcgccggcgcggggcccatctgcgcgtccatgtccatgtcctcctccaacccgccctacgacctgacgtccttccggttcagcc

SEQ ID NO: 31638 - DNA, 300 bp, Zea mays
cccggagcctctccttcccggtctcctccgcccgttgccttcgtcccctccatctccggctgcgtcgccggcgagcccgacaccgcgaatcggatccgccgacaaggtgagagggaagagatggggctcacgttcaccaagctgttcagccggctgttcgccaagaaggagatgcggatcctgatggtgggactcgacgccgccggaaagaccaccatcctctacaagctgaagctcggcgagatcgtcaccaccatccccaccatcggattcaatgttgaaactgtggagtacaagaac

SEQ ID NO: 31639 - DNA, 298 bp, Zea mays
actactactagctggtacacatactagccagcctgccagccagcttgccatggcgcccaccgtgatgatggcctcgtcggcaaccgccgtcgccccgttccagggtctcaagtccgccgccagcctccccgtcgcccgccgcagcaccaggagcctcggcaacgtcagcaacggcggaaggatccggtgcatgcaggtgtggccggcctacggcaacaagaagttcgagacgctgtcgtacctgccgccgctgtcgacggacgacctgctgaagcaggtggactacctgctgcgcaac

SEQ ID NO: 31640 - DNA, 216 bp, Zea mays
cggacgcgtgggccgctggctggcccgcctggctctccgccgtcgccggtgaggccatcgatggctggacccctcgccgcgccgactccttcgagaagatcgacaagatcggccagggcacgtacagcaatgtgtacaaggcgcgggactcgctcagcggcaagatcgtggcgctcaagaaagtgcgcttcgacaaccctggagccgagagcgtgc

SEQ ID NO: 31641 - DNA, 214 bp, Zea mays
cccacgcgtccgaagaagatcaccgaggacgaatacatcagtgccatcaaggaagaaatcagcaaggttgtcaagatccaagaggagcttgacattgatgtgcttgtgcatggagagccagagagaaatgacatggttgagtacttcggtgagcaattatctggttttgcgttcactgccaacggatgggtgcaatcctatggatcacgctgtg

SEQ ID NO: 31642 - DNA, 193 bp, Zea mays
cggacgctggacgagacgcgatgggaaaagccaggcggcggcatatggcgctcagcaaggagcaaaaactagacgttcgtgatcaacaacacacaacaagcagcgaacagcaggtggcgctggatgccgagctccagctgtggaaccacactttcggctacgtcaagtccatggcgctcaaggccgcgctcga

SEQ ID NO: 31643 - DNA, 208 bp, Zea mays
cccacgcgtccggcccaaggtggcggcgtccggcagcccctggtacggccccgaccgcgtcaagtacctcggccccttctccggcgagcccccgagctacctcaccggcgagttccccggcgactacggctgggacaccgccgggctgtccgccgaccccgagaccttcgccaagaaccgcgagctggaggtgatccactcccgctgg

SEQ ID NO: 31644 - DNA, 154 bp, Zea mays
gtcctcgagtccaagatcatcctcgatcgggagacgcagaggtcccgcggcttcggcttcgtcaccttctccacggaggaggcgatgcggaacgccgtcgacggcatgaacggcaaggagctggacggccgcaacatcaccgtcaacgaggccc

SEQ ID NO: 31645 - DNA, 316 bp, Zea mays
gcgccacgctgcacgccatcacgtcccgccacccgcacatctccggggtcaacttcgacctgccgcacgtcatctccgaagcgccgccgttccccggcgtgcgccacgtgggcggggacatgttcgcgtccgtgcccgccggcgacgccatcctcatgaagtggatcctccacgactggagcgacgcgcactgcgccacgctgctcaagaactgctacgacgcgctgccggaaaatggcaaggtcatcgtcgtcgagtgcgtgctgccggtcaacacggaggccacccccaaggcgaagggcgtcttccacgtcga

SEQ ID NO: 31646 - DNA, 315 bp, Zea mays
gtcttcacactcctcgccatcacataaaaccagtgcaagcagaagcagcgcaatggcgagcagcaccatggccctctcctccacagccttcgccggcaaggcagtgaacgtgccgtcgtctctcttcggcgaggcccgcgtgacgatgcgcaagacggcggcgaaggcaaagccggcggcgagctccggcagcccgtggtacggccccgaccgcgtgctctacctgggcccgctgtccggcgcgcccccgagctacctgacgggcgagtcccgggcgactacggctgggacaccgcggggctgtcggcggacccg

SEQ ID NO: 31647 - DNA, 179 bp, Zea mays
cggacgcgtggcaagggccttgtcccgctcgccggctccaacaacgagtcgtggtgccagggcctggacggcctggcgtcccgcgaggccgcctactaccagcagggcgcgcggttcgccaagtggcgcaccgtcgtcagcatccctaacggcccctccgagctcgccgtcaaggaggc

SEQ ID NO: 31648 - DNA, 280 bp, Zea mays
cggacgcgtggcggacgcgtgggcggacgcgtgggctctagggaatggcggcttgggtaggcttgcatcttgctttttggattcaatggcaacattgaatttgcctgcttggggctatggcctgcgttaccgatatggactgttcaaacaacacattgccaaggagggccaggaagaagttgcagaagattggcttgataaattcagcccttgggagattcccaggcatgatgtggtgttccctgtcagattttttggccatgttgagattttgcctgat

SEQ ID NO: 31649 - DNA, 313 bp, Zea mays
gaaggtttgacaatgcggtctcctccatagataaggctaggataatagatccaggaaacactgaagtggtaaacatgcataacaaagtgaaatctgtggccagagcacgttctctagggaacgagctcttcaattctggaaaattttcagaagcttgcgttgcttatggtgaagggctcaagcaacaccctatgaacaaagttctgtactgtaatagggcagcttgtaggttcaagcttgagcagtgggagaagtcaattgaagactgtaatgaagctctcaagattcaatccaattataccaaggctttgct

SEQ ID NO: 31650 - DNA, 310 bp, Zea mays
gtttcgaaagttgccctctcggatcgatgagtgctgctgcatgtggtcatcctttctgcggtacatgttggcgaggttacattagcactgctataagtgatggtccgggatgcttgatgctgaggtgtcctgatccgtcctgtgctgctgctgttggacaagatatgataaattcactggctgatgttgaggatacggaaaagtatgggcgatatcttcgcagatcttacattgaagataatagaaagacaaaatggtgtcctgcgcctggatgtgaatatgcagcggaattcgtcatgggcagtggcag

SEQ ID NO: 31651 - DNA, 307 bp, Zea mays
atgcgtgattgcgacccttcatctgcccgccactggattgtacgcaacacacgaactgtgaatcggacggggcagccaactggctacaggctcgtacctggttcgaactgcctgcctttggctctgcctgaggcgaaatttctgaggagggctgggttcttgaagcacaacctctgggtcactcaatacaagcgtggcgagatgttccctggaggggagtttcccaaccagaatcctcgcatccatgagggtctgccaacatgggtcaagaatgataggcctctggaggaaaccgacattgttctct

SEQ ID NO: 31652 - DNA, 240 bp, Zea mays
ggcggcggctacggcggtggcaaccgtggcggcggctacggcaactccgacgggaactggaggaactgagcggtggggcccgcgcggccaagttatcctgttcgctaccgtgttgtttaccctagtccagagtgtttatcttcgttcgtctcgtgtttgttgttgcccatctgtgtttttgattgaaggtcgctctgtgtcagttgttagtgctgtgttcatcctcggctccagcagacc

SEQ ID NO: 31653 - DNA, 313 bp, Zea mays
gcaaaccagcgcaacccttccctgacagcggcggcgacatggtgctcgaggcgacgatgatctgcatagacaactcggagtggatgcggaacggcgactacgccccgtcgcggttccaggcgcaggccgatgccgtcaacctcatatgcggtgccaagacccagtcgaacccggagaacacagtaggcgtgatgacgatggacgggaagggcgtccgcgtgcttgtcactcccaccagcgacctcgggaagattctcgcatgtatgcacgggttggaagttggtgctgaggcaaacttggctgcggcaatcca

SEQ ID NO: 31654 - DNA, 157 bp, Zea mays
gtcaccagctgccattgccatctactgacctgagacctccgcatttccaaacagcccgagcgagctacagctagaagagcggcaggcgactcgctcctcaaggaacatggcgcgcacgcagcagttggcagtagtggcgaccgcagtggtggcgttg

SEQ ID NO: 31655 - DNA, 193 bp, Zea mays
aaaccgaccaaacagcattgatcctgctcttcgaagatttggaaggtttgatcgggaaattgacattggagttcctgatgaagttggccgtctcgaggttctccgcattcacactaagaacatgaaactagctgaagatgttaatttggaactcatttcaaaagatacccatggatatgttggtgctgatctt

SEQ ID NO: 31656 - DNA, 305 bp, Zea mays
cctacccatcacacacaaacagccactcctcacctcccccgtcctccggttcatgtcctgctgctccccatgtcgcccccactcgacctcgactacataggcctctcgccggcagcggctgccgccgctgcccacgacgacctgaagggtaccgagctccgccttggtctgccggggtccggttcgccggaccgccgtgttgtggctgccaccgcaaccaccctggacctgctcccggctaagggcgccaagcgcgggttttctgacgaggcgccgacgccatcgcccggtgcagcttccgggaa

SEQ ID NO: 31657 - DNA, 291 bp, Zea mays
cccacgcgtccggtcactcggcagtcggcacgcaggctagcagcacagcagcagccagagccatcccctctcctcgctacgcttcgcttcctcggcgccgattcctcctcctcctcctccaccctcgtccgtcccgttccggcgcgcgagctcgcccgagatggcgaacgcgagatcgggtgtcgctgtgaacgatgagtgcatgctgaagtttggcgagctgcagtcgaagaggctgcaccgcttcatagctttcaagatggacgacaagttcaaggagatatttgtgga

SEQ ID NO: 31658 - DNA, 265 bp, Zea mays
  unsure (1)..(265): unsure at all n locations
cccacgcgtccgcccacgcgtccgcggacgcatggatggcgtcgtccatgctctccgctaccaccgtgccactccagcaggggggcggcctgtccgagttctccgggctcaggagctccgcgtcgctgcccatgcgccggaatgccacctccgacgacttcatgtccgccgtctccttcaggacccacgcggtcggcacgagcggcgggccgcggcgggcgccgacggaggcgaactgnaaggtggccatcaatgggttcggccg

SEQ ID NO: 31659 - DNA, 278 bp, Zea mays
  unsure (1)..(278): unsure at all n locations
ccggcgggctgctgcaggtggaggacttctcgccgcagtggtgggacctcatcaccaccaccgcctggttccgcgaccactggtcccgcgagcacgcccacctggacgagatagccgagcagctcgagttggtcgccctccttgcctacgatgaggatgcaggacctcttctacggcgagcaggcccccgccgccgccgcccttaagacagattcggtgctcaaggcgctgaacttgggttcnccgaagagcggcgacgcccgcggaggttccgggag

SEQ ID NO: 31660 - DNA, 314 bp, Zea mays
ccacagcctccaaggctgacaaggccacctagagtattgttgttcttgttttatctatccctctgctgtgagaccgaccttctggccagggggagcatcgcggcggacagtagaggcgtgaccgatatgttggtggttacctcctccgtggggatgctccacggggttcatggccacaccacggaccttgggccagctgttcctcttcacacggtacttgtggtaggcgttgccagccttcagcatcggcttctcagtcctgccaccaccggcaacctgcccaatcatggcacggcagctgctggggacaattt

SEQ ID NO: 31661 - DNA, 316 bp, Zea mays
ctgatggatatgtcgctgttgtcacaatgtttaattatcaacaatttcggcatatcggcgcacctggttggcagcttgggtggacatgggcaaagaaggaggttatatggtcaatggttggggctcagaccactgaacagggcgactgctcaaagttcaagagcagcccaccccattgctgcaagaaagatccaacaattgtcgatttacttccaggcactccatacaacatgcaaattgccaattgctgcaaggcaggagttgtaaatacctttaaccaggacccagcaaatgctgcttcctccttccagatcag

SEQ ID NO: 31662 - DNA, 311 bp, Zea mays
atgcactgccatggttggcggtctatttactgcatcccgaagcggcctgcattcaaaggttccgcacctcttaacctttcggaccgtcttcaccaggtccttcgttgggctcttgggtctgtcgaaatcttcttcagcaagcactgcccactctggtacggatatggcggcgggctaaaatttctggagaggttttcttatatcaactctatcgtatatccctggacatccattcctctcttggcttactgtaccttgccagccatctgcctgctgacggggaaatttatcacaccagagcttaccaatgt

SEQ ID NO: 31663 - DNA, 117 bp, Zea mays
gtacccacagtcctacgagcagtcgcacgcaatgtcaagagacaaaacggtcgacatggctcgcacgcaatctgccgtagcggtcgccgtggtggccgcggtgctgctgctggcagg

SEQ ID NO: 31664 - DNA, 315 bp, Zea mays
ccagctgtatacgctttttaatcgacaacatttgaatagcgtgtagcatgcctagcaagccaaacatattaccttacagcaagcatcccattgccgcttcacacatctttgctgccttcgcgaccctccctccttcgctccttccgcgccgcctcccggccgtcgccgccatggtgaagtactcgcaggagccgggcaaccctaccaagtcggctaaggccatgggcagggatctgagggtccacttcaagaacacaagggagacagcctttgcgcttcgcaagttgtctttgaccaaggctaagcgataccttg

SEQ ID NO: 31665 - DNA, 307 bp, Zea mays
gtccacccgtcgtcctcctagctcctctactcgccagtcgccatgggcaagattaagatcggaatcaacggcttcggaaggatcggcaggctcgtggccagggtcgccctccagagcgaggatgtcgagctcgtcgccgtcaacgaccccttcatcaccacggactacatgacctacatgttcaagtacgacaccgtccacggccactggaagcacagcgacatcacactcaaggactccaagacccttctcttcggtgacaagccggtcaccgtctttggcatcaggaaccctgaggaaatcccgt

SEQ ID NO: 31666 - DNA, 310 bp, Zea mays
gctcaagcaggtcgattgcatggcttcccttatatggcgtcatcagcggttttgatacgtaccggccattcagatatttaggatatagtttgagaagtttcctggccaattcagtgtcgtagtgttttttatttgacatctgtgtacctaaatcttacaccatttctcaaaacacagccagggccaagggagagaccaatgcagtgctttatcaagaggaataagaacaactctacattctacctctaccttggcttcacaagttcacctgtggataaagggaagtttctcatggctgctagaagattta

SEQ ID NO: 31667 - DNA, 310 bp, Zea mays
ggcggagtggcgcgatgggagagcaggtcgtgacggagcagatccagcggaagctcgaggaggtcaacgctaccgtccaacagcacctcgcgggtgtccaggaccacatcaacttcaccatgcagcaagcatacttcaagtgtgcatatggttgctttgatcggcgccatactcaggaagcgatcagcaactgtgtggagaattgtagtgtgcctgtccttgctgccaacaatgtttttgagagtgagatggccaagtttcagggaatgttgaaccggtcattgagggtctgtccagataagtttgaagc

SEQ ID NO: 31668 - DNA, 311 bp, Zea mays
cgacggcaagccgcactgccaggtggacatggggttcctgggcacggcggggcgtgacccgctcttctactcgcaccacgcgaacgtggaccggatgtggcacatctggtccactaggctgggcggtaagggcttcgacgacccggagtggctggacaccagcttcgtgttctacgacgactaccggagcccgcggctggtgcggatgaagttccgcgacgtcctggacgcgaccaggctcgggtacacgtacgacaaggagtcggaggcggcgctgccgtggctgaacagcaagccgacacggttctccg

SEQ ID NO: 31669 - DNA, 310 bp, Zea mays
atggtagtgaggaagcacctttctatggtggccttcaacaacataacaaggctggcatttgggaagcggttcatgaatgcaaacggtgacgttgacgaacaaggacgtgagtttaagactattgtgaacaacgggatcaagattggtgcatctctctccgttgctgagttcatttggtatttgagatggttgtgtccacttaatgaggagctttacaaaactcacaatgagagaagggaccgcctgacaatgaagatcattgatgagcacgctaagtctctcaaggagagtggcgccaagcagcactttg

SEQ ID NO: 31670 - DNA, 311 bp, Zea mays
caagagcgagtacctgttcggcaagatcgacatgcagatcaagctggtgccaggcaactccgctggcacggtcaccaccttctacctgtcgtcccagggcgacgcgcacgacgagatcgacttcgagttcctgggcaacgtgagcggggagccctacacgctgcacaccaacgtgttcacgcgcggacagggccagcgggagcagcagttccgcctctggttcgaccctaccactgccttccacacctactccatcctgtggaacccgcagcacgtgatcttcgcggtggacggcaccccggtgcgggact

SEQ ID NO: 31671 - DNA, 311 bp, Zea mays
cctccagcgcctccaccctcctcgccgcctcactccctctgcagaggtcgcagatccgtccggttagacgaagccgcccgcacccatggcctccggtgagctcgcctgcacctacgccgccctcatcctcagcgacgacggcatcgccatcaccgccgagaagatcgccaccatcgtgaaggcggccaacatcaaggtcgagtcctactggccggcgctcttcgctaagctcctggagaagcgcagtgttgaggatctaatcctctccgttggatctggtggtggcgctgctccagttgctgctgccgccc

SEQ ID NO: 31672 - DNA, 308 bp, Zea mays
  unsure (1)..(308): unsure at all n locations
cccacgcgtccgctcgccatcacataaaaccagtgcaagcagaagcagcgcaatggcgagcagcaccatggccctctcctccacagccttcgccggcaaggcagtgaacgtgccgtcgtctctcttcggcgaggcccgcgtgacgatgcgcaagacggcggcgaaggcaaagccggcggcgagctccggcagcccgtggtacggccccgaccgcgtgctctacctgggcccgctgtccggcgcgcccccgagctacctgacgagcgagttcncgggcgactacggctgggacaccgcggggctgtcgg

SEQ ID NO: 31673 - DNA, 309 bp, Zea mays
catggtatgacttgagaaatggatctccatacaagggaagcgcgacacacaagctacaggttttagaagatagcattcccagcttccaaagggctggtacaattgtgccaagaaaggacagattcagacgcagttctactcagatggtgaatgatccatacactctggtgatagcactcaatagctcaggtgctggagaaggcgaactttatgtggatgacgggaaaagttatgattaccagcaaggggcattcattcatcgccgatttgtctttgcagacaataagctaacttcattcaatattgggc

SEQ ID NO: 31674 - DNA, 306 bp, Zea mays
cggacgcgtggtgactcccgcggcatcccgggaatcaggaaggaagttgccgacttcatccacaagcgagatggatatcccagtgatccggaactcatctacctcacagacggtgccagcaaaggtgtgatgcagatcctgaacaccatcattagcaacgagatggacgggatcttggtccctgttcctcagtacccactttattccgccaccatttccctctatggtggttctctggtcccgtactacttggaagaagaggctaactggagcctcgactttgtgaatatccggcaaacagtggcg

SEQ ID NO: 31675 - DNA, 299 bp, Zea mays
gggttttgctgctctccgaccccgagctccgaacgccgcagcatcaggcgcggaccccctcgcgtgtgaccgagatggcgctgccgaatcaggggaccgttgattaccccagcttcaagctcgtcatcgtcggcgatggtggaactggtaaaactacatttgtgaagaggcatctcactggagagtttgagaagaaatatgaaccaaccattggtgtggaagttcatccgttggatttcaccactaactgtggtaagatcaggttctactgctgggataccgccaggcaagagaagttt

SEQ ID NO: 31676 - DNA, 301 bp, Zea mays
cccacgcgtccgtggttttattgaattcagcaaccatgctgtagccgaacaagttctgcagaactataatggtcaaatgatgcccaaagttaatcaacctttcaaattgaattgggctaccagtggggctggtgagaaacgtggagacgatggttcagattatactatatttgttggggacttggcctcggatgttacagatttcattctacaagatacgttcaagagtcgttatccatcagttaagggtgcaaaagttgtctttgacagaactactggccgttcgacaggctatggtttt

SEQ ID NO: 31677 - DNA, 305 bp, Zea mays
cagcaagacagtctatccaactgagagggtcactgttaataacactatgtaccacaagagctgcttcaagtgctgccatggagggtgcaccatcagcccttctaactacattgcgcacgaggggaagctgtactgcaagcaccaccacatccagctgatcaaggagaaggggaacttcagccagcttgagaatgaccacgagaagacatcacaggctgggtcactggaggaggatgaacaagagtattgatcactgagcacaaccacagatgaataatgaatcctcttgcatttgcctagagcac

SEQ ID NO: 31678 - DNA, 306 bp, Zea mays
ctcgccggtgctgctgcaattaacgccgcctccggccaaccacccgaaacctacctccgccgccgtcgtcgccaccgtcaacatggcgagccaaggggagccctcggcctctgcttccgatccgaaggagaagaaggacttctcgacggcgatcctggagaggaaaaagtcaccgaaccgccttgtcgtcgacgaggccaccaacgacgataactccgtcgtcgctctgcaccctgacaccatggagaggctgcagctcttccgcggcgacaccgtgctcctcaagggtaagaagaggaaagacac

SEQ ID NO: 31679 - DNA, 304 bp, Zea mays
cggactcgcgcttcaaccgcgtgttcaacgagggcatgaagaaccactcggtgatcatcaccaagaagctgctggacttctacacgggcttcgagggcgtgtcgacgctggtggacgtgggcggcggcgtgggcgccacgctgcacgccatcacgtcccgccacccgcacatctccggggtcaacttcgacctgccgcacgtcatctccgaggcgccgccgttccccggcgtgcgccacgtgggcggggacatgttcgcgtccgtgcccgccggcgacgccatcctcatgaagtggatcctcca

SEQ ID NO: 31680 - DNA, 155 bp, Zea mays
atcaagcattcagatgttggttactcaaattgtatctcatttagatctgtctgaggttgaaacttaaatggagcagtagtatctatcatattggtacccctgttactgagtataattttgttttcatatccatccttacagacgattgcactttt

SEQ ID NO: 31681 - DNA, 316 bp, Zea mays
gtcaagagggagctccaggagactgttcaatatcctgtggagcatccggagaagttcgagaagtttggcatgtctccatccaaaggagttttgttctatggtcctcctggttgcggtaagaccttgttggcaaaggcaattgccaacgagtgccaggctaacttcatcagtgtcaagggtcctgagttgcttaccatgtggtttggtgagagcgaaccaacgtccgtgaaatttttgacaaggctcgtcaatctgctccttgtgtcctcttctttgatgagcttgactcaattgctactcagagaggaagcagtgt

SEQ ID NO: 31682 - DNA, 242 bp, Zea mays
cgtcaagcagggaactgcctcatgggcaaggacagcccactgtcactgtcagtgaaggctacgaagcgcaccctggccaagccgcactgggctttccctggcaacacagctgctgacggcatgaagagcagcgcatgagaaaaacgcagcatggcattaggccgccaacagccagcatgattagagcccccctgcatgcagaatgatcacccggtcccgtagttcacgacgaaagcatggct

SEQ ID NO: 31683 - DNA, 246 bp, Zea mays
ggcgcggacgacgtcggcgtcggaggcgaggaggcgaactgcggcgcgacgaacgaggacgaggtgtcggacgacggctccctgcacgccgggcccggggagaagaagcggcggctgaacgtggagcaggtgcggacgctggagaagaacttcgagctcgggaacaagctggaggcggacgcaagctgcagctggcgcgcgcgctgggcctgcaaccgcgccaggtggcaatctggttccagaacc

SEQ ID NO: 31684 - DNA, 321 bp, Zea mays
aggagactgttcaatatccagtggagcatccagagaaatttgaaaagtttggcatgtctccttcaaagggtgttttgttttatggccctcctggctgtggcaagactttgttggccaaggcaattgccaatgaatgccaagctaacttcattagtgtgaagggtcctgaactgcttaccatgtggtttggtgagagtgaggccaatgtccgtgagatttttgacaaggctaggcagtctgctccatgtgtcctcttttttgatgagctcgactccattgctactcagagaggaagcagtgttggtgacgccggtggtgctg

SEQ ID NO: 31685 - DNA, 313 bp, Zea mays
caccaaccccgtccagccgccggctgtctcggccgtcgccgccgccgccgccgccctatcccggtccttcaggtgaaccaggttggccatggccttcaacaagatcaaggtcgccaaccccatcgtcgagatggacggcgatgagatgaccagggtgttctggaaatctatcaaggacaagcttatattccctttcgtagacctcgacatcaaatattttgacctcgggcttccacaccgtgatgctaccgacgacaaagtcacagtggaggctgcggaggccacactcaagtacaatgtggctatcaagtgt

SEQ ID NO: 31686 - DNA, 258 bp, Zea mays
gttggcttctcctccccctccggttcgggttcgggttcgtgaggttctccggggttcggtttcgtgggtgggcggatcgagatggcggcgtcggatgttgagtaccgctgcttcgtcggcggcctcgcctgggccacggacgaccactccctccacaacgccttcagcacctacggcgaggtcctcgagtccaagatcatcctcgatcgggagacgcagaggtcccgcggcttcggcttcgtcaccttctccacggag

SEQ ID NO: 31687 - DNA, 310 bp, Zea mays
gtgactaccacgatcaaggtgggcttgtcagtaactgccttcgcctccttaatggctgcgcggatgtcatcatatccggtgttcccattcttaacccagatcgtgtgccacccaagagcctcgaagcgggtgctcacgtcctctgtgaatgcaatctccgtgtctccgtcgatggaaatgtgttcagttcttccaatctcttgcaagcacaactgcacaagggaacaggaggaaaaaagagcgagaactcgcagctgacgcgcacacggcaagccccaatcggagccgcggaccggatcagaactaggtc

SEQ ID NO: 31688 - DNA, 311 bp, Zea mays
cccacgcgtccggttcttccaggctaacctgcggatcctggtcactggtggggcgggcttcatcggctcgcacctcgtggacaggctcatggagaacgagaagcacgaggtcattgttgctgataactttttcaccggttcaaaagataacctgaagaagtggatcggacacccaagatttgagctcatccgccatgatgtcactgagccacttcttgtggaggttgaccagatctatcaccttgcttgccctgcttcaccaatcttctacaagcacaatcctgttaagaccatcaagacaaatgttattg

SEQ ID NO: 31689 - DNA, 307 bp, Zea mays
  unsure (1)..(307): unsure at all n locations
cgattaacaagagcccgtccactgaatctgtgcggatcctgaacagcttgtgccgagacaaggacaatgtggtgtacctatgcagcgggtatgaccggcgcacccttcatgagtggttcccttgtgagaaccttggcatagccgcggagcatggctacttcctgaggtgtaagagggacgcggaatggaagacctgtgtcgctgccacagactgcagctggaagcagatcgcggaccnggtgatgtgcctgtacagggagacgacggacggctcaaccatcgaggacanggagacggtgctcgtgtg

SEQ ID NO: 31690 - DNA, 311 bp, Zea mays
ctcatcttttctcgtttagaacctctaaaatttcccccactcgccagtcgcagcagcacctgtagcagccatggacgccagcggaccggtagcaaggggaagaagggggcggccgggcgcaaggcaggcggccccaggaagaagtcggtgacgcggtccgtcaaggccgggctgcagttccccgtcggccggatcgggcgctacctcaagaagggccggtacgcgcagctgtgtggcactggcgcccccgtctacctcgccgccgttctggagtacctcgccgccgaggttctggagttggcagggaacgc

SEQ ID NO: 31691 - DNA, 312 bp, Zea mays
aaaccctagccctcgcgccgccgcctcctccgccacccagcgctcgagctcctcgcgtcctgcgagcgcgctccgcaacgtcaccatgaagttcaacatcgcgaacccttccaccgggtgccaaaagaagctggaaatcgatgacgaccagaagctgcgtgccttttatgaccgaagatatcccaggaggtcagtggtgatgctctgggtgaggagttcaagggttatgtcttcaagatcatgggtggatgtgataagcaaggcttcccaatgaagcaaggagttttgacttctggtcgtgttcgtcttctg

SEQ ID NO: 31692 - DNA, 301 bp, Zea mays
attgcaccaaatctgacagccctagtgggtgaattagttggtgctcgccttattgcacatggtggaagtttgctaaatttagccaagcagcctggtagcacaattcagatacttggtgcagagaaggctttattcagagctctaaagacaaagcattctactcctaagtatggcctcatctaccatgcatccttaattggtaaggcttctcaaaagcaccagggaaaaatctctcgttctcttgctgcaaaaactgctcttgccatccgatatgatgcgcttggcgatggtgaggacaact

SEQ ID NO: 31693 - DNA, 158 bp, Zea mays
cagaggtgggttggcttctcctccccctccggttcgggttcgggttcgtgaggttctccggggttcggtttcgtgggttggcggatcgagatggcggcgtcggatgttgagtaccgctgcttcgtcggcagcctcgcctgggccacggacgaccactc

SEQ ID NO: 31694 - DNA, 304 bp, Zea mays
gcctctcctactgcatctccctcgctctcgtcgcctcgttcgcttcgcctccgccccgccccgccccgagcagtcgcaccctatccggagctgggatggcggacgcgaacagcagcagcagcagcagcagcagccacagcaggcggcagcggcagccaccggcgtgtggaagacggtcaagcccttcgttaacggcggggcctctgggatgctcgcgacctgcgtcatccagcctatcgacatggtcaaggtgaggatccagttgggtgagggctctgctggtcaggtcacaaggaacatgctt

SEQ ID NO: 31695 - DNA, 286 bp, Zea mays
cggacgcgtggcgccaagaccagctcttccgtggagaagagctacgagctccccgacggacaggtcatcaacatcggcgccgagcgcttccgctgccccgaggtcctcttccagccatccttcatcgggatagcaactgccggcatccacgagaccacctacaactccatcatgaagtgcgacgtggatattaggaaggacctgtacggcaacatcgtcctctccggtggcaccaccatgttccctgggatcgctgacaggatgagcaaggagatcactgcctggg

SEQ ID NO: 31696 - DNA, 301 bp, Zea mays
cccagctcgctcgtcccagctgatcaggtcgagcacctagtagcgacctgctcgatcatcagtgtagagtgtcggtaggtgtctgtctctcttggtggctggttgcaacggtcatggcgacgtcgtctcgtcgggtgcccgtgctgctgctgtgcctgggcgtgctggtgtcctgctccttcgcggcgggcagcttggaccaggagctggacatcacgtagggcgacgggcggggcaaggtccttgacaacgggcggctgctgacgctgtcgctggaccgcacgtccagctccgggttcca

SEQ ID NO: 31697 - DNA, 305 bp, Zea mays
cttttatatggccgaaaaatatgatgctcatgttgttggtattgatctttccataaacatggtatcatttgcacttgagcgtgccattgggcgcagttgctcagtggagtttgaagttgctgattgcactacgaagacatacccagacaacacatttgatgtcatatacagccgtgatactatccttcacatacatgacaaaccctctttgttcaaaagttttttcaagtggctgaagcctgggggcaaggtccttatcagtgactactgcaggagtcctgggaaaccatcagaggaatttgcag

SEQ ID NO: 31698 - DNA, 304 bp, Zea mays
gtcatccggatcctaacctcacctatgcaaaagagttggttgaacggatgggtcttggaaagtcatcctcaaatgttgaacctcctgaatttggtgctgcagctgatggagatgctgaccgcaacatgattctgggtaaaagattctttgtgacaccatcggactctgttgccattatagcggccaatgctgttcaatcaattccttactttgcttctggcctgaagggagttgccaggagcatgccaacatcagctgcccttgatgttgttgcaaagaatttgaatctcaagttctttgaggg

SEQ ID NO: 31699 - DNA, 307 bp, Zea mays
cccacgcgtccgggtaaccgcgtgcaaagagtccgtgtgcagcttcctggtctaagccaggagcttcttcagaagttgagggagaagaacatcgattttgctgctcacagcaaccaggaagactctggttctcttctgttcaaccttattggaaatttggcattcccgcttatccttatcggtggtctgtttttactttcaagaagggcacagggtggcctcggtggacccaatggtcctggctttccccttggttttggtcaatctagggccaagtttcagatggaacccaacactggtgttacat

SEQ ID NO: 31700 - DNA, 299 bp, Zea mays
  unsure (1)..(299): unsure at all n locations
cggacgtggnncgaacggggaaaggttttgcaggtgtaatgaaaagatatggtttcagtgacatgcctgcatcacatggaacatctttggcgcatcgcagtggtggctctactggtcaaagagatgctcctggaagggttttcaaaaacagaaaaatgcctggacgcatgggtggtgtgcaacgcacagtgaagaatgtatgggtctatcaaatagacccagccaggaacttactgtatctgaagggccaggttcctggtcctcaaggtagctttgttttcgttaaggattctatatat

SEQ ID NO: 31701 - DNA, 189 bp, Zea mays
atctaggtccgggacggtggctagcatggacaacaaatgcaatgttcctgaagtcagttgatagattcaatgaccttgtggtgtctgtttatgtaactgctggtcataccagattcatgctacttcatgactcgcgtagaggactggaataaaaagcttttttcaagaggtccatgaactttacatcaa

SEQ ID NO: 31702 - DNA, 301 bp, Zea mays
aaacttgtggtgtcaacgtcctgctcactgatgcacaccgctgctgaccttgtaaatgagactaagctgcgatgatgagattaagtcatggcttgcatttgctgcccaaaaggttgttgaggataatgcccttgccaatgccttggcaggccaaaaggatgaggtctactttgcagccaatgctgctgctcaggcctcaaggagatcatcgcccagggtgacaaacgacgaggtccagaaggctgcagctgcattgaagggatctgaccaccgccgttctaccactgtttctgctagattg

SEQ ID NO: 31703 - DNA, 297 bp, Zea mays
gcatgaagccagtcgggcaccagtccacgaactggatggtgcgcttggcggacgcgtggggtccattcctctcctggcttactgtaccttgcctgccatctgcctgctcacggggaagtttatcacaccagagcttaccaatgtcgccagtatctggttcatggcacttttcatctgcatctccgtgaccggcatcctggaaatgaggtggagtggcgtggccatcgacgactggtggaggaacgagcagttctgggtcatcggaggcgtttcggcgcatctgttcgcggtgttcca

SEQ ID NO: 31704 - DNA, 295 bp, Zea mays
  unsure (1)..(295): unsure at all n locations
ggacgcggncgagacgcgtggggccgcaacccttcacgtatcgtctctctctcacacgagccacaccctgacatcccccatccccctcccagaaaagacccctcgaaaaacggcggcgctgcgacatggcggaggtcgaggctccagctactgcggtcgaggctccagctgctgcggtcgcgacgacgacccctgaggtggcggcgcccgaggccggagccgctacggaggcgaagggtccgcacaagcttcaccggcagtggaccttctggtacgacatccagacgaagaccaa

SEQ ID NO: 31705 - DNA, 293 bp, Zea mays
  unsure (1)..(293): unsure at all n locations
nccacgcgtccgtcctgtacgccatcgccgtgctgtccaagatcgacccgtgctggggccgcaagtacatgccgcacgctactccatggtggccgacttcatgacgctgtcgcgcaacaaggccggcgccagcttcacccgcctgcggatgttcgacctctggaagctgcactcgtgggccggggggctgacggagttcgccgacgggcgcaaccaggagagcaccagcgaggccgtgaacgcctactactcggcggcgcttgtggggctcagctacggggacgcgcacctcg

SEQ ID NO: 31706 - DNA, 302 bp, Zea mays
ggcggacgtggacctgttcctccggatcatctgcgccaaggccaagggcgtcacaagcggtgggacagcctcttcaacgagctgctgtccgagtacgcgctctccggcggcaagcagggcgaccacaactctgaagacttcgtgcacctcttgctgtcgctgcagaaagactacggtctcaccacggataacatcaagggcatacttgtgaacatgttcgaagcagccatcgagacatcattcctggtgctggagtactccatgagcgagctgatgaacaaccgccacgtcctggccaagct

SEQ ID NO: 31707 - DNA, 292 bp, Zea mays
atggagcaagcttcaaccagagtatgctgctaatatgtggaaagaagcccttaacaaacggcttggaactaagggtcttgacctttctgaaatcatagtggaatcagagaaacgtgggataacatttgacaagttactaactgttcctgagaacgatagctgggtctatgaagatggtcagtcagcatcttgtgtggctttcgtccttatgatgtacaaggaggctggactctttgaccctattaccagctctattgaagttactgaattcacaataaaagatgcttatatc

SEQ ID NO: 31708 - DNA, 302 bp, Zea mays
cccacgcgtccgcactcccagccgtcacgccgtcgccgccgcgagtccttcattcaccatgatcatctccaagaagaaccgccgcgagatctgcaagtacatcttccatgagggggttctatatgccaagaaggactacaacctggccaagcaccccaagcttgacgtgcccaacctggaggtgattaagctcatgcagagcttcaagtccaaggagtatgtcagggagaccttctcctggcagtactactactggtacctcaccaacgatggcattgagcacctccgcagcttcctcaacc

SEQ ID NO: 31709 - DNA, 230 bp, Zea mays
caacgctgcagtacggtccgaattccgggtcgaacaagcgtccgggacgtggggaaaaatttggtgaccagttgaagaaggctgttaaagatggggaaatggttaatgttaatcttgattggagggaggctgttccacatccagatgaccgtgttgagtatgagttatggacaaacagcaatgatgaatgcgggcctaaatgtgatatgctgatgaattttcttaaggaa

SEQ ID NO: 31710 - DNA, 227 bp, Zea mays
  unsure (1)..(227): unsure at all n locations
cgagacgtggncgagacgcgtgggcaacaacctccccgtgctacgcgtcctgcgtgagcttggacgcggcgccgtcatcgtcagcggcaacgagctccgactcgccctccaggcgggattcgaccccgccaggtgtatatttaacggaaatgggaagacactcgaagatcttaaattagctgctgagagtggagtatttgtaaatgtggatagcgnatttgatttgg

SEQ ID NO: 31711 - DNA, 292 bp, Zea mays
gggcgtctggacgacctacatcctcattgtcttcttctcctggctcctcgtcctctccgtcttcggctgcacccctggcaccgcgtggaccgtcgtcaacctcttccacttcgcgatcacataccactttttccattggaagaaaggaacaccttttgctgatgaccagggaatgtacaacgcattgacttggtgggagcaaatggataatggcaaacagcttactcgtaataggaagttcctcattgttgttcctgttgtcctgtatctgatagctctgcacaccacagac

SEQ ID NO: 31712 - DNA, 287 bp, Zea mays
gcttcctcggcgccgattcctcctcctcctcctccaccctcgtccgtccccttccggcgcacgagctcgcccgagatggcgaacgcgagatcgggtgtcgctgtgaacgatgagtgcatgctgaagtttggcgagctgcagtcgaagaggctgcaccgcgtcataactttcaagatggacgacaagttcaaggagatagttgtggaccaggtcggggatcgcgctaccagctacgatgacttcacaaacagcctacctgagaatgactgccgatacgcgatctatga

SEQ ID NO: 31713 - DNA, 291 bp, Zea mays
ggtgcggcggccggagctggtgctccagcgcccttcgcggctgcccaggggtggggcgaggctgacgcgcagggcagggcgagcgattgcgatggcgtcgctagggcggctcaaatccgccatcttcgatagggaggagaggaagatgcagtaccaatcgcacatccgcgggctcaatgcctatgatcgccataagaagttcatgaaggattatgttcagttttatggccacgagaaaaatgtggatagtagtttgcccatcaaaactgataaagatacgctgagagaagg

SEQ ID NO: 31714 - DNA, 290 bp, Zea mays
cccgagctctcgaaaccctaggtgcgtgccgaccggcggcggcggcgaggtgatggcgatggacccggacgcggtggcgaaagcttcgtggagcactactaccggacgttcgacaccaaccgcgcggcgctggtggggctgtatcaggagacctccatgctcaccttcgagggccagaagttccagggcccatccgccattgccggcaagctcggatctcttcccttccaggcctgcgagcaccagatcgtcaccgtcgactgcctaccgtcggggccccagggaggcat

SEQ ID NO: 31715 - DNA, 275 bp, Zea mays
gaacgaactgaggtcgacgacgactgatcgagcagcgacgatggcggctgtgctgaacagcaggaagacgccgcagtggttgccgtgctggtggcggcggcgctgctggcgtcgtccgcttcggcggcgatcacctgcgggcaggtggggtcgtcgctggctccgtgcatcccgtacgcgacggggagggccagcgcgctccccgcgtcgtgctgcagcggcgtcaaggacctcaacagcgcggcgcgaaccagcgcggaccgccaagcggcgtg

SEQ ID NO: 31716 - DNA, 295 bp, Zea mays
gaaaatcttttcgctaatcggatatttgaccttttcgatgtcaagaaaaggggtgccattgattttggtgactttgtccgagctctaaatgtgtttcatccaaatatcccaatggatgaaaaaattgatttctcgttcaagctatatgatatggatagcacagggtttattgaacggaaggaggttaagcagatgttaattgctcttctaggagaatcagaaatgaggctatctgatgatatcattgagacaatcctggataagacattctctgatgctgatgcaaatcaggatg

SEQ ID NO: 31717 - DNA, 208 bp, Zea mays
cgcgccgcgaccttcgccctcgccgccgccatgatctgcgcgatctccggtgaggtgccggacgagccggtggtgtcgaagaagtcggggcttctcttcgagcggcggctcatcgagcgctacattgaggaccatggcaagtgccccatcaccaaggatgagcttactatggatgatatcgtgccggtcaataccaacaaggtcgtga

SEQ ID NO: 31718 - DNA, 205 bp, Zea mays
ccacgcgtccgcccacgcgtccgccacgcgtccgcgaccgtgcgcagacggacatgatcgcgctctcaggcgcgcacacgatcggggtgacgcactgcgacaagttcgtgcggcggatctacacgttcaagcagcggctggcgtggaacccgccgatgaacctggacttcctgcgctcgctgcggcgggtgtgccccctcagcta

SEQ ID NO: 31719 - DNA, 207 bp, Zea mays
agacaatcttccacctcaacccgtctggccgcttcgtcatcggcggacctcacggcgacgctggcctcactggccggaagatcatcatcgacacctacggtggctggggagcccacggcgggggcgccttctccggcaaggacccgaccaaggtggaccgcagcggggcctacgtcgcgaggcaggctgccaagagcatcgtcgccg

SEQ ID NO: 31720 - DNA, 287 bp, Zea mays
cccacgcgtccgcccacgcgtccgcgctgccgagaactccgactgcagctcggccaagcgcggcggtgacctcggttcatttgggaggggtaagatgcagaagccttttgagaaggccgcgtttgctctgaaggtcggggagatcagcgacgtggttgatacagagagcggggtgcacatcatcaagaggactggctgactgcacctgctgcagtatccatacacggtggatgccttggagaggctgtatggtttcttgcttcattggtgaatttgtgcgtgttttt

SEQ ID NO: 31721 - DNA, 285 bp, Zea mays
ctgaaacttgcggtgtcactggctggtatagcctgagtgtgagtgagtgatcgagctagctgagctccgatcctcgctagctagctaggataccgccataccacaagtcttcttcacaagtttaggagtgacagcaacaagagatctcgatggcctctgccaccgtgctcaagtcctccttccttcccaagaagtccgaatggggcgccaccaggcaggccgccgcgcccaggccgcccaccgtctccatggtcgtccgcgcctccgcctacgccgatgagctcg

SEQ ID NO: 31722 - DNA, 285 bp, Zea mays
agaaggcaaaggaggggagaagatgtagttcacccacttaaagtttctctggaagatctttacaatggcacctcaaagaagctctctctttcgcgcaatgtcatctgctccaagtgcaagggcaagggctcgaagtctggtgcctcaatgaggtgccctggttgccagggctcaggcatgaaagtcactattcgtcagctgggcccttccatgatacagcagatgcagcagccttgcaatgagtgcaaggggactggagagagcatcaatgagaaggaccgctgt

SEQ ID NO: 31723 - DNA, 287 bp, Zea mays
gaaataatttaggagcaagtgcaagttcatggactataaaatactacaaggggttaggaacaagcacagccaaagaaggccgaaagtacttcgaagatattactgaacataaaaaagattttctctgggtagatgaccaagatggcaatcatattgaattagcattcagcaagaaacggattgctgataggaaacagtggcttacaaattttcagcctgggacatacattgaccaacgtgacaaacatgtcaagtatagcgatttcatcaacaaagagctgatactc

SEQ ID NO: 31724 - DNA, 290 bp, Zea mays
gatagggaccgtgttgttgaagcaagggatgagcttcaccgaatgctgaatgaggatgagttacgtgatgcagtgttgcttgtgtttgctaacaagcaagatcttccaaatgctatgaatgccgctgagatcactgataagcttggactgcattcacttcgccagcgtcattggtacattcaaagcacttgtgctacaacgggtgagggattgtatgaaggcctagactggctgtccagcaacattgcaaccaagtcctaaattgtcaagcgaggtttggatcatctagg

SEQ ID NO: 31725 - DNA, 196 bp, Zea mays
ccaaattcatgaagccactctcgttttcagggatattaggcggcaaccaaaaatccaatcctgatttctacaactggaatagagtaaagatcagatactgtgatggttcatcatttactggtgacgttgaggctgtggacactgtgaaagatctccgttacagaggggtcagagtctggcgtgccgtcatcgatga

SEQ ID NO: 31726 - DNA, 285 bp, Zea mays
cctaagggttttacacccaagtttagcttagctccccttgtaggacggttgtctgagcttcttggcattcaggtgcaaaaagccgacgatgttattggccctgaagttgagaagctggtggcggccttgcccaacggtggggttctgctgcttgagaacgtaagattctacaaggaagaggagaagaatgacccagagtttgcacagaagcttgcctccctagcagatctttatgttaacgatgcatttggaacagcccacagggcgcatgcatcgacggaggga

SEQ ID NO: 31727 - DNA, 317 bp, Zea mays
cggacgcgtggcgcgcgcgtgctcatcaaccgcgctcgcgtggagtgccagagccaccgcctcacagacgaggacaccgtcaccgtcgagtacatcacgcgctacatcgccggcctgcagcagaagtacacgcagagcggaggggtgcgccccttcggcctctccacgctcatcgtcggcttcgatccctacacccagaagcccgcgctgtaccagactgacccctcagggaccttctccgcttggaaggccaacgcaaccggccgcaactccaactccatgcgcgagtttctcgagaagaattacaaggagacgtc

SEQ ID NO: 31728 - DNA, 213 bp, Zea mays
cggacgcgtgggcggacgcgtgggggcgtcacaagcggtgggacagcctcttcaacgagctgctgtcacagtacgcgctatccggcggcaagcagggcgaccacaactctgaagacttcgtgcacctcttgctgtcgctgcagaaagactacggtctcaccacggataacatcaagggcatacttgtgaacatgttcgaagcagccatcgaga

SEQ ID NO: 31729 - DNA, 233 bp, Zea mays
  unsure (1)..(233): unsure at all n locations
cagacgcgtggagcgacccncacccacccacccactcgcttcagccgcctccgccgcgcgtacaagcacgtggagacaggatgccggctggccatggcctgcgctcgcggacgcgcgacctcttcgcgcgccccttccgcaagaagggctacatcccgctcaccacctacctccgcacctacaagcatcggcgattacgtcgatgtcaaggtgaacggcgcggtccacaaggg

SEQ ID NO: 31730 - DNA, 211 bp, Zea mays
ggacctgggcgcttgcctgcacgctccagggctccaggctcccctcccacctcgccgcggcagagctggcgatcacggcgccaactcccgacatccgcggcgagcgtcagtccggccaggacgtccgcacgcagaacgtgatggcgtgcggcgcgttgtccaacatcgtaaaatcctcgctcgggcccgtcggtctcgacaagatgctagt

SEQ ID NO: 31731 - DNA, 313 bp, Zea mays
gtcagagcactttgtttcttcttataacaaggcttctagaagagcaatatttcttgattacgatggcacacttgtgccccagtcatcaatcaacaaagctccaagtgaagaagtcatttccgttcttaacaccttatgtaatgatccaaagaacattgtgtttatagtaagtggacgaggacgtgattcccttgatgagtggttttctccgtgtgagaagcttggtctagcggcagaacatggctattttatcagatggagcaaggaagccgcatgggagtcaagctattcaaggccgcagcaagaatggaag

SEQ ID NO: 31732 - DNA, 222 bp, Zea mays
gatccatccacactgagctgcccaaatccacattcccatcggcgcagacggccgggaggaggatgtccatgccggagacgttcaccctgaaggtgggggaggcgacgccggccgccgccggaggccgtcggccgggcccgtgtaccggagcatctacgccaaggacggcctcatggacctcccacaggacatccagtccccttgggacttgttcagtggggc

SEQ ID NO: 31733 - DNA, 198 bp, Zea mays
atgcaaggtataaagtgactctgttctgcagcaggggtgtccatggacgagtcctttgggctgacgcttcgccggaaggagaagcttctccttgttccaaggattgcgtcctgataatcctacatctgtaaaacttgtgtcttgctagctgtaccgggaacaagattaaataatgccaggaataaagtgactctgttc

SEQ ID NO: 31734 - DNA, 145 bp, Zea mays
gctgcctccgcctctcgagtctcgtccacccgtcgtcctcctagctcctctactcgccagtcgccatgggcaagattaagatcggaatcaacggcttcggaaggatcggcaggctcgtggccagggtcgccctccagagcgagga

SEQ ID NO: 31735 - DNA, 307 bp, Zea mays
gaggattgaacagcaagcagagctgacctatgatcaattgctaatgctggaggctaatctattttttggcgcctttgcctcctatgatcggcatagagacatgcggatggatattgatgatatgtcctatgaggaattattggccctggaggagagaataggctctgtgagcacagctctttcagaggagcagttcacaaaatgcctcaaaagaagcatatatagtcaggtcgctctagaagtgaacaaatcaaccgttgatgacatgaaatgcagcatctgtcaggaagagtacgcggagggcgaa

SEQ ID NO: 31736 - DNA, 199 bp, Zea mays
caaatgcacacttgagctgtgtggacactggcagccaggtctgcaatctcgcgtggtcaaagaatgtaaatgagcttgttagcacccacggctactctcagaaccaaataattgtttggagatatccaacaatgtcgaagcttgccactttgacagggcatacatacagagtattgtacttagctatttcccctgatgg

SEQ ID NO: 31737 - DNA, 306 bp, Zea mays
cactcagctatccagcaaaagagatcgagaggcaggagtcatggccaccgtcagcgccgccgtggtgaccaccatcgttgcccgcgccgcgatcgccaggcccaatgctctagggctgcctgcgctgagggcgaggagcgagagggtgcggtgcagctacgccaaggacgcggccccagtcagcaccaagggcgcacgcgcgtcgctgctcgccgcacgggcgcggtgaccggtcggcggggcccgcgctggcgctcgtggacgacgcatgtccacggagggcaccgagctgagcctcgggctcac

SEQ ID NO: 31738 - DNA, 176 bp, Zea mays
cccacgcgtccgcggacgcgtggtgaacacttgattgattcagtaggtagctagctagctgaatcacaatggatcctaccaagttccgtccgtccagtagccacgacacgacggtgacgacgacgaacgctggcgctcctgtgtggaacgacaacgaggcgctgactgtggggcct

SEQ ID NO: 31739 - DNA, 268 bp, Zea mays
gtttagaacctctaaaatttcccccactcgccagtcgcagcagcacctgtagcagccatggacgccagcggagcggtagcaaggggaagaagggggcggccgggcgcaaggcaggcggccccaggaagaagtcggtgacgcggtccgtcaaggccgggctgcagttccccgtcggccggatcgggcgctacctcaagaagggccggtacgcgcagccgtgggcactggcgcccccgtctacctcgccgccgttctggagtactcgccg

SEQ ID NO: 31740 - DNA, 160 bp, Zea mays
catagctggtccatctcatggaataagctgttctcggcagtcaagtaggccttctatgctcccaataactcttggaagggttcccccaagtgatttagtgttaaaggactctgaagtatctgggaaacatgctcagataaactggaatgcaaagacatta

SEQ ID NO: 31741 - DNA, 269 bp, Zea mays
gccaccatcgaccttcaagtctcgctacgtagcagtgcaataaaaaaagcagccgcaatggcgagcagcaccatggccctctcctccacggccttcgccggcaaggccgtgaacgtgccgtcgtcgtccgccttcggcgaggcccgcgtgacgatgcgcaagatggcggcgaaggccaagccagcggcggcgtccgggagcccgtggtacggccccgaccgcgtgctgtacctgggcccactgtccggcgaaccaccgagctacctgac

SEQ ID NO: 31742 - DNA, 188 bp, Zea mays
cccacgcgtccgcacatgttaaagccaacttactctttcaggcacatttctccagagcagaattgccaataagcgactatgtcactgacttgaaatcagttcttgatcagagcatacgcatcatacaggcaatgattgatgtatgcgcgaatagtggatggcttactagtgcattgacttgcatgcat

SEQ ID NO: 31743 - DNA, 297 bp, Zea mays
ccaaactctgccaaatttcgccaaatccagccggtcggaccccgcaacacatcgccaaaaccaaccgggccggccgacacaagccgcagcccgtggcgatggacctggcgtcgagcgaccttgcggcgctgggccggcggactggtccgcgtctcggcgtcgatcccgcgcgcggctccccgcaccttcgcgctgctcaccgcctgcctcgtcttcccgctctccttcgccgtgctcgcgcactccctcttcacccaccccatcctgctccgcatccagggcgccacccactccgag

SEQ ID NO: 31744 - DNA, 163 bp, Zea mays
ggaaaaccattgtatgttgcatttgcacagcgcaaagaagatagaaaagcgatgttgcaggcacagttttctcagatgcgccctgctgtaccaatgacacccactctagccccacgccttccaatgtactctccgatggctcctcagcaactcttctatggac

SEQ ID NO: 31745 - DNA, 232 bp, Zea mays
ggacgtggggaagtttggttgctcgctggagtttgtgaccaacaagtctcaggagggatcaccagttctgtagaggatttggtggcattggtggcatgttgcgctaccagctggatatccgttcttttgatgagctttctgatgatgacgatgtgtatgaagactctgactagcaatcagccaatctcatgccagtgctggcccatggaaggacgcaacagctcgacctggc

SEQ ID NO: 31746 - DNA, 267 bp, Zea mays
gcccccaactacacccagcctcggaaggaaccttccagaagcgcaagactctaaggccgtcgccttcccattcttcctcgccgcgggggtcgcctgagatcacataaacaatggtgaaggctgttgctgtgcttggtagcagcgatggtgtcaagggcaccatctttttcacccaagagggagatggccctaccgctgtcaccggaagtgtctctggcctcaagcctggcctccatgggttccatgtacatgcacttggtgacacca

SEQ ID NO: 31747 - DNA, 278 bp, Zea mays
cagctccgccgcttgcccgcttttgctctctccctcccggctctcggcttcttctacacgctaccgtctcacagccgtaaacgcccctcccggatcccgctagttcgccaccgccgcccgcccgcccgccgttcgcctcatcatggccgcctcgtcgaccgccacctccgtccacgacttcatcgtcaaggatgcgagcggcaaagacgttgacctcagcacctacaaggggaaggttcttctcattgttaacgtcgcatcacagtggggcttaacta

SEQ ID NO: 31748 - DNA, 236 bp, Zea mays
cggatatatccttgatgttactccagagaagattgaaaaaatgttcttcgatccattggattttggcattcctcgctgcacattggaagatctgaaaggaggcgatccagcgtttaatgcaaaagttctccaggatgttcttgctggtcaaaggggggcgattgcagatgcccttgttctaaatgccgcggcgtccctacttgtcagtggtaaagtgaaaattttacaggacggtg

SEQ ID NO: 31749 - DNA, 237 bp, Zea mays
ctattcccaaactcgctgggctccaaaggtgcggaaagagttgtaggctgaggtggataaactatctgaggccagacctcaagagaggggcattctcccaagacgaagaagacctcatcattgagctgcacgctgtccttggaaacaggtggtctcaaattgcagctcagctgccagggaggactgataatgagatcaagaatctatggaactcgtgcatcaagaagaagctcaggc

SEQ ID NO: 31750 - DNA, 285 bp, Zea mays
accagcaagggttccatgtcgctgcgcatggttgcgccacttgtgtgggcaactccggtgacctggatggatctgtatcagctgctatcacagaaaatgatatggttgctgctgcggttctgtcggccaaccgaaacttcgaggggcgtgtgaaccctctcactcgggctaactaccttgcctcgccgcctctggttgttgcctatgctcttgccggcactgttgacattgactttgagaaagagcacattggagttggaaagggtggcaatgaagtttcttgga

SEQ ID NO: 31751 - DNA, 310 bp, Zea mays
ctcgggctccagcttccgtttagtgctgaagcggacctgtcggggttagttgattcaccagagggacggaacttgtctgtttcgtccgtattccacaagtcatttgtcgaagtgaacgaggaaggaacggaggccgctgccgcatctgctgcaacagttgtgctccggtcgttcacgatgcctcaggatttcgtcgcagatcaccctttcatgttcctgattcgcgaagacttgactggtgtggtgttgtttgtcggccacgtggtgaatcccctccttgctccatagtgtgttgttcagaagtgtggcc

SEQ ID NO: 31752 - DNA, 267 bp, Zea mays
cggctcccctacggcccacgccacgtcaccgcggtccgcacgcgccccacggcttccgccgcctcctaaccctagaatcttcgagaagcacccggcgaagagcgcgctgccacggcgctttccggaaacttcttggagagagagagagagagagacggccccgcagcggcggaggcggagatgggggcgtcggatctagaccggcagatcgagcagctgaagcggtgcgagccgctcacggaggcggaggtcaaggcactgtgcctc

SEQ ID NO: 31753 - DNA, 254 bp, Zea mays
ggacgacttgccattcacttcttcagcggcagcgtggcaacgagagcaacgaagtattcaaaccgaaaacaatggagccggtgcggaagagcgtgtgcgtgaccggcgctggcggcttcgtcgcgtcggagctggtgaagctcctcctctcccggggccaatacgcggtccgcagcaccgtgcgcgaccctggtgctagcaagaatgcccatctcaaagtgctggaaggagctgaagataagttgcagcttctc

SEQ ID NO: 31754 - DNA, 321 bp, Zea mays
ggcggggcggcgcgcggaggaggagtacgactacctgttcaaggtggtgcagatcggggactcgggcgtcggcaagtccaacctcctctcccgcttcacccgcaacgagttctgcctcgagtccaagtccaccatcggcgtcgaattcgccacacggacactccatgttgagggcaagatcatcaaggcgcagatctgggacacggcaggccaggagcggtaccgggcgatcaccagcgcctactatcgcggggcgctgggcgcggtcctggtctatgacgtgagcaagcccaccaccttcgagaacatcagccggtggct

SEQ ID NO: 31755 - DNA, 251 bp, Zea mays
gccctgaggacgttggtggcatgcacgcagctgtggggattcttacagagaggggtggcatgacttcccacgctgctgtggtcgcacgtgggtgggggaaatgctgcgtctcgggatgctcaggcattcgcgtaaacgatgcggagaagctcgtgacgatcggaggccatgtgctgcgcgaaggtgagtggctgtcgctgaatgggtcgactggtgaggtgatccttgggaagcagccgctttccccacca

SEQ ID NO: 31756 - DNA, 234 bp, Zea mays
cccacgcgtccgcacagcaggcagcagctcgatcgctagctcctccgaaccggaaagccaagcccgctttggcgatcgtgcttgcttgcttggttccttcaattcctgccggagccagcgagagctagctgctgctgtcgcgtggtagacgtcgtcttgccagcgagagcctagctcgatcggtctctctggtacaacgtaggtagaagaatcgagggggagaggacgacgacg

SEQ ID NO: 31757 - DNA, 188 bp, Zea mays
accacaggacgacatgagtcgcgacctgcgacgacagagacgcgtggactgacgcgtgggcgcgtgcgaaccaagcagacgccagcagacgaagcgaagtcgtcgccggagcaagaggaagagcgatgagcaacatgtcgtagcaggcgtacgtcgatgaccacctgctgtgcgacatcgaaggccag

SEQ ID NO: 31758 - DNA, 250 bp, Zea mays
cggacctgggggccgccgaggctggactcgaggcgcgcacgcttgagctcgtcgccgggaagccccatgctgctgctgcggtggcccggtcggcggccgtcgctcccctccatactcctcaactcccacactgacgtggtgccgtcggagccgaacaagtgggaccacccgcccttttccgccgccctcgatgagccatccggtcgcatctacgcgcgaggctcccaagacatgaagtgtgtggggattc

SEQ ID NO: 31759 - DNA, 263 bp, Zea mays
ggtcttttccagggtggagatacatggttcataaactccaatgaacaatcacttggatatatccttgctgacaatggttttgatgtttgggtcggaaatgttcgtggcacacgttggagtaaaggccactctactctctctgttcatgataagcttttctgggattggagttggcaagaccttgctgaatacgacgttttggcaatgttaagctatgtatatacagttgcacagtccaaaatttttgtatgtgggacattcac

SEQ ID NO: 31760 - DNA, 259 bp, Zea mays
cggacgcgtggcgtgacgcgtgggtggccgatgaagaattcggtgacgaggtccgtcaaggccgggctgacgtttcccgtcggccgcatcgggcggtacctgaagaagggccggtacgcgcagccgtcggcacgggcgcccccgtctagctggccgccgtcctcgagtacctggccgccgaggtgctggagctggccggcaacgctggcaaggacaacaagaagacccgcatcatcccgcgccacgtgcttcttgccat

SEQ ID NO: 31761 - DNA, 324 bp, Zea mays
cgctcaccaagatcgagagcaggccgcaccgacaccgccccatccgcctcgtcgacgacgccaacgtcggcaccgccaagcacttcgagtacatgttctacgtcgacttccaggcgtccctcgccgagccccgcgcgcagaacgcgctggccgaggtccaggagtacacgtccttcctccgggtgctcgggagctaccccatggacatgacccccatgaccgccggctcctcctccaccgttgtttcctcgtccgatgatccctcgtcgtcttgattggcgctggaggctggagctagctccgaggacaagtcgtcgagtaggg

SEQ ID NO: 31762 - DNA, 321 bp, Zea mays
cccacgcgtccgcccacgcgtccgcccacgcgtccggagtttttcaaggagtacctgaaggaaaacaccttggatgatttgattgcgcttttgaagaaaggaaaaatggaggacaatctgttggacttttttccatcagctaagagatcctctgaggctttatctgagcatttcatcaaagaaggtctgactagccttgttgagtacaatgaaaagaagatgtttgaagttaaacttaaagagataaagtcaacactgaccactatgatcaatgatgaggctgcaatacctgaagtgattgagactgtcaaacagcaagtt

SEQ ID NO: 31763 - DNA, 315 bp, Zea mays
ccagctcgctcgtcccagctgatcaggtcgagcacctagtagcgacctgctcgatcatcagtgtagagtgtcggtaggtgtctgtctctcttggtggctggttgcaacggtcatggcgacgtcgtctcgtcgggtgcacttgctgctgctgtgcctgggcgtgctggtgtcctgctccttcgctgcgggcagcttggaccaggagctggacatcacgttgtgcgactgtcggggcaaggtccttgacaacggtcggctgctgacgctgtcgctggaccgcacgtccggctccgggttccagtcccggcacgagta

SEQ ID NO: 31764 - DNA, 183 bp, Zea mays
cccacgcgtccgggactggacgggcctgcgcgtcaccgtcgagctcactgtccagaaccgcctggaccgggtctccgacgtcaactcagacgccgcgctcgtcgtctctgcgatcgaggagcacgacatgaacgggcagaaggtcaagatcgtcaggaacagcgaaaacatcggcgtagacga

SEQ ID NO: 31765 - DNA, 317 bp, Zea mays
ggtcgctgcgcatctaccacacgatgccgccgcctctccgctgtctccttctcgccttcgtcgtcgtcctctccggcttcccccgtctcgcccaccccttcacggctctcgagtctgaccagatcgcccgcttccagggatacctccgcatccgaactgcgcacccatcccccgactacgccggcgccacgccttcctcctacactacgccgcttcgctcggtctccacaccaccacgctccacttcaccccgtgcaagaccaagcccctgctcctcctcacctggcgacgctccgatccctccctcccctccgtgg

SEQ ID NO: 31766 - DNA, 312 bp, Zea mays
cggttttctgtgattttcacaattgcgattgtatggctgtatgcgtacattctcacggttagcggtgcctacaagagtgcccgaacaaagacacaactccattgccgtgttgaccgctctgggcttgttggtggagctccttggattagtgtcccatatcctttccaatggggggccccaacatttgatgctggtgaatcatttgcaatgatggtggccgcatttgttgctcttgttgagtcatctggggccttcattgctgtgtcaagatatgcaagcgcgactatgatacctccttcagttcttggtcgt

SEQ ID NO: 31767 - DNA, 308 bp, Zea mays
cccacgcgtccggcttttcgcgcggctgaactaccgcgaccgcgccagcatggcctcagcgtgccgggcttggcgagcgctgggctcgtcatcctgcctgtggagcacgctcgacctccgtgcacaccgctactaccgggaggtggcgtcatcgcttgcctcgcggtgcgggagccttcgtcggctacgcctgcgcggccacgaggcagcagaggccgtcccggccctccgcgcgcatggtctccgcgaggtggtggccgatggctgccgcggcctcacggatgctacgctcgctgtcctcgccgcgc

SEQ ID NO: 31768 - DNA, 307 bp, Zea mays
ggacctggcgcggcggcggcgaccatggctgtcggaaagaacaagaggatctccaagggaaagaaggatggcaagaaaaagaccgtcgaccctttctctaagaaggattggtatgacatcaaggcaccgtcggtgttcagtgtgcgcaacatcgggaagactctcgtatccaggacacagggtaccaggattgcttctgagggtctgaagcacagagtctttgaggtttgcctagctgatcttcagggcgacgaggatcaagcttacaggaaaatcaggctccgtgctgaagatgtgcagggcagga

SEQ ID NO: 31769 - DNA, 306 bp, Zea mays
cacagcttgcgcccgcaatggcactcgtctccgcctcctcgtcctccaccaccgccgtcacggcgctccccaggaatgggcagcgggcgtcgtcctccttcctcggcggcaagacgctgctgagacaggccgaggcggcccggccgtcgttcgccgtgcgcgccgcggcggaccccaacaggccgatctggttccccggcagcacccctccgccgtggctcgacggcagccttcccggcgacttcggctttgatccctggggcctcggatctgacccggagagcctgcggtggaacgtgcaggcgg

SEQ ID NO: 31770 - DNA, 307 bp, Zea mays
cccacgcgtccgcccacgcgtccgcccacgcgtccgcccacgcgtccgcggacgcgtggtgatgctgaccttctccgtgttcccgtcgcccaaggtgtccgacaccgtcgtggagccctacaacgcgacgctgtccgtgcaccagctggtggagaacgccgacgagtgcatggtccttgacaacgaggcgctctatgatatttgcttccgcaccctcaagctcaccaacccttcatttggcgacctgaaccatctgatctcggcgaccatgagcggcgtgacgtgctgcctgcggttcccgggcaag

SEQ ID NO: 31771 - DNA, 306 bp, Zea mays
ggacgcgtggtggttgggtgcatggtgctcaaatggtggcattcaatatgcagggatacgggagagcgctactggctaatgcacggattttacaaagcgaatggcgggtgcggttatgtgaagaaaccagatttcttgatgcagacagaaccacaagtcttcgacccaagagaaccccagcctgtgaagaaaacgttgaaggtgaaggtgtacatgggcgatgggtggcgaatggacttcaagcagacacacttcgatcagtactctcctccagatttctacacacgggttgggattgctggagtc

SEQ ID NO: 31772 - DNA, 302 bp, Zea mays
tagcttcaagtgcggggatggtgttctacttcaaggcgcggcccgaggccggcgactataccatcttcatgggtcttgacaagtacgagaacgaggacctcatcaaatacggcttccccgaggacatctggttccatgtagataagatgtcctctgcacatgtgtatgtgagattgaataaaggtcaatcaatggatgacatgagtgagggtttgctggaagactgtgcgcacgttgtcaaagctaattccattcaaggtaataaagtcaataacattgatgtagtttatactccatggtac

SEQ ID NO: 31773 - DNA, 246 bp, Zea mays
gtggataccctgcatctgccaggcaaagaggggaagccgccacaccgatgaaaaactcaagtattgtgtgtctaccctggacgaagcgtgttacgtccgcgacctgaatgtaaatggctttcacgaagcttgctctgagcatcatttgttcagaggtgagggtgttgttggcagggcctttgcaacgaacgagccatgtttctctgaagacattaccgcctccagcaagatccaataccctctctc

SEQ ID NO: 31774 - DNA, 301 bp, Zea mays
ggacgacctcttcaacatcaacgccggcatcgttaaggggctctgcactgccatcgccaagcactgccccaacgctcttgtcaatatgatcagcaaccctgttaactccactgtcccgattgcggcggaggttttcaagaaggctggtacttatgatgcgaagaagctgtttggtgtgactactcttgatgttgttcgtgctaaaactttttatgctggaaaagcgggtgtgccagttactgaggtgaacgtacctgttgttggaggccatgcgggtattactattctgccactcttctcg

SEQ ID NO: 31775 - DNA, 313 bp, Zea mays
caagaaggctggtgccatgaatgcacttgttcgtgtatcagctgtccttactaatgggcaatacatgttgaatcttgattgtgaccactacatcaataatagcaaggctcttcgagaagctatgtgcttccttatggacccaaacctaggaaggaatgtctgttatgtccaatttcctcagaggtttgatggtattgataggaatgaccgatatgcaaacaggaacactgtgtttttcgatattaacttgagaggtcttgacggcattcaagggccagtttatgtgggaactggttgtgtgtttaacagaacg

SEQ ID NO: 31776 - DNA, 314 bp, Zea mays
cacgcccctgccggccatcggggtgccgttcgatatctcggactccaaggggcccgtgatccaatcgccagtacggtccaaagagcaggtgagggagctcgtccccatcgaccttgatatgctccagttcgtcggggagtcactaaagattctgcgaaatgagattgatggaaaagctgctttgctaggatttgtgggggccccatggacaattgcaacttacattgttgaaggggggatgaccaatacgtacacaaatataaagagcatgtgccatacagctccagatgtcttgaagggtcttctctctcact

SEQ ID NO: 31777 - DNA, 317 bp, Zea mays
cccacgcgtccgatctcctcgcattttccttgcaaccgattgcctatccccctcccaaccaaagaccgatggcgcccaaggccgagaagaagcccgcggcgaagaagccggcggaggaggagcccgcggccgagaagacgaccgccgggaagaagcccaaggcggagaagcgggtccccgcgggcaagtccgccggcaaggagggcggcgagggcaagcgtggcaagaagaagggcaagaagagcgtggagacgtacaagatctacatcttcaaggtgctgaagcaggtgcacccggacatcggcatctcctccaag

SEQ ID NO: 31778 - DNA, 314 bp, Zea mays
cccacgcgtccgagaaggcgttcgacctccaagggtctgagcaggacaggagtctctccatgaggttcttgtacgcgatgaaggagaacaggcttgaggacatcctagacgatcagatcaagaacagtgagagcatcgagtaccttgaggagatcgcagagctggcgagacagtgcttagagatgagtggtgtgaataggccgacgatgaaggaggttgcagataagcttggtaggttgaggaagatcatgaagcatccatgggcacatgagggtcctgaagaattggacaggttgcttggagagccgtctact

SEQ ID NO: 31779 - DNA, 299 bp, Zea mays
gcctgttcgacaagcacgcgcggacggcgctggccttcgtgacgctcaagcacgacggggagcgcgagttcatgttctacaggaacccgagcgcggacatgctgctgacggaggcggagctggacctgggcctggtgcggcgcgccagggtgttccactacggctccatctcgctcatctccgagccgtgccgctcggcgcacatggccgccatgcgcgcagccaaggcggcgggcgtgctctgctcctacgaccccaacgtgcgcctcgcgctctggccgtcagccgacagcgcacgc

SEQ ID NO: 31780 - DNA, 314 bp, Zea mays
gcagttcggtagtccctctcctctcgaggtattagcagtcgaccggttcctcggagcacgatgaagtttgttgctgcctacctgcttgctgtcctcgctgggaacgccagcccctccgctgacgatttgactgccattctggagtcagttggctgtgaagttgacaatgaaaagatggaactcctgctgtcccaactgagcggtaaggacatcaccgagctcattgccgcgggcagggagaagtttgcttcagtcccatgtggtggcggcggtgtcgctgttgcggcagctgcacctgctgctggcggactgct

SEQ ID NO: 31781 - DNA, 321 bp, Zea mays
cccacgcgtccggatctcccccaaatccagccgtcggcacctccgcttcaagatgcagatctttgtgaaaaccctgactggcaagactatcaccctcgaggtggagtcgtctgacaccattgacaacgttaaggccaagatccaggacaaggagggcatccccccagaccagcagcggctcatcttcgctggcaaacagcttgaggacgggcgcacgcttgctgactacaacatccagaaggagagcaccctccaccttgtgctccgcctcaggggaggcatgcagatcttcgtgaagaccctgaccggcaagactatcac

SEQ ID NO: 31782 - DNA, 223 bp, Zea mays
ggagtaggcgaagtagcgccgggagaggaacatggggacgccggagacgtcgcgggagccgtgcccggaccggatcctggacgacgtcggcggcgcgttcgggattggcgccgttagcggctccgcgtatcacttcatcaagggcatctacaactccccaaacgggatgcgcctgtccggaagcgcgcagaccgtgcgcatgaacgcgccgcgcgtggggggc

SEQ ID NO: 31783 - DNA, 305 bp, Zea mays
cggacctggtcgagacgcgtgggcggacgcgtgggcgccgctcttcttcccctgcttgatctgggttcctcacttcctctccagactccatcacaggagcacgcgacgcgcgccacaggaaggaagggaaaaaacatggcggcggcgaacggggacgcgtgccgcagcgtcggcggggtgccgcgcccgacgaaccccatggtgacgccgctgctcaccgacctgtaccagttcaccatggcctacgcctactggaaggccggcaagcacctcgaccgcgcagtctttgatctctacttccggaa

SEQ ID NO: 31784 - DNA, 302 bp, Zea mays
ggacgtggcgacctatattctgggccaacagaccaaagagctatcttaaaaggacattaggttgggatcagtatccccatggacggtggggtgattctcggaacccatcatatggagcacttactgaccaccagttcacaagaccacgaggccgtggtaagaagctccaagaggaatgggctgttccactgaaatctgtggaggacattagtgagcgcttcacaaacttctgtcaagggaaactcacaagcagcccatggtcagaattggacggtcttcaaccagagacaaagattatcgat

SEQ ID NO: 31785 - DNA, 301 bp, Zea mays
cggacctggtcgagacgcgtgggcgcgctggcgctcgtggacgaccatgtccacggacggcaccgagctgagcctcgggctcacaacaacctgctggggtggatcctcctgggggtcttcggcctcatctggtccctctacaccatctacacctctgacctcgacgaggacgaggagtccggtggcctctcgctctagatccacctcctctcctgttaatgatctgaatgtaaacatggtggtggtcatcggtgtaaatttagacatggctatttgcatctaagatccatcctctcctgtt

SEQ ID NO: 31786 - DNA, 292 bp, Zea mays
cggacgcggtcgagacgcgtgggggagccgccgagttcgacgcctggctcaaggactcagtcctcgacggaagcgtacgaggacgtgaaccggttcgaggagaaagcgccgcatgggagggtggcgcacccgtggccggaccacttctacccgctgcacgtggcgctcggcgcgccggggacgggcaaaggcggacagatccaccagtgctggaccaacgccacgctctcctacgcgtcctacaggttcaccaccaagagctgacgcgcccgtgcagctgtcgggtggagga

SEQ ID NO: 31787 - DNA, 305 bp, Zea mays
tgattttagccgccgccgctgctcatctcacatccctcgagaagacgcctgctcctcgccgatcgatacgatggccgtcttctccgacctccacaccgccgacggcctcaagtccctcgaggctcacctcgccggcaaaacctatgtgtctggtgactccattactaaggatgacattaaggtcttcgccgcggtgccgtcgaaacctggcgctgagtttcctaatgccgcccgctggtacgagaccgtctctgcggctgtagcctcaagattccctggtaaggctgttggtgtaaatctgcctg

SEQ ID NO: 31788 - DNA, 311 bp, Zea mays
ctcgctcgcaaggtactgcactacgatggccgccacctcctcctccacctcctccacggtagttgcacttgcggcgcttctcttcttgctccttgtaacgtgtggctcgtgcgcgagaccggcgagctttaacgcctccgactttaccgccgaccccaactgggaggctgcccgggccacctggtacggtgcgcccaccggcgccggccctgatgacgacggtggtgcctgtggattcaagaacgtgaacctgccgccgttctcggcgatgacatcgtgcggcaacgagcccctcttcaaggacggcaagg

SEQ ID NO: 31789 - DNA, 291 bp, Zea mays
agcaagcaagcagcgagtacatacatactaggcagccaggcagccatggcgcccaccgtgatgatggcctcgtcggccaccgccgtcgctccgttccaggggctcaagtccaccgccagcctccccatcgcccgccgctcctccagaagcctcggcaacgtcagcaacggcggaaggatccggtgcatgcaggtgtggccggcctacggcaacaagaagttcgagacgctgtcgtacctgccgccgctgtcgacggacgacctgctgaagcaggtggactacctgctgcgc

SEQ ID NO: 31790 - DNA, 293 bp, Zea mays
cgaccgtgggaagataagctccttggtgatgtccaagtatacccagagaaggggacagttaccttttctgctggtctgcatggatgggcctttacactcactaactttgcgaagatgtatgcatctaagtttggagttgatgaatctaagatgatggagaggctatggggtgagaatttctttgaccctgccacaaagaaatggaccaccaagaacacaggttctcctacctgcaagagaggatttgttcagttctgctacgagccaatcaagcagatcatcagaacctgcat

SEQ ID NO: 31791 - DNA, 300 bp, Zea mays
ctcctctctcgcatccgcagcctctcgagctctactccatcccctcgatctcgaagcgcacagtcagcagtcaggcggccatggacgcgagcgcagccggagccggcgggaaggcgaagaagggcgcggccgggcgcaaggccggcgggccgaggaagaagtcggtgacgatgtccgtcaaggccgggctgcagtttcccgtcggccgcatacggcggtacctgaagaagggccggtacgcgcagcgtgcggcacgtgcgcccccgtctacctggccgccgtcctcgagtacctggccgc

SEQ ID NO: 31792 - DNA, 264 bp, Zea mays
gcaaaataaaagccaggcggcggcatatggcgctcagcaaggagcaaaaactcacaattcctgatcaacaacacacaacaagcagcgaacagcaggtggcgctggatgccgagctccagctgtggaaccacactttcggctacgtcaagtccatggcgctcaaggccgcgctcgacctcggcatacccgatgccatccaccagcacggcggctcggccaccatcccacagatagtcaccaggatcacgctccacccgtccaaga

SEQ ID NO: 31793 - DNA, 261 bp, Zea mays
gctcgtgctctggctcaatggagggcctgggtgctcatccgtgggagtgggggcgttctcagagaatgggccgttcaggctgagcggcaatgcgctaacgaggagcgagtacagctggaacaaagaggccaatatgctgtatctggagagccctgcaggggttggcttttcatactccactggtcctgccgtctacttgagatgaggtggagtggtgttggcattgatgaatggtggaggaacgagcagttctgggtcatt

SEQ ID NO: 31794 - DNA, 267 bp, Zea mays
cccacgcgtccgccactccttccctgccctctcactcccgatccctcctccaccaccgcttcctccgcgtcacccctctcgtcgtcgcctcacgaggcgaccagcggcggaccctccgcggcgcaaccatggggctcttcactgtgacgaagaaggccaccacgcccttcgacggccagaagcccggcacctccggcctccgcaagaaggttactgtattccagcagccccattatctgcagaactttgtccaatcaacattcaatg

SEQ ID NO: 31795 - DNA, 268 bp, Zea mays
cattggcatatgcagctggtccaaactttgcaaaatacatggcacagttttatcagtatttggagatgggtcttcagaactttgaggagtatcaggtgtgtgccattaccgtgggcgttgttggtgacctctgtagagcactggaagacaaaattttgcccttctgtgatggcatcatgactcaactcctgaaggacctgtccagtaaccagttgcacagatcagtgaaaccaccaatattttcgtgctttggtgatattgcactggc

SEQ ID NO: 31796 - DNA, 270 bp, Zea mays
ggcgtcgttcgggcccgtgggcgcagtgctgctggagaacgagcaccacaaggagatcttcatcagggagatcaagctcgtcacgggcagcgacagcagcaccgccgtcaccttcggctgcaactcctgagtgcactccaagttcgacaacccggagaagcgcatcttcttcaccctcaagtcctacctgccgtccgacacgcccaagggcctggaggacctgaggaagaaggacctgcaggcgcttcggggcgacgccacggcgagcgc

SEQ ID NO: 31797 - DNA, 270 bp, Zea mays
gttcgatctgtgcagcagatctgaggtcccgggcgaccgtgaagcagcttcaatcgtcggcatggcgctcgtattgcatagtggggctggaaacaagaatgccttcaaagcacttattgctgcagaatacagtgggatcaaggttgagttgaccaaggattttgagatgggtgtctccaacaagacccctgagtttcttaagatgaacccccttgggaaggttcctgttctggagactcctgatggccctgtttttgagagtaatgctat

SEQ ID NO: 31798 - DNA, 253 bp, Zea mays
ggacgtggggaccagtccatcccctcgctcgctccccaactccagcaggcagatcaactacatccatccattcgcggaccggaagcaggaaaggaagggttgaactatgagcgccgtggcggtttcgtcgtcgctgaacccggacgcgccgctcttcatcccggcggcgctgctgcaggtggaggacttctcgccgcagtggtgggacctcatcaccaccactgcctggttccgcgaccactggtcccgcgag

SEQ ID NO: 31799 - DNA, 260 bp, Zea mays
  unsure (1)..(260): unsure at all n locations
cccacgcgtccggtggacacatggtgctgaaacggaggatggactatgaggaggcatctgaaacctccgcgtggaaactcctcgctgaggtctctctctccgaggagcgcttcgaggaagtgaaggcgtacatcttcagcgctgctggcctggttcagtatgatgaggaagaggaggaagccagcgacggtgagggccctacggcctatgttcctgtcanagttacccctctgcccgtcgctgaagggtgcctcgtcctc

SEQ ID NO: 31800 - DNA, 257 bp, Zea mays
ggttcacagtcacatcccttatcaatgtgctcttcacatactctaggcctctcttgcccaagatgcactacgcacagcctctgtcaatagttcagcaggaaatgctccgccaccaagctgtgctgcttgttgcgcacgcctgggacgcatggagccaccagtccgcatggaagttgttgagtttatgtcagatgctcgctctcacctgtggagcatgcgacggagcaaagctaacttcttccgccttatgcaagtct

SEQ ID NO: 31801 - DNA, 263 bp, Zea mays
ggacgtgggcgagacgcgtgggagcgcttctacgcggcgcactcggccacagcgatagggccgggatggatcagctggagatggacgaggaggtcaggcccgagttcccctgcccctactgctacgaggaccacgacgtcggatccctctgcgcgcacctggaggaggagcacccgttcgaaccccaagccgcggcctgccctgtctgctctgagatggttacgaaggatatggttaaccatattactacgcaacatggatat

SEQ ID NO: 31802 - DNA, 254 bp, Zea mays
aaattcctggagagatttgcttatatcaacacaacaatttatccactcacatcaatcccgctcctcctgtactgcatattgccagcagtttgtcttctcactgggaagttcatcatcccaaagattagtaacctagagagtgtttggtttatatcgctctttatctcaatctttgccactggtatccttgagatgaggtggagtggtgttggcattgatgaatggtggaggaacgagcagttctgggtcattgg

SEQ ID NO: 31803 - DNA, 257 bp, Zea mays
gggacgtggcgagacgctgggcggacgcgtggggtgaataagcttcttgatggcaaggatggtccctggacgatccatgttcctaccggggagaagctctatgtttacgacgcggcaatgaagtacaagtcggaaggtcatgacatggtcatcattgctggctccgagtacggcagtggcagctctcgtgactctgctgccaagggaccaatgctactgggtgtcaagtcggtgattgcaaagagcttcgagcggat

SEQ ID NO: 31804 - DNA, 261 bp, Zea mays
cccatcttggtggtgaggactttgacaacaggatggtcaaccacttcgtccaggagttcaagaggaagaacaagaaggatatcactggcaaccccagggctctccggaggctgaggaccgcttgtgagagggcgaagaggactctgtcttccactgcccagaccacgattgagattgactcgctgtatgagggcatcgacttctactccaccatcacccgtgccaggtttgaggagctcaacatggacctgttcaggaagt

SEQ ID NO: 31805 - DNA, 260 bp, Zea mays
atatattgtagaactataatcccattgccgcttcacacatctttgctgccttcgatacataaacagcacaaggtgtccaagaagcaggaggaggggctcgtcaccaacaagtacaagcccaaggagccgtacgtcgggaggtgcctgctcaacaccaggatcaccggcgaccaagcgcccggggagacgtggcacatggtcttcagcacagaaggcgaggtcccctacagagagggccagtccatcggcgtcatcgcgga

SEQ ID NO: 31806 - DNA, 318 bp, Zea mays
cccacgcgtccgcccacgcgtccgagaccgccagggtttcaggcttccacgaatctccccgccgccctcaattcccctcggcgccgcgcctcctcccctcgcttcggtcctcggttagttaaccatccaggttctgtcaagatgtctgatagccatgagactgacaggaacattgagatttggaaaattaagaaactgatcaaggcattggaatcagccagaggcaatggcacaagcatgatctctctaatcatgcctccacgtgatcaggttgctcgagtggctaagatgttaggtgatgaatatggtactgcttcg

SEQ ID NO: 31807 - DNA, 319 bp, Zea mays
gcggtgcgtgatggtgccaagccagccatcgcccgcgccgagccaaaggcccgggagctctacacccgctacgagcctgtggcagagcggcgtgccccgaggcctgggtggccctgaaccgtctccctctggtgccctcggtcaccagggccgtcctccccactgccgcacagctctctgccaggtacaattcggcggtgcgtgatggtgccaagcgcgggaacgccgtggccacctatctcccgctggtgcccactgagcggctcgcccgcgtgttcaggtaccccgtggctgacgttgctgcagcaccagagatgca

SEQ ID NO: 31808 - DNA, 320 bp, Zea mays
gagaagagctacgagctgcctgatgggcaagtgatcaccataggcgcagaggcttcagatgcccggaggtgctcttccagccatccatgatcggtatggaagctccaggaatccacgagacgacctacaactccatcatgaagtgcgacgtggacatcagaaaggacctgtacggcaacattgtcctcagcggtggatccaccatgttccctggcatcgctgaccgcatgagcaaggagatcaccgcgctcgcgccaagcagcatgaagatcaaggtcgtcgctccgccggagaggaagtacagtgtctggattggagga

SEQ ID NO: 31809 - DNA, 311 bp, Zea mays
cccacgcgtccgatcctttggtggggaagaaagtgtgctatgtacagttccctcagaggtttgatggtattgacaaaaatgatcgatacgctaacaggaacgttgtcttttttgacatcaacatgaaaggtttggacggtattcaaggacccatttatgtgggtactggatgtgttttcagacggcaggcactgtatggttatgatgctcctaaaacgaagaagccaccatcaagaacttgcaactgctggcccaagtggtgcctctcttgctgctgcagcaggaacaagattaaaaagagactacaaacc

SEQ ID NO: 31810 - DNA, 267 bp, Zea mays
cacgcacgcatacacagcacagagtgaggtaagcatccgataaaagctgtgatctgatcgacatggccgccgccaccatggctctcacctcccgcgcgctcgtcggcaagccggcgaccagcaccagggacgtcttcggcgaggggcgcatcaccatgcgcaagactgctggcaagcccaagccagcggtgtccggcagcccctggtacggggccgaccgcgtcctgtacctgggcccgttgtccggccagcccccaagctaactga

SEQ ID NO: 31811 - DNA, 316 bp, Zea mays
cccacgcgtccggaacggccggcgcaaccttgtcacagtgccgctaactaagtactccacattcccgcacagagctgatgcggactatggagcagccaaggtgatgctgaggcctgcttgccctggatctggtgtcattgctggtggagccgtgaaggttgtgctggagatggctggtgttgaaaatgctctgggcaagcagctgcgcacaaagaaccccctgaacaacgctcgagccactatcaaggcgacgcagatgatgaagcagttcaaggatgtcgctgaggagcgtggtattccaatggaggagctgtgg

SEQ ID NO: 31812 - DNA, 314 bp, Zea mays
ccctcaccaacgaaatcctcctcggcaaggcgctgaagcagctgccgcgggagcaggtgcaggtggccaccaagttcgggatacggcatgacgagagcggcacgcggaccgtgtgcggccggccggagtacgttcgcgcctgctgcgaggccagcctgcgccgcctcggcatcgactgcatcgacctctactaccagcaccgcattgacaccacaactcccatcgaggagacgattggcgagctcaagaagctggtggaggagggtaaggtcacgtacatcggattgtcagaggcgagcacggacaccatcagg

SEQ ID NO: 31813 - DNA, 310 bp, Zea mays
cccacgcgtccgcccacgcgtccgggcatgatcttcgtgctggtctactgcaccgccggcatctcggggggccacatcaacccggccgtcaccttcggcctcttcctggcgcgcaaggtgtcgctggtgcgcgcgctgctgtacatggtggcgcagtgcctcggcgccgtctgcggcgtcggcctcgtcaaggcgttccagagcgcctacttcgaccggtacgcgagggcgccaactcgctcgcgtccggctactcccgcgatggcgggctcggcgccgagatcgtcggcagcttcgtgctcgtgtacac

SEQ ID NO: 31814 - DNA, 311 bp, Zea mays
tccctttccccaactcgatctcgcacctagggtttcgtctcgccgctctcgtcctccgcgaagatgccgaagaacaagggtaagggaggcaagaaccggaagcgaggaaagaacgaggctgacgacgacaagcgcgagcacgtcttcaaggaagacgggcaggagtacgcgcaggtgacccggatgctcggcaacgggcggtgcgaggccatctgcgtcgatggcacgcgccgcctctgccatatccggggtaagatgcacaagaaggtctggatcgcggctggggacatcgtcctcgtcggcctgcgcga

SEQ ID NO: 31815 - DNA, 239 bp, Zea mays
tggacgcactggctaaaggtggccggcggcgtcttcttcaacttctgggtgctgttccacctctaccccttcgccaagggcatcctggggaggcacggcaagacccccgtggtggtgctcgtctggtgggccttcaccttcgtcatcaccgccgtgctgtacatcaacataccccacatccacggccccggcggcaagcacggcggcgcgatcggaaagcacggcgccgcccaccatgg

SEQ ID NO: 31816 - DNA, 301 bp, Zea mays
cggacgcgtggcgagacgcgtgggcggcagtgcaggatggctctgaggatgtgggcgagctcagccgcacaatgcgctcaagctctcggcgggcggcggcggagccgggctgctgctgccggcccggccttctctatctccaggttcttctccactgttcacgatgggttgaagtacactcagtctcacgaatgggtcaagacgacgggcgacgtcgccaccgttggcatcacggaccatgctcagggccacctgggagaggtggtgttcgtggagctgccggaatccggcacgaaggtcg

SEQ ID NO: 31817 - DNA, 301 bp, Zea mays
cggacgcgtggcgagacgcgtgggttcgcgtccaagcagtccctctcctacctcgatggcacgctgccacgcgactatggactcgacccgctgggcctctcggacccggagggcatcgggggcttcatcgagcccaagtggctggcctatggcgaggtgatcaacggccgctacgccatgctgggcgcggtgggcgccatcgccccggagatcttcggcaagatgggcatcatccccccggagaccgcgctgccgtggttcaagacgggcgtcatcccgcccgcgggcacctacaactact

SEQ ID NO: 31818 - DNA, 306 bp, Zea mays
gtcacccgcgcggcgatgctggtgcgcatcaacaccctcctccagggctactccggcatccgcttcgagatcctcgaggccatcacgaagctgctcaacaccggtgtcagcccctgcctgccgctccggggcaccatcaccgcgtcgggcgacctggtcccgctctcctacatcgccggcctcatcacgggccgccccaacgcgcaggccgtcaccgtcgacggaaggaatgttgacgccgccgaggcgttcaagatcgccggcatcgagggcggcttcttcaagctcaaccccaaggagggcctc

SEQ ID NO: 31819 - DNA, 303 bp, Zea mays
  unsure (1)..(303): unsure at all n locations
gaaagagatcacctctcataaagatgcatggccatttctggagccggtggatgttgtaactctacagcttcctgactatcacaacattattacccaacctatggacttctctaccatccaaaagaaaatggaaaggaaggatggtacttgttacaccaatgttagagaaatatgttctgatgttcgattaatttttgccaatgcgatgaagtacaatgatgatcaaaatgtcatccacttgatggctanatcattgcttgagaaatttgaagagaagtggctccattttcttcctaaagttga

SEQ ID NO: 31820 - DNA, 301 bp, Zea mays
ggacaaagttgtgcgggacaccaggggtggaggctcgtcacctgcatctggctgcacgccggtgttgcccaccttctggccaacatgatcagcctcgtgctcatcggactcagactggagcaacagtttggatacgtgagagttggcatcatctaccttgtctctggcgtcggaggcagcgtgctttcgtctctgttcatccggaacaacatctctgtcggcgcttccggagctctgttcgggctccttggggccatgctgtcggagctcttcaccaactggaccatctacgcaaacaagg

SEQ ID NO: 31821 - DNA, 303 bp, Zea mays
cccacgcgtccgcccacgcgtccgcacgacgcacgcagagccgcagagatccgtcacactgcaagttttgaaaactgaactgtaagatggcatcagcagagctttcccgtgaggaaaatgtgtacatggcgaactcgccgagcaggcagagaggtacgaggaaatggttgagttcatggagaaggtagcgaaaactgttgactcggaggagctcactgtggaggagcgcaacctcctgtctgttgcatacaagaacgtcattggagcccgccgtgcctcatggcgcatcatctcctccatcga

SEQ ID NO: 31822 - DNA, 113 bp, Zea mays
ctgctgggtcgactgttgatgttgttgcacagcacatggtcaatctgaaaacacctgctacaccgttctttttcaacacactctatgatccatacaggaaaggtgctgacttt

SEQ ID NO: 31823 - DNA, 113 bp, Zea mays
ccgggcgacaatgttggcttcaacgtgaagaacgttgctgtcaaggatctcaagcgtgggttcgtggcctccaactccaaggatgaccctgccaaggaggctgccagcttcac

SEQ ID NO: 31824 - DNA, 112 bp, Zea mays
ggcgaggcggtgtggttcaaggcgggctcccagatcttcagcgagggcgggctggactacctcggcaacccgagcctggtccacgcgcagagcatcctggccatctgggcgt

SEQ ID NO: 31825 - DNA, 112 bp, Zea mays
agacagacggttgctgttggagtcatcaagagtgtggagaagaaggacccgaccggtgccaaggtgaccaaggctgctgccaagaagaaatgatgcgacctgtcgttgatgc

SEQ ID NO: 31826 - DNA, 110 bp, Zea mays
ctcgctccgtgaaggccggcctccagttccccgtaggccgtatcggccgctacctcaagcagggtcgctactcccagcgtgtcggcaccggcgcccccgtctacctcgct

SEQ ID NO: 31827 - DNA, 105 bp, Zea mays
ggtgtggttcaaggcgggctcccagatcttcagcgagggcgggctcgactacctcggcaacccgagcctggtccacgcgcagagcatcctggccatctgggcgtg

SEQ ID NO: 31828 - DNA, 105 bp, Zea mays
gcccgaccatcgacggcggcgtggagtcgttcccgttcaaggccggcaagtaccagatgaagaagctgtgcctggagccgacgtccttcaccgtcaaggcggagg

SEQ ID NO: 31829 - DNA, 104 bp, Zea mays
ccctcacacactcactatacactgctctgctgcagcaagaaggaagaagctagcgcctccctagctctcgttgtcagcaatggccaccaccgccgcgtccagcc

SEQ ID NO: 31830 - DNA, 296 bp, Zea mays
gaacatgctctccttgcgttcacccttggagtgaagcagatgatttgctgctgcaacaagatggatgcaaccactccaaaatactccaaggcacgttatgatgagattgtgaaggaagtctcatcctacctcaagaaagttgggtacaaccctgataagattgccttcgttcccatttctggttttgagggcgacaacatgattgagaggtccaccaaccttgactggtacaaaggcccaaccctgcttgaggctcttgaccagatcaccgagcccaagaggccttcggacaagcc

SEQ ID NO: 31831 - DNA, 296 bp, Zea mays
gtgttattgatggttctctatacagaacaaagcagaagagatgacttagagtctcttggttatgtgctgatgtacttcttaagaggaagccttccttggcaaggcctgaaagctggaacaaaaaaacaaaagtatgacaaaattagtgagaagaaaatgctaacctcaattgaggccctttgtaaatcttatccatcagaattcattacgtacttccattattgtcgctctttgcgttttgaagataagccagactatagctatttgaagaaaaatttccgggatttattcatccg

SEQ ID NO: 31832 - DNA, 291 bp, Zea mays
ccacgcgtccggttgccctcaagctcgcggcgtacaagactttctctgaccactcgcccgtgctccagttcaccaacttcaccgcgacacaggcacttatcgacgaaattgcccgcagcacatcgtcctgcatccatgtcatcgattttgatcttggtgttggaggccaatgggcttctttcttgcaggagctcgcacaccgccgtggcgcaggcggtgcggctctgcgtccgtgaaactcactgcctttgtatcagctgcttcccaccatccactggagctgcgtctcac

SEQ ID NO: 31833 - DNA, 252 bp, Zea mays
cttttctcgtttagaacctctaaaatttcccccactcgccagtcgcagcagcacctgtagcagccatggacgccagcggaccggtagcaaggggaagaagggggcggccgggcgcaaggcaggcggccccaggaagaagtcggtgacgcggtccgtcaaggccgggctgcagttccccgtcggccggatcgggcgctacctcaagaagggccggtacgcgcagcgtgtggcactggcgcccccgtctacctc

SEQ ID NO: 31834 - DNA, 277 bp, Zea mays
cggacgtggggtattttgtttctggatcagctagtcagaattttactcttctgcaagaattctaccagacaacactgaaagcgcttgaagaagcgaaaaatgagagattatggttcaagacaaacttgaagctttgcaaaatttggtttgatataggcgagtacggtcgcatgaacgagatattgaaggaactgcataaatcttgccaaagggaagatggttctgatgatcaaaagaaaggcgcacaacttttggaagtctatgctattgaaatacg

SEQ ID NO: 31835 - DNA, 292 bp, Zea mays
gcagctgttctcggccatggtggtgcgcaggccggcgccctgttcctggacgagctgggcgtgggctacgacgaggccgaggactacgtggtggtcaagcacgcggcgctgttcacgtccaccgtgatgagccggctcctggcgcggcccaacgtgaagctgttcaacgccgtggcggtggaggacctgatcgtgcggcgggggcgcgtcggcggcgtggtcaccaactgggcgctcgtgtccatgaaccacgacacgcagtcgtgcatggaccccaacgtgatggaggcca

SEQ ID NO: 31836 - DNA, 284 bp, Zea mays
gcgctgccagcagtcggagcacttgtgttgcatgggttccagagcgtgaaggaatttttgttgttagtcatgctgatgggaatctgtacgtgtatgacaaatgcaaggatggaaatactgattggacatttccaactgtaaaggatcaaagtcaggtgctgatttcacatgcaaagtcgagtaagagcaatccaattgcaaggtggcacatctgtcaaggtgcaatcaatgacatttccttttcaccggatggtgcttacttggcaactgttgggcgtgatggc

SEQ ID NO: 31837 - DNA, 282 bp, Zea mays
accgaggtcgcgccgcgcgcttgccgtcacgatggccgcgtcgctgctcgtgctcgccgtggcgttcctgcttggcgctggccacggcggcatcgatgggggtgcagcagctcacgtggaggtagagggctctgaggtgacctacgggagtgtgattaagctgttgcacgagaagacaaagcaccgtctgcactcacatgatgtgccgtacggctcaggcagcggtcagcagtctgtcaccggctttcctgaaggcgatgactcaaatagctactggatcat

SEQ ID NO: 31838 - DNA, 283 bp, Zea mays
ggaagcaccttgagaggaacaggaaggacaaagactctaaattcaggctcattcttgtggagagcaggatccaccgccttgcccgctactacaagcgcacaaagaagcttccacccacctggaagtatgagtcaaccacagcgagcactctggtggcctaagtgtggtatcctccgacagcttgttctagatatgaatttgtgtaatgcttattatggctcgagccggttaaatggacaacggacctcatctttttttatgtttaccttgagaatcccgtaaa

SEQ ID NO: 31839 - DNA, 280 bp, Zea mays
gcatctctgacggtattgaggcactgattgctgagggggctgttgagatgattgtgcctggtgtcatgcccacgggctgcttcccagtttacttgaacatgcttgatgagcccaaagaaggatacggcccccacagtggttgtgtccgccggtacaacacattctcctgggtgcacaatgcacatcttaaggccatgcttgagaagctccgggctaagcaccccaatgtgaggatcatatatggcgattactacactccagtcgtccagttcatgcttca

SEQ ID NO: 31840 - DNA, 280 bp, Zea mays
cccacgcgtccgcttccattgaagagtacatcattggacctgccaccgaggcagccgatgatcttgttactgacggtgataaggaacaaatcacactttatgggcctgaagaaggccagtcatggattgctcgaccttctaagggacccagcatgcttggaagtgtgctttctcttgcatctcgtcatgggagcatggtgaaccagagtgtaccccttatggatccgattgtgacactttttggtagtgtccatgagaatatgcctcaagctggaggaag

SEQ ID NO: 31841 - DNA, 277 bp, Zea mays
gcaatcggcccatttctattctgtggatataactgaaaaacaagctaaaatggggctagtttgtcgtgttcactcaaacgataaaagcaaattcaagttgctatattttgagcttgaagaaaatggcgggcttagtcttgcactacaggaagacagtgtgaaggttgggaaagttactgctgcagggatgtatttccttggttttcctgtgtaccgttttgaacaaaataacctggcagctgctgcaaaagattctgatggtgcattctttaaaaga

SEQ ID NO: 31842 - DNA, 283 bp, Zea mays
agttcctgcacgtacgcacgcaccgggacaccagcaacccccaacagcgccactgtccagtgcgcgcgtcaagcttgcttagctagccgccatggcctccctcgccgccgtctccgtgaagcccgtggccatcaagggtctcgccggcagctccatctccggaaggaagctcgccgtcgccaggccgtcggccgctccatccgcagccccgcgcagcgccgtggtggccaagtacggcgacaagagcgtctactttgacctcgacgacatcggcaacaccacc

SEQ ID NO: 31843 - DNA, 319 bp, Zea mays
ctgaccccgctaacgccaagaagatgaggagaatggtgtcaaaccgggaatcggctaggcgatcaagaaagaggaagcaagcacacttgaccgatcttgaatcacaggtttccaggttaacgtctgagaatgcatctttgctgaagcgactggctgatatgactcagaaatacaaggacgcttccgttgacaataaaaatctaacagttgatgttgagactatgaggagaaaggtgaacatagccgaggaagctgtcaggaggctaactgggatcaccctcatgctaccgaccgcttttgagaagcccacgagcagcgc

SEQ ID NO: 31844 - DNA, 315 bp, Zea mays
accacgcgtccgcccacgcgtccgcccacgcgtccgcggacgcgtggattttccctttgaaatacagagaagggggtgttctgaaacgagctggacacaccgaggcatctgttgaccttgccatgttggctggattacctcctgttgctgtcctttgtgaaattgtggatgatgcagatggttctatggctcgcctaccaaagttacgtgtctttgctgaaaaggagaacttaaagattatatctattgctgacttgattaggtataggaggaaaagagacaggctaattgaacgcgcttctgttgcacgcttgc

SEQ ID NO: 31845 - DNA, 314 bp, Zea mays
gccggaccggccggtgaccgtgcggcgctgaggcgcgcgctatataaacagagccatccattcctctcttaccgttcagtcccacctcgaccgcctcctctcccctcccccggctctgtctgttgacttaccccgtcgagctatctagtcagctgctcccgttgccatggggaaggagaaggttcacatcaacattgtggtcattggccatgtcgactccggcaagtccaccaccaccggccacctcatctacaagcttggaggcattgacaagcgtgtcatcgagaggtttgagaaggaggctgccgagatga

SEQ ID NO: 31846 - DNA, 310 bp, Zea mays
gcgagatcccgcagtggagcaagctgctgggcggcgtcttcttcagcttctgggtgctggcgcacctgtacccgttcgccaagggcctgatggggcggaggggccgcacgccgaccatcgtcttcgtctgggcgggcctcctctccatcaccatctcgctgctgtgggtggccatcaacccgccgtcccagaaccagcagattggtgggtcgttcacattcccgtgaaagctctctgggccaatggcggattcatgcatgcttcgtcgcagtgggatccttgcgttgctctgcatcagttcctggttgca

SEQ ID NO: 31847 - DNA, 309 bp, Zea mays
cccacgcgtccgcccacgcgtccgcttttggtcgtccatgagagccagttgggaatctatgatgggaatcttgactgtttgcgcttgtggtctccaagagatgcactcccagctccgatatcgagtgcgatatactcgtgcgacggtctcttggtttacgctgggttctgcgatggtgctatcggagtcttcgaagcagaatctcttaggctgcgttgccggattgctccttccgcttacattccaccttcaatactagcctgtgctggacgggtctacccgttggtagtcgctgcacaccccatggag

SEQ ID NO: 31848 - DNA, 84 bp, Zea mays
gctagcgcttatagcttgtcagccatggccaccgccgccgcgtctagcctcctcaagtcctccgtcgcgggctcccggctcccg

SEQ ID NO: 31849 - DNA, 304 bp, Zea mays
cgcacgctccgcccacgcgtccgggacctggccgcagtgcaacgtcggtatgttcacgcgcgccgagctgctggaggccagcgtggaccttcgtcatcacgccctcggctacgtcaagtccacggccctccggtgcgctgtcaagctcggcgtcgccaacgccatccagcgccgtggcggcagggcctccgtcgaggacctgctcaccgagctctctctggacgcaagcagactccgctgcctgcacagcgtcatgcgcgcgctcgccgcgttgggcgtcttcaaggaggggagcgacggcgag

SEQ ID NO: 31850 - DNA, 306 bp, Zea mays
gccgccgccgctgcagtgtccatagccaccgcagagactgagatggggggttttgtcaagacccacaagagcaatgcatacttcaagcgtttccaggtgaagttcaagagaaggcgcgctggcaagacagactacagggccaggataaggctgattaaccaagacaaaaacaagtacaatacacccaaatacagatttgttgtgcgatttaccaacaaggacatcacagcacaaatcatatctgctagtatagcaggtgatatggttcttgcttctgcttactcgcatgagttgccacgatatggt

SEQ ID NO: 31851 - DNA, 302 bp, Zea mays
gctgtttcttgcagagtggtcatcgacaacgactcgtgtggcaacgcaactgtcatccgggttgatagggtcaataagcatggcattttactggaagcagttcaggtccttgtcgatctcaacctcgtcatcaccaaggcttacatttcttcagacggcaactggttcatgcatgtgttcaatgtgaccgatcaggacgggagtaagcttcataacagggaggtcattgaccatattcagaaatgcctggaatcagacggctaccttgttcctccggcgaacggttatgcgctgccggaaga

SEQ ID NO: 31852 - DNA, 303 bp, Zea mays
  unsure (1)..(303): unsure at all n locations
cggacgcgtggcgagacgcgtgggggcgcagagaatccccaagcaaacaaacagggtagatggagatatgattagacnaaccgagaggttgggtctgggacaccatggctccgatgaagctgtacggggcggtgatgtcgtggaacgtgacgaggtgcgcaacggcgctggaggaggctggctccgactacgagatcgtgcccatcaacttcgccaccgccgagcacaagagccccgagcacctcgtccgcagaccgtttggtcaggttccagctctgcaggatggtgacttgtacctcttcg

SEQ ID NO: 31853 - DNA, 311 bp, Zea mays
cggacgcgtggcccacatcaacattgtggttattggccacgttgactctggcaagtcgaccaccacaggacacctgatctacaagcttggaggcattgacaagcgtgtgatcgagaggtttgagaaggaggctgctgaaatgaacaagcggtccttcaagtacgcatgggtgctcgacaagctcaaggctgagcgtgagagaggtatcaccattgatatcgctctgtggaagtttgagaccaccaagtactactgcacggtcattgatgcccctggacaccgtgacttcatcaagaacatgatcactggta

SEQ ID NO: 31854 - DNA, 310 bp, Zea mays
cagtaatggatgactcacttgctgtaaagcttcttccaggatgcactacaatagacgaggtacgagagcgtattttgaacagatgtaaagaagtggagaagacggccatagaacaagcaacagacaacgcgatccttgaccagctcgggaagttggtcgaggtcgacgtccctcgtgccttgtttcaagagcaaggccagcagctttatggagccaagcttctgcagcttcaggcggaaaggaagctggataaagaccagctagcttcgttatcaaccaagaggtcagtgcaggcgtacctagaagatga

SEQ ID NO: 31855 - DNA, 308 bp, Zea mays
cccaaaatagcaatcagctcatctgtcagcgccacaggtgaccggaaaaccactgccggcgttcctgcttctctacccggtccgaattgctgaccggatcaacccgagaccttgcaggattatcgatctgattgcggcattatccgcttcatcctgctgcagaaccggcaggggaatactcgactggccaagtattacgtcccgctcgaggactcggaaaagcacaaggttgaatacgaggtacaccggctggtggtcaatcgggaccctaagttcaccaacttcgtcgagtttcgcacacacaaagt

SEQ ID NO: 31856 - DNA, 298 bp, Zea mays
cggacgcgtggtgaggatggtcatttgagctagcatatatttcaaacttatacttttgtaatcactcacgataaaataatataaaatttttgtaacttgtaaaatttggtagtaagattttccgctgcaaaaatattggtgtgtgtgatttgtattacttaatccgcggttctggttgaaagtggtttatccgatgtccttggggcaatcggacagatcctgttaagctatctggtgcacatgcatggccgtctgaggtctttggaagaaagacaggtacatgtgggcccaataactt

SEQ ID NO: 31857 - DNA, 306 bp, Zea mays
ggagattgttgaggtagttgctgaccaagttgcagtcgctctgtcacatgctgcactcctagaggagtctcagctgatgcgagagaagcttgccgagcagcatagggacttgctgcaggcaaaggatgaagccatgagggcaggggacgctaggaattccttccagactgcaatgtacgatggaatgcgaaggccaatgcactcaatccttggtctcgtctcaatgatgcaacaggagagcatgaatccagagcaaaggcttgtgatggatgccattgccaagacaagcagtgttgcatccacact

SEQ ID NO: 31858 - DNA, 299 bp, Zea mays
cccacgcgtccgcccacgcgtccgcccacgcgtccgctttcgtcatctcttctccggcgaagaacccccagtcgcccaccagatcacttgttaaactttgttgaggggtgatggcggtttctttcgcaaacctcaactccgaggcagggcttaaaaagcttgatgagtaccttctcactcgcagctacatcactggctaccaagcttccaaggatgacttggctgtctacacttcgttttcggctgctccctcgtccaagtatatcaacgtagcaaggtggtttaaccacattgatgcg

SEQ ID NO: 31859 - DNA, 299 bp, Zea mays
cttgagcgacttatctcgagttaccagtgtcgcatccttctttgtcagtcgagtcgacacccttatcgacaaaatgcttgagaagattggaacacctgaggcacttgccttgagagggaaggctgccgtcgcacaggccaaactagcaaatcggctctaccagaagaaattctctggcccgaagtgggaggcgttggccaagaaaggtgccaagaaacagaggttgttgtgggcgtccaccggtgtcaagaacccagcttatcccgacactctttacatcgacagtctcattggacctg

SEQ ID NO: 31860 - DNA, 300 bp, Zea mays
cggacgcgtggcgagacgcgtgggcggacgcgtgggcggacgcgtgggcagcagaagaagcttaacctacccatccttccagccactacaatcggttcgttcccacaaaccgttgagctcaggagggtccgccgtgagtacaaggcaaaaaagatctctgaggaggaatacgtcactgccatcaaggaggaaatcaacaaggtcgttaagctccaagaagagcttgacattgatgtgcttgtgcatggcgagcctgagagaaacgatatggttgagtacttcggtgagcagctctccggt

SEQ ID NO: 31861 - DNA, 242 bp, Zea mays
gtgggaagaaggtcctactgtggtggcttcgtgttgaagcacgggctgatagcaagtttcctgaagggtgggtaattgagccacctttggaagtcgttgtccctgcaaagcgcactccatggcctgaaacaaccaccgagctgccagccgagttattggatgacaagcaagagcaggaggataggcgcttgtcaagagccaacaaatcatctcggccccgagcacacgaagcggaagggcga

SEQ ID NO: 31862 - DNA, 337 bp, Zea mays
ggagaacctggagaaggctagagctgccttcctcgccaggtgcaaggccaactctgaggctaccctcggcacctacaagggtgatgctgccgccgacaccgagagcctccacgtcaaggactacaagtactgagttgcttctctttgcgtgcccgttttggaactcctgcctacgagctaggttgcggagtgtggtttgctcgttagagcttattttcggacatccaaaaaacatgcttcctatgtgggatgatggttatctttatatttgtatgttaattagtctctttgctgttaaatttcgtgtaagttggtcctgccgatggagaatcgagca

SEQ ID NO: 31863 - DNA, 328 bp, Zea mays
tgactccttcgcttctcctctccctcctgctggtggcggcgaggtgctgccatggctggtcgtcgttccagaagccggcggtgactgcggtgatcgctttcggagactccattgtggacccggggaacaacaacgggctgcatacggtgatcaaggccaaccatccgccctacggcaaggacttgttcaaccacgaggccaccggacgctactccaacggcctcattccaaccgacctaattgcccaggagttgggtgtgaagctgctgcttcctgcctacttgggcgtggatctgagcccggatgacctgctcatcggcgtcacttc

SEQ ID NO: 31864 - DNA, 333 bp, Zea mays
caccgagccgcgtcttgtggaagttgaccaaatctatcaccttgcttgccctgctgcaccaatcttctacaagcacaaccctggttaagaccatcaagacaaatgttattggtaccctgaacatgctaggacttgcaaagagagttggagctaggattttgttgacatcaacctctgaagtgtatggtgatccacttgagcatcctcaaactgaggcctactggggcaatgttaacccgattggtgttaggagttgttatgatgagggtaagcgtgtagcagatacgctgatgttcgactatcacaggcagcatggcattgaaatccggattg

SEQ ID NO: 31865 - DNA, 331 bp, Zea mays
agaaaaaagaacatatttaagctgtcgcaaggggagtatgttgcggttgagtacctggagaaagtttatggcttccctccactcgttgaagatatctgggtatacggggacagtttcagatcaagtttagttgcagtagtcaatccacaccaagaaaacacaatgaagtgggcagagtccaatggctacaagggttcttttgatgaaatctgcaaacttgaaggactcaaagagtacatcctgaaagagctggcagccgttgcgcagaagaacaagctacgaggcttcgagtacatcaaaggcgtagtgttggatcctgtgccttttgaca

SEQ ID NO: 31866 - DNA, 231 bp, Zea mays
caccgagccgcttcttgtggaagttgaccaaatctatcaccttgcttgccctgcttcaccaatcttctacaagcacaaccctgttaagaccatcaagacaaatgttattggtaccctgaacatgctaggacttgcaaagagagttggagctaggattttgttgacatcaacctctgaagtttatggtgatccacttgagcatcctcaaactgaggcctactggggcaatgt

SEQ ID NO: 31867 - DNA, 329 bp, Zea mays
ctcgttctcgccgcgacgaataggcctttcgaccttgatgaagccatcatcaggagattcgagcgcaggatcatggttgggcttccaactctggagagcagagagctgatcttgaggacgctgctttcaaaggagaaagttgatgaagatattgatttcaaggaacttgcggccatgacggaaggatacagcggcagtgatctcaagaatctctgtgtgactgctgcttaccgccctgttagggagctcctgaagatagaaagagagagggaactggagcgaagggaaaaggagtccaaagacaaggcggcggcggcggagaattcaga

SEQ ID NO: 31868 - DNA, 333 bp, Zea mays
ctactggatcgtgaagaactcgtggggcacccagtggggcgaggccgggtacgtccggatggcgcgcaacgtcagggtgagggccggcaagtgcggcatcgccatggagccgctgtacccggtgaaggagggcccgaacccgccgccgggcccgacgccgccgtcgcccgtgaagcctcccaacgtgtgcaacgcggagtactcgtgcccggaggccaccacctgctgctgcgtctccgagtaccgcggcaaatgcctcgcctacggctgctgcgagctggagaacgccacctgctgtgaggaccactcgtcctgctgcccgcacgactaccc

SEQ ID NO: 31869 - DNA, 329 bp, Zea mays
cgccgatgtgctggaggcgctcggggtcaacatcgagcttggacccgagggtattaaacgatgtgtcaatgaggtgggtgttggattcatgatgtctgcaaattatcatcctgcaatgaaaattgtcagacctgtgaggaagaagcttaaaataaagacagttttcaatatccttggtcctctactgaatccagcaagggtgcctcatgctgttattggtgtttaccatgagaatatagttaccaagatggctaaggctgctcagaaatttggaatgaagagagcattggtcgtccattcaaaggggttggatgaaataagcccacttg

SEQ ID NO: 31870 - DNA, 320 bp, Zea mays
atgagctccgcgtcgctgcccatgcgccggaatgccacctccgacgacttcatgtccgccgtctccttcaggacccacgctgtcggcacgagcggcgggtcgcggcgggcgccgacggaggcgaactgaaggtggccatcaacgggttcggccgcatcgggcgcaacttcctgcggtgctggcacgggcgcggcgacgcctcgctcctcgacgtcatcgccatcaacgacaccggcggtgtcaatcaggcgtcccacctgctcaagtacgactccacgctcggcatcttcgacgccgacgtcaagcccgtcggcgacaat

SEQ ID NO: 31871 - DNA, 305 bp, Zea mays
ggaccgtggtcagtggtttgttgcttttgtattcttcccttggggatgctgaaggcattaacaaataggcatctgtagccaaagaacaaggaaagaacaatgttgctttcctttgtttcttcatgctaggaaagctggaagagtgtcttcaattgctaatagaaagcaatcgtattccggaagcagcattgatggcaagatcttatcttcccagcaaagtccctgagattgtagcattgtggaaaaaggatctccagaacgtaaactcaaaagcagcagagtcgctggctgatcctaatgagtac

SEQ ID NO: 31872 - DNA, 314 bp, Zea mays
acacgctccactaaccctagcgacagctcgggtcgtcgtttgatccccgcggggagctctagttccgccaagcgtgcgtaccggcgtccggatccgggaccgaagatgacggagtccctggtgcggaacaagccggggatggccagcatcaaggagatgccggtggtgcatgacgggccgccgccgggcggtttcgcgcccgtgcgcttcgcccgccggatccccacctcggggcccagcgccaccgccatcttcctcaccaccttcggtgctttcgcatatggcatgtaccaggtcggccaggggaacaaggt

SEQ ID NO: 31873 - DNA, 322 bp, Zea mays
cctctctccatctccctgctcctccgcctccttcttgatccagccaagccagggatcgccatgtcggactcggaggagcaccacttcgaatcgaaggccgacgccggagcgtccaagacctacccgcagcaggctggcaccgtccgtaagaacggcttcatcgtcatcaagaaccgcccctgcacagttgtggaggtttctacctcaaagactggtaagcatggccatgccaaatgccactttgttgccatagacatattcaacgggaaaaagcttgaagatattgttccttcatcacacaactgtgatattccgcatgtga

SEQ ID NO: 31874 - DNA, 313 bp, Zea mays
gttggcttcaacgtgaagaatgttgctgtcaaggatctgaagcgtgggtttgtggcctccaactccaaggatgaccctgccaaggaggctgccagcttcacctcccaggtcatcatcatgaaccaccctgggcagattggcaacggctatgcccctgtgctggactgccacacctcccacatcgctgtcaagtttgctgagctcattaccaagatcgacaggcggtctggcaaggagcttgagaaggagccaaagttcctgaagaacggtgatgctggtatggtgaagatgatacccaccaagcccatggtgg

SEQ ID NO: 31875 - DNA, 243 bp, Zea mays
ggcggcgtcggatgttgagtaccgctgcttcgtcggcggcctcgcctgggccacggacgaccactccctccacaacgccttcagcacctacggcgaggtcctcgagtccaagatcatcctcgatcgggagacgcagaggtcccgcggcttcggcttcgtcaccttctccacggaggaggcgatgctgaacgccatcgagggcatgatcggcaaggtgctggacggccgcaacatcaccgtcaa

SEQ ID NO: 31876 - DNA, 318 bp, Zea mays
cggacgcgtgggcagcataactgggaatgattttacgttccctgttgggggaagttgtgaagatgatgatgtacttacagagtcaaaaataaaggcatttcttgaggagaaggctcttgacctgaaaaagctacaaacacctttgtatgaggagttctacaacactgtgcatggagggagttttcagggagctgatcaaacttccaagggaaaactcccaattagtccaaaattgccccctcgaggaaagtcgcctccatgcaagacacgtgtaggtgcatgtgatacttcgaatgacacagctcctgaaagctgcag

SEQ ID NO: 31877 - DNA, 314 bp, Zea mays
cttgagggcatcctggaggacgtgggcatcaacgatcccgccagctgcagcgacgagatcgagaccctggagcgggagatcggcgaccggtcggagaggtggacgtcgtcgatgatcgccctcgtcggcctcctccgctacgccaagtgcgtcctcttcagtgccgccacgccgcggcccgtggactccaaggtggatctcgacgacgcggaccaccgtcgccgccgccggacttccggtgccccatctccctcgagctgatgggcgaccccgtcgtggcttctagcggtcagacgtacgaccgtgactccatc

SEQ ID NO: 31878 - DNA, 314 bp, Zea mays
ctctcggccaggtctccctctccccggctctccgccttcctcttccagtccccgcgcgcgagatcgccgccccgtgtgggccctagatcccgatggcctcgcgccgccgcaccctgctcaaggtcatcatcctcggcgatagtggggttgggaagacttccttgatgaaccaatatgtgaacaagaagttcagcaatcagtacaaggctacgatcggcgcggatttcctcaccaaggaggtgcagttcgaggacaggctcttcactctgcaaatatgggacactgctggccaggaaaggtttcagagtctcggc

SEQ ID NO: 31879 - DNA, 309 bp, Zea mays
cggacgcgtggcggacgcgtggggccacaactccggccagaagctagctagccaagttattagctagtacatactagtgaccggccggacacgatcgatgggcaggccgccgtgctgcgacaaggcgggggtcaagaaggggccatggacgccggaggaggacatcgtcctggtgtcctacgtccaggagcacggccccggcaactggcgcgccgtgcctgtcagcacgggcctcatgcgctgcagcaagagctgccgcctccgctggaccaactacctccgccccggcatccggcgcggcaacttcac

SEQ ID NO: 31880 - DNA, 312 bp, Zea mays
atgtcctggacaagaccgggatgaatggaactgggaaatggacagtccagcaggctgctgagctttctgtagctgctcctacaatcgaggcgtccttggactccaggttcctcagcggtctgaaggacgagcgcgttgaggcttccaaaatcttccaaggtgactactccactggcctaccggtggacaaggcacagctgatcgaggacgtgaggcaagctctatatgcctccaagatctgcagttacgcgcagggcatgaacatcatcaaggccaagagctcagagaaaggatggggcctcaaccttggtg

SEQ ID NO: 31881 - DNA, 310 bp, Zea mays
  unsure (1)..(310): unsure at all n locations
gctgtcattgggatcatttaaaactggagccattctcttgggtggactttttgtgtatgacattttctgggtgttcttcactccagttatggtcagtgtggctaaatctttcgatgctccaataaagcttctgtttccaactgcagacgctgaacggccattctccatgcttggccttggtgacattgtaatacctggtatattcgttgnacntgncntgcgntttgatgtctcaagaggtaccaagaagcgttacttcaaaacgcaaggcaagtgcgacgaatataccaggtattacaatgtcacacaa

SEQ ID NO: 31882 - DNA, 282 bp, Zea mays
gaacactcctagctgaagatctcgagtgcaacgcaacgttggcgcttagcggccagtagtagcagcaaacttagcgtcgctccttcctactagacgagagatcgagaaaccatggccaagctccaagtcactcctggcgccgcgttcaccgagtgcaatgaactcaacttccagggcctgtacatgtaccacacgcccctgggtcgcaaggccaaccaagctgcgatcctagagagcaaggccaagatcggcatcggtgccaccgttgttaacaactgggca

SEQ ID NO: 31883 - DNA, 308 bp, Zea mays
aaagatagtgagcagctggctatgatgattgacagtgttccctcagttgacaacttggacttcatcatggagagtgatgcacttggccacactgtcatggatcagttgcagggacatgaaagtttgcttgcagttgctgaaactgtcacccttgaagaggtcaacactgttggcgcggaagtattggagttcatttcagattttggaaaactcaatgctccccttcctgctgctattgtggcatgtgtcccccaaaaggtgcatgttgatggcgcaggtgaaactgaattcgagatatatccagaaga

SEQ ID NO: 31884 - DNA, 308 bp, Zea mays
gtattgttgtcgtgaatgtcataaattatgcaaattcacttggcgaaagagtgtcatactacaatttcacaagaacaacccctaaaactcaacacataataacaactacagagcatttcgctttgagtaaacaaggaaaattctcgtggtggatatgatatatccagtttactcaatgattttgttgatgacaccagcaccaacagtcttaccaccctcacggatagcaaacctcataccctgctcacaagcaacaggctggatgagctgaacaaccatcttgatacggtcaccaggcatgcacatct

SEQ ID NO: 31885 - DNA, 311 bp, Zea mays
cgccataactatgtccgcaaaacagctgaacttgctacccagtttttcatcaatccagctactagtcagcctaatgttgcaggattgattcttgccggttctgcagattttaagactgagctgagccaatctgacatgtttgatcagcgactccaagccaagatacttaatgtggttgatgtttcgtatggtggcgagaacggtttcaaccaagctattgaattatctgctgagattctagcaaatgtgaaattcattcaagaaaagaagttaattggcaagtattttgaagagatcagtcaggatactgg

SEQ ID NO: 31886 - DNA, 333 bp, Zea mays
  unsure (1)..(333): unsure at all n locations
gtacgccgcagtacggtcggaatccgggtcgacacgcgtccgcgagctgcggacgctggcggaccgtgggttgtgatctaccatcagcagctatcctagtagactgttgagttcagtgagaaggactacaaattagcagatactgtgattaggggtctgctcaagtactggccagtcacaaattgccagaaggaggtgttgtttctggnggagcttgaagaagtgctcgaggcaacacagcctgcagagttccaacggtgcatggtgccactgtttaagcagattgcccgatgccttaacagttctcacttccaggttgctgaacgcgctttg

SEQ ID NO: 31887 - DNA, 306 bp, Zea mays
gcaaccggtccaacactttcacgctcaggcgctcagctctagcaatggctgcctccaccatggcgatctcctccacggcgatggccggtacccccatcaaggtgggctccttcggcgagggccgcatcaccatgcgcaagaccgtgggcaagcccaaggtggcggcgtccggcagcccctggtacggccccgaccgcgtcaagtacctcggccccttctccggcgagcccccgatctacctcaccggcgagttccccggcgactacggctgggacaccgccgggctgtccgccgaccccgagacct

SEQ ID NO: 31888 - DNA, 299 bp, Zea mays
ggaacataagtgatcaacaacaaagagttgatgattcacaaataaacaagtccttgctaggttacatgacgcattcctacagaagcagagcagcgccgacagagaaaccagcaacatctaactacaacacaaggcgaacatcaacacaagagaagcctacaaagggcgagcgtgcaagcctaggaggaggtgaacttggtgacggccttggtgccctcagagacggcgtgcttggcgagctcgccggggagcacgaggcgcacggaggtctggatctcgcgggaggtgatggtgggctt

SEQ ID NO: 31889 - DNA, 295 bp, Zea mays
agtgcctctctgaagttcacggttttgaacccgaaaggtcgcatctggaccatggtcgctggtggtggtgctagtgtcatttatgctgatacagttggagacttgggatatgcatcagagcttggaaactatgcagagtatagtggtgctcctaatgaggaggaggttctgaattattctagagttgttcttgattgtgcaactgctgatcctgatggccgcaagagagcccttctcattggaggtggcatagctaacttcactgatgttgctaccacattcaatggcatcatcc

SEQ ID NO: 31890 - DNA, 309 bp, Zea mays
cccacgcgtccgcccacgcgtccgcccacgcgtccgctttcgtcatctcttctccggcgaagaacccccagtcgcccaccagatcacttgttaaactttgttgaggggtgatggcggtttctttcgcaaacctcaactccgaggcagggcttaaaaagcttgatgagtaccttctcactcgcagctacatcactggctaccaagcttccaaggatgacttggctgtctacacttcgttttcggctgctccctcgtccaagtatatcaacgtagcaaggtggtttaaccacattgatgcgctcgtgaggc

SEQ ID NO: 31891 - DNA, 294 bp, Zea mays
  unsure (1)..(294): unsure at all n locations
cggacgctggcggtacgcgtgtgatcttcctgggccagctctctcattcgaaccagtgtgaagctggactggtactgctgtgatgtctagcaccgcggctggtgtacgagtacatggccctgggcagcgtggattcgcacctcttctcgcgcacgtcgccgctgcttccgtgggccactcggatgatgatcgcgctgggctgcgcgcctgggctgtcgntcctctacgacgcggaccccgctccgttatctatcgcgacttcaagatctccaacatcctgctggacgcgcactt

SEQ ID NO: 31892 - DNA, 313 bp, Zea mays
ccaccacggcggcggctgcggcgtcgctgctgctgctgctgctcgtgtcgctcgccgcggcggaggacatgtcgatcgtgtcctacgggtgagcgctcgctgatggaggctctgcggatgtacgctgagttgattgcggcgctcggtcggtcctacaacgccgtcggttatgaggagcggcggtactaggtggtccgggacaacctccgctacatcgacgcgcactacgccgccgccgacgcgggcgtccactccttccgcctcggcctcaaccgcttcgccgacctcactaacgacgagtaccgcgtcacct

SEQ ID NO: 31893 - DNA, 302 bp, Zea mays
ctctacctctacctaccggagcagggagcacgccgcacgagccctttccgccgccgccaaaatggtgaacgttcctaagaccaagaagacctactgcaagaacaaggagtgcaagaagcacactctccacaaggttactcagtacaagaagggtaaggatagcctgtctgctcagggaaagcgccgttatgaccgcaagcagtcaggatatggtggccagaccaagcctgtcttccacaagaaggccaagaccaccaagaaaatcgtgttgaagctgcaatgccagagctgcaagcactact

SEQ ID NO: 31894 - DNA, 303 bp, Zea mays
gggctgttcttggccaggaagctgtccctgactagggccatcttctacattatcatgcaatgcctgggtgccatctgtggagctggagtggtgaagggcttccagcaggggctttacatgggcaacggcggtggcgccaatgttgtcgcccctggatacaccaagggggacggccttggcgcagagatcgttggcaccttcatcctagtctacaccgtcttctcggccaccgatgccaagaggaacgccagggactcccatgtccccatccttgccccactgccaattgggttcgcggtgttc

SEQ ID NO: 31895 - DNA, 306 bp, Zea mays
catctgcaagcgtgcagatcttggttacaactatggtgttatccttataccagaaggcctgattgatttcatcccagaggttcaaaaactcatcgcggaattgaatgaaattttagcacatgatgttgttgatgaggcaggggcctggaaaagcaagcttcaggctgaatcaagggagctgtttgagtttttgcccaaaactattcaggagcaacttatgcttgaaagagatccccatggcaatgttcaggttgcaaaaattgaaactgagaaaatgcttattagcatggtggaaactgaactgga

SEQ ID NO: 31896 - DNA, 301 bp, Zea mays
gcccacgcgtccgcgacgtggtggggaagctccacttgggaatgccctttgcacaaggtgcctttgagcagctctacaggggaacatacaatgggatggatgttgctattaagcttttggagcgacctgaggctgaccctgagaaagctcaactgttagagcagcagtttgtccaagaagttatgatgcttgcaacactgaggcacccgaatattgtcaagttcattggtgcgtgcaggaagccattggtttggtgtattgtgacggagtatgcgaagggtggatctctcaagaatttctt

SEQ ID NO: 31897 - DNA, 307 bp, Zea mays
ctcccgtctccgtcgtctcgtctctgctcctcacctcgccgccagccatgggcaagatcaagatcggaatcaacggtttcggaaggatcggcaggctcgtggccagggtcgccctgcagagcgaggatgtcgagctcgtcgccgtcaacgaccccttcatcaccacggattacatgacctacatgttcaagtacgacaccgtgcacggccaatggaagcacagcgacatcaccctcaaggactccaagacgcttctcttcggcgagaagcggtcaccgtctttggcatcaggaaccccgaggagatc

SEQ ID NO: 31898 - DNA, 308 bp, Zea mays
ccaggagatcacgaagccggcgatccgcggctggcgcgcaggggcggcgtgaagccatctccgggctcatctacgaggagacccgcggcgtcctcaagatcttcctggagaacgtgatccgcgacgccgtcacctacaccgagcacgcgcgccgcaagaccgtcacagccatggacgtcgtctacgcactcaagcgccagggccgcaccctctacggcttcggcggctaggctaggccggtcgcgcctcgttgtcgtcgctgcggttctattgtttttgcaattcgcaagttgtggctgggtggcgaa

SEQ ID NO: 31899 - DNA, 306 bp, Zea mays
  unsure (1)..(306): unsure at all n locations
ggacgtggncgagacgcgtgggcgagacgcgtgggggactgccgcagtggtcgacgacagctggtatggacactgtccagaagcgactcatgttcgaagacgaatgcattttggtggacgagcaggacaatgttgttggccatgagtcaaagtacaactgccatttgatggaaaagattgattctgagaatctgctacatagggcattcagtgtgttccttttcaactcaaaatatgagctgctacttcagcaaaggtccgcgacaaaggttacctttcctttagtttggaccaatacctgctgca

SEQ ID NO: 31900 - DNA, 297 bp, Zea mays
cctgttcgctacgccctacgcatctgtgctcgacgcctacccgcatgtgaaggcctggtggtctggtctgatggagaggccgtctgtccagaaggtcgctgccctgatgaagccatctgcttgaaacggttgccctgtcaatcggtgaatggaataagccaagtctgttctgggttgtttgcttgttcagtgatgtgtcttctatgacgaaagttgagtgcctatgtgtgagcatgcttgcttgtaacgagacattgaattgttcggaaatgagcattcctgtgctcttcttgaaaa

SEQ ID NO: 31901 - DNA, 295 bp, Zea mays
ggacgtgggtgaatgcagatattgggaattcagctgttgtgagctccattgaggaggatcttcacaagctccagtgggccacgatgtggggagctgatactgtcatggacctttcaacagggcgacatatccatgagacgcgggaatggattattcgcaactctccggttcctattgggactgttcctatttaccaagcacttgagaaagtaaatggtattgctgaaaatctgagctgggaaatttttagggataccttgattgaacaagctgagcagggcgttgattacttcac

SEQ ID NO: 31902 - DNA, 299 bp, Zea mays
agaagatggcggaggacatcatctttgccttaccatatggattgataggattctgaggagttgtttctacaattggcattgtatcaggttcaccataggttgcacacgtactcgagtaaatcagagtatttacattatgtgctgccattgcctcaagaactgtcaatgtgtttgacgttatgttgtggtagtacctgagtggctccattgtgctctcaccaacataagcaacagcagcaaagtgcataacagcatcaaatgcgttctccgaaaatattttgttcacagctttggcatcg

SEQ ID NO: 31903 - DNA, 306 bp, Zea mays
ggatgccaaggagaagaataggaagttcactgagactgtggaacttcagattggtctgaagaattatgatccacagaaggacaagcgtttcagtggctctgttaagttgccccatatccctcgtcccaagatgaaggtgtgcatgcttggtgatgcccagcatgttgaggaggccgagaagatgggacttgactacatggatgttgaggctctcaagaaaatgaacaagaacaagaagcttgttaagaggcttgccaagaagtaccatgctttcttggcatcagaggccatcatcaagcagattcc

SEQ ID NO: 31904 - DNA, 290 bp, Zea mays
  unsure (1)..(290): unsure at all n locations
ttcgatccggttcttccaacccaggggcagtgatggcgacgaagaggagcgtgggcaccctcggcgangcggatctgaaggggaagaaggtgttcgtgcgcgccgacctcaacgtcccgctcgacgatgcccagaagatcaccgacgacacccgcatccgcgcctccgtccccaccatcaagttcctcctcgagaagggcgccaaggtcatcctcgccagccacctgggtcgtccanaaggtgtcaccccaaagtacagcttgaagcctcttgttccacgcttgtctgag

SEQ ID NO: 31905 - DNA, 304 bp, Zea mays
caactcgccgacgacatctgcgattctgccgtctacgactccaatttggcctctcacccttgcaagtttaagcttcaccttcaaccatgggtaaggagcagtcccacatcaacattgtggtcattagacacgtcagactctggcaagtcgaccaccaccggacaactaatctacaagcatagaggcattgacaagcgtgtaatagagaggtttgagaaagaggctgctgagatgaacaagcggtccttcaagtatgcttgggtgctcgacaagctcaaggctgaacgtgagaggggtatcacca

SEQ ID NO: 31906 - DNA, 304 bp, Zea mays
cactcatcttttctcgtttagaacctctaaaatttcccccactcgccagtcgcagcagcacctgtagcagccatggacgccagcggaccggtagcaaggggaagaagggggcggccgggcgcaaggcaggcggccccaggaagaagtcggtgacgcggtccgtcaaggccgggctgcagttccccgtcggccggatcgggcgctacctcaagaagggccggtacgcgcagacgtgggcactggcgcccccgtctacctcgccgccgttctggagtacctcgccgccagagttctggagttggca

SEQ ID NO: 31907 - DNA, 273 bp, Zea mays
aaggcctggtgtatttggtgttgttcgtctggcccaagtaaacatggagttggctagagttgaagccacgtttagtgtctatcacctggtaaacatggatggtcaatagatcagtttggggatttgacaagaggtgcagaaagcactggcaatgtctataatccgccagatcatttatctgataagccacttggtgacctgggagcactagaagctggagagaacggggaagcccatgtctctagaccgaaggagaaattgagagtggttgac

SEQ ID NO: 31908 - DNA, 302 bp, Zea mays
atcagtcacagaagatattcttactgggtttaagatgcactgccatggttggcggtcaatttactgcatacctaaacgggccgccttcaaaggttccgcacctctcaatctttccgatcgtcttcaccaggttcttcggtgggctcttggttcaattgaaattttcttcagcaaccactgccctctctggtatgggtatggtggtggactaaagttcctggaaaggttttcgtacattaactccatcgtatacccttggacatctatcccgctcttggcctattgcacattgcctgccatct

SEQ ID NO: 31909 - DNA, 295 bp, Zea mays
tgtacggggcggtgatgtcgtggaacgtgacgaggtgcgcaacggcgctggaggaggctggctccgactacgagatcgtgcccatcaacttcgccaccgccgagcacaagagccccgagcacctcgtccgcaacccgtttggtcaggttccagctctgcaggatggtgacttgtacctcttcgaatcacgcgcaatctgcaagtacgctgctcgcaaaaacaagccagagctgttgagggaaggaaacctcgaggaggcagcaatggtggatgtttggatcgaggtggaggctaa

SEQ ID NO: 31910 - DNA, 292 bp, Zea mays
  unsure (1)..(292): unsure at all n locations
ccagttcttcccatttcccagccgccgcggcgccacgcagacctagcagagaaacacccacccgagatggcgatggctctgcgccgccttgcgggcgtgtccggatcgccgtcggcctcctctgccgcggccacggggctactccggtcggcgctgacccgcgcgatctccaccggcttccgcgaggagcgcgacaccttcggtcccatccaagtccccaacgacaagctgtggggcgcgcagacgcagagatcgctgcagaactttgacatttgcggngaacgtgagagga

SEQ ID NO: 31911 - DNA, 299 bp, Zea mays
tgctactgcagttgcaagataccgtacgaaatatcaggctgctcagaagggtaaggtcggaatagtcctggacttcaactggtacgaggctcttacaaactcacctgatgaccaagcagcagcccaaagagccagggacttccacattggctggtttgttgatccattgataaacggacactatccacagataatgcaagatctcgtgaaggagaggctgcccaggttcactcctgagcaggctaaactggtgaagggctcggcagactacatcggtatcaacgagtacacatccagct

SEQ ID NO: 31912 - DNA, 297 bp, Zea mays
gaaggagttgattggcaaagctttgatgaagcgtgttatgcaaacgtggcttccagctagcactgctctgcttgagatgatgatattccaccttccttccccagcaaaggctcaaaagtatcgtgtggagaacttgtacgagggaccccttgatgatgtgtatgcaactgctatcagaaactgtgatccagagggtcctcttatgctgtatgtttcaaagatgattcctgcatctgacaagggcaggttctttgccttcggtcgtgtcttctcagggaaggttgctactggtatgaa

SEQ ID NO: 31913 - DNA, 291 bp, Zea mays
gatgcattggtgcattcactaaatgagacacaggtttcaactctgatatgtgattcgaagcaacttaagaagatacctgcaatcagctctaaactgcagagtcttaggcgtattatctatattgaggatgaacctgtcgaggctgagacactgaaccaagtgaagcatttgacaacattgtctttcactgaagtagaggagcttggcaagacatctcatgttgatgcaaggttaccttcaggctctgatactgcagttatcatgtatacaagcggaagtactggtcttccc

SEQ ID NO: 31914 - DNA, 291 bp, Zea mays
  unsure (1)..(291): unsure at all n locations
gcccaacgagaagagcggcggcgcgggcggacaaggagcaggcggaggaggagctgtgccaagccacaatgggtatctcacgcgactcgatgcacaagcgccgtgccaccggtggaaagcagaaggcctggaggaagaagcgaaagtatgagcttggtcgccagccggccaacaccaagttgtcaagcaataagacagtgaggagggtccgtgttcgtggangtaacgtgaagtgganggctcttcgccttgatactggtaactactcatggggaagtgaactgttaccgc

SEQ ID NO: 31915 - DNA, 332 bp, Zea mays
tggtacgccgcagtacggtccgaatccgggtcaccacgcgccgggagcgcggaccgtggcggaccgtggtcctactggtggaacccagctgagtacctcagtgccggccgcgagcctccacgccaacaggtggatacaggacagccgtgaccagttcaccaaggagcgtctggacgccatcaacgacgagttcaagctgtaccgctgccacaccatcaagaactgcacgcacgcctgccccaaaggcctgaacccggcaaagcagatcgacacgatcaagaagctccagttgggtgccccaagtgcctgaagccgagcgtgtcttcccttga

SEQ ID NO: 31916 - DNA, 295 bp, Zea mays
caccaacccagctcgctcgtcccagctgatcaggtcgagcacctagtagcgacctgctcgatcatcagtgtagagtgtcggtaggtgtctgtctctcttggtggctggttgcaacggtcatggcgacgtcgtctcgtcgggtgcccttgctgctgctgtgcctgggcgtgctggtgtcctgctccttcgcggcgggcagcttggaccaggagctggacatcacgtggggcgacgggctgggcaaggtccttgacaacgggcggctgctgacgctgtcgctggaccgcacgtccgg

SEQ ID NO: 31917 - DNA, 307 bp, Zea mays
gtcctcccggatccggcgacgaagattaattgaataacttcgataagatgggtcgtggtattagcagtgggggtggtcagagttccttgggctatctctttggcagtgacgaagctccaaaatcatttgagaagcctgcaccagttcaaaagccaactcctccatcctctgcagagagactaaaagatatcgctgctggtattcaaagtagtaaatcaaacaattacaaaagatctgaaggccagaactgtggaaatttccttacggaccgtccgtcgaccaaggtgcaagcagctccaggtggcga

SEQ ID NO: 31918 - DNA, 312 bp, Zea mays
accaaggagagtacgtggaggagcagccatggcttcatcggtggccgccgcggcgagcacattcctgggcacccgcctggacgacccggcgccacagaacgggcgcatcgtggcccggttcgggttcgggttgggcggcaaggcgaactcgcgccgaagaaggtggcgaagacatcgacctcctctgaccggccgctgtggttccccggcgccgtggcgctcgactacctggacggctcgctggtcggcgactacgggttcgacccgttcggtctcgggaaccccgtggagtatctgcagttcgagttggac

SEQ ID NO: 31919 - DNA, 385 bp, Zea mays
  unsure (1)..(385): unsure at all n locations
gtaaaagatggacggaagccagaagaagttaaagacattctaggtttgagggtaatcttggagcctcggtgtggtggcaattcatctgattggggccctagggcttgccacaggacacatgaaattattcaagctatgtggaaggaaatcccgggtagaacaaaagattatataactcacccaaaacgaaatggttaccagagcttgcatgtggccatcgatgtcagtgaacctgggaaggtgaggccattaatggaggtacagatacgcaccaaggagatgcataggtttgctgttggtggagaggcatctcactctctctacaagggtggtcttactgatcctggagaggctanaaggctcaagactattatgttggcggcac

SEQ ID NO: 31920 - DNA, 264 bp, Zea mays
catcatcgtccctatcatttaccgggtgatcccatccttgaggatactcgccatcgacgctatattgcattcttctatttaaacgccatcgcctttgtggcatcccttgtcatgatcatcatgctcctgaaccggaggatgagctacaagggcataaaacgatatgcgctgcagatggctatgatagttgatcttcttgctctaacagggtcttacattatggggagtagtagggggacgaagagctccatatacatatggctg

SEQ ID NO: 31921 - DNA, 263 bp, Zea mays
cgagcggggatcgccaatccacaggctttcctgtgaagaagttttcactgtcctcaaagggaagggtacgctcttgatgggatcaagctcactaaagtacccagggcagccacaggaaattcctttctttcagaataccacattttcaatccctgtaaatgatccacaccaggtttggaattctgacgagcacgaagatttgcaagttcttgtgatcatatcgagaccgcctgctaagatatttttatatgatgattggagca

SEQ ID NO: 31922 - DNA, 176 bp, Zea mays
agatcatcgagaccctcgtgccggggctcaaggacgaggtgatgaagatcacgcccgttcagaagcagacccgcgccggacagcgcacgcgcttcaaggcctttgtcgtcgtgggcgactgcgacggccacgtcggccgtgggagtcaagtgcgccaaggaggtggcaaccgccat

SEQ ID NO: 31923 - DNA, 193 bp, Zea mays
agggcggcgcggacaaacgcaggcgaaggcgagggtgtgagggaaggagcaccagccatggtgcacgtcaacttctaccgcaactatggtaagacgttcaagaaaccaaggcgtccttatgagaaggagcgtcttgatgctgaactgaagctggtcggtgagtatgggctgaggtgcaagcgtgagctttgga

SEQ ID NO: 31924 - DNA, 363 bp, Zea mays
  unsure (1)..(363): unsure at all n locations
gtaacatggaggtcctgttgaggtatggcactaaggagcaacagaagcaatggctagttcctttattggaagggacaattcgttctggatttgcaatgacagaaccacaagttgcatcttcagacgcgacaaatatagaatgctcaatatccaggcaaggagatttttatgtgataaatggaaggaagtggtggaccagtggagctatggatcctaggtgcaaaatcctgatattaatgggaaagacagattttcctgcacttagccatagccgcagccatgttttagtgacatcacactcctgggtcagataagagacattgtagtcttggtttgatgagcactcatgaccncagagataca

SEQ ID NO: 31925 - DNA, 368 bp, Zea mays
cccacgcgtccgcccacgcgtccgggggttgctttctttacaaaaattttggaaagaaagatatgcgtggtttcagagttgagctctgtggaggctcttctgttgtgatgttccatggagacctcccttactcctcaaaagacatactcaagaagctagagactatggatgaagaaaatatcattggagcaggaggcttcggaactgtttataaacttgcaatggatgatggcaatgtctttgctttgaaaagaatagtgaagacaaatgaagggctagatcggttctttgatagagaacttgagatattgggaagtgtaaacatcgttacttggtcaatcttccgtggtattgcactctccttcatc

SEQ ID NO: 31926 - DNA, 262 bp, Zea mays
attgagatcctggaggaatcatttggacctgatgatatacgggttggaagaactgtgcatagtcttggaatatgctatcatcttcaactcaagcttgctcaagcccagacatgttatgagcgtgctttgaagatagaaggacgtgttctgggggttggtcacccagagtattcaagtacaatgtacagtctagccaaggtgctcagtctacaaggaaaaagaaaaaatgcagaatgctttattgaagagtctattaagatac

SEQ ID NO: 31927 - DNA, 311 bp, Zea mays
ggtcactcggcaccaggctagcagcacagcagcagccagagccatcccctctcctcgctacgcttcgcttcctcggcgccgattcctcctcctcctcctccaccctcgtccgtccccttccggcgcacgagctcgcccgagatggcgaacgcgagatcgggtgtcgctgtgaacgatgagtgcatgctgaagtttggcgagctgcagtcgaagaggctgcaccgcttcataactttcaagatggacgacaagttcaaggagatagttgtggaccaggtcggggatcgcgctaccagctacgatgacttcac

SEQ ID NO: 31928 - DNA, 199 bp, Zea mays
ccttggaggagataagcttgtcactgtcgaagatattgtccgtcagcactgggccacatatggtcgccattactacacacgctatgactatgagaatgttgatgcaggggctgctaaggagcttatggcaaacctagtaagcatgcagtcatcactttctgatgttaacaagttggtcaaggagatccggtctgatgtt

SEQ ID NO: 31929 - DNA, 296 bp, Zea mays
aaccttccaactgaaatacttacagtatgtgagaaattccgggcatattatcttggaactcacaatggcaggagattgacatggcaaacaaacatgggtacagctgatataaaagccacatttggaagaggccagaagcatgaactagatgtatccacttatcagatgtgtgttctcatgctgtgtaacaatgctgatggactgactacaaagacatgaactggtactgagatactgctcagactaagaatgctgagcactgctgtgcaaggaaatgtctcgtagactatgacagc

SEQ ID NO: 31930 - DNA, 374 bp, Zea mays
cacgactagaggcgggaggaggggagctctgatcgattcacccaagatgtctgaggtggtggcgatggcggggcaggcctacatgaagcagctgcaggcccacccgctgcgcaccaaggctatcacctccggcgtcctggccggctgcagcgacgccgtcgctcagaagatctccggtgtttccaagctccaactcaggaggctcctcctcatcgcgctatatggatttgcatacgcgggaccgtttggacatttcctccacaagctcatggataggtttttcaagggaaagacaggaaaagaaactacagccaagaaggtcttagtagagcagctgaccgcatctccatgggaacacatgatgtgtatgatgt

SEQ ID NO: 31931 - DNA, 244 bp, Zea mays
  unsure (1)..(244): unsure at all n locations
cagagacntacagtcctctgttacttcacgctccgccgccactcccctcccattcaccgccaccgccaattccataccgtcctccgccacctctgctgagagcgagaagagatggcaggcaagggtgatgggccggcaatcggcatcgatctcggcacgacgtactcttgcgtcggcgtctggcagcacgaccgttccagatcatcgccaacgaccagggtaaccgcaccacaccctcgtacgt

SEQ ID NO: 31932 - DNA, 319 bp, Zea mays
gttcggcgaggccgtctggttcaaggccggctcccagatcttcagcgagggcgggctggactaccttggcaaccccagcctgatccacgcgcagagcatcctcgccatctgggcctgccaggtcgtgctcatgggcgccgtcgagggctaccgtattgccggcgggccgctcggcgaggtcgtcgacccgctgtaccctggcggcacttcgaccccctcggcctggccgacgaccccgaggccttcgccgagctcaaggtgaaggagctcaagaacggccgcctcgccatgttttccatgttcggcttcttcgtccagg

SEQ ID NO: 31933 - DNA, 316 bp, Zea mays
ctctgctgcagcaagaaggaagaagctagcgcctccctagctctcgttgtcagcaatggccaccaccgccgcgtccagcctcctcaagtcctccttcgcgggctcccggctcccttcggccacgcgcaccaccaccccgtcgtccgtggccgtggccaccccgcgcgccggcgggagccccatccgcgcgtccatctcctcctcccccaccccgccctacgacctgacgtccttccggttcagccccatcaaggagtccatcgtgtcccgcgagatagaccggcgctacatgacggacatgatcacccacgccgac

SEQ ID NO: 31934 - DNA, 317 bp, Zea mays
cgaaggatgtgggaagacattttttgatgcaggggctcttaggaagcatgctcacgtccatggggagaggcaatatatctgtcactatgagaactgtggcaagaaattcttagatagttctaagttgaagagacattttcttattcatacaggagaaaagaattttgtgtgcccacatgaaggttgtgggaaggctttttcgttggattttaatttaaaggcacacatgaaaacacattctgcagataactatcatgtgtgccagtacccagaatgtggccgaagatttacacaagaatcaaaactaagagctcata

SEQ ID NO: 31935 - DNA, 314 bp, Zea mays
gtcgttcttgccggccgcgccccacctccgccctctcctcctccagggggatcggatacgccacaggctgagcgatggtgctgtgggtcttcggctacggctccctcatctggaaccccggcttcgacttcgacgacaaaatcctcggcttcatcaagggctacaagcgcacctttaatctcgcttgcattgaccacagaggcacaccggagcatccggcgaggacctgcacgcttgaaaccgacgacgaggccatatgctggggaattgcatattgtgtcaagggtggtccagaaaaagagctaaaagcaatg

SEQ ID NO: 31936 - DNA, 340 bp, Zea mays
gagctgagtacgtcggattccgggtcgaccacgtccgcgacgtgtcggacgcgtggcggacgcgtggcggaccgtgggtaaataagcggatatgggcactgttgtaatggagcaaaatagaggctggcactatcagagagggtgacagtttattgattatgccaaacaagtctcatgtgaaagtcattggtttgaacttggacgagagcaaagtacgtcgtgctggacctgctgagaatgttcgtgtcaaattgtccggagttgaggaggaggatgtaatgtctggttttgtactttcaagtgtcgctaatctgtaactgagcgatgcgacgggtaagtg

SEQ ID NO: 31937 - DNA, 312 bp, Zea mays
gggttttgctgctctccgaccccgagctccgaagccgcagcatcaggcgcggcccccctcgcgtgtgaccgagatggcgctgccgaatcaggggaccgttgattaccccagcttcaagctcgtcatcgtcggcgatggtggaactggtaaaactacatttgtgaagaggcatctcactggagagtttgagaagaaatatgaaccaaccattggtgtggaagttcatccgttggatttcaccactaactgtggtaagatcaggttctactgctgggataccgcaggcaagagaagtttggtggcctcagggat

SEQ ID NO: 31938 - DNA, 314 bp, Zea mays
gcgagaacgagaagtccgggttcatcagcctcgtgtcacggtacctcagtggggacgctgacagatcgagtggagcaagatccagacccctacggatgaggtggtggtgccctacgataccgtcgcgtcgcctcccgaagatctcgaggagacgaagaagctgctggataagctcgttgtgctcaagcttaacggagggctcgggacgaccatgggctgcactgggcccaagtctgtcattgaagtccgcaatgggttcacattccttgaccttattgtgattcaaattgagtccctgaacaagaagtatggat

SEQ ID NO: 31939 - DNA, 318 bp, Zea mays
cggacgctgggaggcagacggcaggactcgcttcaagctcctcatctcgcgcagggagcggtcgcctgagatcacagcgacaatggtgaaggcagttgctgtcctcgccggcactgatgtcaagggcaccatcttcttttcacaggagggggatggtccgaccaccgtgactggaagtatctctggcctcaagccagggctccatgggttccatgtgcacgcgcttggcgacaccaccaacggctgcatgtcgactgggccacacttcaatcctgttggcaaggagcatggcgcaccggaagatgaggaccgccatgc

SEQ ID NO: 31940 - DNA, 318 bp, Zea mays
ctctccttcccggtctcctccgcccgttgccttcgtcccctccatctccggctgcgtcgccggcgagcccgacaccgcgaatcggatccgccgacaaggtgagagggaagagatggggctcacgttcaccaagctgttcagccggctgttcgccaagaaggagatgcggatcctgatggtgggactcgacgccgccggaaagaccaccatcctctacaagctgaagctcggcgagatcgtcaccaccatccccaccatcggattcaatgttgaaactgtggagtacaagaacatcagcttcactgtctgggatgtcgg

SEQ ID NO: 31941 - DNA, 314 bp, Zea mays
cggacgtggggaaccgacgagcgacgaagcgcgcagaaagagaagaacctcggagatcagatggcacaagccatggcgtcgatgaccggcctctcgcagggcgtcctgcccagcaggcgcgccgacagcagaaccaggacggccgtcgtcatcgtcagggcgtccgcggagggcgacgccgttgcgcaggcgggccgccgcgccgtgatcgggctggtggccactggcatcgtcggcggcgccttgtcgcaggcggcgcgcgccgagaccgtcaagaccatcaagattggagccccgccgccgccctccggtgg

SEQ ID NO: 31942 - DNA, 313 bp, Zea mays
cacgcatactgcatacacaacgcagagcatcagaagcagctgcgatctgatcgacatggctgccgccaccatggctatcacctcccgcgcgctcgtcggcaagccggcggctggcacgagggacgtcttcggcgagggccgcatcaccatgcgcaagaccgccgccaagcccaagccggcggcgtccggcagcccatggtacggtgccgaccgcgtcctgtacctgggcccgctgtccggctcgcccccgagctacctgaccggcgagttccccggcgactacgggtgggacacgcggggctgtcagcggacc

SEQ ID NO: 31943 - DNA, 312 bp, Zea mays
cttcgtacaaggtgatgcgtgaccaaaatggtcttagcaaaggctctggatttgttgctttctcaactcgtgaggaagcatctcaggctttaactgaaatgaatggcaaaatgatatctggaaaaccattgtatgttgcatttgcacagcgcaaagaagatagaaaagcgatgttgcaggcacagttttctcagatgcgccctgctgtaccaatgacacccactctagccccacgccttccaatgtactctccgatggctcctcagcaactcttctatggacaagcgccaccagctatgatgccccctcagc

SEQ ID NO: 31944 - DNA, 311 bp, Zea mays
aaaatagcaatcagctcatctgtcagcgccacaggtgaccggaaaaccacggccggcgttcctgcttctctacccggtccgaattgctgaccggatcaacccgagaccttgcaggattatcgatctgattgcggcatgatccgcttcatcctgctgcagaaccggcaggggaagactcgactggccaagtattacgtcccgctcgaggactcggaaaagcacaaggttgaatacgaggtacaccggctcgtggtcaatcgggaccctaagttcaccaacttcgtcgagtttcgcacacacaaagttatcta

SEQ ID NO: 31945 - DNA, 288 bp, Zea mays
cgcacgccatcagcagctagcgcgctcctcgagcccagcagagaaaggccggcagcgctaatcgtaatagccatgggctccatcgccggcgacgtggccgcggtggtggacgaggaggcgtgcatgtacgcgatgcagctggcgtcgtcgtccatcctgcccatgacgctgaagaacgccatcgagctgggcctgctggagctgctgcagaaggatgccggcagctgcaatgcggcgctggcgcccgaagaggtggtggcgctgatgcccgcggcgcccagcgtcccc

SEQ ID NO: 31946 - DNA, 309 bp, Zea mays
agtaaagagaacatcattggtactgggaggacagggactatgtacagggcggtgctgcctgacggctccttcctagccgtgaaaaggctacaggactcgcaacattccgaatcacagttcgcatcggagatgaagacacttggccaggtgaggcaccggaacttggttccgctcttgggattctgcgtcgccaagaaggagaggttgctggtgtacaagcacatgcccatgggctcgctctacgaccagctaaacaaagaggaaggtagcaagatggactgggcgctgaggctacggatcggcatcggt

SEQ ID NO: 31947 - DNA, 309 bp, Zea mays
aattaataagtctctctcagttggcaagcgtcgaactgggagatctatcagtattcttgatatctatggctttgaatcatttgataagaacagttttgaacagttctgcattaattatgctaatgaaaggttgcagcaacatttcaatcgtcatttgtttaagcttgagcaagaggaatatgtggaggatggcatcgactgggcaaaggttgacttcgaggataatcaggactgtttgagcctctttgagaaaaaaccactgggactattgtctctgctggatgaggaatctactttcccgaatgccac

SEQ ID NO: 31948 - DNA, 305 bp, Zea mays
cccacgcgtccgccccgcgtccgcccacgcgtccgcgaccgtggcttccgcgccgccacccccttcaggtaaggaagaggaggagggcaggatgtcgcaccgtaagttcgagcacccgaggcacggctccctcggcttccttcccaggaagcgctcctcccgccaccgcggcaaggtgaagtcattccccagggatgaccccaagaagccttgccatctcactgccttccttggctacaaggctggcatgactcacattgtccgtgaggttgagaagccaggatccaaactccataagaaggaaa

SEQ ID NO: 31949 - DNA, 279 bp, Zea mays
atttgatcatctagaggagcttcgtgacaggattttcatctcagttttggctgttggggctgcgatattaggctgttttgctttttcaaaagatttggttatttttcttgaggcaccagtgactgctcagggtgttcggtttttgcagctctcgcctggggaatttttctttacaacattaaaggtttcaggttattgtggccttttacttggaagtcctatcattttgtatgagatcattgcatttgttatcccaggtttaacaagggacgagcggaa

SEQ ID NO: 31950 - DNA, 300 bp, Zea mays
cccacgcgtccgcatcagatttgtgtattcaagattgctaatgagactggaaagccatggctgtggtgggattatgtgcatgatttcgcacttaggtgtccaatgaaggataagaaatacaataatgactgtgcccatgatgttatcaaatcacttggattggacatcgagaatataaacaagtgtgttggagaccctgaagccgatgtggaaaatgaaattctaaaggcagaacaagatgcccaaattggtcatggtaaaaggggagatgtcacaatactaccaacccttgtcatcaac

SEQ ID NO: 31951 - DNA, 131 bp, Zea mays
cgagaccctcccccaaaaccccagagcggagaagagcgcaagatgttcggcttcgggcaccacggccaccacggccagaacccgccggcgcacggctgcgtgcaccagcccaccttcaagatcttctgcaa

SEQ ID NO: 31952 - DNA, 140 bp, Zea mays
ggacgtggtgcagggttctggaagaagcttgcctaggtcttgcacctcacacatggacaaaacctcgtgctttttcccccagaatgtgttgccaaccatccgaaccccaacttttgttttgaacactgcctatgacgtgt

SEQ ID NO: 31953 - DNA, 149 bp, Zea mays
gtccttgacaacgggcggctgctgacgctgtcgctggaccgcacgtccggttccgggttccagtcccggcacgagtacctgttcggcaagatcgacatgcagctgcggctggtgccgggcaactccgccggcaccgtcaccgcctacta

SEQ ID NO: 31954 - DNA, 149 bp, Zea mays
ggcttctcctccccctcttatcaagtcctcctcgggttagggttccatagggttttgtgtaggggcgatggcggcggctgatgttgagtaccgttgcttcgtcggtggacttgcctggggcaccagcaacgagtcgctggagaatgcct

SEQ ID NO: 31955 - DNA, 85 bp, Zea mays
ctcagggtgtgcatggccacttcaccaagcgccccgaggagattggagctggtgaccagggacacatgttcgggtatgcgaccga

SEQ ID NO: 31956 - DNA, 265 bp, Zea mays
cccacgcgtccgtggaactccggagcgctcatgacccaaatccagtggttccgtgatctcaagcctttcttctgcaacacaacgcaggcatgcaagaaattctttgccaaggcgctgtttgtggtcggtgagtttggcggcaatgactacaatgcacccctctttgcgggcatgggcatcccagaggtttacaaattcatgccggatgtcatccagggcatctctgacggtattgaggcactgattgctgagggggctgtggaga

SEQ ID NO: 31957 - DNA, 119 bp, Zea mays
ccatcgtccatcgtttcacacaacctccccctccgctccgcgcttcgcctgggtaccggcgtccgagcgctccgtcccgtccaggaacaggaagagcagtaactcatccatctgggatt

SEQ ID NO: 31958 - DNA, 296 bp, Zea mays
gagcccggtatttctttcagcagttgatctgtggagtgagctattgccattacatgcaaatatgccatagagatctgaagctggagaatgttctcttggatggcagcccagctccacggcttaagatctgcgattttggctattccaagtcatcagtgttgcattcaagacccaaatcagcagtaggaacgccagcatatattgcacctgaggtgctatcccgtcgcgagtatgatggaaagcttgcagacgtatggtcctgtggggtgactctttacgtcatgcttgtggagcat

SEQ ID NO: 31959 - DNA, 220 bp, Zea mays
cccacgcgtccggcaggctatcgtcaccggcaagggccccctcgagaacctcgccgaccacatcgccgaccccgtcaacaacaacgcctgggcttacgccaccaacttcgtccccggcaagtgagcgagggcatgatgcttgcatgcgtgtaccgtagacgtacgtattcctacgtactgcaggttgcaccagtatttgtgaagggagctttgggagcca

SEQ ID NO: 31960 - DNA, 146 bp, Zea mays
cccacgcgtccgtggaactggaggactcgctgtatccactgctgagggaagtcagcattggcatagatccttacgtggtctttcaagatgtagattgggcccttcttattggcgctaagcccgaggtcccggcatggagcgagctg

SEQ ID NO: 31961 - DNA, 322 bp, Zea mays
ctcgagcgctcgcgccggcgaccacagcaaagaggaggccgcagcacgacagcgccccagggttcctactctcgtcgcagcggcacactggtagcggcacagtgaggggaagatgtcgtcggtgttcagcggcgatgagaccgcccccttcttcggcttccttggcgccgccgccgcgctcgtcttctcatgcatgggggcggcgtacgggacggccaagagtggcgtcggcgtggcgtccatgggtgtcatgcgcccagagctcgtcatgaagtccatcgtgcccgtggtcatggctggtgtgctcggtatctacggcctc

SEQ ID NO: 31962 - DNA, 320 bp, Zea mays
gttcctacagatgccccaaactatctaccgctgatatttgaccggggttttatcggggttcaacatgactggtgtgatgcatttccaacttacccaagaacatatgatatggtgcacgctgatggttttctatcacttcagaagaaccacaagcatagatgttctactcttgacatattcttggaagttgaccgcatcctacgcccagagggctgggtcataatccgtgacgctgcccctcttattgaagcggcaagatctgttgttactcaactcagatgggacgcccgtgttttggatcttgacatagccagtgatga

SEQ ID NO: 31963 - DNA, 304 bp, Zea mays
tgacccgcagtacggcgaatccggcgccaccgcgcagagcgcacggcccgacggggcggatgcctctccttccacgtctcctccgcccggtgcctacgagccctccatctccggctgcgtcgccggcgagcccgacaccgcgaatcggatccgccgacaaggcgagagggaaaagatggggcttacgttcaccaagctgttcagccggctgttcgccaagaaggagatgcggatcctgatggtgggactcgacgccgccggaaagaccagcatcctctacaagctgaagctaggcgagatcgtc

SEQ ID NO: 31964 - DNA, 318 bp, Zea mays
ggacgtggggcccgcccctatggccagcgtgctgtcctcaagttcgctcagtacactggcgctcatgccatcgctgggaggcacacccctggtaccttcactaaccagctccagacctccttcagcgagcctcggctgctcatccttaccgacccaaggactgaccatcagccaattaaggagtctgctctggggaacatccccaccattgccttctgtgatactgactctcccatgcggtatgtcgatatcggcatcccagcgaacaacaaggggaggaacagcattggatgcctgttctggcttttggccaggatg

SEQ ID NO: 31965 - DNA, 313 bp, Zea mays
ggacgtgggcgcacgcatacacagcacagagtgaggtaagcatccgaaaaaagcagtgatctgatcgacatggccgccgccaccatggctctcacctcccgcgcgctcgtcggcaagccggcgaccagcaccagggacgtcttcggcgaggggcgcatcaccatgcgcaagactgctggcaagcccaagccagcggcgtccggcagcccctggtacggggccgaccgcgtcctgtacctgggcccgctgtccggccagcccccaagctacctgaccggcgagttcccggcgactacggctgggacaccgcggg

SEQ ID NO: 31966 - DNA, 317 bp, Zea mays
gccactcgctgggaggaggtactggttcaggaatgggcaccctgctcatctccaagatcagggaggagtacccggaccggatgatgttgacattctctgtcttcccgtcgcccaaggtgtctgatactgttgtggagccctacaacgccacgctctccgttcaccagctcgttgagaacgcagacgagtgcatggtgctcgacaacgaggctctctatgacatctgcttccgcacgctcaagcttgccacaccaacctttggtgatctcaaccaccttatctctgcaaccatgagtggtgttacgtgctgccttcgc

SEQ ID NO: 31967 - DNA, 321 bp, Zea mays
cccacgcgtccggtaaagttgccaccccagctcaggctcaggaagtgcacgcctccctgagggattggctaaagaccaatgccagccctgaggttgctgaatctactaggatcatctacggaggctctgtaactgctgcgaactgcaaagagctagcagcacagcctgatgtcgatggttttcttgtcggtggagcttctttgaagcctgagttcatcgacatcatcaacgcggccaccgtgaagtccgcttaagatgctacgctgaagacgaacatactttttttttgctcaactgtgctatgtaagctagtagcttttg

SEQ ID NO: 31968 - DNA, 306 bp, Zea mays
agcatactttggtatctggtggtgttagaggaaccttaccgtggatggcaccagagcttctgagtgggaaaaacaatatggtgtcagagaagattgacgtctattcgtttggaattgtcatgtgggaactgcttactggggaagagccatactctgatatgcgtgctgctgaaattattggggccattgtaaacgattccctacgccctcaaatcccttcatggtgtgatcctgagtggaagggattgatggaaagctgttggtccagtgatccagccgagagaccgtccttcactgatatatctc

SEQ ID NO: 31969 - DNA, 316 bp, Zea mays
ggacgtggggttctgaggcgcatacttaggcgagctgttcactttggtcatcagacattgaaggcaaagcaaagtttttttagctcgcttgtaaatgtttttgtccaactgatgggtgatgtatttcccgagttaaaagacaacgaaaagaagatcaaatgtattattagagatgaagaagaaagctttgagaacactctagcaaagggttatgaaaaatttaagaaagctgcagacgctgttaaggataatggtggaactatacttagtggacatgatgcatttattctttgggacacttatggttatccaattg

SEQ ID NO: 31970 - DNA, 263 bp, Zea mays
cactcccaagccagtacccacagtcctacgagcagtcgcacgcaagtgtcaagagacaaaacggtcgacatggctcgcacgcaatctgccgtagcggtcgccgtggtggccgcggtgctgctctggcagcggcggcgacgacctcggaggccgccatcacctgcgggcatgtgagctccgccatcgcgccctgcctctcctacgcccgcggcacggggtccggcccctccgcgtcctgctgtagcggcgtcatgatactcaag

SEQ ID NO: 31971 - DNA, 316 bp, Zea mays
ggacgtgggtatctgcatcagtgggtttatggcatttgacgtaccgcctcctcgaggtcctctctggatacttggtgatgtttttatgggtgcctaccacactgtttttgacttcggtgagaacaggattgggtttgccaaatctgcatgaggactggagttctgcgctttagtagcatgtccagtttgttatccgggtattgtacatatatatgttgccaactggtgtaatccgcagtgtttaatagtatatattcatgcagaaatctagaagattgtggcatgatatgtgtttgcaaatggagctatgctatgt

SEQ ID NO: 31972 - DNA, 311 bp, Zea mays
  unsure (1)..(311): unsure at all n locations
gcggtcgattctgtggtggatcccctccgcgacttcgccaaggacagcgtccgcctcgtcaagcgctgccacaagcctgaccgcaaggagttcaccaaggtggcagcgcggacggcgatagggttcgtcgtcatgggcttcgtcggcttcttcgtcaagctcatcttcattcccatcaacaacattatcgtcggttccggctaggctcagggcgcgactagcatgggagtagtgcgatacttttgagagcaagggatagcgangatcttggtctttggaatagtattgttaatgacatgttttttccggtg

SEQ ID NO: 31973 - DNA, 300 bp, Zea mays
acaaactcaccgggccaatcccaccgtcaatcagtaatctggaagactctctcttcgaggtactccttctcaacaaccagctctccggctgcctcccccacgagctcggcatgctcaccaaggcggccgtgattgacgccggcatgaaccagctcaccggcccaatcccgtcatctttctcgtgcctaatcagcgtcgagcagctcaacctggccggaaaccgcctctacggtcaggtacccgacgcgctctgcaagcttgctgggcccgctggccgcctcgccaacctcacgctgtccg

SEQ ID NO: 31974 - DNA, 309 bp, Zea mays
gcaaccggtccaacactttcacgctcaggcgctcagctctagcaatggctgcctccaccatggcgatctcctccacggcgatggccggtacccccatcaaggtgggctccttcggcgagggccgcatcaccatgcgcaagaccgtgggcaagcccaaggtggcggcgtccggcagcccctggtacggccccgaccgcgtcaagtacctcggccccttctccggcgagcccccgagctacctcaccggcgagttcccggcgactacggctgggacacgccgggctgtccgcgacccgagacttcgcaaga

SEQ ID NO: 31975 - DNA, 315 bp, Zea mays
gccgacgtgggagaaaaatatatgatacaacttccctatacaagcagacttcagcagaaagcaagtgttgtggagaaaggttcccccacgcgtccgaacagtgctgttggcattcgaggtacactagccaagttatcacagcttgtagcaaagtatgatggagaactccagcaacatctggaaataactacggaagttaatccccagttctacgcattcagatggataaccttactgctgactcaggaattcaacttcgccgacaccattcacatctgggacacactattaagtgatcctggtgggccccaggaa

SEQ ID NO: 31976 - DNA, 300 bp, Zea mays
  unsure (1)..(300): unsure at all n locations
caacggtccgggacgtggagcggnantcagctgtgctgagccactgatcaagcggtgggaacagatcgcagcagccagcagatccagcgaggacggtgggaggggagaagtgcaagtggagttcagcaagcagttccaggacctgacggcggacgttatcgcccacaccggtttcggaagcagctacaaggagggcaaagaggtgttccatacgcagaagcagctcctggcgctcgccatggcgactctcctcaacgtgcagctgccaggattcaagtatctccctaccaagaacaacag

SEQ ID NO: 31977 - DNA, 313 bp, Zea mays
gagcttgaaagagtgggaaggggtaaaagtcatggatgatgttctcccattcgtccagtcgctcaagctatcgaggactgcagttactgttgacgattgtgttaaggagcttgctggagttgtccgtgagaagctaggacctaagaatgcaatcttcaccaaagcagccgatgccatggtggaatggaacaatctctggaaagtgcatggtgctcagaatgcatagtttgggagtttgcatgtttcctacagagcatctaatagttgtttggagtgcgcgttttacagttctaaattttccctgtggaactca

SEQ ID NO: 31978 - DNA, 300 bp, Zea mays
gggaatagattaccatcataccgatgcagtcttacctacacctatggatctcatcaacactgtacgagaattagttctctctcaagatcttactcttattattgaacctggaagatccttgattgctaatacttgctgcttcgtcaatagagtaactggtgttaaatctaatggtacaaagaatttcattgttgttgatggcagcatggcagaactcatcagacctagcctgtatggagcatatcagcatatcgaattggtctctcccccactcctggtgctgaagtagcgaccttcgat

SEQ ID NO: 31979 - DNA, 307 bp, Zea mays
cggacgcgtggatttccacaactggactgggaatagagtaacttgccgtgattggttccagcagcaccctgaaagaaggactgaccgttttcagggatcaggagttctcttcagatcttggctgtcgtacggtaaaacgtattgctgatgtctccaaacttagaatctatcaattcccacaggacgccgggcctatggcacatcctatccgtccccattcttatatcaagatggacaacttctatactgttacggtttacgagaagggtgctgaagttgtcagaatgtacaagaccatgtttggagc

SEQ ID NO: 31980 - DNA, 297 bp, Zea mays
ggacgcgtggcggtattgtaagcaactgggatgacatggagaaaatctggcatcacactttatacaatgagctccgtgttgccccggaggagcaccctgtgttgcttactgaggctcctttgaacccaaaggccaacagggagaagatgacccagattatgttcgagactttcaatgttcctgccatgtacgttgcaattcaagcagtcctgtcactctatgctagtggccgtactactggtattggtctcgaatctggtgatggtgtgaagcatactgtgcccatttatgaaggat

SEQ ID NO: 31981 - DNA, 288 bp, Zea mays
acttagcatagcaatgctgcaaggaatcttggggtacaccacagtagtgccaattttctcttaacatcaccgctcaccagaatcttaataaaagcgtcatagcaacacttgctagcttacagaaaaactgacacattgataaaacagaaggaagatagctcttagaccctagccttccgacgcagcagccggccaatcccgacgctcagaagccgagcttggtgcggcgccagtgcctgcgcttggcgttgtacctgatggtattgtcagtgcgcatgcggatccagt

SEQ ID NO: 31982 - DNA, 307 bp, Zea mays
cccacgcgtccgatcattttgccatcttcaaggtgttgttcatcgtgatctgaagccggagaatttccttttctcttcaaaggacgaaaactctcccttgaaggtcatagattttggcctgtctgactttgtgaagccagacgaaagactaaatgatattgttggaagtgcatactacgttgctccagaggtgctccaccgatcttacggcaccgaggcagatatgtggagcatcggagtaatcgcctacatcttgctatgcgggagccgacctttctgggcgcgcacggagtcaggaatcttccgg

SEQ ID NO: 31983 - DNA, 322 bp, Zea mays
attcgatattcatggtggggggaaagatttgatttttcctcatcatgagaatgagcttgcacaaagccgcgcacttatcctgagagcgaggtcaagtgctggatgcacaatggctttgttaacaaggatgataaaaaaatggcaaaatcagataataactttttcacgattagagatatcactgctctttaccatccaatggctttaagatttttcttgatgcgcacacattatagatcagatgttaaccattctgatcaagcgcttgagattgcatctgatcgtgtctactacatttatcagactctatatgactgtggag

SEQ ID NO: 31984 - DNA, 322 bp, Zea mays
cccacgcgtccgggttcatgcagagaatggtgatgctgttgccgagggacaacagcggatgattgaccttgggataactggtccagaagggcatgctctctcaaggcctccaattttagaaggagaagcaactgcacgggcaatccgtttagctaagttcatcaatacgccactgtatgttgttcatgtgatgagcatcgacgcaatggatgagattgccaaggctaaaagagaagggcagagagtcatcggtgaacctgtggtttctggactagtgcttgatgattcttggctttgggatcctgacttcacgattgcttca

SEQ ID NO: 31985 - DNA, 304 bp, Zea mays
cccacgcgtccgcacacgcgtccgggcgcaccgtggagtccctctctgatttttggcgagcagaacatacctgagacgacaggtagaagacgactgactgcctcgagcagcagagatcagggaggccgagggcgggatgacgatccggttcgtgctgttcgtcaacaagcagggccagacgcggctggcgcagtactacgagcacctctccctcgacgagcgacgggccctcgagggcgagatcgtccgcaagtgcctcgcccgcactgaccagcagtgttcgtttgtggagcaccggaactac

SEQ ID NO: 31986 - DNA, 321 bp, Zea mays
agttgggcgcagagaatccccaagcaaacaaacagggtagaggtagagggagaggagaggagaggagaggagaggagaggttgggtctgggacaccatggctccgatgaagctgtacggggcggtgatgtcgtggaacgtgacgaggtgcgcaacggcgctggaggaggctggctccgactacgagatcgtgcccatcaacttcgccaccgccgagcacaagagccccgagcacctcgtccgcaacccgtttggtcaggttccagctctgcaggatggtgacttgtacctcttcgaatcacgcgcaatctgcaagtacgct

SEQ ID NO: 31987 - DNA, 324 bp, Zea mays
cccacgcgtccgggcggagacatgggtagcttcgctaagctggcgaggagggcggtggagacggacgctccggtcatggtgaagatacaagaactgctccgaggggccaaggatgtgatgtcgcttgcgcagggagttgtttactggcaacctcccgagtcagctatggataagatcgaaaagatcatcagggaaccaatagtcagtaaatatggttctgatgatgggcttcctgagcttcgagaagcacttctcgaaaagctaagcagagagaacaagcttaccaaatcatcagtcatggtcactgctggtgcaaatcaggct

SEQ ID NO: 31988 - DNA, 319 bp, Zea mays
aacaagggatgcgccccgatcatgctccgcctcgcatggcatgatgctggaacttatgacctgaagacaaaaactggtggtgcaaatggttcgattagatatgaagaagagtacactcatggttcaaatgctggtttaaagattgctatcgatctccttgagcctatcaaagcaaagaatccaaagataacatatgcagacctgtatcagcttgctggagtggttgcagtcgaagtgactggggggccaactgttgaatttattcctggcagacgtgattcgtcggtgtgcccccgtgaagggcgtctgccagatgcta

SEQ ID NO: 31989 - DNA, 320 bp, Zea mays
cctcctcatactttaccgcaaagcgcgcaccacgaattgcacctacccatttcgctaatctccctccacgagccgaccaaatcgaatcgattcgcgcgcacgcaccgcgcagcgattgccggcgatggcgagcctcaccctgccgccggcgatggcgaacccacggcaggacgccatcgacctccaaaaggccttcaaagggtttggctgtgacagtacaacagtgataaacatacttactcatcgcgattcagtgcagcgtggactcattcaacaggaatacagggctatgtatcatgaggaactctcccatcgcattt

SEQ ID NO: 31990 - DNA, 320 bp, Zea mays
cggacgcgtggacgcggtcgcgcctccagcctcccctacccctactcccctcgcgcccagggaggagaccgagtcgcggcgagcgaagattccctccgattgctctcctcctagaacttccgatcggctcgtgatggccatgcagcagcacgcggcgtcggcgtcgagctccagcttggggctgcaccttctcgcctcgccctcgtccatcagggaggccacccacaccaaggttttcgtgggcgggctcgcctgggagaccagcagcgacaggctccggcgcttctacgagcgcttcggggacattctcgaggccgtcg

SEQ ID NO: 31991 - DNA, 299 bp, Zea mays
gttcgtgcacgtacgcacgcaccgggacaccagcaacccccaacagcgccactgtccagtgcgcgcgtcaagcttgcttagctagccgccatggcctccctcgccgccgtctccgtgaagcccgtggccatcaagggtctcgccggcagctccatctccggatagaagctcgccgtcgccaggccgtcggcacgctccatccgcagccccgcgcagcgccgtggtggcaagtactcgacaagagcgtctatttgactcgacgacatcgcaacacaccggacagtgggactctacggctc

SEQ ID NO: 31992 - DNA, 311 bp, Zea mays
atctaggggaaagaaaggtactggaaggatcgagcgtgttgagcagttaacatttttgacccgtgtggccaaaacaccagctcagaagcttgaaatcctcttccatgtgatttctgcgcagtttgatgttaaccctagtctatttgggcatatgccagtcaatgtgtggaagaagtgtgtcaataatatgcttcttgtgcttgatatactccagcagtatcctaacattgtagtagacacctcatttgagcctgatgagaatgaaactcaaaagggtgcagactacaatggaacaatacatgttgtcggtg

SEQ ID NO: 31993 - DNA, 306 bp, Zea mays
ggaggggttctacgactactcctgcccacaggcggagaagatcgtcaaggactacgtgaaggcgcacatcccccacgcgcccgacgtcgcctccaccctgctccgcacccacttccacgactgcttcgtcaggggctgcgacgcgtcagtgctgctcaacgcgacgggcggcagcgaggcggagaaggacgcggcgcccaacctgacgctgcgcggcttcggcttcatcgaccgcatcaaggcgctgctcgagaaggagtgccccggcgtggtgtcctgcgccgacatcgtcgcgttcgccgcccg

SEQ ID NO: 31994 - DNA, 308 bp, Zea mays
  unsure (1)..(308): unsure at all n locations
cccacgcgtccgcccacgcgtccgggagaaacgccaggattggttgttgtctgaactgaggggcaaacgtccattgtttggttctgatcttcctcagactgaagagactgctgatgttttaggcacatttcatgtccttgcagagcttccagcagattgctttggtgcatatatcatctcgatggcaactgccccatctgatgtgcttgcggtggagcttttgcagcgagagtgccatgtanaacaaccactgagagttgttccactcttcgagaaacttgcagatcttgaagcagctccagcagctg

SEQ ID NO: 31995 - DNA, 303 bp, Zea mays
  unsure (1)..(303): unsure at all n locations
ctcacgcgtccgctcacgcgtccgctcacgcgtccgcggacgcgtggcgtacgtggngncatccgtggctgcactntctgcgcctccacaaggctttggcctctgttgtaagatttaagcttaacctacaaccatgggcatggagaagtcccacatcaacattgtggttattggccatgtcgactctggcaagtcaaccaccaccggccacctgatctacaagcttggaggcattgacaagcgtgtgattgagaggttcgagaaggaagccgctgaaatgaacaaacggtccttcaagtacgc

SEQ ID NO: 31996 - DNA, 309 bp, Zea mays
atcaaggaggagttccccaccctctcctatgccgatttctaccagcttgccggagttgtggccgtcgaggtcaccggtgggcctgagatccccttccaccccggcagggaggacaagcctcagccgccacctgagggccgtcttcctgatgccaccaagggttctgaccacctgaggcaagtctttggcaagcagatgggtttgagtgatcaggacattgttgccctctctggttgccacaccttgggaaggtgccacaaagagcggtctggttttgagggggcctggactacgaaccctttggtcttt

SEQ ID NO: 31997 - DNA, 313 bp, Zea mays
gaaattagctgaggaacttagggatgaaatacagagattagagagtagtatcacacaagctggcattgataatgatgtgcttgaaactaaattggaagaaaagattggtgagattaattttttgcaggaaaagataagtttactcaaccaagaaattgatgataaggagaagcacatcagggaactcagtgcatcactttcctcgaaggaagtagactaccaaaagctgaccgctttcacaaatcaaactaaaaagagccttgagcttgcaaattctagagtacaacaactcgaggaagaactaagtacaact

SEQ ID NO: 31998 - DNA, 310 bp, Zea mays
ggaccgtggtcccgaacgtcgtcgcaggcgctcctgctgataccgccgtgaagtatgtcgccggtgacatgttcgagagcgtttcgtcggcagagctgtcttcctcaagtggattatacatgactggggtgatgccgactgtgtcaagatactgaagaactgcaagaaggccataccagctcaaggaggcaaggtgataatactggatatcgtggttggagcaggatcgtcgtgcgaccggaagaacgtggagacgcaatgcttgtttgatctctacatcatgactatcaacggtgtccagcgagatgag

SEQ ID NO: 31999 - DNA, 295 bp, Zea mays
catttgaaccccccacgtctcctcgcctcgttccccatttgctgcgtctccttgcccgcgccgccgctcgccgtttgcccctcgtctccgcaccgcgcgctgttgtccatccttgtgcagcaaaaatgacggctggctacattgttggctcactggtcggatcctttgccattgcatacctgtgtgacacatttatctctgacaagaaggcatttggatgtagcaccccaagactgtttctggagaagagtggtggcaagccacagacaccaagttcccagcctggcttcgaact

SEQ ID NO: 32000 - DNA, 280 bp, Zea mays
tccacgcgtccgatcaactttgcagtgttcccatctctccaatgtggccctcacaaccaccagattgctgcacttgctgttgctctacagcaaactatgtcgcctggcttcaatgcctatgcaaagcaagtgaaggccaatgctgttgcaattggagactatctcatgagcaagggctacaagatggtgactgatggaactgagaaccacctggttctctgggatctccgcccccttggtcttgactggtagacaaggtcgaaaagctaggtgatctttg

SEQ ID NO: 32001 - DNA, 242 bp, Zea mays
ggacgcgtcaacaagctgccccgcacagacgaacacgaaccttggcagagctaagctgaagtagttcgttgtgaacccagtatggcaaacgcgccgaggatcctggccctcggcccctgctagcgctcctgtgcgctgccgccggcccggccgccgcgcagaactgcggctgccagcctaacttctgctgcagcaagttcggctactgcggcacgaccgacgactactgcggcgacgggtgc

SEQ ID NO: 32002 - DNA, 294 bp, Zea mays
acggacgggagcgcggacgcgtggcggaccgtggcggaccgtggggtagaggcggtctcaaagctaggcgagctagcctccggtcacccgtcgatccacgcaaccatgtcgaggaggaagaccagggagcccaaggaggagaacgttacccttggacccactgtccgtgaaggagagtttgtctttggtgttgctcacatctttgcatccttcaatgacaccttcattcatgtcactgatttgtctgggagggaaactttggttcggatcactggtggcatgaaggtaaagctg

SEQ ID NO: 32003 - DNA, 300 bp, Zea mays
gattgccttcattggtgatgggagcttccaggttacagcacaggatgtgtcaactatgctgcgatgtgagcagaacagcataatcttcctgatcaacaacggtgggtacacgattgaggtggaaatccatgacgggccatacaacgtcatcaagaactggaactacactggctttgtggacgccatccacaatggcttgggcaagtgctggacctccaaggtgaagagcgaggaggagctgacggctgccattgagacagcgctaggggagaagaaggactgcctgtgcttcatcgaggt

SEQ ID NO: 32004 - DNA, 280 bp, Zea mays
ggacgctggcaccgtcagaggaaccgtcaacaacgcctgccggattcagcacgtgcggagggacttttgctcgctggacaagtacgtgtgggcgttcgtgaacaacaagccgctgtcgccgagctacaagtacagccggaagatcccggtgaagacgtccaagtcggagtccatcagcaaggacatggtccggcgcggcttccgcttcgtcggccccactgtcatccactccttcatggaggcggtcgggctcaccaacgaccacctcgtctcgtgcccg

SEQ ID NO: 32005 - DNA, 300 bp, Zea mays
catggactgtgtgttgcccatcccaattcccaaccccaaccaaaccaaacacgcgtgcaggtgtggccggcctacggaacaagaagttcgagacgctgtcgtacctgccgccgctgtcgacggacgacctgctgaagcaggtggactacctgctgcgcaacggctggataccctgcctcgagttcagcaaggtcggcttcgtgtaccgcgagaactccacctccccgtgctactacgacggccgctactggaccatgtggaagctgcccatgttcggctgcaacgacgccacccaggtgt

SEQ ID NO: 32006 - DNA, 293 bp, Zea mays
ggacgcggccgcacaacggcacgattctcctcctccgtccgcgtactcagcggtttcggcgatgtcggggcgcggcaagggcggcaaggggctgggcaagggcggcgccaagcgccaccgcaaggtgctgcgcgacaacatccagggcatcacgaagccggcgatccgtagctggccaggaggggcggcgtcaagcgcatttctgggctcatctacgaggagacccgcggcgtgctcaagatcttcctcgagaacgtcatccgcgacgccgtcacctacaccgagcacgctcg

SEQ ID NO: 32007 - DNA, 298 bp, Zea mays
gctagctcgaaaacccaacattcttcgcaatgatagaccatttaagacaagcatagtcttttcactagaagaaggacatggacaactctttagggcgcttggtgtattcgcacagaggaaaatcaacctcacaaagatcgacagtcgtccacacaaggagaggcctcttcgagtatctgatgactgttcctcactcttaaagaattttgattacctcttttacgttgaccttgaagcatcaatggctgatccaaagattcagaatgctcttggaaatctgaaggagtttgcaaccttt

SEQ ID NO: 32008 - DNA, 299 bp, Zea mays
ggaaggaaaggcgcggacaagatgtcgtggcaggcgtacgtcgaagtgcacctgatgtgcgagatcgaaggacaacatctcagcgccgccgccatcgtcggtcacgacggcagcgcttgggcgcagtccgagagcttccccgagttaaagcctgaggaggttgctggtatcataaaggactttgatgaacctggtactcttgcaccaactggtcttttcgttggaggtacaaagtacatggtgatccaaggtgaacctggagttgtcatccgaggaaagaagggcactgggggcattac

SEQ ID NO: 32009 - DNA, 299 bp, Zea mays
ccatcgtccatcgccacacccaacccccccctccgccccgcgcttcgcctgggtactggcgtccgccgcgccccgtcccgtccaggaacaggaagagcagtaacccatccatcggggatcaccaggggagcaagatgtcgactgccgccgccccaagattgcccgctcccagatccggggcaagctatcactatcagacgaccgcggctccggtggccaacaccctctccttcgccggccacgcgaggcaggcggcccgcgcgtccgggccacggctgtcgagcaggttcgtggcgtcc

SEQ ID NO: 32010 - DNA, 300 bp, Zea mays
cccacgcgtccggaaaactagaaaaggctcctcccgaccgcaacgcccctcatctccctcgaccccgacatccccgacccgatggcgcccaaggcggagaagaagccagcggagaagaagccggcggccgaggagaaggcggagaagacgaccgcaggaagaagcccaaggccgagaagcggctgcccgcgtccaagtcctccggcaaggacggcggcgagaagaaggggaagaagaaggccaagaagagcgtggagacctacaagatctacatcttcaaggtgctgaagcaggtgcacc

SEQ ID NO: 32011 - DNA, 293 bp, Zea mays
gatcatgtcgtcttgctgcggcggcaagtgcgggtgcggctccagctgctcctgcggcagcggatgcaacggctgcggtatgtaccctgacgtggagaccgccgccaccagcagcgtcaagaccacggtcctcgccgcgccgaccaccaaggccagcgccggcggcttcgaggcggccaccgagggcggcggctgcgactgcaacacctgctagtgcggcaccagctgcggctgctcctgctgcagctgcaactgagctggcccggcccgcgatgcgcacgagatcgagagag

SEQ ID NO: 32012 - DNA, 294 bp, Zea mays
gcatcattgccgagacaggggctggtcagcacggcgtcgccaccgccaccgtgtgcgcccgtttcgggctgcagtgcatcatctacatgggcgcacaggatatggagaggcaggcgctcaatgttttccggatgaggcttcttggtgcagaggtcagggcggtacattctgggacagcaaccctgaaggatgcaacttcagaggctatccgtgactgggtcacaaatgtggagaccacacactatatcttgggctctgttgccggtccgcacccgtacccgatgatggtgaggg

SEQ ID NO: 32013 - DNA, 292 bp, Zea mays
ggacgtggggcggacgcgtgggtgcagctggaagatgtggtcgtaggacagtatgcaagtcacacaacaggtggtaccacataccctgggtatactgatgataagacagtgcccaaggatagtgtgactccaacgtttgctgctgcggcgcttttcataaataatgccagatgggatggagttccctttcttatgaaagctgggaaagctttgcacacaaaacgagctgagattagggtacagttccgacatgttcctggaaatctctacaaggggagttttggcacagatc

SEQ ID NO: 32014 - DNA, 294 bp, Zea mays
caacttcagccagggcgccaacttcgcggtgatgggcgcgacgggcttgacctcaagtacttcaaggacaacaacgtgtggagcatcccgcccttcaacacgtccatgggcgtgcagctggagtggttccaggaggtgaagcgcacactctgccccgacgaccccggcgcgtgccgcgccctgttcgggagggccctgttcgtgttcggcgagttcggcggcaacgactacagcttcgcgtggaaggcggactggtcgctggagaaggtgaagacgatggtgccggcggtggtg

SEQ ID NO: 32015 - DNA, 291 bp, Zea mays
cttggtgaaaaccgatacccactggttgagcaactggaaccaaaccaagctgcaaaggtcactggaatgcttttggagatgcatcacaccgaggtcctccacctgctcgagtcccctgatgctctcaagtccaaggttgctgaggcgatggatgttctccgcaatgtggcccaccagcaaaacccaaacctcccgaccagtcagcttgccgcattatcactgaccgaagcattatgtcctaacttgaaggccataacaaactatcttcagtttccaactcagtgcgggtgt

SEQ ID NO: 32016 - DNA, 289 bp, Zea mays
ccacgcgtccggagaagaaaaaggggaccaaaaaacggaaaaggggataggaggaacggatcagcggtggaagcttccagccctagcgcacaatggcgggttggtgcgagcaggcggtggcgctgctacagcccccgcggtggcggagatggccgtcgacgtgctgctctgcgcggtgccgatctgggccgccgtcatgatcggcctcgtcgtcggctggtcctggcgcccgcgctggacgggactgctcttcctcggcctccggagccgcctccgcatcctctgggtg

SEQ ID NO: 32017 - DNA, 294 bp, Zea mays
tctcagttagacttagaccacactcaaaccagccacggacagcctcaaaatcccgagcaggagctcgctcgtagccccgagaacccgaaagctctgcagcgagatgtctcccgagctgaccggcaagatggccgccaaggccgccgccgccgcggggtagaagcccgcgacgagggcgtacgtaacgttcctggcgggcgacggcgactactggaagggcgtggtgggcctggccaagggcctgcgcaaggtcggctcggcctatcccctggtggtggcccatctgcctgacgt

SEQ ID NO: 32018 - DNA, 244 bp, Zea mays
gaaattagagtaagatatgctactgagcacagatgtggtgtggttgtcaaaggaccaaagctcagtgggaacatttctggaaccgatcccttgaaggacaaccgcttgcatctgaaggctgaaccgttggatgactcacaagaagctaaaaacagtgcagctgtgatcaatgagctttctaaagagataacgcacatactggtttctcaccccatcaatgcacatcgtgcagcttgaggggaag

SEQ ID NO: 32019 - DNA, 291 bp, Zea mays
cagcttgcgcccgcaatggcactcgtctccgcctcctcgtcctccaccaccgccgtcacgggctccccaggaatgggcagcgggcgtcgtcctccttcctcggcggcaagacgctgctgagacaggccgaggcggcccggccgtcgttcgccgtgcgcgccgcggcggaccccaacaggccgatctggttccccggcagcacccctccgccgtggctcgacggcagccttcccggcgacttcggctttgatccctggggcctcggatctgacccggagagcctgcggtgga

SEQ ID NO: 32020 - DNA, 284 bp, Zea mays
ggacgtgtcgagacgcgtggggaacactctagcaaagggttatgaaaaatttaaagcagctgcagacagtgttaaggataatggtggaactatacttagtggacaggatgcatttattctttgggacacttatggttatccaattgatttgactgaggtcatggcaatcgactatgggctaactgttgataagaaggggtttaatgcttctatggaagaagcgaggcaaaaagctagaaatgctcgtaacaagtctggacggaactctattgctatggatgcga

SEQ ID NO: 32021 - DNA, 289 bp, Zea mays
cccacgcgtccggggcgggctggactacctgggcaaccccaacctggtgcacgcgcagagcatcctggccgtgctcggcttccaggtcatcctcatgggcctcgtcgagggcttccgcatcaacggcctcgacggcgtcggcgagggcaacaacctctaccccggcggccagtacttcgacccgctgggcctcgccgacgaccccgtcaccttcgccgagctcaaggtcaaggagatcaagaacggccgcctcgccatgttctccatgttcggcttcttcgtccaggcc

SEQ ID NO: 32022 - DNA, 285 bp, Zea mays
ggtagcagccgcgccgctcccggcgctggcggacagatggagaaggccgcactgtttgacttcaacctgacgctcccggcgatcgcgaccgagttcctgctgctcatggtggcgctggacaagctctacttcacgccgctaggcaagttcatggatgagcgggacgccaagatccgcggtgagctcggcgatgtcaagggcgcctccgaggaggtgaagcagctggaggaccaggcggcggccatcatgaaggcggcgcgcgccgagatcgcggcggcgcttaac

SEQ ID NO: 32023 - DNA, 286 bp, Zea mays
gggtgactgactgaccacactagcgcagagccacaggagcaaaggggggcatcctctctcgcgcgcgcgccatggccaccaggccgggccctttgactgaatggccatggcaaaggcttggaaacttcaagtacttggtgatggctcccgtggtggtccacggcgcgcggcgggtgttggcgcggggctggggcgacatcgaccttgccttcgcgctcatcctgccgtcgctgctgctgcggatggtgcacaaccagatctggatcagcgccgcggctaccagacg

SEQ ID NO: 32024 - DNA, 287 bp, Zea mays
tgttgtcattggacctcttgaagacaacactatttattactaccgatgtggagggcaaggtccagaattccaatttaagaccccgccctcccaatttcctttgtcattggctgttgttggtgatcttggtcagactagttggacaacatcaacgctgaatcacattaagcagtgtgagcatgatatgcttttactccctggtgatctctcttatgctgattatatgcaacacttgtgggattccttcggcacattggtggagccacttgctagcaaccggccttgga

SEQ ID NO: 32025 - DNA, 286 bp, Zea mays
ctcgagcgctcgcgccggcgaccacagcaaagaggaggccgcagcacgacagcgccccagggttcctactctcgtcgcagcggcagcactggtagcggcacagtgaggggaagatgtcgtcggtgttcagcggcgatgagaccgcccccttcttcggcttccttggcgccgccgccgcgctcgtcttctcatgcatgggggcggcgtacgggacggccaagagtggcgtcggcgtggcgtccatgggtgtcatgcgcccagagctcgtcatgaagtccatcgtgcc

SEQ ID NO: 32026 - DNA, 274 bp, Zea mays
caccatggccgcttctgatgaccatgacccgaagcgctgctgcaggtaagggtgagcgatgaggatggtgcgctggtggacgcgctcaaccgtcgagctgctgtttctgccgccgcccccagcttcttcgaggggttcgcgctccacgggatccgcgtggagagcatccgcccaggccacatcctctgctccttcacggtccccgcacgcctcacctccggcagcgatcacatagcccccggcgccgtggtggccctggtggacgagatcggct

SEQ ID NO: 32027 - DNA, 293 bp, Zea mays
agcaccttatactagcgaggaactaatgaaagtaactgaagaacaaattgctgcatcagctgctgctgcttggaatccacaacagcctgccacgtcgcaacagcaagaagaagcgtcctcacttcttggagtagtgggcgcttcttcttgctgttgactgcaagagcctttcctcgcactcgcccctctgcatttaccacattgccctcgtcggcggcgcgaccagctgccgccgcgtccagcaaaacaaccggccgtagtccaaaatagttccccatggcgtccatatcgtc

SEQ ID NO: 32028 - DNA, 200 bp, Zea mays
gcgggatcgagacgagcacggtgggtctgggatgtgaggccgtcaccgggcaggtcacggaggtcaacaaggacaccttctggcccatcgtcgaggccgccggcgacaaggtcgtcgtcctcgacatgtacaccgaatggtgcgggccttgcaaagtgatggctccgaaattccaggagatgtctgagaagaacctggat

SEQ ID NO: 32029 - DNA, 213 bp, Zea mays
cccacgcgtccgcttgctgcatgcgaaggagctctctagaaggctgaaggaagaacgagcaagtacgccagcttagactgtccataagctggcgaacttgctgcatgcgaaggagctctctagaaggctgaaggaagaaggagcaaacatcacagttaacagtgtccatcctggattgatcatgaccaatttgatgaggcactcctttgttct

SEQ ID NO: 32030 - DNA, 264 bp, Zea mays
gatttcttagtttctgctgctgtagctgagtttaaagggcctgttgtatttggtgttgttcgtctggcccaagtaaacatggagttggctagagttgaagccacgtttagtggtctatcacctggtaaacatggatggtcaataaatcagtttggggatttgacaagaggtgcagaaagcactggcaatgtctataatccgccagatcatttatctgataagccacttggtgacctgggaacactagaagctggagagaacggg

SEQ ID NO: 32031 - DNA, 189 bp, Zea mays
cccacgcgtccgcacacgcgtccgcggacggtggcgacgaggccgaggactacgtggtggtcaagcacgcggcgctgttcacgtccaccgagatgagccggctcctggcgcggcccaacgtgaagctgttcaacgccgtggcggtggaggacctgatcgtgcggcgggggcgcgtcggcggcgtggtca

SEQ ID NO: 32032 - DNA, 134 bp, Zea mays
cccacgcgtccggtcctcagtccctcacacactcactatacactgctctgctgcagcaagaaggaagaagctagcgcctccctagctctcgttgtcagcaatggccaccaccgccgcgtccagcctcctcaagt

SEQ ID NO: 32033 - DNA, 110 bp, Zea mays
cagacgcgtggcgagacgcgtgggtagcaagatcctccgcatcctcaaggcccatgggttggcgccggagatcccggacgatctctacttcctcattaagaaggcggtgg

SEQ ID NO: 32034 - DNA, 355 bp, Zea mays
ctcgcctgacgtacggtcggacatccggctcgaccacgcctccggctgcatcaccccggacgtgctggacacgtgggtgcccgtcgacttcaaggagcccgtgtcgttcaacgccggcgcgcagatcttctcggacggcgggctggactacctggccaaccccaacctggtgcacgcccagagcatcctggccgtgctcggcttccacgtcatcctcatgggcatcgtcgacggcttccgcatcaacggcctcgacggcgctcgccacggcaacaacgtgtaccccggcggccagtacttcgactcgctgggcgtcgccgacgaccccgtcagcttcgccgagctcaacgtcaac

SEQ ID NO: 32035 - DNA, 313 bp, Zea mays
tgctaatggtgaaaatgcgtgggttggcattgatggaaggagtggcgatatcgttgatatgaaagagcgaaagatctgggatacctacagcgttaaagcgcagacgttcaagacagcgattgaggctgcttgcatgcttttgagaatagatgacattgtcagcggtatcaagaagaagcaggctcctggagcctcagctcccaagcaaccccaaattgaaactgagggtgatgccgacaatgggcagattatcccgaactagaggctgtgaccaacctgcactgtcaaagttgtttactagtgccggaatagc

SEQ ID NO: 32036 - DNA, 302 bp, Zea mays
  unsure (1)..(302): unsure at all n locations
cggacgcgtggtgacattactgaggaatccgctttacctgtttgccatatttgtgatttatcttgttggaaanagcctttgggtgcaatcagaaattggcagggaattccaacatggatttcttcctgccatcctttcactgtcgacgaaatttgttcccactgtaatgaacatcctgaagagattagctgacgcgggtcaagaacctgcagcagcccccgagaggcaaagagagatggaactccaaccagaatccaccaggaacggttccttatacagcaatgtgacatcggcagggtcat

SEQ ID NO: 32037 - DNA, 176 bp, Zea mays
agcaggccctccccgacgacctcatcaagcgaggcatggccgttccagatccgtcgagcccctacaaggtgcggctgctgatcgaggactacccgtacgcctcggacgggctggccgtgtggcacgccatcgagcagtgggtgacggagtacctggccatctactaccccaacgac

SEQ ID NO: 32038 - DNA, 304 bp, Zea mays
ccgcagttcccccgcgcccgagacgcaaccccgcgccaggagtaagtttgttcttttatcgatattatcgatatggcgagggaggagaatgtctacatggccaagctggctgagcaggccgaaaggtatgaagagatggttgagtatatggagaaggtggctaagactgtagatgtggaagagctcactgttgaggagcgtaacctcttgtcggtcgcatacaagaatgtgattggggctcgccgtgcttcatggcgcattgtctcttctattgaacagaaggaggagtcgcgtaagaacgaag

SEQ ID NO: 32039 - DNA, 177 bp, Zea mays
gaagaactacccgaccgtgagcgccgagtacagcgaggctgtggagaaggccaggcgcaagctccgagccctcatcgccgagaagagctgcgccccgctcatgctccgcctcgcgtggcactccgcggggacgttcgacgtgtcgtcgaggaccggcggtccattcggcacgatgaa

SEQ ID NO: 32040 - DNA, 304 bp, Zea mays
ccaagtactgccccaatgcccttgtcaacatgatcagcaaccctgtgaattcaactgtaccgattgctgctgaggttttcaagaaggctgggacatatgatgagaagaagttgtttggcgtgaccacccttgatgttgttcgtgctaagactttctatgctgggaaggctaatttaccagttaccgatgtgaatgtccctgttgttggtggtcatgcgggtatcactatcctggccgttgttctgagaggccacccttgcaaccaacgcattgtctgatgaagacatcaacgctctcaccaaga

SEQ ID NO: 32041 - DNA, 309 bp, Zea mays
ggacagcaaccacagcgtcctgctggtagacgtgctggtggaatgcagcagcccatgccaatgggtggtcagcaacaggtgttccctagaggtggtcgtggctatcgctatcctactggacgtggaatgcctgatcctggcatgcacagtgttggtgctgtgatgccaccttcatatgagatgggagggatgccaatgagagaagctgccccccaacctgttccaattggggcgctagcactgcacttgctaacgccccaccagatcagcagagacttatgcttggtgagaacctgtatcctcttgttg

SEQ ID NO: 32042 - DNA, 255 bp, Zea mays
aaaaaatgaagatatatcgacaattgaactctctggtggagcaaggatccattacattttccagtctatctttgtcaaaagtttagaggaggttgatccttgtgaggatgttacagatgaagatatccgcatggctattcaaaatgcaactggtcctagaagtgctctgtttgtacctgaagttccatttgaagtccttgtacgtaggcagatcagcagattgcttgatccaagtcttcagtgtgcacaattcat

SEQ ID NO: 32043 - DNA, 320 bp, Zea mays
  unsure (1)..(320): unsure at all n locations
cccacgcgtccgcccacgcgtccggcagcgagctgccgtttctcaattcactgaagatgaagatgtccattcttcttggagttgcacaaatgaaccttgggattgtgatcagctacttcaatgcaaaattttttaggaacagtcttaatgtgtggtaccagttcattccccagctgatcttcttgaacagcttatttggttacctgtccttgcttattattattaagtggtgcacggggtcaaaagcagatctataccatgttatgatctacatgttccttagcccaacagatgagattggtgaaaaccagttngttagt

SEQ ID NO: 32044 - DNA, 355 bp, Zea mays
gacgcgcagtacgtccgaatccgggtcaccacgcgtccgagacctggcggtctgcccctctgccctcccggtctctcctcttcccgtcccgcccagcgcgaccccccaaggaagccccgacgccacggcatggggatcgtggaggaggcgcacaacctgcgcgtggtgggcaaggggaagcgcggggtcatcgtgttggcgcacggtttcggcaccgaccagtccgtctggaagcatctggtgccgcacctcgtcgccgactaccgcgtcgtgctcttcgacaccatgggcgccggccccaccaacccggactacttcgacttctcccgctacgccacgctcgagggctacgcgc

SEQ ID NO: 32045 - DNA, 315 bp, Zea mays
cggacgcgtgggaagggctgaaacacatgcacagctttgatcctccatacgctcataatgatgtacagcctggtaatgttcttataacctggcgtaaaggacaagcacctgttgcaactttaatggattttggaagtgcaaggcctgcaagaaaggaaatccgttctcgttctgaggcactacagttgcaggaatgggccgctgagcattgctctgctccttaccgggcccctgaattatgggactgcccaagccatgccgatattgatgagaggacagacatctggtctctaggatgcactctttttgctatca

SEQ ID NO: 32046 - DNA, 315 bp, Zea mays
gaaccaagcagaccccagcagaagaagcgaagtcgtcgccggagcaggaggaagagcgagcagcaagatgtcgtggcacgcgtacgtcgatgaccacctgctgtgcgacatcgaaggccagcacctcagcgccgccgccatcgtcggccacgaggcagcgtctgggcacagtccgagaacttccccgagttaaagcctgaggaggttgctgggatgataaaggactttgatgaacctggaactcttgcaccaactggtctttttgttggaggtacgaatacatggtgatccaaggtgaacctggagttgtcatct

SEQ ID NO: 32047 - DNA, 315 bp, Zea mays
cccacgcgtccgccctctgctgcagcaagaaggaaagaagctagcgcttatagcttgtcagccatggccaccgccgccgcgtctagcctcctcaagtcctccttcgcgggctcccggctcccggccgccacgcggaccacaccggcgtccctcgtggtggccaccggcccgcgcggcgccggcgcggggcccatctgcgcgtccatgtccatgtcctcctccaacccgccctacgacctgacgtccttccggttcagccccatcaaggagtccatcgtgtcccgcgagatgacccgtcgctacatgacggacatg

SEQ ID NO: 32048 - DNA, 315 bp, Zea mays
ccaggagtctcagtttgtggaggctacagccatggtgggtaagggtgacttgcatttgactgggcagcttggtgatgttattaaggagtcagcgcactagctttgacatgggtgagagcaagagctgcggacctcaatttgtcacctacttctgatatcaacttattggagagccgtgatatccacatacattttcctgctggtgctgtgccaaaggatggcccttctgcaggtgtgacattggtaacggcactagtgtcgctttttagtaacagaaaagtgagagcagatactgctatgactggcgagatgact

SEQ ID NO: 32049 - DNA, 311 bp, Zea mays
  unsure (1)..(311): unsure at all n locations
ggacctggctggtgcgaggcgtccaagcagatggacgaggtcttcgcgcacctcgccgtcgactatccccacgcagccttcctgcgggttgaagctgaagaacaacctgaaatatcagaggcatatggagttacagcggttccatattttgttttctgcaaggaaggaaaaattgttgatactttggagggagtaaacccagccagcctggccaataaggttgcaaaagtagctgggcctgctagtgttgctgagtctgctgtacctgctagccttggagtcgctgctgggcctgctgtacttgaanacat

SEQ ID NO: 32050 - DNA, 305 bp, Zea mays
ggaccgtggtccgactcccccgccgaggccgaggagcgtctgctcgacatcaagaaggtggtcggacatccccgagggcgtgaccgacgccgacgacgtggccgccatcgtccgcgccacagcaaggcatcgtcgtcgtcgtcgtcgtcgcgccacgacggggtgtggaaggagctgctcatcaacccttcccgccccgtgcgccgcatgctcgtggcggggctcggcctcatgttcatccagcaggccacgggcgtggactgcgtggtgatgtacagcccgcgggtgttcgagcgggcgggcat

SEQ ID NO: 32051 - DNA, 348 bp, Zea mays
atacgctgcagtacggtcggaatccgggtcaccacgcgtccgggacctggttgatgaatgccatcacgcaactggtaaccacccatatactaggataatgaaggaattctatcatggatcagagcataagccaaatgtgttcggtatgacagcctctcctatcataagaaaaggggtctcctctgatttggattgcaaaaatcagctatctgagctggaaaatattttagattccaagatacactctgtggtggatagagaagagatagaactttgtgttccttctgcaaaagaagtgaatagatactatgagccaagaactgtttcttttgacgatttaagtgaaga

SEQ ID NO: 32052 - DNA, 305 bp, Zea mays
cggacgcgtggcgagacgcgtggggtggtgcgcaacacggcgcacctgttcctggacgagctgggcgaggcgtacgacgaggccgaggactacgtggtcatcaagcacgccgcgctcttcacgtccacggtcatgagcctgctcctggcgcgccccaacgtcaagctgttcaacgccgtggccgtggaggacctcatcgtcaggggagggcgcgtcggcggcgtcgtcaccaactgggcgctcgtgtccatgaaccacgacacgcagtcctgcatggaccccaacgtcatggaggccaaggtcgt

SEQ ID NO: 32053 - DNA, 307 bp, Zea mays
agcaagcaagcaagcagcgagtacatacatactaggcagccaggcagccatggcgcccaccgtgatgatggcctcgtcggccaccgccgtcgctccgttccaggggctcaagtccaccgccagcctccccgtcgcccgccgctcctccagaagcctcggcaacgtcagcaacggcggaaggatccggtgcatgcaggtgtggccggcctacggcaacaagaagttcgagacgctgtcgtacctgccgccgctgtcgacggacgacctgctgaagcaggtggactacctgctgcgcaacggctggata

SEQ ID NO: 32054 - DNA, 262 bp, Zea mays
  unsure (1)..(262): unsure at all n locations
ggacctggcgcgtgctcaagccggggcgcctctacgtctcctacgagtgggtcaccaccccgcagtaccgcgccgaggacccgggccacgtcgagtgcgtccacggcatcgagcgcggcgacgcgctcccggggctccgccgccaggacgagatcgcgtccatcgccaaggaggccggcttcgaggtgctcaaggagcaggacctggcgctgccgcncgcgctgcactggtggacgcgcctcaagatgggccgcatcgccta

SEQ ID NO: 32055 - DNA, 309 bp, Zea mays
ataaaatattgccagtcccgcagtcgagatggccctacgccgccagctcgccctcgccgtcctcgccctggcggcaaccacagccgcggccaactccggcttcgcggactccaacccgatccgtcccgtcaccgaccgcgcggcctccgcgcgcgagtccaccatcttcgccgctgtcggccgcacccgcgacgcgcttcgcttcgcacgcttcgccatcaggtatggcaagagttacaagagcgcggcggaggtccagaagcggttcaggatcttctccgagagcctccagctcgtccgctctaccaa

SEQ ID NO: 32056 - DNA, 122 bp, Zea mays
gggttggcttctcctccccctccggttcgggttcgggttcgtgaggttctcaggagttcgggttcgtaggtgagcggatcgagatggcggctgtcggatgttgagtaccgctgcttcgtcgg

SEQ ID NO: 32057 - DNA, 308 bp, Zea mays
cgagccaccgagctacctgacgggcgagttcccgggcgactacggctgggacaccgcggggctgtcggcggacccggagacgttcgccaagaaccgggagctggaggtgatccactcccgctgggccatgctgggcgcgctcggctgcgtcttccccgagctgctcgcccgcaacggcgtcaagttcggcgaggccgtgtggttcaaggccggctcccagatcttcagcgagggcgggctggactacctcgggaacccgagcctcatccacgcgcagagcatccttgctatctgggcctgccaggtcg

SEQ ID NO: 32058 - DNA, 305 bp, Zea mays
ggaataccttgttgtttgcaagttgtgcaaaggaagtggtgacaaatgcccaacgttaatgtggttatgtctgataaggcactggttaagcaattacaaaaagaacttgcaaggttggagagtgaattgcgatgcccagcttcatattctggtcttgaagcattagtgagagaaaaagataatcaaatccggaagatggataaagaaattaaggaactgaagttacatcgtgatcttgctcagtctagactgcaagatttgctcaaggttgttggagataaccacggttcgaagcaccccctggc

SEQ ID NO: 32059 - DNA, 303 bp, Zea mays
cccacgcgtccgggcagatccagcgcttcggcggaacccaagctcaccgtcgtatgcctcctcctcaccgtcgtcgtgctccgcggcaccgtcggcgccggccgcttcggcacgccgcagcaggacctcatcgagctacgccagcacttcgtgtcccacccgcaccgggcgctcgccgagcaccacgacgccaggtccagggcctccaccaccaccacatcgtcctcgtcctcctccgcccgccgcgacgacgaccccgacccgccaccgaggtcgctcagggacccgccctacacgctgggg

SEQ ID NO: 32060 - DNA, 303 bp, Zea mays
cccacgcgtccgggcgcaccggaagatgaggaccgccatgccggtgatcttgggaatgtgacagcgggagcagatggtgttgttaatgtcaatattactgacagccagatacctcttgctggaccccactcgatcattggccgagctgttgttgtccatgctgatccggatgatcttggcaaaggtggacatgagcttagcaagagcacgggaaatgctggcggacgtgttgcctgtggtatcattgggctccaaggctaaagcagttaacctccgaggcaaacaccatagaaggtcgaagcg

SEQ ID NO: 32061 - DNA, 322 bp, Zea mays
ccaaaccctagcttcgctcgttagggcggcgagccggcgatggcgaagtctctgcgatccaaacgcgagaagcggcttcggacgttgcgccgggagatagcggaccgttctacgacaagaaggaggccgccaagctcgccgcgcaggccgccgccctagctgctgccccgctcccggtccgcgggcccccgccatcccaggatgccggcagctcccgcgcactagctcggcctcggctattgacgtggagatgtctgatgcacggaacaacaggtctaagaccttcttgaggccacttggcagcattagcacagagaaggtg

SEQ ID NO: 32062 - DNA, 304 bp, Zea mays
aaagatatgaagaccagagggaagactttgacggagcggtacgagatggggaagctgctggggaaaggcgcgttcgggaaggtgcactatgcaagggacctcgagtccaaccagggtgttgctatcaagatcatggacaaggacagggtgctcaaggccgggctctcggagcaggtaaagcgtgagatcacgactatgcggctggtggaacacaaaaacatcgttcgtctccatgaggtcatggcgacacggaacaagatctacatcatcatggagtatgccaaagggggtgagctcttagaca

SEQ ID NO: 32063 - DNA, 290 bp, Zea mays
ggacctggcgtgcgacgactgggtgggctaccgccgccctacgcaaggtgccgagaacttcgccgatatctgcgccggagaagagcgcccaccagatcaggcgcttagaaggcgcgctggccggtggatgacgatggcgggtggcgggggactgaaccggtcttcatcgagggggcagctgccgccgcaagagctgcttgacgatctctgcagccggttccttctgaatgtgcccaaggaggagctggagtcgttcgagcggatcctgttcctgctggagcaggcgcact

SEQ ID NO: 32064 - DNA, 341 bp, Zea mays
tgtacgccgcagtacggccgaatccgggtcaccccgcgccgggacctggcggacgcgtgggcggacgcgtgggcggacgcgtgggcggacgcgtggggtcgccggaggacaggctggcaacctcggcgaatccgtcaccatctctcgcgagaagaccaaggtcaccgtcacctctgacggacccttctccaagaggtacctgaagtacttgaccaagaagtacttgaagaagcacaacgtgcgggattggctacgcgtggttgctgccaacaaggaccgaaacgtctatgagctccgctacttcaacattgctgagaacgagggcgaggaagatgattaga

SEQ ID NO: 32065 - DNA, 317 bp, Zea mays
cggacgcgtggcgcccgcgctggccgccccgcgcgggcgcttgtcctcgaggaagacgacgacatcgaactgttggagcgcgtgaaggaggacaggaagaagcggctgcagaagcagcgcatcatcagctcctccggcgccgagaccgggtatttgcaggacctcatctacaggctcagcaaagtcgggcaggccattgacaacgacgacctcccagccgcgagcagcgtgctgggaccaagctcagacgcccagtgggtgcagaacatcaatgcagctttctccaagctcagctcaagcccggagcagaagaacgt

SEQ ID NO: 32066 - DNA, 296 bp, Zea mays
  unsure (1)..(296): unsure at all n locations
cggacgcgtggctggacgcgtggggacggcaagtacacggccctcccgccgttcgacgccatcgcccagaaccccgaggccaagttcctccacatctgctccaacgagaccatccacggcgtcgagttcaaggactacccggagccccgcaacaggtcgggcatcctcgtcgccgacatgtcctccaacttctgctccaagcccgtcgacgtctcccgcttcggcgtcatctacgccggcgcacagaagaacgtcaggccctccggcgtcacnatcgccatcgtgcgcaaggacct

SEQ ID NO: 32067 - DNA, 313 bp, Zea mays
cggacgcgtggttcgccaccgacccgcggctgcccaagaacgccaaggccttcttcagcatcctcgactactccgtgttcagctgggacaacaagctcccgggcgcccagctgctgctgtcgcgcctgcgcatgttcctcaaccccggctacccgtacgaggagtcgctagccggctaccacaacgccaccagcctcaacatgtgcatgtacttcccgcgcttcgccgccttcaacttcaccaagggcgggatggcgctcttcaaccacggcagggggcagccgctgcagtacgtcgtcgccaactccttcat

SEQ ID NO: 32068 - DNA, 305 bp, Zea mays
atcgacacgatcgcgagcgcaacacgtacgttgtcggaagctcaagttagaagaagcaccagtgcctgatcgatggcggcccaggctctcctctccggccggcagctgctgggccgccccgtgcagtcggccgtctctaggtcgtcggcgaggaaggcgcccttcgtcgtcagggccagctccagccctccagccaagcaaggtgccgacagcagctgtggttcgcgtccaagcagtccctctcctacctcgatggcacgctgcccggcgactatggcttcgacccgctgggcctctcggacccg

SEQ ID NO: 32069 - DNA, 211 bp, Zea mays
cccacgcgtccgcacgtctaatcagacattttactcagaagtcatctttgcttgccggtcccgaataaagagcagcagcgcaagaggtcggtagagcgagaagaaggcaatggcggccgagagcttccttttcacctcggagtccgtgaacgaggggcacccgacaagctgtgcgaccaggtgtcggacgccgtgcttgacgcatgcctcg

SEQ ID NO: 32070 - DNA, 315 bp, Zea mays
cataaacctagaattctatcccttattggtgtcccctatctctcaactacttggtggacttttaaagaacctgttggcatttggggtgaaggcatctttactgctcaggggatattagagcacttaaacgtgacaaaagacatctctgactacctttcatatactaccagggtgaacatttctgaagaggatgttttatattggaattccaaaggttttcttccatcactaaccatagatcaaatccgcgatgtagcacgtgtatttgtaaatgggaagcttgcaggtagtaaagttggtcattgggtctcactg

SEQ ID NO: 32071 - DNA, 314 bp, Zea mays
  unsure (1)..(314): unsure at all n locations
cccacgcgtccgatcgacgaggctgcactgagagaagggctgccgctccgcaaggctgagcatgcattctacttggactgggctgtccactccttcagaatcaccaactgcgagatccaggacaccacccagatccacacccacatgtgctactccaacttcaacgacatcatccactcgatcatcgacatggacgcggacgtgatcaccatcgagaactcgcggtccgacgagaagctgctctccgtgttccgtgagggtgtcaagtacggcgcgggcatcggccccggtgtctacgacatccactcncccag

SEQ ID NO: 32072 - DNA, 312 bp, Zea mays
cggacgcgtgggcaagcaagcaagcagcgagtacatacatactaggcagccaggcagccatggcgcccaacgtgatgatggcctcgtcggccaccgccgtcgctccgttccaggggctcaagtccaccgccagcctccccatcgcccgccgctcctccagaagcctcggcaacgtcagcaacggcggaaggatccggtgcatgcaggtgtggccgcctacggcaacaagaagttcgagacgctgtcgtacctgccgccgctgtcgacggacgacctgctgaagccagtggactacctgctgcgcaacggctg

SEQ ID NO: 32073 - DNA, 321 bp, Zea mays
ggaaaaagtagttgatcacttgcggggtttgagtggatcactgctgtttttagaaccagtgacaaagaaagaagcttctgattaccttgatatcatacggtacccaatggatcttggtaccatcagggacaaggtgagaaagatggtgtacagaaacagggatgaattcaggcacgacgtagcacagatacaactcaatgcacacatatacaacgacactcgctatcctcacatccctccgcttgctgacgagctcatggaggtctgcgaccatctgctttacgaaaacgcagatctgctcaccgaggcggaagatgctat

SEQ ID NO: 32074 - DNA, 272 bp, Zea mays
catagatcccgtaactgaatttctggaatgcttatatgttaactatgattttgatggtgctcaacagaaactcatagagtgtgagcaggttatactgaatgatccattcctgggaaagcgcattgaagagggaaattttgtcagtgttcctttgagagatgagttccttgaaaatgctaggctttttattttcgagacatactgccgtatccatcggtgcatcgatatcagcatgcttgctcagaagttgaacatgagctacgatgaggccg

SEQ ID NO: 32075 - DNA, 306 bp, Zea mays
gttgagaagcacgtcgctgaggctgacattatctttgtctcggtgaacacccccaccaagacccgtgggcttggagctggcaaggctgccgacctcacctactgggagagcgctgcccgcatgattgcggatgtctccaagtctgacaagattgttgttgagaagtccactgtccctgtcaagaccgctgaggctattgagaagatcttgacccacaacagcaagggcatcaactaccagatcctttccaacccagagttccttgcggagggcactgccattgaggacctgttcaagcctgacaga

SEQ ID NO: 32076 - DNA, 307 bp, Zea mays
gcgagcgtggcgcgacgcgtggggcacaagcagcaaaaagctaatctcaggtcccatattagcgagcggtactgtcacagatactagcaggaacggaagcaaaagtgcaaaacatgtccagactcagcatgaacctggcgacccagaggcacgcgccatccacatttattctcggcatacacaagcagcaaccatccatgagaagcagggggaaaaaacccctctactggcgtttgaacatgtggcggatcaggtcgacgacgcggttgctgtagccccactcgttgtcgtaccacgagacgagctt

SEQ ID NO: 32077 - DNA, 299 bp, Zea mays
cggacgcgtggcgagtgatgaagttggtaaaacatccaaacattgtccaattgtatgaggttatggctaccataaccaagatatattttgtgatagagtatgtcaagggaggagagttgttcaaaaaggttcaacgtggaaggttaaaagaagatgttgctcgtacatatttccaacaattgatcagtgctgttgacttctgccatactagacaagtttatcatagagatctaaagcccgaaaatcttcttcttgacggaagtcacaacttaaagaattcagactttgggttgagtgca

SEQ ID NO: 32078 - DNA, 177 bp, Zea mays
cctggaactcttgcaccaactggtctttttgttggaggtacgaagtacatggtgatccaaggtgaacctggagttgtcatccgaggaaagaagggcactggaggcattactatcaagaaaactggcatgtccttgattatcggtatctatgatgagccaatgactccagggcaatgc

SEQ ID NO: 32079 - DNA, 309 bp, Zea mays
ctccgccgccgctcccgctccgccccagcgcatcgcccgccgccacagcgtaccgcgacctcatctatcaccttcagctttcaatcatggcggacgtcgatgtcgaaccggaggttgccgccggagctcccaagaagaggacgttccgcaagtacagctaccgcggcgtcgacctagatgcgcttctcgacatgtccactgacgacctcgtccagctcttccccgcgcgcgccaggagaaggttccagaggggtctgaagaggaagcccatggcgctcatcaagaaactgcgcaaggcgaaaaaggatg

SEQ ID NO: 32080 - DNA, 310 bp, Zea mays
cccacgcgtccgcccacgcgtccgcccacgcgtccgcccacgcgtccgcacacgcgtccgggaccgtggcacgcttggggcaacagacctcctggtgcctggcgttctcccaattggctgcttcccgttgtacctgacgctgtacaacaccagcagcaaagcagattacaacgcccggaccgggtgccttcggaggtacaaccgcctggccttccaccacaacagggagctgaagcagcagcttgacgagcttcagaagaagtaccccaagacgaagatcatgtatggagattacttcaaggctgcactg

SEQ ID NO: 32081 - DNA, 314 bp, Zea mays
cccacgcgtccgggcctcaaggcgttcacagaatcagcaaaggtgtttgagaacttgcatctcgaggaatgcaaccgggtttctcttgtcggtattcttgctttcctcctcaactgcagagagaagttcagggctctatcgttggtgaaatgcatggggatcaaggatatctgctctgcgcctgcacaacttcctctttgccgatcacttcgtttccttacaatcaaggattgcccaggtttcaccgatgcaagcttggctgcggtggggatgatttgcccttagttggagcaggttgacctgagtggtcttgg

SEQ ID NO: 32082 - DNA, 309 bp, Zea mays
aattgattcagctaggagccaagactcttgtggttccaggaaaccttcctattggatgtgtcccaaaatatctgatgatattcaagagcaataagaaagaggattatgatccacagacaggttgtcttagatggatgaacgagttctcacagtaccacaacaagcttcttgtggagcagctcaagaagcttcgcaggctccatcctggagtaaccatcatctatgctgattactatggagctgctatggaaatattcctttcccctgaacgatatggtaatatcaacttatctagagattgtttgacag

SEQ ID NO: 32083 - DNA, 182 bp, Zea mays
cacaccccccgagctcagcttagctccactccagctccaatcacagtcgtgaccagagcgcgagagctagctagagggccgtgaaaatgccgatcaataggatcgccctggggagccaccaggaggtgtaccacccgggcgccctcaaggcggcgttcgctgagttcatctccaccctcatc

SEQ ID NO: 32084 - DNA, 275 bp, Zea mays
atataatctgcgtatggtacattatttcatgataaaatgtcccaggccgcgacgtcacgtttaatgggtattttgtttcacaaataaaatgccatagacgacgttatgagtaattcggatcccgaaccgacaatctacctacacagccatacgggggagacgtacacgcaggggctaagtaattccttcccttcacgatttctattcacaacggagttcccgttctgtatagcccatccaccaagctcaggccaaacatgcatgcattattgatg

SEQ ID NO: 32085 - DNA, 304 bp, Zea mays
ccacgcgtccgcgacgtgcgagccctcgcccgctcagtcacaaagcctcagatctcaagcgccagcgccgccgcttcgttcgtgtggaggggagaagacaggaaatggcggcgactgagggcgtgctcttggggatgggcaaccccctcctcgacatctccgccgtcgtcgatgacgccttcctgacaaagtatgacatcaagctgaacaatgctattctcgctgaggagaagcacttgcctatgtatgacgagttggctagcaagagcaatgttgaatatattgccggatgagccacccagaa

SEQ ID NO: 32086 - DNA, 310 bp, Zea mays
atcctccatcgccatccaatggccgccaccgccctgagcatgagcatcctccgcgcgccgccgccctgcttctcgtccccactcaggctcagggtcgcggttgccaagccgctggcggcccccatgcggcgccactgctgcgcgcgcaggccacctacaacgtgaagctgatcacgccggagggggaggtggagctgcaggtgcccgacgacgtctacatactggacttcgccgaggacgaaggcatcgacctgcccttctcctgccgcgcggggtcctgctcctcctgcgccggcaaggtcgtctccgg

SEQ ID NO: 32087 - DNA, 310 bp, Zea mays
cccacgctcaccgacgccacagcttgtgcgcgcgcaatggcactcgtgtccgcctcctcgtcctccaccaccgccgtcgcggcgctccccaggaatgggcagcagcgggcgtcgtcgtcgttgttctcctcctcctcctcttcctccttcctcgtcggcaagacgctgctgaggcaggccgaggcagcccggccgtcgttcgccgtgcgcgccgcggcggattccgacaggccgatctggttccccggcagcacccctccgccgtggctcgacggcagccttcccggcgacttcggctttgatccctggg

SEQ ID NO: 32088 - DNA, 310 bp, Zea mays
ggacggggcgactacggagctgcaagaaggtccacaagcaaggaatgagcctgggcaggtccgtggaccttaccaagttcaacggctacacggagctggtggcggactggacgagatgttcgacttcaacggcgagctgaaaggctgtagcaaggagtggatggtcgtgtacaccgactacgaaggcgacatgatgctggtcggggacgcccctggaatgagttctgcagcatggtgcacaagatcttcgtgtacacgagggaggaggtccagcgcatgaacccgggcgccctgaactcgaggccggagg

SEQ ID NO: 32089 - DNA, 311 bp, Zea mays
gccggccgcgcccgcagctcggccttcctccccttcacgctgccgctgcgctctgtgtcggcgccggcgccacgaggcgggtcttcgagcccgttgccgtcgcggtgtcgtcggagtacgggaccgagggcgcggacagcaggacggggagttctccgaggacctcaagctgttcgtcggtaacctgccgttcagcgtcgacagtgcgcagctggccgggctcttcgagcaggcgggctccgtcgagatggtcgaggttgtatacgatagaatgactgggcggaccgtggatttggattcgtgacaatgtc

SEQ ID NO: 32090 - DNA, 177 bp, Zea mays
tgctatttccctggtgattcaagcaccctagaagatgctgaggttgcgatgatggatctgtattgtgagaggtcgaaactacaagatggccaaagtatcctagatgttggatgtggatggggatccctttcactgtacattgcaaagaaatataggaactgcagtgtaacagggata

SEQ ID NO: 32091 - DNA, 237 bp, Zea mays
  unsure (1)..(237): unsure at all n locations
agcagctgccattgccatctactgacctgtgacctccgcatttccaaacagcccgatcgagctagagctagcagagcggcaggcacctccctcctcaaggaacatggcccgcacgctgcagttggcagtagtggcgaccgccgtggtggccttggtgctgctgtcggcggcggcgacctcggatgcggccagctactgcgggctngttgcttcggccagcgctccctgcatctccta

SEQ ID NO: 32092 - DNA, 303 bp, Zea mays
ggacgtggcgagacgcgtgggcgcttccgcttccgctccgtcgctcgcatgctcgcctccggagcacctccaccatggccccgaagaaggagaaggccccgccgccatcgtccaagccggccaagtccggacgcgggaagcagaagaagaagaagtggagcaagggtaagcagaaggagaaggtcaacaacgctgtgctcttcgaccaggccacctacgataagctgctctccgaggtgcccaagtacaagcagatcaccccatccatcctatctgagcgcctcagggttaatggatcttggc

SEQ ID NO: 32093 - DNA, 298 bp, Zea mays
agtacatggtgatccaaggtgaacctggagttgtcatccgaggaaagaagggcactggaggcattactatcaagaaaactggcatgtccttgattatcggtatctatgatgagccaatgactccagggcaatgcaatatggtggtggagaggctcggcgattacctgatcgaacagggcttctaagtttgtcataatgctattttggtcattgggcacttaagtttgcacctcatttggttctgtaatatgtgggcttgtgcatgtgcttggcgtattgcatgcagtgaataatttat

SEQ ID NO: 32094 - DNA, 279 bp, Zea mays
cgcacgcgtccgcactaacgaacgaactgaggtcgacgacgactgatcgagcagcgacgatggcggctgtgctgaacagcaggaagacgccgcagtggttgccgtgctggtggcggcggcgctgctggcgtcgtccgcttcggcggcgatcacctgcgggcacgtggggtcgtcgctggctccgtgcatcccgtacgcgacggggagggccagcgcgctccccgcgtcgtgctgcagcggcgtcaagagcctcaacagcgcggcgcggaccagcgcgga

SEQ ID NO: 32095 - DNA, 301 bp, Zea mays
gaacccaacaaagatactaaatcttcagatttaaggtaccagctgaaatcacaacattgcatatagtgacatgaattcaaaacatagctaaggcagtgtccaattcttggtaaactagatgtaaaatctactgcttgatatcagccttcttcttctgccacagcctgtccaaggagctgtctgcgtcgccctgagcacggacaaacccagagagagcaaacgttgtgaagtgaccatcatacaggccattcgcatccaagtggccaatgttgatctggacagaggcatggtccttggcagt

SEQ ID NO: 32096 - DNA, 310 bp, Zea mays
cccacgcgtccgatctgtttaaaactgatcatactaaacacgcttgtcatgcaatgatatttaacaaccctgaggcgatggaggaagacgaatggatgagatcgctgagatcagggcccctcacttcgaggagtcgatgaagtatgctcggcgtagtgtcagtgatgctgatatccgcaagtatcaggcgtttgcccagacattgcagcagtcccgggggttcggcagtgagttccgcttctcggatcagccggcgacactggtgctgctgctgcagctgatccgtttgcttctgcgggtgctgcggctg

SEQ ID NO: 32097 - DNA, 300 bp, Zea mays
caagcagcgccgcgagccacagctagcaccaccaccttgcaccgcacccgcaccgagacgaacagatctatcgatcgatagctagatccatggctgccggcggcgacgacaccaccatcgcgcaggtccacagcggcatcgacagcagcaacaagacgctgctcaagagcgaggccctctacaagtacgtgctggacacgtcggtgctgccgcacgagccggagagcatgcgtgagctgcggctggtgaccgacaagcacgagtgggggttcatgcagtcgtccccggacgaagcgtcgc

SEQ ID NO: 32098 - DNA, 304 bp, Zea mays
cttgacaaggagaaacgccaggcacattgtgctgatgttggatctcacttgttggagcgtctaaaatcgcttcaggagaagcacgaaatcataggtgatgttagaggaaggggactgatgcttggggtggaactcgttacggacagaaaggagaagacccctgccaagtcagaaaccattgaactgtttgagaagctcagagatctcggggtactagttggaaagggcggtctgcatggtaacgtcttcagaataaaaccaccgatgtgcttttcgaaggacgatgcagacttcttggtggact

SEQ ID NO: 32099 - DNA, 304 bp, Zea mays
agaaaccacctgcattttcattttgatctccctaatccctccggctagctgctttccagtgaccaaaagatatcaaagaccacttcccgtcttcctcccgtggctgtctgtcatctggctctgaaacgatggcagtcctgcaagttgctgctgctgcccctccccctgtctctgtgattgggttcgagggatttgagaagcgccttgagatcagcttctctgaggcacctgtcttggctgaccccagcggaaggggactgcgtgcgctctcgcgtgcccagatcgactctgttcttgaccttgc

SEQ ID NO: 32100 - DNA, 307 bp, Zea mays
tggaaggagaagatcagccagcggatgaagcttctgcaggatctcgtcccgggctgcaacaaggtggtcggcaaggcggtgatgctggatgaaatcataaactacgtgcagtccttgcaacggcaagtcgagttcctgtccatgaaactggccaccgtgaatccccagctggacttcaacaacctgcctaacctccttcctaaagatatgcaccagtcctgcggcccgctgcagaactcgcatttcccgctggagacctcaggcgcgccgctgccatacctcaaccaggggaacctctaataggctg

SEQ ID NO: 32101 - DNA, 326 bp, Zea mays
cttttgtggcaccatctctcaggacccttactgcgaaacttgcccttggatggcgaattcgcatgaccaatcatatgcttcgatattatttgaaaaggaatgcattctacaaggtattcaacatgtcaggtaaaagcattgatgcagaccaaagattaacacttgatgtagacaagttgaccactgaccttgctggcctagttactggaatggtaaaaccgctagttgacattctttggtttacatggagaatgaagcttttatctggacgaagaggagatgctatactgtatgcctacatgctactggggttgggctttcttaga

SEQ ID NO: 32102 - DNA, 316 bp, Zea mays
agcgcaccatccagttcgtggactggtgcccgactggcttcaagtgcggaatcaactaccagcctcccagcgtcgtccccggcggtgacctggccaaggtgcagcgtgccgtgtgcatgatctccaactccaccagtgttgtggaggtcttctcccgcattgaccacaagttcgacctcatgtacgccaagcgcgccttcgtgcactggtacgtcggtgagggtatggaggagggcgagttctccgaggctcgtgaggatctggctgcgctcgagaaggactacgaggaagtcggtgctgagtttgacgagggtga

SEQ ID NO: 32103 - DNA, 320 bp, Zea mays
cccacgcgtccggtcaccgccaccacagccgccagcagtccatcaccggttccgttcgaatgggccgcaagggacgcaaggctatggtttcgcgcgacgccgacgtcgacggcagcgaggatgagatggccgccgctcctgccgccgctgcgggcaggagcctctacgagatcttgggagttgagaagactgcttcacaacaagaaataaagaaggcatatcacaaattggctctgcgcctccatccagataagaatcctggggattaggaagcgaaagagaagtttcagcagctgcagaaggttatatccattcttgga

SEQ ID NO: 32104 - DNA, 313 bp, Zea mays
cacctcagcaaaagaaagctagctagtactctagctatatatacatgataactagacaaggatcgtgaagtaattaatataatgacaaagtcgtcaggggcgctagatcttgctcggagcaccggagggtcgcttagcaaggaccaagtcaaatccgccgttgatcagtatgtgaagtaccacgacctccacggaggcgaacaagaatcaaggaagtcaaattacgctgatttggcaaacaagtactatgatcttgtcactggcttctacgaatatggatggggcgactcattccatgttgctggcggatatc

SEQ ID NO: 32105 - DNA, 310 bp, Zea mays
agggacgcgtggcgcccgcgccctcgagcaggccaagatgctgttccccaacacctatcttctcgtcggacgctgcaacgacgagcacacctaccgctacaagggcaagaccgtcatgacccaggaagagcgatacgaatccctgcggcactgcaagtgggttgatgaggtcattcctgatgcaccgtgggttctcacacaggagtttattgataagcatcagattgactatgttgctcatgatgcgctgccttatgctgatactagcggaacagcaaatgatgtctatgaatttgttaaaacagatgga

SEQ ID NO: 32106 - DNA, 318 bp, Zea mays
cccacgcgtccgcataaccacaacctcttctcccctgtttcctctcgtgcgttctccgcagagcagaggagggctcgcggcagcggcagggtctccggtgtttttgttccagaatctgtagcaaatggctgacggcgaggacatccagccccttgtttgtgacaatggaactggcatggtcaaggctggttttgctggtgacgatgcgccaagggctgttttcccaagcattgttggacgcccacgtcacactggcgtgatggttggcatggggcagaatgatgcgtatgttggcgatgaggctcagtccaagagggg

SEQ ID NO: 32107 - DNA, 319 bp, Zea mays
agctcccatatccgctcccctacctctccagcatcctcccgtctccgtcgtctcgtctccgctcctcacctcgccagccatgggcaagatcaagatcggaatcaacggtttcggaaggatcggcaggctcgtggccagggtcgccctgcagagcgaggatgtcgagctcgtcgccgtcaacgaccccttcatcaccacggattacatgacgtacatgttcaagtacgacaccgtgcacggccaatggaagcacagcgacatcgccctcaaggactccaagacgcttctcttcggcgagaagcgggtcaccgtctttggc

SEQ ID NO: 32108 - DNA, 316 bp, Zea mays
cccacgcgtccgcccacgcgtccgatttcttctctctctgctcctccgcctccgcctccgcctgatccatccaagacagggatcgccatgtcggactcggaggagcaccacttcgaatcgaaggccgacgctggggcgtccaagacctacccgcagcaggctggcaccgtccgtaagaacggcttcatcgtcatcaagaaccgtccctgcaaggttgtggaggtttctacctccaagactggtaagcatggccacgccaaatgccactttgtcgccatagacatattcaatgggaaccagcttgaagatattgttc

SEQ ID NO: 32109 - DNA, 320 bp, Zea mays
ggaaactgggtgcagacgtaccggcagatgtccctcgaacgggcgtcgctagaccagtggcttcaggcggaggctcagaacttcgggccccccagctccgcgctcgtcttccagctggcgttcgtccctcacctcacccacctgggcgttcgtcaggaccctgccgtgatcgccgagaacgaggataagctgaagcaggtccttgatgtctacgacgagatactctcgaggaacgagtacctggctggcgacgagttcaccctggccgacctctcccacctcccgaactcgcactacatcgtgaacaccgagagaggaag

SEQ ID NO: 32110 - DNA, 325 bp, Zea mays
cccagtctccaccccggaaatggccagaacctgaggcactagaacccacccgcccgcggctctctccagcagccccccaatccatcgacgccgttggcgagggcgcacaggcgcgcgtcgcaccacatccgccacccacaacacaccaccgtcctcatctccggtgtgcaggcagagacgcgggatggcctcgcgccagtagtatccgcccggcactttctaccccacccatccggccgcgggtgggtttgaccgagatcggcaggcggccgtcggcgtctcgctcgctcgatccgcctcgtctcagtcctacctaggtatggcg

SEQ ID NO: 32111 - DNA, 317 bp, Zea mays
cccacgcgtccgaatcagagcatgggaaggttcagcttggaaacataactgtggatatggtccttggtggaatgagagggatgattggaatgctttgggaaacatccctacttgacccagaggagggtattcgttttaggggtctctcgattccagagtgccaaaaagtgctgccaacagcagttaagggtggtgaacctttgcctgagggtctcctttggcttcttttgacggggaaggtcccaaccaaagagcaagttgatgctctatcaaaggaattgcttgagcgctcaactgtcccagctcatgtctataag

SEQ ID NO: 32112 - DNA, 312 bp, Zea mays
cggacgcgtggcggacgcgtgggccggcgactacggctgggacaccgccgggctgtccgcggacccggagacgttcgcgcggcacagggcgctggaggtgatccacgggcggtgggcgatgctgggtgcgctgggctgcatcaccccggaggtgctggagaagtgggtgcgcgtggacttcaaggagcccgtgtggttcaaggccggcgcgcagatcttctcggagggcgggctggactacctgggcaaccccaacctggtgcacgcgcagagcatcctggccgtgctcggcttccaggtcatcctcatggg

SEQ ID NO: 32113 - DNA, 308 bp, Zea mays
cggacgcgtggcggacgcgtgggcgcgcgcttcaccttccccaccccgccgccgccatcgcacgcccgcaaccgcatccgctacgggtgcgtacaagtacgtctcggagctatggcggaggaagcagtccgatgtgatgcggttcgtgcagcgcgtgcgctgctgtggagtacaggcagcagccggccatcgtccgcctcacaaggcccactcgccctgacaaggcgcgccgcctcggctacaaggccaagcagggttatgttgtttaccgtgtccgtgttaggcgtggtggcaggcagatgcctgtg

SEQ ID NO: 32114 - DNA, 309 bp, Zea mays
cggacgcgtggcggacgcgtgggcggacgcgtggggcgcagagaatccccaagcaaacaaacagggtagaagtagagggagaagagaggagaggagaggagaggagaggttgggtctgggacaccatggctccgatgaagctgtacggggcggtgatgtcgtggaacgtgacgaggtgcgcaacggcgctggaggaggctggctccgactacgagatcgtgcccatcaacttcgccaccgccgagcacaagagccccgagcacctcgtccgcagaccgtttggtcaggttccagctctgcaggatggtg

SEQ ID NO: 32115 - DNA, 314 bp, Zea mays
cgaggagttcaagctggtcaagatccagaaccatgcgctgaaggtgaacatacactgcgacgggtgcaagcacaaggtcaagaagcttcttcagaagatcgaaggcgtgtactcggtggccattgatgtggacaaccacaaggtctcggtgacgggcgatgtggactcggagaccctgatcaggaagctcaccaggggcggcaagcacgcggacatgtggtcgcagcccaagggcggcggcaaccagggccacaagggcaataatggccagcagcagaaacagcagcagccgcagaaccagaaccagaaccacc

SEQ ID NO: 32116 - DNA, 313 bp, Zea mays
ctcatttccactttccactgcgcctccgctgcccatcgccgtccccgaccgcagcgcaggtgaggatccaaccccaacaaacttccaggcgacggactgaggatgagtgaagaggataaggctgctgcttctgctgagcagcctaagagggcccctaagctcaatgaaaggatcctctcctctctgtccaggaggtccgtagctgctcatccatggcatgatctcgagatcggtcctggtgctcctgctgtattcaatgttgttgttgagatcacaaagggaagcaaagtcaaatacgagcttgacaagaaaa

SEQ ID NO: 32117 - DNA, 310 bp, Zea mays
ggcttcgtgagccagctgcccgacgggtacaggaccgcggttggcgagcggggcatgcagctgtcgggcgggcagaagcagcggatcgccatcgccagggcggtgctcaaggacccggccatcctgctgctggacgaggcgacgagcgcgctggacgcagagtcggagtgcgtgctgcaggaggcgctggagcggctgatgaaggggcggaccaccgtcctggtggcgcaccggctgtcgacgatccgaggggtggaccgcatcgcgtcgtgcaggacgggcgggtcgtggagcacggcagccactccga

SEQ ID NO: 32118 - DNA, 303 bp, Zea mays
ggcaagggcccgctcgagaacctcgctgaccacatcgctgacccagtcaacaacaacgcatgggcctacgccaccaacttcgtccccggcaactaagctcaacggctatgctatgcaacttcattgtctttcggatcggagagggtgtacgtacgtggattgattgatgctgcgagatgcatgtgtgtcttttgtttcacgttgcattgcataggcaagtcgagatgatgagttggcgttgtacactaagatgaaccatgtttgtgcaatagtggtggtttttgtttcctgctggttgaaaaa

SEQ ID NO: 32119 - DNA, 310 bp, Zea mays
accacgcgtccgggaccgtggtcgagaactccatttcgatcccatttgaaatcaacccatcctcgtttcctccgtctagacgcctctcacactcatggccaagatcaagatcgggatcaatgggtttggcaggatcggaaggctggtggccagggtggccctgcagagcgacgacgtcgagctcgtcgccgtgaacgaccccttcatcagcaccgattacatgacctacatgttcaagtatgacactgtgcacggacagtggaagcaccatgaggtcaaggtgaaggactccaagacccttctctttggg

SEQ ID NO: 32120 - DNA, 282 bp, Zea mays
cccacgcgtccgcgccaagtcgccgtcgacggccgtggacatgagcgaggtgctggcggcgtacaccaacgacgtggtgagccggtcggtgctgggctcgacgcaccggaagaaaggccggaacacgctgttcagggagatgaccatgaccaacgtggacctcctggtggggttcaacctggagtactacatcccgcggtggccgctgacggacctgctcttcaggctcgtgtgctggaaggtcacgcgccacctcaagcgctgggacgccctgctggagga

SEQ ID NO: 32121 - DNA, 306 bp, Zea mays
accctccgtctccaaaagagagcccaatcctaaattcccaatccctcaaaggaaggaggattcttcagcgtctcgcttgccggccccgaatcgcagtcgccgcccggatccgaggaaacaagtcgtcgtcttgctccaccgtccgcccgccgccatgagcttcatcttcggcaagaagaagactcctgctgagctgctgcgggagaataagcggatgctggacaagtccatccgggagattgagagggagaggcagggcctgcaggcccaggagaagaagctcatcaacgagatccagaaggtggc

SEQ ID NO: 32122 - DNA, 167 bp, Zea mays
gaaagaccatcatggagaagaacccaacggcacgtattgatgttctgaagctagacctcagctccctcaagtctgtcagggcttttgtggaccagttcaactcgatgaaactccctctaaacatcctgataattaatgcaggcgtcatgttctgcccttttcaatgg

SEQ ID NO: 32123 - DNA, 307 bp, Zea mays
gtggatctctcgttttgatgtctggccatacctggagacatacactgaggatgtttccagtgaaataatgaaagaaatgcaggccaagcctgaccttatcattggcaactacagcgatggcaacctagtcgccactctgctcgcgcacaagttgggagtcactcagtgtaccatcgctcatgccttggagaaaaccaaataccccaactcggacatatacttggacaaattcgacagccagtaccacttctcttgccagttcacagctgaccttattgccatgaaccacaccgatttcatcatcacc

SEQ ID NO: 32124 - DNA, 304 bp, Zea mays
cggacgcgtggctttcaacaggaaaatcctctgagaaaactgatgtatttggctatggaattactcttttagagcttattacaggacaacgtgccttcgatctagctcgtcttgctaatgatgatgatgtcatgcttcttgactgggtcaaggggttgctcaaggagaagaaactggagagtctggtcgacgaagatctagaccacaactacatcgatgtcgaggtggaatctctgatccaggtggcgctcctctgcacgcagagcaaccccatggaacgtcctaagatgtcggaggtggtgag

SEQ ID NO: 32125 - DNA, 114 bp, Zea mays
gtgacgcgggttcgccgcggtgctctgcgtcgtcttcgcccccaccgccgctgagcctggcatctcctatatcaaggcttatctcaacggcgtcgacacgcccaacatgttcgg

SEQ ID NO: 32126 - DNA, 302 bp, Zea mays
cccacgcgtccgtgatggactatgcatttgagttcatcatcaacaatggcggaatcgacaccgagaaggattacccttacaagggcacggacggacggtgtgatgtcaacaggaaaaacgcgaaggttgtcactattgacagctacgaagatgtaccagcgaacgatgagaagagtctgcagaaggcagttgcaaaccagcctgtcagtgtcgcaattgaggctgctggcacacatttcagctctacagctcgggtatcttcactggaagctgtggaacacgctggaccatggtgtcacggc

SEQ ID NO: 32127 - DNA, 308 bp, Zea mays
tgaaacgggagagagagagagagaagagagagagaagagagagagagagagaggagtgggagacccgcgagaggctgccgtgtagggaccgtagactcagcgactgcgaaggagggataaggggatggccgggatcggaccgatcaggcaggactgggagccggtcgttgtgcggaagaaggcacccaccgccgccgccaagaaggatgagaaggccgtcaacgccgcgcgccgcgccggtgcggagatcgataccatgaagaagtacaacgctggtacgaacaaggcggcatccagcggtacatccc

SEQ ID NO: 32128 - DNA, 307 bp, Zea mays
  unsure (1)..(307): unsure at all n locations
atccatcgtccatcggccacacncaacccccccctccgccccgcgcttcgcctgggtaccggcgtccgccgcgccccgtcccgtccaggaacaggaagagcagtaacccatccatcggggatcaccaggggagcaagatgtcgactgccgccgccccaagattgcccgctcccagatccggggcaagctatcactatcagacgaccgcggctccggtggccaacaccctctccttcgccggccacgcgaggcaggcggcccgcgcgtccgggccacggctgtccagcaggttcgtggcgtccgcggc

SEQ ID NO: 32129 - DNA, 303 bp, Zea mays
cccacgcgtccgccggacgctagctcaccaccaacctcagcacatcgaggagaagaggagtggccatggcttcgtcggtggccaccgcggcgagcacattcctgggcacccgcctggcggacccggcgccgcagaacgggcgcatcgtggcccggttcgggttcggcggcggaaagcccaaggctgccgtcccgaagaaggtggcgaagacgtcgatctcctctgaccggccgctgtggttccccggcgccgtggccctcgactacctcgacggctcgctggtcggcgactacgggttcgacc

SEQ ID NO: 32130 - DNA, 297 bp, Zea mays
cggacgtggctgagacgcgtgggcaccatcgaccttcaagtctcgctacgtagaactgcaataaaaagcagagccgcaatggcgagcagcaccatggccctctcctccacggccttcgccggcaaggccgtgaacgtgccgtcgtcgtccgccttcggcgaggcccgcgtgacgatgcgcaagacggcggcgaaggccaagccagcggcggcgtccgggagcccgtggtacggccccgaccgcgtgctgtacctgggcccactgtccggcgagccaccgagctacctgacgggcgag

SEQ ID NO: 32131 - DNA, 300 bp, Zea mays
atcggcaagcccgaggcctacgtgatggttgttctcaagggttcggtgcctatggcatttggaggtacccaggagccagcagcttacggtgagctggtttccatcggaggcctgaaccctgatgtgaacaagaagcttagtgctggcatcgcttctatcctggagtcaaagctgtctgttcccaagtcacgcttctacctcaagttctatgactcgaagcgctcggacttcggttggaacggctccaccttctagacttgaggtctgcagctgaaataaaagaaattcgtggaatcatgg

SEQ ID NO: 32132 - DNA, 297 bp, Zea mays
ggacgcgggcttgtgcagtctgatctttacaccttggttgatggctttgagctccgcaacccatccagagcgaatccagctaacccttcaattgagcttggacctgagttcaagaaggttgccaatttccttgctcggttcaagtccatccccagcatagttgagcttgacagcttgaaggtttctggtgatgtctggtttggctctggaattacactcaagggcaaggtgacaattatcgccaagcctggagtgaagttggagattccagatggagacgtacttgagaacaaggat

SEQ ID NO: 32133 - DNA, 299 bp, Zea mays
atgtcctttgatgcgctgctaagtgtgcgaaacaactcgaagaatttggattcccttgcaaagctgtcaatgatggtctatggctacagatgcttctgtgtcacagggtgcaagcgatagttgctgacacttgcaggaactgttgccttacgaataattcttgtgcttgcaagcaagcatatgtgagctcacatacacaccactacaggcaggaacatgaccggagcagtgtttccggcaccataggtaatgtctaccttgcggatgcccagggcgatgggaatggtgtacttgggcct

SEQ ID NO: 32134 - DNA, 303 bp, Zea mays
atgattgagaacatgataaaggagggaaagattgttccatcggaggtgactataaagcttttgcaggaggcaatgataaaaagtgaaaatgacaaattcctgatcgatggatttccaaggaatgaggagaatcgtgcagcctttgagaatgttaccaaaatttctcctgcatttgtgctattctttgactgttctgaagaagatatggagaaacgactcctggggcgcaatcagggaagggttgatgataacattgaaactatcaaaaaaaggttcaaaacctttgttgactcaactctgcct

SEQ ID NO: 32135 - DNA, 299 bp, Zea mays
ggacgtgggaacacggtccgtacggtaaagagagagaaggtgggagtggaatcgagaggggaaaaccaagcctgcgtttcagagacaactcaggcggcgcgatggcgatggcggcgctgcgacgcgaggggaggcgcctcctcctctcccccaccgtccccaacccgtcttcggcggccgcttccgctgcggtgacgcgatcctccgccatgtcgcaaccggagatggctccacttggtgcacgttctatttcaactcaagttgtgaggaaccggatgaagagtatcaaaaacatccag

SEQ ID NO: 32136 - DNA, 299 bp, Zea mays
catcaccatgcgcaagaccgccgccaagcccaagccggcgggtccggcagcccatggtacggtgccgaccgcgtcctgtacctgggcccgctgtccggctcgcccccgagctacctgaccggcgagttccccggcgactacgggtgggacaccgcggggctgtcggcggacccggagaccttcgccaagaaccgcgagctggaggtgatccactgccgctgggccatgctcggcgcgctcgggtgcgtgttcccggagctgctcgcccgcaacggcgtcaagttcggcgaggcggtgtg

SEQ ID NO: 32137 - DNA, 300 bp, Zea mays
gcaaaacagaggctatgacggctccttgtcagatctctggtcgtgtggggtgatcctctacgtgatgcttgttggctgccttcccttcgacgacaggaacctcgtcgttctttatcagaagattttcaagggagactgtcagatccccaagtggctttcgcctgccgcgcaggaccttctcaagaggatcctccaaccgaatccgatgaagaggatcaacgtcgcggggatcagggagcacgagtggttcaagaaggactacgtgcctgctgttccgcacgatgatgacgaagacgtcct

SEQ ID NO: 32138 - DNA, 297 bp, Zea mays
gaagatattgttccttcatcacacaactgtgatattccgcatgtgaaccgtactgagtaccagctgattgatatatcagaggatggatttgtgagccttcttacttcagatggcaacactaaggatgatcttagactcccaactgatgagactcttgtggcccagatcaaggaagggtttgaaagcggcaaggatcttgttgtgactgtccagtctgctatgggggaggagcagatctgcgcgctgaaggatgttggccccaagtaacttacctgccttggaatactgtatctcaaa

SEQ ID NO: 32139 - DNA, 293 bp, Zea mays
gtacggtggttcggggatgtttggcattactggactgatgatgggcttggatataatgagttccttcagcttgcggaggacctgggtgctgccccaatctgggtattcaacaatggaataagccacaatgatgaagttgatactgtagctattgccccttttgtaaaggatgtattggacagtctggaatttgcaagggggagtgcagattcaacatggggctctgttagggctgcaatggggcacctgaacctttcctggtcaaacatgtcgcaattggaaatgaagattgc

SEQ ID NO: 32140 - DNA, 298 bp, Zea mays
gagatcctggaggctgttgtcatcactgacaagaacactggcagatccaagggctacggatttgttaccttccgggatccggacgcggcgatgagagcttgcgttgatcccgcaccggtgattgatgggaggagggctaactgtaatcttgcttcccttggggttcaaagatctaggcctcctactccccagcatggaggagctagaaactttagagtaatgaaatccttcaaccagcaggcaggaatccaaggtggactcggcgcacttttccttctcatgccaccttccctcatta

SEQ ID NO: 32141 - DNA, 297 bp, Zea mays
ctgatgcatatgaggtcgcattgaaattagagcatcgaaacagtaaaggatgcaattatggccctccatatgagtggcaggtttataacactctcaatggttgctatggcataccatcggtccactacaagggtcgtcagggcgactactatatacttgtaatggatatgcttggtcccagcctttgggacgtgtggaattcaatggggcaggcgatgactccaaatatggctgcttgcattgctgtagagagcatatcgattcttgagaagctccattctaaagggtttgtgcatg

SEQ ID NO: 32142 - DNA, 293 bp, Zea mays
gacaacattcgcatatctgatgattgcagacaactcatttcacgtatctttgtcagcaatccattaaggagaatcaccatgagggaaataaaaagccatccatggttcctgaagaacttgccgagggagctcacagaggcggtgcagttatcctacttcaggagggacaacagtgtctctgcattttcagaccaaacaaccgaagaaatcatgaagattgtcaaggaggcaagaaccttgccaaaatcgtcgagatcaggctatggctacagtgaagaatgctcagatgagga

SEQ ID NO: 32143 - DNA, 294 bp, Zea mays
cacagtttcagacactgttgttgagccatacaatgcaacactgtcagtccatcagttggttgagaatgctgatgaatgcatggttcttgacaatgaggcactttacgacatttgcttccgaactctgaagcttacgacgcctagctttggagacctgaaccacttgatcagtgcaacaatgagtggagtgacttgctgcctccgcttccctggacagctgaactcggacctgcgcaactcgcagtcaacctgattccgttccctcgcctgcacttctttatggtcggctttgcg

SEQ ID NO: 32144 - DNA, 279 bp, Zea mays
cagatcctgagatccggcaccggccccaagccgataaagggccagaaggtcaccgttcactgcaccggctacgggaaggatcgtgatctgtccaagaaattttggagcaccaaggaccctgggcagcagccattcagtttcagcattggtcagggttcagtgatcaaaggatgggacgagggagttatgaccatgcaagtgggtgaagttgctcgtatccagtgcacgcctgattatgcttatggagccggcgggttcccagcctggggaattcaacca

SEQ ID NO: 32145 - DNA, 292 bp, Zea mays
cccacgcgtccgaagaaatcttggggtggaaaagtgaagggtcttgtcggagataaggaaaagagccacactttgtctgaaagagctaatggtctattgcagagcctaagattgagatatcctggtctgccacaaacctcccttgacatgaacaagatccagtataacaaggatgttgggcagtccatacttgaaagttactcaagggttctggagagcttggcatttaacataattgcaagaattgatgatgtgatttatgttgatgatgctacaaagaaatctgctgctg

SEQ ID NO: 32146 - DNA, 294 bp, Zea mays
ctccctactcgatcggcagccgcaagagctgaccctccgcttcccccccaaaaaccctagccatcccaggttgctccggccgcatccccgccgaccgccgacgatgcctcccaaggccaagaaggacgctgcgccgtctgagcgccccatccttggacgcttctcctcccacctcaagatcgggatcgttgggttgccaaatgttggcaaatcaacttttttcaacatagtaacgaattggctatcccagctgagaattttcctttctgtaccatcgaaccaaatgaagcacgg

SEQ ID NO: 32147 - DNA, 292 bp, Zea mays
ggtgaagctggtgccgttcaacccggagtaccaggacgagtcggtgctgtggacggagagcggcgacgtgggcaagggcttccgctgcatccgcatggtgaacaacatccgcctcaacttcgacgccttccacggcgacaagggccacggcggcgtgcacgacggcaccaccgtggtgctgtgggagtgggccaagggagacaaccagagctggaagatcctgccctggggcgacgaagcctacgccgcgggaggcagcagcgccgccaacgcgccccgcttcggcggcggt

SEQ ID NO: 32148 - DNA, 291 bp, Zea mays
cccacgcgtccgatgaagtatgtagaactctgtgttgacctgaggaaaggcagatttgcaaaagatggtcttattcagtataggattgtctgccagcaagtaaacgtgtcatccttggaggatgtcataaagcacttcatgcagctttcaaatgagaaagctgaacaagctaagagtcaggtcgaagcactggaagatgctctggatgtcgaagatcttgaagcagacaagcgtcccgaggacctcatgctcagttttgtcagtggggagaaaggaaaggaccgatcagat

SEQ ID NO: 32149 - DNA, 283 bp, Zea mays
gcgggacgggcggacggtgggcggaccgtggcggacggtgggtggccctgaggatctttaagcaatgagctgttctcaagtacgtctccatctggaatcgccaagcctggagtgaagttggagattccagatggagacgtacttgagaacaaggatgtcaatggccctgaggatctttaagcaatgtttgtcatcaccagtttttcccaaggacatgtcacaggaactgccaagcctagtcactcctactgagatctatattttgtaattttcatgtgcattc

SEQ ID NO: 32150 - DNA, 209 bp, Zea mays
gaacacgcgtccgcgacgtgggtaagtcataagagagagtgatacactgttctttgtttttgagtacatggaatgcagtctttatcagctgatgaagagcagagggaagcccttttcagagactgaaatccgaaactggtgctttcaaatatttcaagctctgagtcacatgcaccagcgtggatattttcaccgtgaccttaagcctg

SEQ ID NO: 32151 - DNA, 152 bp, Zea mays
caacgcgtccgggacgctggtggtgatggtgtgagccacactgtgcccatttacgaaggatatgcacttcctcatgcgattcttcgtttggatcttgctggtcgggagctcacagactccctcatgaaaatcctgactgggaggggttactc

SEQ ID NO: 32152 - DNA, 305 bp, Zea mays
cgagaagccgaagcaaattcgaagacgaggagcagctacactgcggacggacttcgggcatggagggccagttccaggttggcaaggaggaggtcatccaagcatggtacatggacgacagtgaagaggaccagaggcttcctcatcatcgcgagcccaaagaattcatccctctcgacaaactttccgaactaggaatattaagctggcgcctaaatgctgatgattgggagaatgatgagaacctcaagaaaattcgtgaagccaggggttactcttagcaggacatttgtgatgtgtgccca

SEQ ID NO: 32153 - DNA, 308 bp, Zea mays
ctcagacgaaaggcccaagtgggccacggccgcggggaaggaaaccaacaaagaatgatgtggtggaccttaggaccatcctcatccactgtgcacaggcggtggcagcagatgaccgcagaactgctaatgaattgttaaagcaaataagacaccattccaagccaaacggcgatggaacccagaggttagcacattgttttgcagatggtctcgaggctcgcttggcaggcacggggagtcagctttaccgcaagcttatagcgaaacgtacaactgcctcagacatgcttagagcctaccacctt

SEQ ID NO: 32154 - DNA, 346 bp, Zea mays
agtagccgcagtacggccgaatccgggcgccagcgccgaacgctagtacttctattgccgcaccccagatctccaggagggactcgttctttcagctaactacactgcacgcaatggccaccacggcgaccgaggcggcgccgtcgcaggagcagcaggccaacggcaacggcgagcagaagacgcggcactccgaggtcggccacaagagcctgctcaagagcgacgacctctaccagtacatcctggacacgagcgtgtacccgcgggagccggagagcatgaaggagctccgcgaggtcaccgccaagcacccatggaacctgatgacgacctccgccgacga

SEQ ID NO: 32155 - DNA, 281 bp, Zea mays
cattgatctgcttgtgcatggcgagcctgagagaaacgatatggttgagtacttcggtgagcagctctccggttttgcgttcactgccaatggctgggtgcagtcttatgggtcaaggtgcgtcaagcctccgatcatctacggtgacgtgagccgccccaaccccatgaccgttttctggtcgaagacggcgcagagcatgacgtctcgcccaatgaaggggatgctgactggcccagtcacaatcctcaactggtccttcgtccggaatgacaagccga

SEQ ID NO: 32156 - DNA, 209 bp, Zea mays
attctagggttttgctgctctccgaccccgagctccgaaggccgcagcatcaggcgcggcccccctcgcgtgtgaccgagatggcgctgccgaatcaggggaccgttgattaccccagcttcaagctcgtcatcgtcagcgatggtggaactggtaaaactacatttgtgaagaggcatctcactggagagtttgagaagaaatatgaa

SEQ ID NO: 32157 - DNA, 303 bp, Zea mays
cgctcatgcggtcgctccgcatcacgcccgtgcacggccaggccggcgcgctcggcgccgccgcctcggtcgccatcctcagcgtctgcctcaccgtgtacggcgtcgcctccttcaacgagggggacccgtccacggcgccctcgctcacgctcaccggcaggaagaaggagggcgacaagctgcaggcctccgactgctgggccaagttcaccgggggattcgtctgctgcggcatctccggcgtgctctgggcgtactttctcctctacgtgctcgacgtcccctacttcttcaagtagg

SEQ ID NO: 32158 - DNA, 266 bp, Zea mays
ggatctgccagattccacaaggtcttgcaaggtcaagaattgttgggtttcaaaacccatgatggtcctgctatttctgcttctcaggcaactgaagcaagaaatttgcagtacagtgatgaacggagtaacaataacttaggatcccaagacttggtgttaggtctccaactggaatccctgggtttccctaccattgctcaggctttggggaatctcaaagattccaaaaggtcttgcaaggtcaagaagtgtttcatcctttc

SEQ ID NO: 32159 - DNA, 293 bp, Zea mays
caagacgaagagcgtggagttcatgccgttcctgctctccctggccgtgttcctgtgcggcacctcctggttcatctacggcctcctcggccgcgaccccttcattattatcccgaacgggtgcgggagcttcctgggcctgatgcagctcatcctgtacgccatctaccggaaaaacaagggccccgccgcgccggccggcaagggagaggccgccgccgccgccgcggaggtggaggacaccaagaaggtggccgctgccgtggagctggccgatgccacgaccaacaagg

SEQ ID NO: 32160 - DNA, 184 bp, Zea mays
ccccaacgtgatggaggccaaggtggtggtcagctcctgcggccacgacgggtccttcggcgccaccgggtcaagatgctccaggacatcggcatgatcagcgccgtgcccgggatgaaggcgctcgacattgacgccgccgatgacgatatcgttcgcctcactcgcgaggtcgtgcccggca

SEQ ID NO: 32161 - DNA, 295 bp, Zea mays
acaagtttcaatctggtgagcttagctcagaatcggtttacttgtcttctgtttcaaaaaaaaaaaatagcagcagccagctccatccatcctctttcccctcctcgcttcgcttcctcggcggattcctcctccctcgaccgtccccgtccccgtccccttccggcgcgcaacgacgcccgagatggcaaacgcgagatcgggtgtcgctgtgaatgacgagtgcatgctcaagttcggcgagctgcagtcgaagaggctgcaccgcttcctaactttcaagatggacgacaag

SEQ ID NO: 32162 - DNA, 314 bp, Zea mays
ggaccgtggcacttctgaaggccggaaaggctcaggcagcccttgagctgctgagtggcatgacaaatggtactccagatctgattacttataatacagtaatttccaatcttaccaaggccgggaaaatggaggaagctcttgacttgttgcgtgtgatggtctctaatggcctttgcccggacacgaccacatacagatctttggcctatggtgtctgtagagaagatggaaccgacaaggcggtcagaatgctccgcacggtgcaagatacgggcttgtcgcctgacactacattctacaatgatgttctt

SEQ ID NO: 32163 - DNA, 306 bp, Zea mays
ggacgtggctaggactacctcggcaacccgagcctggtccacgcgcagagcatactggccatctgggcgtgccaggtggtgctcatgggcgccgtcgaggggtaccgcgtcgccggcggcccgctcggagaggtggtcgacccgctgtaccctggcggcagcttcgacccgctcgggctcgccgacgacccggaggcgttcgccgagctcaaggtgaaggagattaagaacggccgcctcgctatgttctccatgttcggcttcttcgtgcaggctatcgtcaccggcaagggccccctcgagaac

SEQ ID NO: 32164 - DNA, 306 bp, Zea mays
ccacgcgtccgccacgcgtccgcccacgcgtccgccacgcgtccgggacctgggatattccagcaggagaactaccttgctaattggattcaggctctattcaattccttgccccctgaagattatgtgggtgcaaccttgtacttgggggtgatggccggtactttaacaaggaggctgctcagatcatcattaagattgcagctggaaatggagttcagaagatcatagttggcaggaatggtctactgtcaacacctgctgtatctgctgtaattcgtaaaagaaaagccaatggcggcttta

SEQ ID NO: 32165 - DNA, 175 bp, Zea mays
gttccactggaagccgacgtgcggcgtgcggtgcatcctgacggacgaggaggcggcgctggtcgggggacggaaccacagtcacgcgacgcaggacctgtacgactccatcgcggcggggagcttcccggagtggacgctgtacgtgcaggtgatggacccggacacggaggag

SEQ ID NO: 32166 - DNA, 251 bp, Zea mays
ctcacccagccgccctacggcgagaccttctttggccgcgccacctgccgctgctccgacggccgcctcgtcgtcgacttcctggccgagaagttcgggctgccgctgctgaagccgtcgaagcagggcggctcagacttcaagcagggcgccaacatggcgatcattggcgcgaccaccatggactcgggcttcttccagtctctgggcatcgccgacaagatctggaacaacgggcccctcaacaccca

SEQ ID NO: 32167 - DNA, 273 bp, Zea mays
gcctgctttagcaatacctagttatcaagagtgtggagaagaaggacccaaccggcgccaaggtgaccaaggctgctgccaagaagaaatgatgcgatcctgcgcctgctttagcaatacctagttttcatcattacaagttttgtttgtggtcgttgctgttattgtgtgaactgttgagctctgttagcctgtgcacttttatctatttatttggtaccttcttgctatttcaccttctgcaatacaagaatgctgtaagagctatatgtt

SEQ ID NO: 32168 - DNA, 312 bp, Zea mays
gcggacccgggcaactcgctgctcctggtcaactacgccaggttcctcaaggaggtggcgggggacgcagcaagggcgcaggagtactgcgagcgcgccatcctcgccagtcccggcgacgcgaggcgctgtcgctctacgcgggcctcgtttgggagaccagccgcgacgctggccgcgccgaggactactacagccgcgccgtccaggccgcacccgacgactgctacgtcctgggctcttacgccgggttcctgtgggacgccgaggaggacgaggaagagaactccgagcccttgccacctccttcgc

SEQ ID NO: 32169 - DNA, 249 bp, Zea mays
ctcggcaacccgagcctgatccacgcgcagagcatcctcgccatctgggcctgccaggtcgtgctcatgggcgccatcgaggggtaccgcgtcgccggcggcccgctcggagaggtcgtcgacccgctctaccccggcggcagcatcgacccgctcggcctcgccgacgaccctgaggccttcgcggactcaaggtgaaggagctcaagaacggccgcctcgccatgttctccatgttcgggttcttcg

SEQ ID NO: 32170 - DNA, 303 bp, Zea mays
  unsure (1)..(303): unsure at all n locations
gcatgatccggcctctgtgcttcattacgggagcacggtctagctacctgatgagcgagaggangtgatcaaccatggttgttttgtccctctcgcagggcgcgtccggggtcgggctcggcaacttcctggagatggggccgctggacgtggacctgaagccgcgcaactcgacgtggctccacaaggccgacctcatctttgtggacaacccggtcggcacagggtacagctacgtggaggacgacagcctgttcgtgaccagcgactggcagcaggccgcggacatgacgacggtggtca

SEQ ID NO: 32171 - DNA, 311 bp, Zea mays
ggacgtgggccctgcgaacgaagggggctccaatgacagggatctcgctcttgcaaagctggaaacagagaagaggaactctttgatcaaagcttgggaagagaatgagaagacaaaagctgagaacaaggctgctaagaaagtatccgctattctttcatgggaaaacacaaagaaagcaaacatagaagctgaactgaagaagattgaggaacaactggaaaagaagaaggctgaatatgcagagaagatgaagaacaaggttgcaatgatacacaaggaagccgaagagaagcgagcgatggtggagg

SEQ ID NO: 32172 - DNA, 191 bp, Zea mays
gccattctcctccggcatcgacgaggcgaacccagcgcccgagtccctctccctgcttccacgacccatggcggcggatatggcgtacgcgccgccgatgaaggcgggcaaggccgggttcgaggctggcatgatggatccgcagcacaggatccgcatcacgctctcctccaagagcgtcaagaacctcg

SEQ ID NO: 32173 - DNA, 309 bp, Zea mays
acggcagccacacgcactccaacaccacctcccaggtcgcgctcgtcggcgccgacgtctgccccatcgagagcctcgactacgagctgatcgagaacgacgtgttcaagcaggactggagggcgcggggacggggccacatcctgcgctacgtggcgctcaagtgggccctctgcttcctcgtcggtgccctcgcagccgccgccggcttcgtcgccaacctcggcgtcgagaatgtcgccggcgccaagttcgtcgtcacctccgacctcatgttggacggcagacacggctcggcgttcgcggtgt

SEQ ID NO: 32174 - DNA, 298 bp, Zea mays
  unsure (1)..(298): unsure at all n locations
agaaaacaataacgccaaacttaataacccagtagcaaagcgggggaataaagtcttacaacgtaagttgtaanaccacacaacgacagatagataagaaccgacagaaacataacacgataggagccactcagggcagatcacaggatagcagtggcacacaagcccgacgacgccgcgccagtagagcgtctagtactcgtcaccctcgtcgccgtcctcaccctcgtcaaactcagcaccgacctcctcgtagtccttctcgagcgcagcagatcctcacgagcctcggagaact

SEQ ID NO: 32175 - DNA, 175 bp, Zea mays
cccacgcgtccgctccttttgctcggaacgcacacacagcccggtccccgatctccgatcccctcgtcgatccaagatgcagatcttcgtcaagaccctcactggaaagactatcaccctcgaggtggagtcttctgacaccattgacaacgtcaaggccaagatccaggacaag

SEQ ID NO: 32176 - DNA, 301 bp, Zea mays
ggcaagcccgcagtcggattgtcatggggctttttgggaagactgttcctaagacagcagagaacttccgagctctttgcacaggagagaaaggaattggcaagagtggcaaagctctccactacaagggaagtacattccacagaatcattcccagcttcatgctccaaggaggtgacttcactcttggggatgggaggggtggtgaatctatctatggcatgaagtttgctgatgagaacttcaagatcaagcacactggaccaggccttctgtccatggccaatgctgggagagatac

SEQ ID NO: 32177 - DNA, 305 bp, Zea mays
cccacgcgtccgtggtggattatcgccatccattgagaccctcgacaacatccgcaacttcgaccgtgtccaagaagttcctcatgaaggtccaatgtgtgatcttctgtggtctgatccagatgatcgatgtggttggggtatttctccacgtggtgctgggtatacctttggacaggatatatcagagcagttcaaccataccaatagcctaaggcttattgctagagctcaccaattggttatggagggtttcaattgggctcatgagcaaaaggtcgtgactatatttagtgcacctaatt

SEQ ID NO: 32178 - DNA, 302 bp, Zea mays
agatccaattcgcgagttctccctcctctgccgccatggcgctctctgtggagaagacctcgtctggacgggagtacaaggtcaaggatctctcgcaggcggacttcggccgcctcgagattgagctggccgaggtcgaaatgcccggcctcatggcgtgccgcgccgagttcggcccgtccaagcccttcgccggcgctaggatctcggggtctctccacatgaccatccagaccgccgtcctcatcgagaccctcaccgcgctcggcgccgaggtccgctggtactcctgcaacatcttc

SEQ ID NO: 32179 - DNA, 228 bp, Zea mays
  unsure (1)..(228): unsure at all n locations
ggacgtggncgagacgcgtgggcggacgcgtgggttcggcactggagtgaaaaagaaagatctgattgggtcctagcctaggccccatagatatagctcttttttgagaaggaagagagattaattcagcagcagcttttataaattctttgttgtcatgaagcaggtggttcttttgtagttgatgaaagggatttgtcgtcgctatcgtttacataattcagacaa

SEQ ID NO: 32180 - DNA, 186 bp, Zea mays
cgaccttcaagtctcgctacgtagcagtgcagtaagaaaagcagccgcaatggcgagcagcaccatggccctctcgtccacggggttcgccggcaaggccgtgaacgtgccgtcgtcgtccgccttcggcgaggcccgcgtgacgatgcgcaagacggcggcgaaggccaagccagcggcggcgtc

SEQ ID NO: 32181 - DNA, 249 bp, Zea mays
gagagattagagggagcgccctgcccaagcaaagagaaaccgcggcgcgagaagagggaggaagggcagacgggcgagcaggatgagagagatcatcagcatccacatcggccaggccgggatccaggtcggcaacgcctgctgggagctctactgcctcgagcacggcatcgagcccgatggcaccatgcccagtgatacctcggttggcgtcgcacatgatgccttcaacacgttcttcagcgagac

SEQ ID NO: 32182 - DNA, 88 bp, Zea mays
cccacgcgtccggcttcggacctgagaccaccggcccagacatggttgttgatatgtgcaatggagtgcacgtatctcaatgaaatca

SEQ ID NO: 32183 - DNA, 311 bp, Zea mays
cgaagaattacccaaccgtgagcgccgagtacagcgaggccgtcgagaaggccaggcgcaactccgcgccctcatcgccgagaagagctgcgcgcccctcatgctccgcctcgcgtggcactccgcggggacgttcgacgtgtcgtcgaggaccggcggtcccttcggtactatgaagtgcccggcggaactggctcacggcgccaacgcggggctggacatcgcggtgcggctgctcgagcccatcaaggtagagtccccaccctctcctatgccgatttctaccagcttgcaggagttgtggccgtcga

SEQ ID NO: 32184 - DNA, 287 bp, Zea mays
cggacgcgtggcgcgagaaaaacgcgtatacccaggcggcggttgaagaagaggaggagaagaagaagcagatggcttcctccgcatacgcctcatggtccaagcggtggatccgtcacgaggtgtacccgctgatcgtgccgatggccgtggccttgggcatctgctcgtaccagcttgtgcgcagcatcacgggcaaccccgaggtgcgggtgaccaaggagaagagagcggccggcgtcatggacaaccacgacgaggtgcgacagtacgctatgcacggcctc

SEQ ID NO: 32185 - DNA, 188 bp, Zea mays
ctgtgttcttgcgcgtacggtacacagccccgatccgaatcgtcctcctcgcgagcctcgccgatcccccactcccctcccatcgcttcaagatacagatctttgtgaagaccctcaccggcaagactatcaccctcgaggtggagtcttctgacaccattgacaatgtcaaggctaatatccaggac

SEQ ID NO: 32186 - DNA, 306 bp, Zea mays
gtctctttgaggagatgaaactgaagaatgttaaaccgaatagcctcacatgctgcattttaatgaccagctatgcagcattgaacaagatagatgacattgaagaacttctaaaagaaatggtagaaaaagatgtgactcttgggtggtctgcatacagcacacttgcttctatctatgtaaatgctggacaatttggaaaagcagaatctgctctgaagaaacttgagggccttatcagtgctcatgatgacagacagccttttgatttccttctgagcctatacgcttcactaggaaatttga

SEQ ID NO: 32187 - DNA, 312 bp, Zea mays
ggacctggtaacgagctgcccttgaggcaaagtaccagaagctttatgaacctttatacacaaagacggtatggaattgtaaatggagaagtggaggtagatggtgtttgtgatgaaccggccagtgagaatactgttgagggaaaagaaccagacgctaaaggagttccagacttttggcttactgccatgaaaacaaacgaggttttgtctgaggagatacaagagcgcgatgaagccgctttgaaatatctataagatatcaagtggtctagaatcgaggatcctaagggtttcaagctggattttttc

SEQ ID NO: 32188 - DNA, 276 bp, Zea mays
tgaagaattaggagctgaaatggctgtacgttcacttgagcgtcttctgcagtatggcgagcagaatataagacgggcagtccctcttgctcttggtatactctgcatatctaatcccaaggtaaacgttatggacacactaagcagattgagtcatgatgcagacgccgatgtgtcgatggctgcaattatctcattgggtttgattggtgctggcacaaacaatgccagaatagctggcatgcttcgcaatctgtcaagttattactacaagga

SEQ ID NO: 32189 - DNA, 239 bp, Zea mays
cccacgcgtccggccgctatagctcgtcctctcgttcgccgcctctcctgctcctaccgcagctctccctcaggtttagtgttcgcaatggcggccttcaacaagcttggtggccttctaaggcacagtgctctggtgagcggtatcactggtggctcttctcctgcagtgttcaatgctgcacggctcatgtctaccaagctatttatgggtggtctcgactggggttttgatgacgt

SEQ ID NO: 32190 - DNA, 309 bp, Zea mays
aaaagaaagtgccttggtgtggcaccatcaggatgctgacccaggctttggatcctcacaggcaaaggagctgcttgatcacctggaaagtgtactagcaaatgaaccagtctctgtcaagagtggccagttcatcgttgaagtcaaaccacagggagtaagcaagggaatagttgccgagaggatacttgcatcagtgaaggagaggggaaagcaggctgatttcgtattgtgcatcggcgatgataggtccgatgaggacatgtttgaagatattgccgatatcattaagaggaatatggttgctcc

SEQ ID NO: 32191 - DNA, 308 bp, Zea mays
ggcacattggctggtgggagatatgctgataatgatgttgttgctgctgtaatattgggcactggcacaaatgcagcttatgtggaacatgcaaatgtgattcctaaatggaccgggctgctacctagatcagggaacatggtaatcaacatggagtggggaaacttcagatcagataaacttccaaggtcggagtatgataaatccttagacttcgaaagtttgaaccctggtgagcagatatatgaaaagatgatttctggaatgtatcttggagaaattgtccggaggatcctgctgaaactggc

SEQ ID NO: 32192 - DNA, 304 bp, Zea mays
cggacgctggtgttcatccacactaacgaacgaactgaggtcgacgacgactgatcgagcagcgacgataccggctgtgctgaacagcaggaagacgccgcagtggttgccgtgctggtggcggcggcgctgctggcgtcgtccgcttcggcggcgatcacctgcgggcaggtggggtcgtcgctggctccgtgcatcccgtacgcgacggggatggccagcgcgctccccgcgtcgtgctgcagcggcgtcaagagcctcaacagcgcagcgcggaccagcgcggaccgccagcagcgtgccg

SEQ ID NO: 32193 - DNA, 301 bp, Zea mays
cttgcaggggaatatgtggccttgactggtgaaaagcttaatggaacagatatgattgctcttggcctcgctacacactatttcatgagtggccatctggatctgatcgatgaacgacttgcaaagttagtaactgatgatccatcagttattgattcgtcccttgcacaatatggagacatggtttatccggacaaaaatagcattgttcataggctggaggtgattgatagatgcttcagccatgacacagttgaagagattgttgatgccttggaaagtgaagcagccagctcaaatg

SEQ ID NO: 32194 - DNA, 302 bp, Zea mays
cgagtccttcgcaaagatgaagaatggtgtccggatcatcaacgtggccaggggtggagtgatcgacgaagacgctctggtcagggcgcttgactccggcaaagttgctcaggcggctcttgatgtcttcaccgtggagcccccgcccaaggacagcaagctggtgttgcatgagaatgtcactgtaacaccccaccttggagctagtactgtcgaggctcaggaaggcgtcgctatcgagattgcggaagccgtggttggtgcgctgagaggggagctcgcagcaaccgctgtgaatgcgc

SEQ ID NO: 32195 - DNA, 302 bp, Zea mays
gcagcacatccatgacctgcagctccagatccggcagaagacccataacctcaaccgcctcgaggcccagcgcaacgacctcaactcccgagttagaatgctcagggaagagttgcagttgcttcaagagcctggctcatatgttggtgaggtggtgaaggtcatggggaaatcaaaggttctggtgaaggtacatcccgaaggcaaatatgtggtggatatagataagagcattgatatcactaagatcacaccttcaacaagagttgctcttcggaatgacagctatatgctccatctga

SEQ ID NO: 32196 - DNA, 260 bp, Zea mays
atacacgcgtccgcggaccgtggctatttgcaggaccgagaaggacatcactcccatgggtggcttcccccactatggtatcgatgaagggtgaatacctgatgatcaagggatgctgtgtgggtccaaagaagagggtggtgaccctccgccagtccctcctgaagcagacttcccggctggcgctggaggagatcaagctcaagttcatcgacacatcgtccaaatttgggcacggtcgcttccagactaccgatgag

SEQ ID NO: 32197 - DNA, 301 bp, Zea mays
ctccgctcctcgcgccgccgccgcgtctcctcctgtacaggtaaggagaggaagagggcgaaatggtgaagcacaacaacgtcatccccaacgggcacttcaagaagcactggcagaactatgtcaagacatggttcaaccagcccgcccgcaagcagaggcgccgcatcgctcgtcaaaagaaggctgtgaagatattcccccgcccgactgctggtcctctacgccccattgttcaatgccagactttaaagtacaacatgaagtcaagggctgggagaggctttacccttgaggagct

SEQ ID NO: 32198 - DNA, 148 bp, Zea mays
gacacggtccgcaacgcgtcgcgaccgggtggttgatggggattttgatgtttgtgatcccctggcaatcatattgtatcttgaagataaatatcctcaacaccctcttttgcctcaagatctcaaaaagaaagctataaatctgcag

SEQ ID NO: 32199 - DNA, 152 bp, Zea mays
gagtgggttggcttctcctccccctccggttcgggttcgggttcgtgacgttctccggggatcggtttcgtgggtggtcggatccatatggcggcgtcggatgttgagtaccgctgcttcgtcggctgcctcgcctgggccacggacgacca

SEQ ID NO: 32200 - DNA, 157 bp, Zea mays
caagaataattgtgttcattgtcaaaaaaaaaaccagcgtgcgctcacatgcatccggacacctaaaggtcaccggcggcgcctccgctcacttagcacggggacgaagttaggtggcgtaggcccaagcgttgttgttgacggggtcggcaatgtg

SEQ ID NO: 32201 - DNA, 314 bp, Zea mays
gctccagctcgcggcgagggttattgttgccattgagaacccacaagacatcatcgtccagtcggcccgcccctacggccagcgtgctgtcctcaagttcgcgcagtacactggcgcccatgccatcgctgggaggcacacccctggtaccttcaccaatcagctccagacctctttcagcgagcctcgcctgctcatccttactgacccaaggactgaccatcagccaatcaaggagtctgctctggggaacatcccgaccattgccttctgcgacactgactctcccatgcggtatgtcgatatcggcatcc

SEQ ID NO: 32202 - DNA, 307 bp, Zea mays
gacaaccgtccgcgacgcggcagccagccagtgagctagcctcccgagccctatctatccttttatcggcacctcgcgggtctcccgtccgccccgtcccgcattcgtatcctctcctcactctcgccgccgccgcttcccctgcgccccgagccaagatgaatgttgaaaagctcaagaagatggcaggtgctgtgcgcactggggggaacggtagcatgcgcaggaagaagaaggcagtccacaagactacgaccacagatgataagaggcttcagagcaccctgaaaagaataggagtgaacac

SEQ ID NO: 32203 - DNA, 311 bp, Zea mays
gttgttgaagtcaaagggcccattgaaaagctcagatacaacccgaacatgaaaaaacaaattgggatgatcgctggtggttctggtataacaccaatgctgcaggttgtcagggctatcctcaaaaaccctaatgacaacactcaggtctccttaatttacgccaatgtgtcaccagatgatatattgctcaaaagagaactggatagacttgccagtagctatcctaacttcaaggtattttatacagttgataaaccgtcaactgactggaggggtggtgttggttttgtatcaaaggacatggtttt

SEQ ID NO: 32204 - DNA, 306 bp, Zea mays
ggacgtgacgccggcgaggaagcgcctgatgcgggacttcaagcggttgcaacaggacccgcccgccggcatcagcggcgcgccgcacgacaacaacatcatgctctggaacgccgtcatattcgggccggatgacacgccgtgggacggaggcacgttcaagctgactctgcaatttacagaagattaccccaacaaacctccgactgttcggtttgtttcgaggatgtttcgacccaacgattatgcggatcgaagcatctgtttggacatcctagcaaaccagtggagtcctatatacgatgt

SEQ ID NO: 32205 - DNA, 305 bp, Zea mays
ccgccacgcgtccgccacgcgtccgaccacgcgtccgcgacctgcgccaacttcgccatcaccggcgcgacggccctggagtactccttcttcaaggcgcacggcatcgaccagcgcatctggaacaccggctccatcaacacccagatcggctggctccaggacatgaagccgtccctctgtaaatcggagcaagactgcaaggattacttcagcaaatccctgttcgtcgtcggggagttcgggggcaacgactacaacgcgccgctcttctccggcgtcccattttctgatgtcaagactta

SEQ ID NO: 32206 - DNA, 308 bp, Zea mays
ggacgtggggcgaaggcgaccattccttcttcgctccttcgccgccgctatggtcagcgtactcgcaggagccgggcaaccctaccaaatcggccaaggccatgggaagggacctgagggtccacttcaagaacacaagggagacagcttttgcgcttcgcaagctgcctttgaccaaggctaagcgataccttgaggatgttattgctcacaagcaggcaattcccttccggagatactgtggaggtgttggtcgcaccgcacaagcaaagtctcgccactccaatgggcagggtcgctggcctgtt

SEQ ID NO: 32207 - DNA, 306 bp, Zea mays
ggcacattggctggtgggagatatgctgataatgatgttgttgctgctgtaatattgggcactggcacaaatgcagcttatgtggaacatgcaaatgtgattcctaaatggaccgggctgctacctagatcagggaacatggtaatcaacatggagtggggaaacttcagatcagataaacttccaaggtcggagtatgataaatccttagacttcgaaagtttgaaccctggtgagcagatatatgaaaagatgatttctggaatgtatcttggagaaattgtccggacgatcctgctgaaactg

SEQ ID NO: 32208 - DNA, 304 bp, Zea mays
cccacgcgtccgtccgtgtccgcgtccagtgtgtccgctactccgctccccctcagtcctcagttcctcacctagcggtagcgtgcgcgcgggagacgtagatggcggcttcggaggcggcacggcggcggcaacaccggtgacgccgacagaggggacggtgatcgcgatccacagcctggaggagtggagcatccagatcgaggaggccaacagcgccaagaagctggtggtgattgacttcactgcaacatggtgtcctccgtgccgcgccatggctccaatttttgctgatatggccaag

SEQ ID NO: 32209 - DNA, 304 bp, Zea mays
ccgttccatttccccatctcccagatccaattcgcgagttctccctcctctgccgccatggcgctctctgtggagaagacctcgtctggacgggagtacaaggtcaaggatctctcgcaggcggacttcggccgcctcgagattgagctggccgaggtcgaaatgcccggcctcatggcgtgccgcgccgagttcggcccgtccaagcccttcgccggcgctaggatctcggggtctctccacatgaccatccagaccgccgtcctcatcgagaccctcaccgcgctcggcgccgatgtccgct

SEQ ID NO: 32210 - DNA, 303 bp, Zea mays
atatttttgagtctttttccttagacgggtaagacttgtgaaagtacactctgtactcagggttttcgaacccatgttattgcaggtactagatttgtgctactgtggatggtgttaagcgccggtgggcacggccttcttataggttacagtagctcctcaataagaagtatagaagagccaagatgcagacggtgccggagctcgtgaaggcctgcaccaccatcatctggatcgcgtcggcgctacacgccgccgtcaacttcgggcagtacccgtactgcgggtaccacccgaaccggc

SEQ ID NO: 32211 - DNA, 304 bp, Zea mays
agagaaagcaaagatgcataattggcttgactactatcagctgagatttgaaaggaatgcatctaaaaggcctactactaagactggttttcttggttgttttggtacgaaggtggatgccattgaatactacacatcagaaattgagaggatagaaaatgaagaagcagaagagcgtgaaaaaaaattgtaaaggatcccaaatccattgtaccagcagcatttgtttccttccgatcacgttggggtgcagcagtttgtgctcagacacagcaaaccagtaacccaactgtttggttgacag

SEQ ID NO: 32212 - DNA, 298 bp, Zea mays
cagacgtgggcgccggagcctcagcaatccctgagcagactagaggagtagctaaggagcagggaggtggcaaagatgctgccgacgaccgcgtccaaggggcgcggggcctcccgctccgccccgccgctcttcggtccctacctccgccgcatcgtcaagtggcaacaaatggatattgaatacacattttggcaaatggttcatctctgtacttcaccaaaagtagtctatcagcacaccaaatatcacaagcaaacaaagaaccagtgggcccgtgatgatcctgcatttgttg

SEQ ID NO: 32213 - DNA, 139 bp, Zea mays
gccgctgataccgacgacgtccaagatcttcaacgacgagtccttcgcaaagatgaagactggtgtccggatcatcaacgtggccaggggtggagtgatcgacgaagacgctctggtcagggcgcttgactccggcaaa

SEQ ID NO: 32214 - DNA, 293 bp, Zea mays
ggacgtggagcagccgcaaagaaccctcctagacgacagtttgaaacaactacagctgagcgtactgaagaaggctgattttaggaatgttagattcctctccaactttcttacggaagctggaattatcatcaagagaagccagacccgtataagtgcaaaagctcagcgtaagattgcaagagagatcaaaaccgcacgtgcgtttgggttaatgccttttacaacaatgggtagaagaccattcatttttggcagaagtgcggaggagcattattgggatgatggatatt

SEQ ID NO: 32215 - DNA, 296 bp, Zea mays
cccacgcgtccgcccacgcgtccgcaacaaagtgacgcgagcacgagcatccatcgtttccccttcttccccatcgcgtgccctcgccgcagccatcttccatggcggaccagctcacggacgagcagatcgcggagttcaaggaggccttcagcctcttcgataaggatggcgacggctgcatcactaccaaggagcttggaactgtgatgcgctcccttggccagaaccccactgaagcagagctgcaggacatgatcaacgaggttgatgctgatggcaatgggaccattgac

SEQ ID NO: 32216 - DNA, 296 bp, Zea mays
agaaatgccacccattgggcatgtttgacagcattgcatcacttgctgttgctcaaaacatgcgtgagctttatagattggttctagtcgatacaccactggccccttacttctcagagtgcattacatctgaggatttggatgacatgaatattgagattatgaggaacactctctacaaagcatatcttgaggacttctacaaattttgccagaaactaggtggtgcaacagctgagatcatgtgtgatctcctttcatttgaagctgacagaagagctgttaacattacaata

SEQ ID NO: 32217 - DNA, 207 bp, Zea mays
gcaaccccagcctgatccacgcgcagagcatcctcgccatctgggcctgccaggtcgtgctcatgggcgccgtcgagggctaccgtattgccggcgggccgctcggcgaggtcgtcgacccgctgtaccctggcggcacttcgaccccctcggcctggccgacgaccccgaggccttcgccgagctcaatgtgaaggatcgcaagag

SEQ ID NO: 32218 - DNA, 282 bp, Zea mays
gcgacccgagctactaaaggcacaagccgacatatggcggctcagcctctcctacctcacgcccctgtcactgaggtgcgccgtggagcttggcatccccacggcgatctaccgccatggcggagctgcctcagccgctgagctggtcacggcgctgtctctcccctccactaagctgccgttcctccgccgcctgctgcggctcctcgccgcgtcgggcgtgttcaccgtcgacaagcagagcacggaggaggagcggtaccgcatcaagcccgtgtccta

SEQ ID NO: 32219 - DNA, 277 bp, Zea mays
gatgaatcgaaccgccagcatcagaaggttccgaatgaattgttggagcaggccaaagctgctgctcaggcagctcttgaggagatggatgctgactaagaaacatgacaaatatgcccatgcttcatgtttttgtgctgttgatatctttgatccctttggggtgacagactggacattgccaatttgttggatttaatttggatgtcatgtaaaactccattcatggaagtttgaatctggattgactgatatcagagctgtggtgtttttacag

SEQ ID NO: 32220 - DNA, 141 bp, Zea mays
ggaccgtggcacgcatactgcatacacaacgcagagcatcagaagcagctgcgatctgatcgtcatggctgccgccaccatggctatcacctcccgcgcgctcgtcggcaagccggcggcttgcacgagggacgtcttcgg

SEQ ID NO: 32221 - DNA, 315 bp, Zea mays
gtgaacctgaaacttgcggtgtcactggctggtatagcctgagtgtgagtgagtgatcgagctagctgagctccgatcctcgctagctagctaggataccgccataccacaagtcttcttcacaagtttaggagtgacagcaacaagagatctcgatggcctctgccaccgtgctcaagtcctccttccttcccaagaagtccgaatggggcgccaccaggcaggccgccgcgcccaggccgcccaccgtctccatggtcgtccgcgcctccgcctacgccgatgagctcgtgaagaccgcgaaaacgatcgcgt

SEQ ID NO: 32222 - DNA, 132 bp, Zea mays
cggagcctggacgagacgcgtgggcgccatcacataaaaccagtgcgagcagaagcagcgcagtggcgagcagcaccatggccctctcctccacagccttcgccggcagcaggtgaacgtgccgtcgtctct

SEQ ID NO: 32223 - DNA, 121 bp, Zea mays
cctgcagtcaccactcccaagccagtacccacagtcctacgagcagtcgctctaatgtctaagagacaaaacggtctacatggctcgcacgcaatctgccgtagcgttcgccgttgtggcc

SEQ ID NO: 32224 - DNA, 233 bp, Zea mays
gtttgggcaggcggagacggacaccgacgaggtctacgcgcagatcatgctcatgccggagcccgagcaaaccgatgtgccggctgagaagccgagttctgcacctgctgcgtcgccgaggccagcagtcaggtccttctgcaagacgctcaccgcctcggacaccagcacacacggtggcttctctgtgctgcgccgacacgctgacgactgcctccctcccctggatatga

SEQ ID NO: 32225 - DNA, 308 bp, Zea mays
tgctgttctgcgcctccacaaggctttggcctctgttgtaagttttaagcttcacctccagccatgggtaaggagaagtcccacatcaacattgtggttattggccatgtcgactctggcaagtcaaccaccaccggccacctgatctacaagcttggaggcattgacaagcgtgtgattgagaggttcgagaaggaagccgctgaaatgaataaacggtccttcaagtacgcttgggtgcttgacaagctcaaggctgagcgtgagagaggtatcaccattgatatcgctctgtggaagtttgagac

SEQ ID NO: 32226 - DNA, 208 bp, Zea mays
cccacgcgtccgcccacgcgtccgctcgctcttcgtctccgaggaggtggacaaggtggagctgctctactccaagttcgtgtcgctggtgcgctccgaccccatcatccagacgctgctccccatgtcgcccaagggcgagatctgcgacgtcaacggcgtctgcgtggacgccacggaggacgagctcttccgcctcaccaccaag

SEQ ID NO: 32227 - DNA, 220 bp, Zea mays
gggttcaaagtctggagcttcatcgaggtgtgctggttgccaaggttctggctttaaggtccaaatccggcagttggggcctggaatgatccagcaaatgcagcatccttgcaacgagtgcaagggttctggagagacaatcagcgacaaggatagatgccaaagtgcaaaggtgataaagttgtgcaggagaagaaggttcttgaagtgtttgtggaga

SEQ ID NO: 32228 - DNA, 192 bp, Zea mays
gacacgcgtccgcggacgctggcgcgccggagcgcatcagcgtcgtcccgggcagcagcgccgccgccttcaagcaagacgacgcacggtggaagctcagggccaagcactacaagacgctgcttccggcgctggggagcgacaagatcaggaacgtcatggacattaacaccgtgtacggaggattcgcag

SEQ ID NO: 32229 - DNA, 309 bp, Zea mays
cggacgcgtgggcacgggaaggccatccgaccagctgggcaggagagtcgtcactgacagccccgagtacgacggccgtggcgccgacgcccgcctcgtggctcgcatacagggagtcacggtcctggtcggtaacgcagacgccttgttcaccatggtgttcgaaaccgacaggctaaagggctccacgctcgtcatcaacggaatggtcacggatgggtcagacgaatgggcgatctacggcggaaccggggtgttcgcaatgccaccggtgtcatgaagagaagaaccttgccgcggtacaacgac

SEQ ID NO: 32230 - DNA, 189 bp, Zea mays
  unsure (1)..(189): unsure at all n locations
ggcagatcagcagattgcttgatccaagtcttcagtgtgcacagttcatatatgatgaacttgtaaagatgagccatcgctgccttgcaacggagttgangcagtttcctatactccgcagaagcatggatgaagtcattgggaagtttttgcgggatggacttaagcgagcagagagtatgatatcac

SEQ ID NO: 32231 - DNA, 301 bp, Zea mays
gctcgttgccggctgcccccgcggccccggccagtccatcccctcgctcgctccccaactccagcaggcagatcagatacatccatccattcgcggaccggaagtaatcatcaggaaaggaaagggttgaactatgagcgccgtggcggtttcgtcgtcgctgaacccggacgcgccgctcttcatcccggcggcgctgctgcaggtggaggacttctcgccgcagtggtgggacctcatcaccaccactgcctggttccgcgaccactggtcccgcgagcgcagccacctggacgagatg

SEQ ID NO: 32232 - DNA, 320 bp, Zea mays
gttcaatatcatcatgcgcaaatctttgggcaatcattatggatgcaggaactggcttctcagctcaagtttatgagctatcttcacactttcttcataaggagtggatcatggaacaatgggataaaagtttctacatcagttctgttgctggctccaacaatggaagttctattgtagtgatgtcaaaaggcacaccatatacacagcaatcttataaagtcagtgattcctttccatttaagtggataaacaagaaatggaaagaaggttttcatgtgactgcaatggcaacatcaggcaatcgatgggctatagtc

SEQ ID NO: 32233 - DNA, 314 bp, Zea mays
cccacgcgtccgcccacgcgtccggcagtgctggtgcctcaactttcgcgggcgcgtcaccgtggcctcggtcaagaacttccagctgatagctcctgcaaagacgcagccgcagccgcagcctccggccccccgccgccgccgccgccgtcgtcgtcgtcgtaccatgacccggtgatcctgcagttcggcaaggtcgggagggacatgttcaccatggactaccggtacccgctgtcggccttccaggccttcgccatatgtctgacgagcttcgacaccaagctggcctgtgaatgaatgaatgaatgaat

SEQ ID NO: 32234 - DNA, 313 bp, Zea mays
caaaaatatcaggatatgtgccttccacatttttaaggtatttgttgccaatccaaacaagcctcgtgagattattcaggttttggttgagaatcacagagaagtgttgaagctactccacaatctccccacaagcaaaggtgaagatgaacagcttgatgaggagagagatttaattatcaaagaaatcgagaagcttgtgcggttgtcagtataaaccctcaggaaattcgaacgtatccttgaagacatactgtgcaatatgctgccttgtatagagcttgtttttcatgtatggaaaaaaaagtttggc

SEQ ID NO: 32235 - DNA, 310 bp, Zea mays
cccacgcgtccggcagcccccaactacccccagcctcggaaggaaccttccagaagcgcaagactctaaggccgtcgccttcccattcttcctcgccgcgggggtcgcctgagatcacataaacaatggtgaaggctgttgctgtgcttggtagcagcgatggtgtcaagggcaccatctttttcacccaagagggagatggccctaccgctgtcaccggaagtgtctctggcctcaagcctggcctccatgggttccatgtacatgcacttggtgacaccaccaatggatgcatgtcaactggaccaca

SEQ ID NO: 32236 - DNA, 304 bp, Zea mays
caacggtccgggacgtggtctcgactctcaactcccaaggtccctttttttttctcgatctggaagcgccgaagtagcagccatggacgtgagcggagcaggcggtaaggcgaagaagggcgcggcggggcgcaaggccggcgggccgacgaagaagtcggtgtcgcggtcctccagggccgggctgcagttccccgtcagccgcgtcgggcggtacctcaaaaagggccggtacgcgcagtgtaaggcacgggtgcccccgtctacctcgccgccgtcctggagtacctcgcggccgaggtgc

SEQ ID NO: 32237 - DNA, 308 bp, Zea mays
atcttgacaaggttgatatcttttctcttggggcagccgtctatgagctaataagaggcaccccgcttcctgagtctggatctcactttacaagcattagagagggtaagatcgcattgcttccagggtgcccgatgcagtttcaaagtttaatcaagtctatgatggaccctgatccggtgaggcggccttcagcaaaggagatcctgagacacccttcgtttgacaagctccacaaggcctcatcgaagtagaagtgctgccgcgcccccgtcagatcagagcagccggcaaagggaattccgcag

SEQ ID NO: 32238 - DNA, 338 bp, Zea mays
tagcactgcagtacggtcggaattgcgggtcgaacacgcgtccgggaccgtgggtattttatagacaccagtagtctgctaccctgctttcagataggtatataaggtgtcaggattcaaatcgcaagttagatctcaattcgttatagcacaagatgaatccataaagtcagaactttgcatgttaagggcttgctccttttgatctgaatccatatggattaagtgagattgagcggggttaaataccaaacaagtcaaaatctttcataatttttttcaatctcatataatctatatgggataggaataatcgaagaaaccctaagttggatctg

SEQ ID NO: 32239 - DNA, 315 bp, Zea mays
cggacgcgtggcgaccacccacccacccactcgcttcagccgcctccgccgcgcgtacaagcaggtagttgacaggatgccggctggccacggcctgcgctcgcggacgcgcgacgtcttcgcgcgccccttccgcaagaagggctacatcccgctcaccacctacctccgcagctacaagatcggcgagtacgtcgatgtcaaggtgaacggcgccgtccacaacgggatgccgcacaagttctaccacggccgcaccggtcgcgtctggaacgtcgccaagcgcgccatcgcggtcgaggtcaacaagcaggt

SEQ ID NO: 32240 - DNA, 305 bp, Zea mays
cccacgcgtccgcccacgcgtccgcccacgcgtccgcgatcgcaaccgccccccacattccccagagttagcccgatcagatcgtttttccctcgaggtgagagtaagatgagggagatcctgcatatccagggagggcagtgcgggaaccagatcggctccaagttctgggaggtggtgtgcgatgagcacggcatcgacccgacggggcggtacatggggacgtcggacgtgcagctggagcgcgtcaacgtctactacaacgaggcttcgtgtggtaggttcgtgccgcgcgcggtgctcat

SEQ ID NO: 32241 - DNA, 305 bp, Zea mays
gtcaagagcgccggcaaggccgccgccgccgccgccgagctcgtcaagtccttcgacgagtccaaggaggggatcgatggcgagttccaggagaagaaggctgatctccagcccaaggtcgtcgagatctacgagtctgcccctgcaccactcaaggtcctgatcaaggagaggagcaaggtgtccgggatcaagaagaactccgccgcaatcaccaagttcttcgaggagctggccaagatcgaattccctggagccaagcaagtgagcgacggcatctccaaggccggcccggcgctgctgtc

SEQ ID NO: 32242 - DNA, 304 bp, Zea mays
gtttctctaatatgcactgttactccagcatcaagcaattcagaagagactcgtaacacattaaaatttgcccaccgtgcaaagcacattgagattcaagtgtcacaaaacaagattatggatgagaagtctttgataaagaagtaccagaatgaaatttgccaattaaaggaagagctagaccaactgaaaaggggtatactttctggcactccttcaaaagatgtcatagaagacaatgtcattctttggaaacagaagctagaagatggtaatgtcaagctccagtctagactggaacaag

SEQ ID NO: 32243 - DNA, 299 bp, Zea mays
ggaccgtggcagtggacgtgccgtgcgtctcgctgcggcgaggcccgcgtgacgatgcgcaagtcagcggctaaggcaaagccgtcggcgagctccggcagcccgtggtacggctccgacctcatgctctacctgggcccgctgtccggctcgcccccgagctacctgacgggcgagttcccgggcgactacggcttggacaccgcggggctgtcggcggactcggatacgttcgccaagaagcgggagctggaggtcagccactctcgctgggcgatgctgggcgcgtttggctgcgt

SEQ ID NO: 32244 - DNA, 299 bp, Zea mays
cccacgcgtccgcccacgcgtccgcccacgcgtccgcccacgcgtccgcggacgcggtgtgcagcccgtgcgctgtcctgttaccgtctgtggcgacatccacggccagttctatgacctcatcgagctcttccgcatcggcggcgacgctcccgacaccaactacctcttcatgggcgactacgtcgatcgtggctactattcagttgaaacagtttctctgttagtggctttgaaagtccgttacagagatagaattacaatacttagaggaaatcatgagagcagacaaatcactc

SEQ ID NO: 32245 - DNA, 297 bp, Zea mays
  unsure (1)..(297): unsure at all n locations
agggacgctggncgagacgcgtgggcgggaacgatggctgccattggtgccactacctgaactgcgtggcaacatccaagacgaagtgtaacacctagacacctcagttttctgtacactcgggggcaaaaatgtagtatccagatttacaagaccattctctatgtttgtttgtctgtagatatgaacaagttctttgttgtttactggttttgagtttccttgcctatgtaaactgcttcgttgagcgttctatgtttataattggagtttgatagctgttttaaattgctcaat

SEQ ID NO: 32246 - DNA, 297 bp, Zea mays
gtccgtgacatcaaggaaaagcttgcatatgtcgcgctcgactacgaacaagaactcgagaccgccaagagcagctcatcagttgagaagagctatgaactgcctgatggacaagtgatcacaataggcgcagagcgcttcagatgcccggaggttctcttccagccatccttcattggtatggaagctccaggaatccacgagacgacctacaactccatcatgaagtgtgacgttgatatcaggaaggacctgtatggcaacattgtcctcagtggtggatccaccatgttccct

SEQ ID NO: 32247 - DNA, 296 bp, Zea mays
ggttgctctagatccgttcatcctggtggttttgtgaggtcgaaagcggcgagcgaattagaagatgctggacaagctgtgggacgacgtggtggccgggcctcgcccggagacgggcctcgagaagctccgcaaggccaccaccgcccgtccgctcgtcatcaacaaagacgcggacggcggcagctacaagcgggcgcagtcgatgccgtcgaccccgacgacgccggtgacgccgtcgtcgtcgtcgtcgtcgacgacgccgcgcggcgccggcaacgtgtggcgcacgtctt

SEQ ID NO: 32248 - DNA, 295 bp, Zea mays
aagaatctggttatgcagatgtcaatgacaatagcttcttaaaagtaaacttccaaatggaacagggattgccacttgtacctaagtcattgaccttcaatagagttaaatgtgcagtttcaaaaggcattaagttgggtccgacatttttggttactagtttgacaggcggatccattgttggggacatggcaccttatcaagcttttgccataggtggacttggtagtgtccgaggctatggtgagggcgctgttggttcaggaagactatgtctaattgctaactgcgaata

SEQ ID NO: 32249 - DNA, 294 bp, Zea mays
atcggattcaatgttgaaactgttgagtataagaacattagcttcactgtttgggatgttggtggccaggacaagatcaggcccctgtggaggcactactttcagaacacacagggacttatttttgttgtagacagcaacgacagggaacgtgttgttgaggctagagatgagctccacaggatgctgaatgaggatgagctgcgtgacgctgtgctgcttgtatttgcaaacaaacaagatcttcccaatgctatgaatgctgctgaaattactgacaagcttggtctgcat

SEQ ID NO: 32250 - DNA, 293 bp, Zea mays
gcggacaatatggttatgctgattggatttgttttgatgcatcagtggtccgtggccttgcatactacacaggaattgtatttgaggcatttgatagagaaggaaaactgagagcaatttgcggtggtggaaggtatgatagattgctttcaacatttggaagtgaagatataccggcttgtggctttggatttggagatgctgttatagtggaactgctgaaagaaaagggtctcttgcctgatatgtcacgccaaattgatgacatcgtcttccctttggacgaagaactt

SEQ ID NO: 32251 - DNA, 296 bp, Zea mays
atcaaactcgctactggcctcgggcccgcccgtcgtgaggtccgagctcgatgcagccgatccggcggcggcaccgaggctttgcactcctctgtctctccgccgccctcctcgctgccgccactctgctccccggcgccgccgtcgccgaaggtgtcacgccctccgaggcgcgccggctccgcgacgaggtgaaagatatgttctatcatgcgtttgatggatacatgaagtatgctttcccactcgatgagctgcggcccttaagttgccaaggtgaagactcacttggtggg

SEQ ID NO: 32252 - DNA, 290 bp, Zea mays
cccacgcgtccggccgagtccatgctcagggcgcagatgagctacggccgcggcggcgaccgcaccccggcttcagccccgtccccaacgtgccgctcctcaccaacggccagatggttgatgacatcccgccggagcagcacgcgctcgtgccgtcctacatgatcggcggcggcggctggggcaagatgatccacccgctccctttcgcagatcccaaccttccagtgcaaccgagatccatggagccgtccaaggatctggccgcctacggatatggcaccgtggcc

SEQ ID NO: 32253 - DNA, 285 bp, Zea mays
gggagacatacaggactgttctagagatactgaggaacaattcaaagcttgaagcgttatatgctatggctgctcatagggcttttcaattctgtaaacagtataagaggacaactgaattccgtaggttgtgtgagataatcagaaatcatctcgccaatctgaacaaatatcgcgatcaaagggatcgtcctgatctgactgcacctgaaagtttacaactatatcttgatacacgtgttgagcagcttaaagttgctacagagctttgcctttggcaggaag

SEQ ID NO: 32254 - DNA, 294 bp, Zea mays
agaaggacttgcagccttggattgctagagatgacgaacaaggtcagaagatgtggagagtcaaccagcgtatagtgaagcttatagctgagcttatgaggaaccatgacagccctgaagcgttggtgatactcgctagtgcctccgaccttctacttcgtgctaccgatggaatgctcgtcgatggtgaagcttgtactttgccacagcttgagcttctggaagtgaccgctcgggctgtccatcttatcatcgaatggggagattcaggtttatcagttgcagatggtcttt

SEQ ID NO: 32255 - DNA, 297 bp, Zea mays
cggacgcgtggctacctctccagcatcctcccgtctccgtcgtctcgtctccgctcctcacctcgccagccatgggcaagatcaagatcggaatcaacggtttcggaaggatcggcaggctcgtggccagggtcgccctgcagagcgaggatgtcgagctcgtcgccgtcaacgaccccttcatcaccacggattacatgacgtacatgttcaagtacgacaccgtgcacggccaatggaagcacagcgacatcgccctcaaggactccaagacgcttctcttcggcgagaagccgg

SEQ ID NO: 32256 - DNA, 235 bp, Zea mays
cttgatttcaccaggctacccgggcaaggacggctacccgccagcggggtacccgacggccggctaccccccgccggcgcagggctaccctccgcaggctacccgccgcagtacgcgcagcgccgcctccacagcagcagcagagcagcgggccttccttcatggagggatggtacgttcttggctcccccacttttgtgccgcgcaccgctcataagttgttcctagatcggag

SEQ ID NO: 32257 - DNA, 269 bp, Zea mays
gagctgcactatgtgaaggagtacgagtttgttgccatctttgacgcagacttccaacctcatcccgactttctgaagcgcactgtgccacatttcaaggacaatgatgagcttgggctagtgcaagcaagatggtcctttgtcaataaggatgagaacctgctgactcggttgcaatatattaacctttgcttccactttgaggtggaacagcaggtgaatggagtgttcttaaacttctttgggttcaatggcactggctggggtgt

SEQ ID NO: 32258 - DNA, 212 bp, Zea mays
ggaacgggctctgggcttggatctctcctcctggagcgcctgtctgttgactatggcaagaagtccaagctcggtttcaccgtgtacccatccccccaggtgtccacatccgtggttgagccatacaacagtgtcctgtccacccactctctcctcgagcacactgatgttgctgtcctgctcgacaatgaggccatctatgacatctgccg

SEQ ID NO: 32259 - DNA, 218 bp, Zea mays
agatccacttcgttccaatctctggttttgaaggtgacaacatgattgagaggtccaccaaccttgactggtacaagggcccaaccctacttgaggctctggacttgatcaatgagccaaagaggccttcagacaagcccctgcgtctcccccttcaggatgtgtacaagattggtggtattggaactgtccctgttggacgtgttgagactggtgtc

SEQ ID NO: 32260 - DNA, 260 bp, Zea mays
gaagagcaccaaggaccttcggcgcccgttcaggatccacatcttcccgagcgagttcttggttgacctcttcctcttcggaccacctccaaggctcttggtgtagcttgccactctcaccaatcaagttttcatgtctgatctcgacattcagatcccaactgccttcgatcccttcgctgaggccaatgctggggactctggtgcggcacagggtcaaaggactacgtacacgtgcgcatccagcagcgtaatggtcg

SEQ ID NO: 32261 - DNA, 225 bp, Zea mays
  unsure (1)..(225): unsure at all n locations
ggacgtggncgtgacgcgtgggaagcatatgtattcatgcttaaggtagtataggattgtaggaacttatagtcccaattgatgtaccacagcagcgaagactctgaatcccgttgcatcgatcaggcgtgctcctcctcgccgtcctgctcttcctcgtcgtactcctcggctgtggcgtcttggtactgctggtattcggcgacgaggtcgttcatgttacgc

SEQ ID NO: 32262 - DNA, 161 bp, Zea mays
caaagatctttgccaaagtcagaggatgggagactgagaatattgaggagattgctttgaagatctctcaacttcctttggcttcaggcaagcaaaagaggattgctgtgattactcaaggtgctgatccagtggttgttgctgaggatggaaaggtgaaa

SEQ ID NO: 32263 - DNA, 259 bp, Zea mays
cccacgcgtccgcctcctcgcttgcactccgctcgtctgacatctcgtcccgtcctttcgtttcgacgcctcgcgagccccgacgatggccaccaccgcggtgtcggtcgacgagaagctcgataagcttcgcgccgaggtcgccaagctcgaccagatcagcgagaacgagaagtccgggttcatcagcctcgtgtcacggtacctcagtggggaggcggacagatcgagtggagcaaatccagaccctacggatgag

SEQ ID NO: 32264 - DNA, 180 bp, Zea mays
atctcgagctagctagctgctgtaaccgttgccatggccaaaatggtgttgctctgcgtgctcgtctccttcctcctgatgcccttggcctccctagccctgacgcaggacttctgcgtcgccgacctgacctgcagcggacacgccggcggggtaacctgcaaagtccagcgtcaccgc

SEQ ID NO: 32265 - DNA, 229 bp, Zea mays
gattggtggtattggaactgtaccggttggtcgtgtggagactggtgtcatcaagcctggtatggtagtcacctttggtccaactggcctgactactgaggtgaagtctgttgagatgcaccatgaggcgcttcaggaggctcttccgggcgacaatgttggcttcaacgtgaagaacgttgctgtcaaggatctcaagcgtgggttcgtggccttccactccaaggat

SEQ ID NO: 32266 - DNA, 188 bp, Zea mays
cccacgcgtccggccttcgcgctcgtcaacaaggtcaccggcgaggcgctcaagcactccacggggcagggccaccccgtcaagctcgtgccctacaacccggactaccaggacgagtccgtgctctggaccgagagccgcgacgtcggcaacggcttccgctgcgtccgcatggtcaacaacatcta

SEQ ID NO: 32267 - DNA, 311 bp, Zea mays
cagaaaaccctagccgccgccaccgaagcggcctcccaggtaagcaagagcgtccaccccgccgccgccatgaagcgcaatccccgcgtcacgagctctcgccggaagtgccgcaagcgcacttcacggccccgtcctccgtccgccgcgttctcatgtccgccgggctgtcgacggagctccgccacaagtacaacgtgcgctccatcccgatccgcaaggacgacgaggtgcaggtcgtgcgcggcacctacaagggccgtgacgggaatgtggtgcaggtgtaccgccgccgctgggtcatccacgtc

SEQ ID NO: 32268 - DNA, 286 bp, Zea mays
cacgcatactgcatacacaacacagagcatcagaaggagctgcgatctgatcgacatggctgccgccaccatggctatcacctcccgcgcgctcatcggcaagccggcggctggcacgagggacgtcttcggcgagggccgcatcaccatgcgcaagaccgccgccaagcccaagccggcggcgtccggcagcccctggtacggtgccgaccgcgtcctgtacctgggaccgctgtccggctcggccccgagctacctgaccggcgagttctcggcgactacgggt

SEQ ID NO: 32269 - DNA, 303 bp, Zea mays
cacactcgcattgcattgcattccttcagttcagtagtgtgctctgacagtgagatggcgagcgtgaaggttttcgggtcacccacctctgcggaggtcgcccgcgtgctcatgtgcctcttcgagaaggaggtggagttccagctgatccgcgtcgacgcctagcgcggcaccaagcgcatgccccagtacctcaagctgcagccgcaaagcgaggcgctcaccttcgaggacgagagcctcaccctctccgactccagggggatcctccgccacatctcgcacaagtacgcgaacgagggc

SEQ ID NO: 32270 - DNA, 131 bp, Zea mays
  unsure (1)..(131): unsure at all n locations
gccaaggtccgggacctgnggttgcactatctggagcacacacacttggaagagcaaggcctgaccggagtggctggggaaagctagaaacaaaatatactaaggatgggcctggtgagcctggagggcaa

SEQ ID NO: 32271 - DNA, 303 bp, Zea mays
gttgccctgtacgcggtgcaatgctataagtgctacaaatggagtacggttccaaaagaagaatttgagacgcttcgtgaaaacttcactaaggatccatggttctgcagcagacgaccagacagctcttgtgaagacgatgctgacattgagtacgacagcagccgcatttgggttttggacaagcccaacataccaaagcctccaccagagacggagaggctagtggttatgaggggcgactacagcaaaatggacacatattatgtcatgcccaatgggaagcgtgcaaggtgtgctggt

SEQ ID NO: 32272 - DNA, 301 bp, Zea mays
tggagatgtcatcacaggtggagatctatacgctactgtttttgagaacacattgatgcagcaccatgttgctcttccaccgggttctatggggaaaataagttacattgcaccagctggccagtacaacctgcaggacacagtgctagaattggaatttcagggcataaaaaagaaatttaccatgcttcagacatggcctgtgcgttcaccaaggcctgttgcatcgaagcttgctgcggatacacctcttctgaccaggcagcgtgtactggatgcactaatcccctcgggtctggga

SEQ ID NO: 32273 - DNA, 300 bp, Zea mays
aaaacaaatgattgcagcaggcctttagctttgtttctaggtatgaaccatcatcgccaaatgaccatatttggtgctgcttttttatacgatgaatctgttgagtctttcaagtggcttcttgaaacctttaagagtgccatgtgtgggaaacacccaaagacaattttgactgatggatcttcagctttgaaggaagccctgggtcttacttggcctggtactgttcaccggtcctgtgtgtggcaaatataccagagcactgttaagtcattggcacatatgtttagtgcttatgaa

SEQ ID NO: 32274 - DNA, 297 bp, Zea mays
tgctgatgtggctcatttcatggggatgagtgaggaggatgcgacaaactatgctgcgcaaaacggttggagtttggatgcagcggccaagatgcttactgtcaaaaagccaaagtctcagaccaaccagaagcttgatgctagcaaactgcagcgtttgactgagtgtgttttccaccttgagaactgatgttcactgtcaatcgtgttgtgtccctgtttcttctctgctccacattgtaagaagcatgtttaccatgtgacagctatatgcctgagcgacttggcccctttcgg

SEQ ID NO: 32275 - DNA, 128 bp, Zea mays
cgcaggacttcaagaccgacctacgcttccagagctctgctgtctccgcgctgcaggaggcggctgaggcctaccttgtcgggctcttcgaggacaccaacctctgcgccatccacgccaagcgcgtc

SEQ ID NO: 32276 - DNA, 130 bp, Zea mays
cggacgcgtggcgcgacgcgtgggcttgacaaagaagcatgcttccaatagctactcaaaaatggttatatatgttgaaacgtgtgaaagtggcagtatctttgaggggttaatgcctgacgatctaaat

SEQ ID NO: 32277 - DNA, 126 bp, Zea mays
agtagatgtagttctgagacgcatcaagttgaacaatggtgacaaaccattatatatggggaaccttaacctcctgcacagaccattgaggactggaaaatgggcagttacagacgaggagtggcc

SEQ ID NO: 32278 - DNA, 123 bp, Zea mays
cgccgcgtgccgtcgaagcctggcgctgagtttcctaatgccgcccgctggtacgagaccgtctctgcggctgtagcctcaagattccctggtaaggctgttggtgtaaatctgcctgcggga

SEQ ID NO: 32279 - DNA, 283 bp, Zea mays
cccacgcgtccgggcagctgcgggactgttgggctttctcaacaatagcagctgtggaaggcatcaaccagattgttacaggcgacttgatctccttgtctgaacaagagcttgtcgactgtgacacttcgtacaatcaggggtgcaatggaggtctgatggactatgcatttgagttcatcatcaacaatggcggaatcgacaccgagaaggattacccttacaagggcacggacggacggtgtgatgtcaacaggaaaaacgcggaagttgtcactattga

SEQ ID NO: 32280 - DNA, 290 bp, Zea mays
ctccttttgctcggaacgcacacaccgcccgtccccgatctccgatcccctcgtcgatccaaagatgcagatcttcgtcaagaccctcactggaaagactatcaccctcgaggtggagtcttctgacaccattgacaacgtcaaggccaagatccaggacaaggagggcatccccccggaccagcagcggctcatctttgctggcaagcagctcgaggacgggcgcacacttgccgactacaacatccagaaggagagcaccctccaccttgttctccgcctcaggggag

SEQ ID NO: 32281 - DNA, 282 bp, Zea mays
  unsure (1)..(282): unsure at all n locations
tagcttgaaggttaaaaccactggttcgacgaataaccatatgcatttgtatcgagagtatttaccatgagtagcaaactgaattttgtaataatagtcaaaagtgtgattgtaaaatgtacttagggaatgtggtacgctatattagcgtgcaaacataagtatagccagttaagcccctccattttagtctcatttagtctctanattgcttaacggtgggactaaaatagggactaaattgttttagtctctagtcacttaaggcatgactatgagaga

SEQ ID NO: 32282 - DNA, 311 bp, Zea mays
  unsure (1)..(311): unsure at all n locations
gttctagatcgcgagcggccgccctttttttttgttttttagatagaggtacagttgagttatacaaaggtttcatcaagtttcttaaagtacagcagagcttccatttcctacatgaccagatagccctagcaaagcatgcagctcctacaccaaaagccatccatgtttccccacgtactatccaagcgcccagctcggcagcagcaatatatatgcacagtgcaagcaggtgaacaagcgcactangtagtagccgatgtccttgtcgtcgacaacgaggtccccgttgatgagctcgcggtaggcgg

SEQ ID NO: 32283 - DNA, 226 bp, Zea mays
ggttatcttccgttccatgataagaacttgatggacatgtataagaagattgagaaagctgacttcaaatgtccaagttggttttctaccgatgttcggaggcttttgcaaaggattcttgatcctaaccctagtagaaggatctcggtggaaaaaatcatggagaatccatggtttaggaagggtttaggtgcaaagctacttaggtacgatttacagaataaga

SEQ ID NO: 32284 - DNA, 228 bp, Zea mays
agagcaggctctccctgacgacctaatcaagagaggcatggcggttgccgacccgtcgagcccgtacaaggtacggctgctggtggaggactacccgtacgcgtcggacgggctggccatctggcacgccatcgagcagtgggtgacggagtacctcgccgtctactaccccaacgacggcgtgctgcgggcggacgtggagctgcaggcgtggtggaaggaggcgcg

SEQ ID NO: 32285 - DNA, 228 bp, Zea mays
gttgatgcagctgcagctctttccttgtactggtctgagctcaagggtaaggttgctggcctggcgttggttcagagcccatatggtggcaccccggtcgcctccgatatccttcgagaaggccagatcgctgataaggagacaaggaggatcatggagctcatcgtatgcaaactaatcaagggcgacatcagggccttggaggacctcacgtatgccaagagaaag

SEQ ID NO: 32286 - DNA, 219 bp, Zea mays
ggaaggtgctccgcgacaacatccaggggatcacgaagccggcgatccggcagctggcgcgcaggggcggcgtgaagcgcatctccgggctcatctacgaggagacccgcggcgtcctcaagatcttcctggagaacgtgatccgcgacgccgtcacctacaccgagcacgcgcgccgcaagaccgtcacagccatggacgtcgtctacgcgctcaagc

SEQ ID NO: 32287 - DNA, 328 bp, Zea mays
ctccatccactccactccactccactctgctactccacctacctcccggctcccggatccggcgatggagaagatgctccactcagccccggcccacggcaggctcccggagtgcttcatcttcccggccgacaagctcccgctagccaaggccacctcagcgacggtctccctgcccatcgtggacctctccctcggccgcgacgaggtgcggcgcgccatcctcgaggccggcaaggagatcggcttcttccaggtggtgaaccacggcgtctccctggaggcgatgcaggacatggagacggtgtgccaggagttcttccggctg

SEQ ID NO: 32288 - DNA, 316 bp, Zea mays
ggtttggtggttacctccaaatgtttggaacaaggggtgtgggtttgagtgatcgctttgcattattttttgcacggtgtgtttgggttgagctttgcactattttttgcacggtatggtaacacggagggtgaagccgtggtatcaccaggtgcccacattaggttcttaatagtttagtatagatataaatatagatatagatttgacctcatattctgattatatgttgcacaggtgctaaaagaaagctttaaaatttattgtgcaataaatgatggaatcataaacctcgttgataagttttttgagatgc

SEQ ID NO: 32289 - DNA, 349 bp, Zea mays
  unsure (1)..(349): unsure at all n locations
agagccgcagtacggcggaatccgggtcgaccacgcgtcgggacctggcgatcgcggggctcaacccgctgtgcatccagctcctgacggagttccccatcaggagcaagctggacccggtagtgtacggcccggcggagtccgccatcaccaaggagatcctggagaagcacatgagcggcggcgcgccatgaccgtggagcaggcgcacgcggcgaacgtctgttcatcctggactaccacgacgtgttcctgccctacgtgcacagggtgcgcgagctgccggacacgacgctctacggctcncgcaacgtcttcttcctcacggacctgggcacgctgatgccgc

SEQ ID NO: 32290 - DNA, 216 bp, Zea mays
gtgacaaggagggggtgaagcgagggccatggacagcggaggaggacaagaagctcattagcttcatcctgacacatggccggtgctgctggcgggcagtgcctaaactcgcagggctgcttcgttgcggcaagagctgccgtctgcggtggactaactatcttcgccctgacctcaagcgtggcctcctcagcactgccgaggagcagcttgtca

SEQ ID NO: 32291 - DNA, 217 bp, Zea mays
cccacgcgtccgctgggccacttcctcctggcgcgcctgctcctggacgacatgcagaagtccgactacccgtcccgccgcctcgtcatcctcggctccatcaccggcaacaccaacacgctggccgggaacatcccgcccaaggccgggctgggcgacctccgcggcctcgcggcggggctgcgcggccagaacggctctgccatgatcgacggct

SEQ ID NO: 32292 - DNA, 217 bp, Zea mays
cggactcaaggtgaaggagctcaagaacggccgcctcgccatgttctccatgttcgggttcttcgtccaggccatcgtcaccggcaagggcccgctcgagaacctcgccgaccacctcgccgaccccgtcaacaacaacgcatgggcctatgccaccaactttgtgcccggcaagtgagggggtggaggcgccaccgcccaccggccaccgctgcgg

SEQ ID NO: 32293 - DNA, 216 bp, Zea mays
ggacgcgtggaaagaaaatgatgaagttttcattaagctgggttctgacaaggataagaagaaggaaaatgctgagcgtgatgagcgtgccaagaagtcggtgagcatcaacgagttcctgaaacctgctgaaggagaaaggtactacggcggccgtggccgtcgaagggggggccgtggggatcgtggtggttttagaggcggatacggaggggg

SEQ ID NO: 32294 - DNA, 308 bp, Zea mays
aggaagtttattaagcgcattctcgatcctaaccctgataccaggataaaaattgcagaaattttggaagatgaatggttcaaaaaaggctataaaccaccacattttgaacaaggcgaagatgttaaccttgacgacgttgatgctgcattcaatgattcagaggtattatatagaccaaatgttcattttgaatctacgactatcttgaaaatctttccagctttccagaaatattacgtgctttaaaagcatttttacattctattttatgttcacattatcgttcaggttcatagctgctataa

SEQ ID NO: 32295 - DNA, 308 bp, Zea mays
gacaaggtccgcgaccgtggggccgaggtcatcgagcgcgacgtcccgggctgcaacagggacctcatccacatcgcgtaacacctctccaaggacttcggcctcccgggcttccgcgtcggcatcgtctactcgtacaacgacgacgtcgtggcctgcgcgcgcaagatgtccagcttcggcctcgtctcctcgcagacgcatcacttcctggcgaagatgctgtcggacgcggagttcatggcccgcttcctcgcggagagcgcgcggcggctggcggcgcgccacgaccgcttcgtcgcgggact

SEQ ID NO: 32296 - DNA, 312 bp, Zea mays
tcttctctctctgctcctccgcctccgcctgatccatccaagacagggatcgccatgtcggactcggaggagcaccacttcgaatcgaaggccgacgctggggcgtccaagacctacccgcagcaggctggcaccgtccgtaagaacggcttcatcgtcatcaagaaccgtccctgcacagttgtggaggtttctacctccaagactggtaagcatggccacgccaaatgccactttgtcgccatagacatattcaatgggaaaaagcttgaagatattgttccttcatcacacaactgtgacattccgcat

SEQ ID NO: 32297 - DNA, 273 bp, Zea mays
caaggagagtacgtggaggagcagccatggcttcatcggtggccgccgcggcgagcacattcctgggcacccgcctggcggacccggcgccacagaacgggcgcatcgtggcccggttcgggttcgggttgggcggcaaggcgaactgcgtccgaagaaggtggcgaagacatcgacctcctctgaccggccgctgtgagtcgccggcgccgtggcgcccgactacctggacggctcgttggtcggcgactacgggttcgaccgttcggtctc

SEQ ID NO: 32298 - DNA, 271 bp, Zea mays
gatggaggaagagttcgatgcaacccggtggcttgatagatctctcatacgtctttgttcaagatttggggattaccggaaggatgatccctcttcatttagcctgcattcaaatttctcattgttccctcagtttatgtttaatcttcggcgttcacaatttgttcaggttttcaataacagtccagatgagacagcttatttcaggatgttactcaatcgtgagagtatcactaactcggttgccatgatccagccttccttgatatca

SEQ ID NO: 32299 - DNA, 276 bp, Zea mays
cggacgcgtggcggacgcgtgggcgcgcaccaccaccccgtcgtccgtggccgtggccaccccgcacgccggcggagaccccatccgcgcgtccatctcctcctcccccaccccgccctacgacctgacgtccttccggttcagccccatcaaggagtccatcgtgtcccgcgagatgacccggcgctacatgacggacatgatcacccacgccgacaccgacgtggtgatcgtgggcgccgggtccgcgggcctgtcctgcgcgtacgagctgtc

SEQ ID NO: 32300 - DNA, 276 bp, Zea mays
cccacgcgtccgcccacgcgtccgagaatattatagagcaaagtgtgtggccaattttactagctgagagcttaaaggcactgggcgggcttggcttactttcccttggtgggaaatacttcataagacgtgtctttgagtttgttgcagagtcaaggagttcagaggcatttgttgcgctctgtcttcttacagtcgcagggacatcacttatcacccagaagctgggatttagtgatacattgggtgcatttctggctggagccattcttgcag

SEQ ID NO: 32301 - DNA, 207 bp, Zea mays
cccacgcgtccggagattagagggagcgccctgcccaagcaaagagaaaccgcggcgcgagaagccggaggaagggcagacgggcgagcaggatgagagagatcatcagcatccacatcggccaggccgggatccaggtcggcaacgcctgctgggagctctactgcctcgagcacggcatcgagcccgatggcaccatgcccagtg

SEQ ID NO: 32302 - DNA, 273 bp, Zea mays
gaaccatgtctgcctgaaggatgggtccatcacgatcccgccatatgcgcctcctcagaaaatgcagactcaccttatccccccggacacccctcgatccatctttgtgtacttccgaggtctgttctatgacaccggcaatgaccccgagggcggatactacgcaagaggtgctcgtgcatcggtctgggagaacttcaagaacaacccgctgtttgacatctcgaccgatcacccaccaacatactacgaagacatgcagcgctcggtgtt

SEQ ID NO: 32303 - DNA, 241 bp, Zea mays
cccacgcgtccgcggacgcgtggcatgcgacgaagcgcgcacaaagagaagaacctcggagctgagatggcacaagccaacgcgtcgatgacaggcctctcgcagggcgtcctgcccagcaggcgcgccgacagcagaaccaggacggccgtcgtcgtcgtcagggcgtccgcggagggcgacgccgttgcgcaggcgggccgccgcgccgtgatcgggcttgtggccactggcatcgtcg

SEQ ID NO: 32304 - DNA, 264 bp, Zea mays
cacgcatactgcatacacaacacagagcatcagaaggagctgcgatctgatcgacatggctgccgccaccatggctatcacctcccgcgcgctcatcggcaagccggcggctggcacgagggacgtcttcggcgagggccgcatcaccatgcgcaagaccgccgccaagcccaagccggcggcgtccggcagcccctggtacggtgccgaccgcgtcctgtacctgggcccgctgtccggctcgcccgcgagctagctgaccgg

SEQ ID NO: 32305 - DNA, 267 bp, Zea mays
ctcaatttggctattgggatactacctcacgttgacaactttgctcacattggtggattcgcgacgggtttcctcttgggttttgttctgttggcaaggcctcaatttagctggatggaaagtcatgagttgccacacactaaccaacctcccaagtacaaagcataccagtatattttgtgggttgtggcactcgtcttgctgttagttgggtttgtgatttcactggtgatgcttttcaaagggaagaacgggaacgatggctgc

SEQ ID NO: 32306 - DNA, 318 bp, Zea mays
cccacgcgtccggatttccacaatctgcgaactgaatccctcaagcagcagtacaagttggtcaaggataggacagcggttcatgacacgttcagctatggttcccatgtgatgcaatatggcgcattggagctgaatgttcagcgtttgttttcgtacattggcacagaccctgctaacgatggcaacacttttatagaagataactcactgccatcgttctcaaaagccgttaatcagcgcgacgctgaccttgtctacttctggcagaagtaccgcaaattggctgatagctcgcatgcgaaaaatgatgctcgg

SEQ ID NO: 32307 - DNA, 322 bp, Zea mays
gccgccgcgctcaacatcgtgcccacgtccaccggcgccgccaaggccgtctcgctggtgctccccaacctcaagggcaagctcaacgggatcgcgctccgggtgcccaccccgaacgtctccgtcgtcgacctcgtcgtgcaggtctccaagaagaccctcgccgaggaggtgaaccaggcgttccgcgacgccgcggccaacgagctcacgggcatcctcgaggtctgcgacgtgccgctcgtgtccgtcgacttcaggtgctccgacgtctcctccaccatcgacgcctccctcaccatggtcatgggcgacgacatgg

SEQ ID NO: 32308 - DNA, 200 bp, Zea mays
ctcgagctgctctcccgcaacggcgtcaagttcggcgaggccgtctggttcaaggccggctcccagatcttcagcgagggcgggctggactaccttggcaaccccagcctgatccacgcgcagagcatcctcgccatctgggcctgccaggtcgtgctcatgggcgccgtcgagggctaccgtattgccggcgggccgct

SEQ ID NO: 32309 - DNA, 314 bp, Zea mays
ctccgtggctccgtgacgagacacgacgccgagaggtcacccccacaccgcgccgaggccaccccgcttgggattgtgaggtaaagcgtgatggcagcgccaccggcgagggcccgagccgactacgactacctcatcaaactgctcctcatcggtgacagcggagttggaaaaagttgtctcctgttacggttctcagatggatcattcaccactagctttattaccactattggcattgacttcaagataaggactgtcgagttggatggcaaacggattaagttgcagatctgggacactgcaggccaaga

SEQ ID NO: 32310 - DNA, 314 bp, Zea mays
cagcgactcagcgagcgagagcagcacacacgcagctagctaggagcagcagcagagcagcggcgatggcggcctccatgatctcctcgtcagctctggcggtggcgcctcagggcctgccgcccctcggccgccgcgcctcctccttcgccgtcgtctgctccaagaagaagatcaagaccgacaagccctacgggattgggggtggcctgaccgtcgacgtcgacgccaacgggagaaagggcaagggcaagggcgtgtaccagttcgtcgacaagtacggcgcgaacgtcgacggatacagcccaatctac

SEQ ID NO: 32311 - DNA, 189 bp, Zea mays
cagacgcgtggcggacgcgtgggccgcagttcccccgcgcccgagacgcaaccccgcgccaggagtaagattgttcttttatacgatattatcgatatggcgagggaggagaatgtctacatggccaagctggctgagcaggccgaaaggtatgaagagatggttgagtatatggagaaggtggctaag

SEQ ID NO: 32312 - DNA, 315 bp, Zea mays
gggagagagatgctgcaggtggaggaggcgctggcggcggtgctgtccgcggcggcgtgccacgcggagccgcacgccgtgccgctgcagggcgcgctcgggctcgtcctcgctgatgacgtctgcacgcccgatccgctccctcgcgtccgcgcctccatcaaggacggatacgccgtcgtggcctccgatgggccaggggagtatcctgtggtcacggagtcgagggctggcgacgacgcgctcggcgtggtcgtcgtccccggcagcgtcgcctacgtcgacaccggagggccggttcgcgatggcgccgat

SEQ ID NO: 32313 - DNA, 317 bp, Zea mays
cccacgcgtccggccatggcctcctactgctccgagctccagttcctgggcaacccggtgaccaaccacgtccagagcgctgagcagcacaaccaggacgtgaactccctgggcctcatctcctccaggaagaccgccgaggccatcgacatcctgaagctgatgtcgtccacgttcctgatcgccctgtgccaggccatcgacctgcggcacctcgaggagaacgtgaaggccgcggtgaagaactgcgtgacgcaggtggccaagaagtccctgagcctgaatcgccagggcgggctccacaacgcgcgcttctg

SEQ ID NO: 32314 - DNA, 316 bp, Zea mays
gggaagcgggccaaggaattcatggagaagggccagctcgtgcctgatgagattgtcgttaatatggtgaaggaacgccttcggcaaccagacgctcaagaaaatggttggcttttggacgggtacccaagaagctattcacaggccatggccttggaaactcttgaaatccggcctgatactttcattctgttagatgttccagatgaactccttgttgaaagggtggttggaaggcggcttgatcctgtaacagggaaaatatatcatttgaagtattctccgccagagaatgaagaaatcgcttcaaggctta

SEQ ID NO: 32315 - DNA, 316 bp, Zea mays
atcaaatattgcaaatatgctaaatttcaaagataacaatataaacaatgaggggatgcttcgtacagttcttgatgttggttgtggagttgctagtttcggaggataccttctttcttctaatgtgatagcaatgtctttggcaccaaatgacgtgcatcagaatcagattcagtttgcactcgaaagaggaatccctgcatatcttggtgttttgggaacaaaaaggcttccatacccgagtagatcatttgaactagcccattgttcacgttgtaggatcgactggcttcaaagagatgggattcttctgctc

SEQ ID NO: 32316 - DNA, 316 bp, Zea mays
gatcaaggtccgggacgcgtggcagcagcaccggtgctgccaaggctgtcggtaaggttcttcctgaattgaatggcaagctcactggcatgtccttccgggttcccaccgtggatgtgtcagttgttgacctcactgtcagaatcgagaagggggcctcttacgaggaaatcaagaaagctattaaggctgcttctgagggcccactcaagggtattatgggctacgtggaggaggatctggtttccaccgacttcaccggtgacagcaggtcgagcatcttcgacgccaaggccgggattgccctgaacgacca

SEQ ID NO: 32317 - DNA, 305 bp, Zea mays
cggacgcgtggcggacgcgtgggcggcagtgcaggatggctctgaggatgtgggcgagctcagccgccaaagcgctcaagctctcggcgggcggcggcggagccgggctgctgctgccggcccggccttctctatctccaggttcttctccactgttcacgatgggttgaagtacactcagtctcacgaatgggtcaagacgacgggcgacgtcgccaccgttggcatcacggaccatgctcagggccacctgggagaggtggtgttcgtggagctgccggaacccggcacgagagtcgccgcgg

SEQ ID NO: 32318 - DNA, 212 bp, Zea mays
gaaccccaacttcgtcggctgcgtcgagggtgcactcggcatccgcggctggctcgagtcgcagggccatcagtacattgtcaccgatgacaaggaaggccccaactgtgaactggagaagcacattgaagacatgcatgtcctgattaccaccccattccacccagcttatgtcactgcagagaggataaagaacgctaagaatcttgagc

SEQ ID NO: 32319 - DNA, 307 bp, Zea mays
tctctaccgtccgataccccaagcaccagcgcggcggcggcgaccatggctgtcggaaagaacaagaggatctccaagggaaagaagggtggcaagaaaaagaccgtcgaccctttctctaagaaggattggtatgacatcaaggcaccgtcggtgttcagtgtgcgcaacatcgggaagactctcgtatccaggacacagggtaccaggattgcttctgagggtctgaagcacagagtctttgaggtttgcctagctgatcttcagggcgacgaggatcaagcttacaggaaaatcaggctccgtg

SEQ ID NO: 32320 - DNA, 302 bp, Zea mays
cagacgcgtggcgccgctgcgcgtctcctccgctcccgtcgtccggaaagatggcgtcccacattgttgactaccctcgcatgggccccaagagggagctcaagtttgcacttgagtctttctgggatgggaagagcaccgctgaggatctggagaaggttgctaccgacctcagggccagtatctggaagcagatggctgatgctgggatcaagtacatccccagcaacactttctcgtactatgaccaggggcaacgccactgttcctgctatggagatgaccaagtggtttgacaccaa

SEQ ID NO: 32321 - DNA, 308 bp, Zea mays
cccacgcgtccgaaacattcaaattgcagttgcttctgcgaaggagattgatgacaaggatcactggtacaagttgggaattgaggccctgaggcagggaaatgttggtatagtggaatatgcttaccaacgaacaaagaattttgagaggcttgcttttctgtatcttattaccggttacttggacaaggtgggcttcatgtgcaaaattgctggacagaacaacaatttgatgggacagttccacaatgcgttgtatcttggggatgccaagaagcgtgttgagatcttggagaatgctgggcagc

SEQ ID NO: 32322 - DNA, 238 bp, Zea mays
cggacgcgtggcggacgcgtgggtgctttagcaatacctagttttcatcatttcttcttggcagccgccttggtcaccttggcaccggtcgggtccttcttctccacactcttgataactccaacagcaaccgtctgtctcatgtcacggacagcaaacctaccaaggggaggatacgctgagaatgtctccaccaccatgggcttggtcggtatcatcttcaccataccagcatcac

SEQ ID NO: 32323 - DNA, 312 bp, Zea mays
cccacgcgtccgcgactcgaccgccgccgtcccagttcgcttcgcgtcaccgagagctcgtcggcctccgtccccgcgagaagcgagagcatggacacccaagtgaagcttgctgttgtggtaaaggtgatgggcaggaccggctccaggggtcaggtgacccaggtcagagtgaagttcttggatgaccagaaccgtctcatcatgaggaacgtcaagggccctgttcgtgagggtgacatcctgaccctgctcgagtctgagagggaggccaggaggctgcgctgaagcccttgttgtcttggatgtaat

SEQ ID NO: 32324 - DNA, 304 bp, Zea mays
gacttcaacaactacaagtttcgtgtgcctgtgtccggcgccatcatcctagacgacacttatgagaggtgcttgcttgttaaaggatggaaggctggggccagctggagctttcctcgtggaaagaggaataaagatgaggaagaccacacatgtgctgttagagaagttctagaggaaactgggtgtgatgtttctagactattaaatctggatgattacattgaagtttcaattggacaacaaagggttcggctctacatcataacaggggttaaaagagacactgtgtttgcacctcaaa

SEQ ID NO: 32325 - DNA, 269 bp, Zea mays
cggacgcgtggcggacgcgtgggcggacgcgtgggcggacgcgtgggcgtgtggagaacttgtatacgggaccccttactgatgtttatgcaactgctatcacaaactgtgatccggagggtcctcttatgctgtatgtttcaaagatgattccagcatctgacaagggcaggttctttgcctttggtcgtgtcttctcagggaaggttgctactggtatgaagttcggatcatgggtccaaactatgtccctggccagaagaaggacc

SEQ ID NO: 32326 - DNA, 116 bp, Zea mays
cacgcatactgcatacacaacacagagcatcagaaggagctgcgatctgatcgacatggctgccgccaccatggctatcacctcccgcgcgctcatcggcaagccggcggctggca

SEQ ID NO: 32327 - DNA, 266 bp, Zea mays
caataaggtaaggggtgacgaaaatggctccaacgaccgccaccaaggacgacagtggctacggcgacgagcgccggcgcgagctgcaggcgttcgacgacacgaagctgggggtgaaaggtctggtggactccggcgtcaagtccatcccgtccatcttccaccacccgccggaagccctgagcgacataatttctccggcgcctctgccgtcgtcgccaccctccggcgccgccatcccggtggtggacctctcggtgacgcgg

SEQ ID NO: 32328 - DNA, 261 bp, Zea mays
cggacgcgtggcgtggaggcgaaaccaaggcatacatatacatatttgtagtggtaccatcataacaaataaagatggtgaagttcacggctgaagagctccgtgccatcatggacaaaaagaacaacattcgtaatatgtctgttattgctcatgtggaccatggcaagtctacacttacagattcccttgtggcagctgctgggattattgcccaggaagttgctggtgatgttcgcatgactgatactcgtgcagatg

SEQ ID NO: 32329 - DNA, 263 bp, Zea mays
cccacgcgtccggaaactgtggttgcaataactagtggggcaaatatgaactttgatcgacttagactagtaaccgagctagctgatgttggccgaaaacgggaagcagtgttagctacatttctgccagagcagcagggaagcttcaaaaaattcacagaattggttggcaggatgaatattactgaattcaaatacagatacaattctaatgcaaaagatgcccttgttctttacagtgttggcatctacactgacaatga

SEQ ID NO: 32330 - DNA, 258 bp, Zea mays
ggacgctgggcgcaagatggcggaggcgtggcgcaccatcgaccagttcgtcgccgacacgatcgacaagcggcgggccgagaaggcgaggcacggcaacgggcaggtctcggcggacctgctctcgtcctacatcaacgacgacgaggacgaggaaggcggcgtggacgcgttcctgcgcgacacgaccatcaacctcatgctggccggccgcgacacgacgggctcggcgctgtcctggttcttctacctcctgag

SEQ ID NO: 32331 - DNA, 259 bp, Zea mays
gcacgaggcatccgtcaaaatacacgaagggcaacgaggcgaggcctagtatagaggaaaacgagtcacaggggggaaatgctgcgccacgccgcccgccgtctcgtctcccgcaccgccgcggcgcccaccgcccgccggcgctcgtcacggcagaggtgcctgcggaggccgccgaggactccacgtttgtggaggcgtggaagaaggtctcccccaacatcgagcccccaacgacgcccctcttcctcatgcagcc

SEQ ID NO: 32332 - DNA, 262 bp, Zea mays
gagaactggcagcccacgcccgacgaccacctggttatcagagcacccggaatggacacactgaagatacctctaataacggaacacgccacaatcgatgatgtctctgtctgggagtggtctggctctgcgtatgatgaaggggctgaagcgtctgaatggttctccacttactttgggaagccaagtcgactagtgcgcttcaaagaagcatcggaaactaggccaaccgatccagattatgcccaaggttataagatca

SEQ ID NO: 32333 - DNA, 292 bp, Zea mays
tgacctgcagtacggcggattccgggtcgacccggaccgacacaatacgtacaggtccgggacgcgtggcgacctgtgtgaggcttttgcaggcagagcacagattgtgcacattgatattgatcctgctgctattggcaagaacaagcagccacatgtgtccatctgtgcagatgttaagcttgctttgcagggcatgaatactcttctggaaggaagcacatcaaagaagagctttgacttcggctcatggcatgatgaattggatcagcaaaagcgggagtttcccctt

SEQ ID NO: 32334 - DNA, 256 bp, Zea mays
aagaatgcgaggggaagctttgctatgacttctcaaacctggagaggttcttcggtgacaaagcggtcaaggaggcgcttggagtcggtgacatcgatttcgtctcttgcagcactacggtttatgaagcgatgctcacggactggatgaggaatctggaagtcggcatcccggcgctgcttgaggatgggattaacgtgcttatatacgctggggagtatgaccttatatgcaattggctgggaaactcgagatg

SEQ ID NO: 32335 - DNA, 254 bp, Zea mays
gtgctgtctggatgcctgatgagaccaggagcacgatgatcttaacacatcagctgagggaaagggatataatggacccacagaaacactcgattcctattgatgatccggatgttcaagaaataaaggcaaccaaggatgcaaaagttcttggcccagattcggcgctaggggtttctagccgaagcaagcatgaagcagggcctgtggctgcaataaggatgccgatgttaagggtgtcaaatttcaaagga

SEQ ID NO: 32336 - DNA, 252 bp, Zea mays
cggacgcgtggatttgatgggaactccgaactagctgctgagcttgtgacagccaatggttacaaagcagcttttgcagtgaaggatggtgcagaaggaagccgaggatggaagagcagtaaccttccctggaaggctccgccaaaaggattcagctttgacttgggcgaattatttggggatggttcagatggtttgcctgtgacaattggtctcgctgcagctactggtttgggagtacttgcctacaca

SEQ ID NO: 32337 - DNA, 255 bp, Zea mays
ctgccgctgcttcggctacatggtctccaagaagaagtacatctacaccatcgacgacgactgcttcgttgccaaggacccatctggcaaggatatcaatgctcttgagcagcacatcaagaacctcctcagcccatccaccccgttcttcttcaacaccctgtacgacccctaccgtgagggtgctgactttgtgcgtggataccccttcagcctcagggagggtgctcacaccgccgtctcccacggcctgtg

SEQ ID NO: 32338 - DNA, 257 bp, Zea mays
  unsure (1)..(257): unsure at all n locations
ggggcctcgtgttcgcgccgtgggccatcgccgcgcgcgcgggccgcgccgntaccgacgtcaccaggctcaccgtcgtcgttgcctccgccaacgacacgctggcgctgggggtggaccacagctacgccatctacgtggcggcggccgggggcgtcgattccatcgtcggaggagcaatcattgaggcaaacacaatatatggagctattcgaggactggagacattcagtcaactttgtgttttcaactatgac

SEQ ID NO: 32339 - DNA, 259 bp, Zea mays
ggacgctgggcggaccaggtaagcagcagcaggaaccctagcaccgccgcatccgcagccatgggtatcgacctcgttgccggtgggaggaacaagaagaccaagcgcacagcgccgaagtccgacgatgtttatctcaagctccttgtcaagctctaccgtttcttggtcaggaggaccaagagcaacttcaatgctgtcattctcaagaggctcttcatgagcaaaaccaatcgcccaccaatctccatgcgccgcc

SEQ ID NO: 32340 - DNA, 328 bp, Zea mays
acggaccgggaccgtggctccggctccctcccctcccttggggagtccgagtcgggagcgtttcccctccctaggagactccgattcggaagcgggtcacttgaaagccgcggaagggggtctgcacgaggaaggtgagaggagccaagctcaggactccgacgccgagctccagcagcccagccccagccccagccccgaagtcgaccctctggccagggccgtgctcgtgacccccaccactccttctgcattcaccagtgatgaggatatcctcgagctcgctcgcagccgcgacatctagagttgcctatgtcacggtgactaa

SEQ ID NO: 32341 - DNA, 314 bp, Zea mays
cacagcgtcgcgacctgcgcgccatggctccaatttttgctgatatggccaagaagtccccaaatgtagtttgcctgaaagtagatgtggatgaaatgaagaccattgctgagcaattcagcgtagaggccatgccaacattcctgttcatgagggagggcgacgtcaaggacagggtcgttggcgcagaaaggaagagctagcaaggcagcttgaactacacatggcctcgtagatcagtgatgccgtaatgtagtattcgcctaaataagaggacgctcgcctcaactctgagaaaactagtgcttctgtga

SEQ ID NO: 32342 - DNA, 320 bp, Zea mays
gagacacttgaatttgagcaacaataacctcagtgggccaataccaccttccttgcagaggtttccatcgagttctttcttagggaattcttttttgtgcgggtttcctttggaaccatgttttggaactgcaccttctccttctccagtatcaccaccatcccccagtaagaccaagaagagcttatggaaaaagatcagaactggtgtgataattggaattgctgttgttggaggggtattgttgcttattttgattctcgtgctcttgatatgtattttcaagagaaagggacacactgaacctaccacagcttcgt

SEQ ID NO: 32343 - DNA, 322 bp, Zea mays
ctccctcttgccggtcccgaataaagagcagcagcgcaagaggtcggtagagcgagaagaaggcaatggcggccgagagcttccttttcacctcggagtccgtgaacgaggggcaccccgacaagctgtgcgaccaggtgtcggacgccgtgcttgacgcatgcctcgcgcaggaccccgacagcaaggtggcctgcgagacctgcaccaagaccaacatggtgatggtgttcggcgagatcacgaccaaggcgaccgtggactacgagaagatcgtgcgcgacacctgccgcgagatcgggttcactccgacgacgtgggc

SEQ ID NO: 32344 - DNA, 321 bp, Zea mays
ggagactggatggatgaccctgctattcctatagtcactggttttcctgggcagggatgtaaatcatgtgctgtcaccactttaggcaggggtggtagtgacttgacagctacaaccattggcaaagccttgggattaagagaaatccaggtttggaaggatgtagatggtgtgttgacatgtgatcctaatatatatgcaaatgctatacccgtgccctacttgacttttgatgaggctgctgagcttgcctactttggtgcacaggttttgcatccccaatcaatgcgaccggctagggatggtgatattccagtgaga

SEQ ID NO: 32345 - DNA, 320 bp, Zea mays
cggagaaggacctgggcatcgtcttctccacgttcgaccacgacggcgacgggttcatcacggcggtcgagctcgaggagtcgctgcgccgcctcggcatcgcagtgtccgccgacgaggccgcggccatggtcgcgcgcgtcgatgctaacagcgacgggctcatcgacatccacgagttccgcgagctctacgactccatacccaagaagaggaagcaccagcaccccgtagccgacggtttcagcggggcagcaagggaggtgccggtggagggcgacgacgaagaggccgaggaggagagggacctgcgggaggcg

SEQ ID NO: 32346 - DNA, 325 bp, Zea mays
ggcagtgactcagctcagggcctcgggccagcacaccaaccctccagtagtatctctgacgtgcgggctccgccagacaacgagctcacgagtcacgatccaaatcccttttccactccgccggacgtcgagagaggcggtgggtgcgggacgcgaaggcgaagcctagccccctccctgccgcggacgccgatggacccacctcgcgccgtcgcctttcttctcatactcctgcccgtgctcgccccggtggcctccggtgtacctttcgtcgtcctacacgggattggcgacgagtgcgggaacgatgggctgtcatccttca

SEQ ID NO: 32347 - DNA, 313 bp, Zea mays
cccacgcgtccgcgagggtggactggactacctcgggaacccgagcctcatccacgcgcagagcatcctcgccatctgggcctgccaggtcgtgctcatgggcgccgtcgagggctaccgcatcgccggcggcccgctcggcgaggtcgtcgacccgctctatcccggcggcagcgtcgacccgctcggcctcgccgacgaccccgaggccttcgctgagctcaaggtgaaggagctcaagaacggccgcctcgccatgttctccatgttcggattcttcgtccaggccatcgtcaccgggaagggcccgctc

SEQ ID NO: 32348 - DNA, 311 bp, Zea mays
cccacgcgtccgcaggaacgcggcgaaagacaacaagaagacgcgcatcatcccgcgccacgtgctcctggcgatccgcaacgacgaggagctcgggaagctgctggccggcgtcaccatcgcgcacggtggcgtcctccccaacatccactccgtgctcctgcccaagaaggcggcggagaaggcggccagcggcggcagcaaggagcccaagtcccccaagaagggcgccaagtcccccaagaaggcttagaaagtagggtcttcatttgcgctgtgtgctgtagcatgttcgtgtctagatctgtgga

SEQ ID NO: 32349 - DNA, 313 bp, Zea mays
aacctcttgtcggtcgcatacaagaatgtgattgggagtcgccgtgcttcatggcgcattgtctcttctattgaacagaaggaggagtcccgtaagaacgaagagcatgtgaaccttatcaaggaataccgtgcgaagatcgaggctgaactgagcaatatctgtgatggcatcctgaagctgcttgactcccacctagtgccttcttctactgctgctgaatcaaaggtcttctacctcaagatgaagggtgactatcacaggtatcttgcggaatttaagactggtcctgagaggaaggaatctgctgaga

SEQ ID NO: 32350 - DNA, 318 bp, Zea mays
actttgtgaagaagcttatatctatggcaatggatcgccatgacaaagaaaaagaaatggcatcgattctgttatcatctttgtatgctgatctactgagctcctacaggatcagtgaaggttttatgatgcttctggagtctacagaagatctaactgttgatataccggatgctactgatgtattggcagtttttattgcacgggctattgttgatgaaattttgcctcctgttttcctcactcgagctagggcactacttccagaattttccaagggcattcaagttctgcaggttgttgaaaagagctatttgt

SEQ ID NO: 32351 - DNA, 315 bp, Zea mays
agggacgcgtggagcaagacccgcatcgtcccgcgccacatccagctcgccgtccgcaacgacgaggagcactcccgcttgctgggcacggtgaccatcgccagcggtggtgtcatgcccaacatccataacctgctgttgcccaagaagtctggcggcggcagtgccaaggctgcggctggtgatgaggactagaccgaccacgcctagcctttcatccggtggtggcacctcttgtggatgctgccgtatcaacttgtgcctgtgtagtacgctctagaaatgccttaggtgttgcgttgtagttcgggatgt

SEQ ID NO: 32352 - DNA, 196 bp, Zea mays
cccacgcgtccgcacaccaccgcgaaaccccagcagccgcatcgatggcgcccaaggcggagaagaagccggctgcgaagaagccagcggaggaggagcccgctgccgcgaaggccccggcggggaagaagcccaaggccgagaagcgcctcccggcggccaagtcgtccggcaaagaaggcggcgacaagaaggg

SEQ ID NO: 32353 - DNA, 309 bp, Zea mays
cccacgcgtccggaggaagagcaaggcgaatttcttccgcatcatgagcgtcttgagccccttggtcgcggtgacaaagtggttcgatcagatctgccgctggaggaacccactgaccaccatactgatccatgtcctcttcatgatactggttctttacccagagctgatactgcccacagtcttcctctacctgttcctgataggggtgtggtactaccggtggcgtctgaggcagccgccacacatggacacccgcctctcccacgcggagactgcccaccccgacgagctggacgaggagtttga

SEQ ID NO: 32354 - DNA, 304 bp, Zea mays
cggacgcgtggggacatgatgggctcggatcctttggaggctggctcccaggctgcccagctggtgctgagctatccgcaagaggaagggtctgaaagaacagatgactcctctttctgagtttgaggacaagctctaatcttttcgtttttgctactgttactggttttaattgtcactcggagtctgggaactatgtatatcttgtttccttttagttgtcaagtgcatgtttctgaacatcattggtcatactgtactatccaagtgctgttgagacacttgtttcgatcgatcgtgatgt

SEQ ID NO: 32355 - DNA, 178 bp, Zea mays
cccacgcgtccgcccacgcgtccgcccacgcgtccggctctagatccgttcatcctggtggttttgtgaggtcgaaagcggcgagcgaattagaagatgctggacaagctgtgggacgacgtggtggccgggcctcgcccggagacgggcctcgagaagctccgcaaggccaccaccg

SEQ ID NO: 32356 - DNA, 310 bp, Zea mays
aggttattggtggcgaaatgactgctattccaggaatttctgatgcaattgaggggacaatacgtgatactattgaggatacactgacatggccgaatcgcataattgttcccattgtacctggagactatagtgacttggagttgaaacctactggggtattagaagtaaaactggtggaagctagggacctaaagaacaaggatcttgtgggaaagtcggacccttttgcattgatattcatagtgctcattccagatgggattccaatcattgttaatttgtggttgaggacatatctacgcagcac

SEQ ID NO: 32357 - DNA, 293 bp, Zea mays
gaacagctcgccgcggctccgaatggcaacttccccgaaccccgcgacgattcaccgagccggcgcccagtgacccttccagaagcttccagaaggtcaccgccatggccgcgcccttcttttccactcctttccagccctacgtctaccagagccagcaaggatctgtgacggcgtttcagatatccggtggagatgtgcaggtcctgcaggtgatgctgaagtctcaagagaagctgactgcaaaaccaggtaccatgtgctacatgtctgggaacatgcagatgggacac

SEQ ID NO: 32358 - DNA, 288 bp, Zea mays
cggacgcgtggcggacgcgtgggccggtcaccgtctttggcatcaggaaccctgaggaaatcccgtggggtgaggctggcgctgagtatgtcgtggagtccaccggcgtcttcactgacaaggacaaggctgctgcacatctcaagggtggtgccaagaaggttgttatctctgccccaagcaaagacgcacccatgtttgttgttggtgtcaatgaggacaagtacacctcggatgttaacattgtttccaatgctagctgcaccacaaactgccttgctccccttg

SEQ ID NO: 32359 - DNA, 271 bp, Zea mays
cccacgcgtccgtctcgaccgtcgctcaccgggaagctacgctacgacgaagcatggcgtccgtcaccgcccgcgccccggtcgcagccctgcgcccgtcgtcgtcgtcggccttccttggccactctagccgcctcggccgcactgctaccgcgtcgccgacgaggcggagcctcaaggcggaggccaagggcgagtggctcccgggccttccctcccccgcctacctcgacggcagcctgccgggtgacaatggcttcgacccgttggg

SEQ ID NO: 32360 - DNA, 241 bp, Zea mays
gtgatgtggttaccacaaccacgcacaagtccctcagagggccaagggctggcatgatcttctacaggaaaggccctaagccccccaagaagggccagcctgagggtgctgtttatgattacgaagacaagatcaactttgcagtgttcccatctctccaaggtggccctcacaaccaccagattgctgcacttgctgttgctctacagcaaactatgtcgcctggcttcaaggcctatgc

SEQ ID NO: 32361 - DNA, 286 bp, Zea mays
caagcaagcaagcagcgagtacatacatactaggcagccaggcagccatggcgcccaccgtgatgatggcctcgtcggccaccgccgtcgctccgttccaggggctcaagtccaccgccagcctccccgtcgcccgccgctcctccagaagcctcggcaacgtcagcaacggcggaaggatccggtgcatgcaggtgtggccggcctacggcaacaagaagttcgagacgctgtcgtacctgccgccgctgtcgacggacgacctgctgaagcaggtggactacct

SEQ ID NO: 32362 - DNA, 283 bp, Zea mays
  unsure (1)..(283): unsure at all n locations
ggaggcggcctcggtggtggagctggaggtggcttaggcggaggcggagggcttggtggcggtggaggaggtggttatggcggaggtgctggcggaggcggcggccttgggggtggttccggtggaggtctcggcggtggtgaaggcggaggaggcgggcttggtggtggtgccggtggaggcggtggtcttggtggcggaggaggagctggtgggggagcaggtgcgggtggcggctctggcggaggcgccggtgcangaggtggcgctggaagcggctatg

SEQ ID NO: 32363 - DNA, 195 bp, Zea mays
cggcgtccctccgtcgtcgagcccagctgcgctcctcaaggaggccatccacgtcatcagctgcggctacgaggacaagaccgactggggcctggagctggggtggatctacgggtccatcacggaggacatcctgacggggttcaagatgcactgccgcgggtggcgctcggtgtactgcatgccgaagcgggc

SEQ ID NO: 32364 - DNA, 267 bp, Zea mays
ggacgcgtgggcgcgcaaccgcctcccgctcgaactcgtctgggatgccttcttccgcggtgacaaggaggggaggttctccatcctcgtgcactcgcggccgggcttcgtgctcacacgagccaccactcgatcccgattcttctacaaccgtctagtcaacgatagcatccaggtggattggggggaggcgagcatgatcacggctgagcgcattttgctcagccatgctctcaaggatccactcaatgaccgctttgtttttgt

SEQ ID NO: 32365 - DNA, 279 bp, Zea mays
cccacgcgtccgccacgcgtccgattgacagcaacactgatgggctcgtggacttcaaggagtttgttgcggcaactctccatatccaccagatggcggagctcgactcagaaaggtggggcatacgctgccaagctgctttcagtaagtttgatcttgacggtgatggatatatcacgccggaggaactcagaatggtgcagcacactgggttgaagggatctatcgagccgctgctggaggaggccgacatcgacaaagacggcaagataagcctgt

SEQ ID NO: 32366 - DNA, 275 bp, Zea mays
ccacgcgtccgcgacgctgggctgcagttcaccagcaataagagtctctgatattgtaaacatactgaagaccgaatatccaacatacacttaccctcaaaaattcgttgaagcggaaggtagcaacacatacaacacggagaagcttcggaagctagggtggacctctaggcccatggaggacaccctccgagacagcatcgaatgctacagagctatgggcatcctgaactgagcttcccttcagctttgggctttggctgctgctgctgcta

SEQ ID NO: 32367 - DNA, 281 bp, Zea mays
caagagcgccggcaaggccgccgccgccgccgccgagctcgtcaagtccttcgacgagtccaaggaggggatcgatggcgagttccaggagaagaaggctgatctccagcccaaggtcgtcgagatctacgagtctgcccctgcaccactcaaggtcctgatcaaggagaggagcaaggtgtccgggatcaagaagaactccgccgcaatcaccaagttcttcgaggagctggccaagatcgaattccctggagccaagcaagtgagcgacggcatctcca

SEQ ID NO: 32368 - DNA, 277 bp, Zea mays
  unsure (1)..(277): unsure at all n locations
tggcgtcgtccatgctctccgctaccaccgtgccactccagcaggggggcggcctgtccgagttctccgggctcaggagctccgcgtcgctgcccatgcgccggaatgccacctccgacgacttcatgtccgccgtctccttcaggacccacgcggtcggcacgagcggcgggccgcggcgggcgccgacggaggcgaactgnaaggtggccatcaatgggttcggccgcatcgggcgcaacttcctgcggtgctggcacgggcgcggcgacgctcg

SEQ ID NO: 32369 - DNA, 277 bp, Zea mays
ggtcttctgggatgggatcaagaaaggggtggttcccgtggccctcctgctgttggccgactctgccctctggccgccggtcgccgccgccgccgccggagcgcgaggccgaacacgccgttcagcagcatagcgagcgcatctcagggagtgctggtgatgtgttagaagataatcctgtgggtaggttgaaggtcttcatttatgacttaccaaggaagtacaacaagaagatggtcaccaaggattcacggtgcctcagtcacatgtttgctgc

SEQ ID NO: 32370 - DNA, 278 bp, Zea mays
cggacgcgtgggtgaggacttctctgttgagccagctgatgagaggaggcctttccgtgctctcttagatgttggccttattaggactacaactgggaaccgtgtctttggtgccctcaagggagctttggatggtggactggatattcctcacagcgagaagaggtttgctggtttcaagaaggatgacaagcagctggatgctgatatccatcgcaagtacatctatggtggccatgttgctgactacatgaggaacctcgctgaagaggagccag

SEQ ID NO: 32371 - DNA, 207 bp, Zea mays
cccacgcgtccgcccacgcgtccggaaaaaactcccgaacaggaaagacttgagaggagaagacaaatgccttaccatatgcatataaacctggagcttttggaagccacacacttgatctgtgcgatgctgattgaagtccccaatatggctgccagcacctatgacaagcggagacctatgagcaaaacattccgaagcttcttg

SEQ ID NO: 32372 - DNA, 271 bp, Zea mays
gcttaacggagggctcgggacgaccatgggctgcactgggcccaagtctgtcattgaagtccgcaatgggttcacattccttgaccttattgtgattcaaattgagtccctgaacaagaagtatggatgcaatgtccctttacttctgatgaactctttcaacacccatgatgacacacagaagattgttgagaagtattccaactccaacatcgaaattcatactttcaatcagagccagtatcctcgcattgtaaccgaggacttcttg

SEQ ID NO: 32373 - DNA, 270 bp, Zea mays
atcataccaagggatcttgctttgctttgtcagaaggttgagaatcatgtagttggagctccttgtggagtaatggatcaaatggcatctgcgtgtggagaagctaacaaactccttgcgatggtttgccagcctgccgaagtgaaggaattggttagcatacctactcatatacggttctggggtctagattcagggatacggcatagtgttggcgggggagattatggatctgtgagggtaggcacttacatgggacgaaagatgatc

SEQ ID NO: 32374 - DNA, 273 bp, Zea mays
cccacgcgtccgcccacgcgtccgcccacgcgtccggagggcatgaagaaccactcggtgatcatcaccaagaagctgctggacttctacacgggcttcgagggcgtgtcgacgctggtggacgtgggcggcggcgtgggcgccacgctgcacgccatcacgtcccgccacccgcacatctccggggtcaacttcgacctgccgcacgtcatctccgacgcgccgccgttccccggcgtgcgccacgtgggcggggacatgttcgcgtccgtg

SEQ ID NO: 32375 - DNA, 219 bp, Zea mays
gaagtatgcagatgatgcagcaaccttgaaaagtatcatcacgggggagttacccactggctgggttgatgctcttcctaaatacactccagagagcccaggagatgccaccaggaacctctcccagcagtgcctgaacgcgcttgctaatgttgtgcctggtcttattggaggcagtgctgatcttgcatcttccaacatgactctgctgaagatgtt

SEQ ID NO: 32376 - DNA, 330 bp, Zea mays
atttcagccgccgccgcgcgtacaagcaggagcagcaaggatgccggctggccacgggctgcgctcgcggacgcgcgacctgttcgcgcgccccttccgcaagaagggctacatcccgctcaccacctacctccgcacctacaagatcggcgactacgtcgacgtcaaggtgaacggcgccgtccacaaggggatgccgcacaagttctaccacggccgcaccggtcgcgtctggaacgtcaccaagcgcgccatcggcgtcgagataaacaagcaggtgaatggtcgcatcatcaggaagcgtatccatgtccgcgtggagcatgtgca

SEQ ID NO: 32377 - DNA, 327 bp, Zea mays
ttgatgaaaagcggaggatcaagatggcccttgatgtggccaaaggcatgaattgcctgcacactagtgtacctacaattgttcatcgggatctgaaatcgccaaacttgctggttgacaataattggaatgtaaaggtttgcgactttggactttcacggttaaagcacagtacgtttttgtcatccaaatccactgctggaacacctgagtggatggcacctgaggttctacggaatgaacaatcgaatgaaaagtgcgacgtttacagctttggtgtcatattatgggagctggcaacgcttagaatgccatggagtgggatga

SEQ ID NO: 32378 - DNA, 323 bp, Zea mays
cccacgcgtccgatcctctcgcaccgcaccgttcgcttcctttcgtcaactccactcctcttggccgccgcatcacctcctcttcgccgctgccgccaccgctccaccgggcagccagccagccatggatgaggagtacgacgtgatcgtgcttggcacggggctcaaagagtgcatcctcagtggtctcctttccgtcgacggcctcaaggttttgcatatggacagaaacgactactatggaggagattccacctcgctcaaccttaatcagctctggaagaggtttagaggggaagacaagccccagcacatctaggtgc

SEQ ID NO: 32379 - DNA, 323 bp, Zea mays
ggacgctgggtcgtgaactacctaaaggaaaagtaccataatccaatcatcatcatatcggacaacggaatggatcagcctggaaacctcacgcgcgaggagtacgtgcacgacgccgtgaggatcgatttctacaagaactacctgacggagctaaagacagggatcgacggcggcgcgaacgtgatcggctacttcgcgtggtctctcctggacaacttcgagtggctgtcgggctacacgtccaagttcggcatcgtctacgtcgacttcgcgacgctcaagcggtaccccaaggactcggcgtactggttcagagacat

SEQ ID NO: 32380 - DNA, 326 bp, Zea mays
ggcggcggcatatggcgctcagcaaggagcaaaaactcacaattcctgatcaacaacacacaacaagcagcgaacagcaggtggcgctggatgccgagctccagctgtggaaccacactttcggctacgtcaagtccatggcgctcaaggccgcgctcgacctcggcatacccgatgccatccaccagcacggcggctcggccaccatcccacagatagtcaccaggatcacgctccacccgtccaagacaccatgcctgcagcgcctcatgcgcgtgctcaccctcaccggcgtcttcgagcaccaggagccgcacgatgacggg

SEQ ID NO: 32381 - DNA, 325 bp, Zea mays
gttggaaaaagcacattctcagcccaactctcgtttgccctagctgaaatggaccatcaggttggccttcttgacatagatatatgtcgccctagcatccctaaaatgctaggccttgaaggacaagatattcatcaaagcaaccttggctggtcacctgtgtatgttgagtccaaccttggtgtgatgtcgattggtttcatgctgcctaatccagacgatgctgtcatatggaggggtccccgcaagaatggactgatcaagcagttcttaaaggatgtcgattggggggagattgactatcttgttgtggacgctcctccag

SEQ ID NO: 32382 - DNA, 190 bp, Zea mays
acccgctgtaccctggcggcacttcgaccccctcggcctggccgacgaccccgaggccttcgccgagctcaaggtgaaggagctcaagaacggccgcctcgccatgttttccatgttcggcttcttcgtccaggccatcgtcaccggcaagggcccgctcgagaacctcgctgaccatatcgctgaccca

SEQ ID NO: 32383 - DNA, 322 bp, Zea mays
gtgccttcgtctcgctggtggtgtacctggcgctgcgcccctcgaagccgtccttctacctgcaggacctgcagctgcgcaggcccatctcgctgggcgacccgtcgctgacggcgtcggcgcaggtgacgctggcctcccgcaaccccaacgaccgcgtgggcatcttctacaagcgcctggacgtgttcgtcacctaccgcgacgaggccgtgacggtgcccgtgtctctgccgccgcagtaccagggccaccgcgacttcaccgtctggtcccccgtgctgtcggccgagtccgtgcccgtatgccgctacgtcgccga

SEQ ID NO: 32384 - DNA, 97 bp, Zea mays
cgaccttcaagtctcgctacgtagcagtgcaataaaaaaagcagccgcaatggcgagcggcaccatggccctctcctccacggccttcgccggcaag

SEQ ID NO: 32385 - DNA, 296 bp, Zea mays
agcagaggcagcgacacgatcgcgagcgcacgcacgtaagcacgttgtcggaagctcaagttagaagaagcaccagtgcctgatcgatggcggcccaggctctcctctccggccggcagctgctgggccgccccgtgcagtcggccgtctctaggtcgtcggcgaggaaggcgcccttcgtcgtcagggccagctccagccctccagccaagcaaggtgccgacagcagctgtggttcgcgtccaagcagtccctctcctacctcgatggcacgctgcccggcgactatggcttcg

SEQ ID NO: 32386 - DNA, 212 bp, Zea mays
ggcgcatcaccatgcgcaagactgctggcaagcccaagccagcggcgtccggcagcccctggtacggggccgaccgcgtcctgtacctgggcccgctgtccggccagcccccaagctacctgaccggcgagttccccggcgactacggctgggacaccgcggggctgtccgccgacccggagactttcgccaagaaccgcgagctggaggtg

SEQ ID NO: 32387 - DNA, 209 bp, Zea mays
ctggaagggcctccgcgtcaccgtcaagctcaccgtgcagaaccggcaggccaaggtctccgtcgtcccctccgccgcggcgctcgtcatcaaggcgctcaaggaacccgagagggacaggaagaaggtcaagaacatcaagcacagcggcaacatcagcctcgacgacgtcatcgagatcgccaagatcatgaggaagaggtccatgg

SEQ ID NO: 32388 - DNA, 317 bp, Zea mays
gggagctgagttgggaggaggactgctgcagccatgaaggccctcattctcgtcggaggcttcggcacccgcctgcgcccgctcacgctcagcgtgcccaagccgctcgtggatttcggcaacaagcccatgatcctgcaccagatcgaggctctgaaggaagttggtgttacagaggttgtcctggccatcaattaccagcctgaggtgatgctcaactttctcaaggacttcgagagcaagcttggcatcaagatcacctgctcgcaggagacggagcccctcgggaccgcagcccgctggccctggcccgcgac

SEQ ID NO: 32389 - DNA, 316 bp, Zea mays
ggaaaccctagccgccatatctcacgatccactcgagcaccaagccgagggaaggtgaggagcgatggcgcgcggcgtggtgtcggcgaagggcggcgcggtcgcgggcaagaagaaggggtcggtttccttcacgatcgactgcaccaagccagtggaggacaagatcatggaggtcgcctcgctcgagaagttcctgcaggagcgcatcaaggtcgccggcggcaaggctggcaacctcggcgactccgtcaccatctctcgcgagaagaccaaggtcaccgtcacctctgacgggaccttctccaagaggtac

SEQ ID NO: 32390 - DNA, 312 bp, Zea mays
ctttccggttcgttcccctacgcccgtttctctctcgtcgcgcaacatcagagcacaagcgaggaacccagtccagtcccgggaatggagtgcgtattgggcgtggttggccgcgacttcgtgctggtggcggccgacacctccgccgtgcagagtattctcgtccacaagaccgacgaggacaaggtgatggtgctcgactcgcaaaagctgatgggcgcttcaggggagcctggtgatcgggtgcaatttacggagttcatacagaagaacttccacctgtaccagttccggaacaccatcgcgctctca

SEQ ID NO: 32391 - DNA, 315 bp, Zea mays
cgaacagcagccaattcgctcgagttcagatcgagcgcgcgccaagcaagtcttccggccggccgcgaagagcgcaatcaagcaagacaagatggtgaagctcgccttcggaagcgtcggcgactccttcagcgccacctccatcaaggcctacgtggccgagttcatcgccaccctcctcttcgtcttcgccggcgtcggttccgccatcgcctacgggcaactgacgaatggcggcgcgctggacccggcgggcctggtggcgatcgcgatcgagcacgcgctggcgctgttcgtgggcgtgtccgtcgcggc

SEQ ID NO: 32392 - DNA, 295 bp, Zea mays
accacgcgtccgcggacgcgtggggcagctaacgacctgcagccaaccatctaccagcgactcagcgagcgagagcagcacacactgcacgcagctagctaggagcagcagcagcggcggcgatggcggcctccatgatctcctcgtcagctctggcggtggcgcctcagggcctgccgcccctcggccgccgcgcctcctccttcgccgtcgtctgctccaacaagaagatcaagaccgacaagccctacgggattgggggtggcctgaccgtcgacgtcgacgccaacgggag

SEQ ID NO: 32393 - DNA, 313 bp, Zea mays
cacagggggtgatggcgctgtctcgacgcatggcggctcccgtcctcgtcctcctgctcctcctcgtcgccacagagctggggacgaccaaggtggcggaggcgaggcactgcctgtcgcagagccaccggttcaagggcctgtgcatgagcagcaacaactgcgccaacgtgtgccagaccgagaacttccccggcggcgagtgcaaggcggagggcgccacgcgcaagtgcttctgcaagaagatatgctagtagtagcctaggctttgcttgctggcacaagcaggtcgtcggcacgcaacgcaattcaa

SEQ ID NO: 32394 - DNA, 201 bp, Zea mays
  unsure (1)..(201): unsure at all n locations
cggacgctggncgagacgcgtgggtttttttttttttttttttttttttttgcagcaccaagaagcacactttttttcctacggatttaacttagaataaagcctgacgggggtaacagcacccatcgatccgcagtccatgctggttgatgcatgggtctgctggagccgaggatgaacacagcactaacaactgacaca

SEQ ID NO: 32395 - DNA, 215 bp, Zea mays
  unsure (1)..(215): unsure at all n locations
gtaggctcaccaaaaacacaccgaagatttcttgctcgaaatgacggtacatatggaccaatgccgcggggtaaaccgaaggnattactggctatgcctttcaatactacctcaatagatggcctttactgtgtcggtgacagctgtttccccgggcaaggtgtcatagctgtagcattctcagggatcatgtgtgctcaccgagttgctgcaga

SEQ ID NO: 32396 - DNA, 265 bp, Zea mays
gcgcgcctgagggagctggcgaacctcgtgatcgtcgccggtgaccacggcaaggagtccaaggacagggaggagcaggcggagttcaagaagatgtacagcctcatcgactagtacaagttgaagggccatatccggtggatctcggcgcagatgaaccgcgtccgcaacggggagctgtaccgctacatttgcgataccaagggcgcattcgtgcagcctgcgttctacgaagcgttcggcctgactgtgatcgagtccatga

SEQ ID NO: 32397 - DNA, 267 bp, Zea mays
accagcgactcagcgagcgagagcagcacacactgcacgcagctagctaggagcagcagcagcggcggcgatggcggcctccatgatctcctcgtcagctctggcggtggcgcctcagggcctgccgcccctcggccgccgcgcctcctccttcgccgtcgtctgctccaagaagaagatcaagaccgacaagccctacgggattgggggtggcctgaccgtcgacgtcgacgccaacgggagaaagggcaagggcaagggcgtgta

SEQ ID NO: 32398 - DNA, 257 bp, Zea mays
ggaaggtggacgccgccgaggcgttcaagatcgccggcatcgagggcggcttcttcaagctcaaccccaaggagggcctcgccatcgtcaacggcacgtctgtgggctccgcgctcgcggccaccgtgatgtacgacgccaacgtcctggccgtcctgtcggaggtcctgtccgccgtcttctgtgaggtcatgaacggcaagcccgagtacacggaccacctgacccacaagctgaagcaccacccggggtccatc

SEQ ID NO: 32399 - DNA, 267 bp, Zea mays
attcatttcccgccagactaccccttcaagcctccaaaggtatcttttaagacgaaggtcttccatccaaacatcaatagtaatggaagcatatgtcttgacattcttaaggagcagtggagccctgctttgacaatctctaaggttttgctttctatctgctccctgcttactgatcccaacccagacgaccctcttgtccctgagattgctcacatgtacaagacggatcggcctaagtacgaggcgacagccgcagctggaccc

SEQ ID NO: 32400 - DNA, 269 bp, Zea mays
agcagtagcaagagggatagagcaaggccacacacacacacacaccactagtaggctagcctagccttttagtcgtcgaggaggagcaagaatggcgcgcacgcaagcaggcaagcaagaagagagccgatcgaccgagagctagcacgcgatggcgaggtcttccaagatgatggtggcggcagctctgctggccttggccctggccgtgtcgaccgccgaggcgaggaacatcaagaccacgacgacggagaagaaggacgacgcgg

SEQ ID NO: 32401 - DNA, 259 bp, Zea mays
cccacgcgtccgcccacgcgtccggaggagctgttgatcgaggtgagtgaggttgaaaagcaggcggcgaacaaaggcaccatcgtcatggacggcggatactacggcggccgcgatcagcgctacagcggcgggtactacggcggcggtggcatcgcgacgccggggtacgctccggcggtcccgtacgggatgtcgcaggtgaacatcgagggcaacgggtgcgggcgggcgctgccgccgcagccgaccgtgaagg

SEQ ID NO: 32402 - DNA, 259 bp, Zea mays
ggagggtgagatcaccggcccgctcctcgcgtcgggcgccggcgcgccggcgcggaggcggtgcccccgtggcgggagcaggtgacggctcgggggctggcggtcagcgccgtcctgggggtgctcttctgcctcattacgcacaagctcaacctcaccgtcgggatcatcccctcgctcaacgtcgccgcggggctgctcggctacttcctggtccgcacctggacggcggcgctcgagaggttcggcgtcgtctcca

SEQ ID NO: 32403 - DNA, 250 bp, Zea mays
gtgcctactttgcttggttacagtgctcagggggcttgcaagtttggcttctatgagttctttaagaagtattactcggacatcgcagggcctgagtatgcccaaaagtacaagactctaatctacctcgcaggatctgcatctgctgaggtaattgctgatgtggctctctgcccttttgaagctgtgaaggtacgtgtgcagacacaacctggatttgctcgtggattgagtgatgggctccccaaat

SEQ ID NO: 32404 - DNA, 256 bp, Zea mays
cggacgcgtggcggacgcgtgggcggacgcgtgggcggttgctctagatccgttcatcctggtggtgctgtgaggtcgacagcggcgagcacattagaagatgctggacaagctgtgggacgacgtggtggccgggcctcgcccggagacgggcctcgagaagctccgcaaggccaccaccgcccgtccgctcgtcatcatcaaagacgcggacggcggcagttacattcggccacattcgttgccgtcgaccccg

SEQ ID NO: 32405 - DNA, 261 bp, Zea mays
caagtactatgatttggggatactgcaccgtgaagcaactgatgacaaggtcacagtggaggctgcagaggctactctcaagtacaacgtggctattaagtgtgcgaccattactccagatgaaactcgggttaaggagttcaatctgaaacacatgtggaagagcccaaatggcacaattaggaacattataaatggcactgtgttcagagagcctattatatgcaaaaacgttccaagacttgttccaggatggactaa

SEQ ID NO: 32406 - DNA, 259 bp, Zea mays
cggacgcgtggcgcgacgcgtgggcaactacgtcaagttgtaccagaagatcttcaaggccgactacacggtgccgcccagggtctccggcgacgcgcgccgcctcatcgcgcgcctgctcgtcgtcgaccccgccaagcgcgcctccatcgccgagattatgtgcacgccgtggttcaggaagggcttcgtgccgcccgtcctttcgcccccggtgacgcccaagaaacagcagctggacgaaggcgctgccctcttc

SEQ ID NO: 32407 - DNA, 261 bp, Zea mays
gccaacaacttcgctcgtggtcactacaccattggcaaggagattgttgacctgtgccttgaccgcatcaggaagcttgcagataattgcactggtctccagggcttcctcgtcttcaacgctgttggtggaggaacgggctctgggcttggttctctcctcctggagcgcctgtctgttgactatggcaagaagtccaagctcggtttcaccgtgtacccatccccccaggtgtccacatccgtggttgagccatacaac

SEQ ID NO: 32408 - DNA, 264 bp, Zea mays
cggacgcgtggcaagagcaagatcatcaatgcaccatggcaggcaaggtcaacattttcctctccatggctctgagtttggtattgtgaagatgggtaatgggaggtcaaggtttagatccaagtatatgtccactgaagaacttgaaaacattttaagaatacagcatgccgccactcatataaatgatccatacatcgatgattattaccatcaagcttgtctggccagcagatatgtggatgcaaggtcgaagcaccgctt

SEQ ID NO: 32409 - DNA, 146 bp, Zea mays
ggaccgtgggattgttctgggtgtcgagaagctggtaacctcaaagatgatgctggagggatcaaaagcgtagatccattcagtgcacaggcactcgggcttggctgttgctggtttggctgcagatggcaggcaaattgtttcaa

SEQ ID NO: 32410 - DNA, 185 bp, Zea mays
ttcctattcgcgccgccgccgctgctgcaagcgccagctcgccgtcgtccgaatagtacactctaacgccgccatggggcgtatgcacagccgcgggaagggtatctcgtcgtcggcgctgccgtacaagaggacgcctcctacctggctgaagaccgccgcctccgacgtggaggagatgatca

SEQ ID NO: 32411 - DNA, 171 bp, Zea mays
ctgggtgaaggggacactgcaaagcttgagattcagattaagttggacaaagagaagaaaatccacctccattcgggataggggtattggtatgaccaaggaagatcttattaagaaccttggaacgattgctaaatctggcacttcaggaacaggagctgctcgagtctc

SEQ ID NO: 32412 - DNA, 255 bp, Zea mays
ccatgggcagtcagaatggagtatgagatctacaaagcggcaaattccatacatggctattgtaaggtgggagagctgaaacctgagaagtcgatccctgattcaattctcagacaagcaaaagggcttgcaatcatcactgaggtaaaggttggagtgatgcttacatacaaaatcggtactggattggttgttgctcggagaggtgatggttcttggtcccctccttcagccatctctacttgtggtcttgga

SEQ ID NO: 32413 - DNA, 239 bp, Zea mays
cggacgctgggagcaggccattctgctcgccttactccctcacagaacccagtaaaatattgccagtcacgccgtcgagatggccctacgccgcctgctcgtcctcgccgtcctcgccctcgcggccaccgccgccgcggccaactccggcttcgcggactccaacccgatccgccctgtcaccgaccgcacggcctccgcgctcgattccacggtttccgctgcgctcggccgcaccc

SEQ ID NO: 32414 - DNA, 253 bp, Zea mays
cccacgcgtccgcccacgcgtccgagcagactgctgcctctgtagagttgaactcggataagctctcacagccatctgatgtcaacaattctgatgccctagcagctagcagtgaacgttcacctcttgaatcccaaagccggcaagtgaggagctgtaccaaggtaattatgcaaggaatggcagtaggaagggctgtagacctgacaaagcttagtggctacagcgatctttgccagaagctggaggagat

SEQ ID NO: 32415 - DNA, 254 bp, Zea mays
cccacgcgtccgcccacgcgtccgcggacgcgtggggacgaggcgacgagcgcgctggacgcggagtcggagtgcgtgctgcaggaggcgctggcgcggctgatgaaggggcggaccaccgtcctggtggcgcaccggctgtcgacgatccgaggggtggaccgcatcgcggtcgtgcaggacgggcgggtcgtggagcacggcagccactccgacctcctggcccggccggagggcgcgtactcgcggctgct

SEQ ID NO: 32416 - DNA, 257 bp, Zea mays
accttgaagagtgcaagtcctgcttctcttttgaaagaagctatacatgtcattagttgtggttatgaagacaagacagactggggaaaagagattggctggatctatggatcagttacagaagatattctaactggtttcaagatgcattgtcatggttggcggtcaatttactgcatacctaaacgggttgcattcaaaggttctgcacctctgaatctttcagatcgtcttcaccaggtgcttcggtgggctct

SEQ ID NO: 32417 - DNA, 188 bp, Zea mays
gtgagcatatcattgctggagctggtgagcttcatcttgagatttgcctgaaggatctgcaagaggacttcatgggaggtgctgaaattattgtttctcctcctgttgtgtccttccgtgaaaccgttcttgagaagtcctgccgcactgtcatgagcaagtcacctaacaagcacaaccgtctgtac

SEQ ID NO: 32418 - DNA, 186 bp, Zea mays
ccctgttcgggaagctcttcttcgccttctgggtgatcgtccacctgtacccgttcctcaagggtctggtggggaggcagaacaggacgccgacgatcgtcatcgtctggtccatcctgctggcctcgatcttctcgctcctgtgggtccgcgtcgacccgttcctcgccaagagcaacggcccgc

SEQ ID NO: 32419 - DNA, 177 bp, Zea mays
accaggtccgcgcaggtcactcccgggccgccgccgccgccgcctccggaaaaaccctagcaggcttcgcgctgatcactccaaggggcgcgaccatggtggccacaaagaagacgaagaaatccacggacaacatcaataacaagctgcagctttgatgacagagtggcaagtaca

SEQ ID NO: 32420 - DNA, 184 bp, Zea mays
ggaaagtggtcgcagggctcgtgaaaaagtcttggaggccttccctcgtctcaaagtaaccaacgggcgaatggttttagaggttcgcccggtgatcgactgggacaagggaaaggctgtcgagttcctgcttcggtcgctcggcctaagcgactccgaagatgtggttccaatctacatcgga

SEQ ID NO: 32421 - DNA, 185 bp, Zea mays
cacaactggggcaacggatcagcttcggcgcgcagctccagaactaccaggcggcggtgcagcagctggctgagcatcctgggcgacgaggactccgcggccagccacctgagccagtgcatcttcacggtgggcatgggcagcaacgactacctcaacaactacttcatgccggcggtctactc

SEQ ID NO: 32422 - DNA, 182 bp, Zea mays
cccacggtccgcccacgcgtccgctatgtttctccgctttgcaagatgtcgtccccgagcaagcgccgacgcatggaccttatgaagctgatgatgagcgactacaaggtggagatggtgaacgacgggatgcaggaattcttcgtcgaattcaagggcccggccgaaagtatctaccaagg

SEQ ID NO: 32423 - DNA, 181 bp, Zea mays
aaagcaccagggtatcacccagctcaagttccagaggacaagaggtctgttgctgaggagagggctggacaaaagcttggtggactcagggttctcaactcctactgggtgaatgaggatagcacctacaagtactttgagatcattcttgttgatgtggcccacactaccatccgcaatg

SEQ ID NO: 32424 - DNA, 178 bp, Zea mays
ccaaatttgtccgatctgagggtgttcttgggctctacaagggaattgttcctctctggggtcgtcagattccttataccatgatgaagtttgcttcctttgagaccatcgttgagcttatctacaagcatgctgtgcctgttccgaagtctgagtgcagcaagactacccagttggg

SEQ ID NO: 32425 - DNA, 184 bp, Zea mays
tggttggcttctcctccccctccggttcgggttcgggttcgtgatgttctccggcggttcggtttcgtgggtgagcggatcgagatggcggcgtcggatgttgagtaccgctgcttcgtcggctgcctcgcgtgcgccacggacgaccactccctccacaacgccttcagcacctacggcgagg

SEQ ID NO: 32426 - DNA, 182 bp, Zea mays
gcagccaacgtgttcggcaagaccaagaagaacacggacttcatctcctacgtcggcgagcgcttcaagctgctgatcccgtccaagtggaaccccagcaaggagcgggagttccccgggcaggtgctccgctacgaggacaacttcgacgccaacagcaacgtgtccgtcatcatccagcc

SEQ ID NO: 32427 - DNA, 176 bp, Zea mays
ggccgtatcgtgggctcggtttccagcactttcacgctcagctccagcaatggctgcctccaccatggcgatctcctccacggcgatggcgcgcacccccatcaaggtgggctccttcggcgagggcgcgatcaccatgcgcaagaccgtgggcaagcccaaggtggcggcgtccg

SEQ ID NO: 32428 - DNA, 179 bp, Zea mays
aggagatccaaagaagccagagacggtggagctggcgataaaggactacccgtacgcggtggacgggctcgacatgtgggcggcgatcaagaagtgggtggctgactactgcgccatctactacgccgacgacggcgtgtggcgagggacagcgagctgcaggggtggtggagcgaggt

SEQ ID NO: 32429 - DNA, 176 bp, Zea mays
ggcaagttcctcctatgtgcgaaacggacctcccgcccaacctgtacagaatatacaatatttatgaattctgaaaatttatctaggtcaagcaaaatgtacattggaaagctgaggtcgaatctcctcggcacaaagtttgcaatatatgatacccagcccccatgcaagcagca

SEQ ID NO: 32430 - DNA, 177 bp, Zea mays
ctcggcgcgatccacccgattcgaagcgtgcggagagaccgaagaagcgggagagatggctcgtaccaagcagactgctcgcaagtccacgggagggaaggctcccaggaagcagcttgccaccaaggctgcccgtaagtctgcccccaccactgggtaggtgaagaagcctcaccg

SEQ ID NO: 32431 - DNA, 179 bp, Zea mays
ccttcaagtctcgctacgtacagtgcaataaaaaaagcagccgcaatggcacgcagcaccatggccctctcctccacggccttcgcggtcaaggccgtgaacgtgccgtcgtcgtccgccttcggcaggcccgcgtgacgatgcgcaagacggcggcgaaggccaagccagcggctcgt

SEQ ID NO: 32432 - DNA, 166 bp, Zea mays
cgcgcgccgccgccgccgaaacagcacatcgctctctcgatctcagccatggcgcaggtggagcagccccaggacgcggtgaagctcttcaaccgctggaccttcgacgatgtccaggtgaacgatatctcgctgaacgactacctggctgtgactgcggcgacac

SEQ ID NO: 32433 - DNA, 171 bp, Zea mays
gtacgagggcaatgttgaggccactggtgaggacttctctgttgagccagctgatgagaggaggcctttccgtgctctcttggatgttggccttatcaggactacaacagggaacgcgctctttggtgccctcaagggagcattggatggaggcctggatattcctcacag

SEQ ID NO: 32434 - DNA, 170 bp, Zea mays
gtccggcgagccctacacgctgcacaccaacgtgttcacgcgggggcaggggcagcgggacagcagttccgcctctggttcgaccccaccgccgacttccacacctactccatcctctggaaccccaagcacgtcatcttcatggtggacgacatgcccatcagggactt

SEQ ID NO: 32435 - DNA, 274 bp, Zea mays
gttctgaagagcgtgccccggggggctgcaactacgtgttacttggcattgcaccctaatgtcaaaggtgcatctggtaaatacttcgctgattgcaatgaagcaacaccgactgctgtcgcgagagactcagagctggcgaagaggctatggtcgttcagcgaagaacttgtcaagatctatgctgatatgtcacagacgacacaggcaagcgaagaggaggaaaccacggttacgaaagacgttttccaagacaagtagcgtaatatatgtt

SEQ ID NO: 32436 - DNA, 275 bp, Zea mays
agcgcgtcgccctcggaggagaacatgcgctacttcaacgttatgttccttgtggccggcgcagtcgccctatgaaggtggagtttttaagcttgaactctttttacctgaggaatatccaatggctgccccaaaggttaggtttctgacgaagatttatcatcccaacatcgacaagcttggtaggatatgcctcgacattctcaaggacaaatggagcccagcacttcagattcgaacagttcttttgagtatacaggctctactgagtgcgc

SEQ ID NO: 32437 - DNA, 273 bp, Zea mays
gcagcaacgccgatggagagcgaggagagacatatacatatctcgcgctgagatgtcgtcggactcctcgtcgtgggcgcgcgccctggtgcagatctcgccctacaccttctccgccatcggcatcgctgtctccatcggcgtctcggtcctcggcgcggcatggggtatcttcatcacggggagcagcctcatcggggctgccatcaaggcgcccaggatcacatctaagaacctcatcagtgtcatcttctgtgaggctgttgcaattta

SEQ ID NO: 32438 - DNA, 272 bp, Zea mays
actcctagctgaagatctcgagtgcaacgcaacgttggcgtttggcggccagtagtagcagcaaacttagcgtcgctccttcctactagacgagagatcgagaaaccatggccaagctccaagtcactcctggcgccgcgttcaccgagtgcaatgaactcaacttccagggcctgtacatgtaccacacgcccctgggtcccaaggccaaccaagctgcgatcctagagagcaaggccaagatcggcatcggtgccaccgtggttaacaac

SEQ ID NO: 32439 - DNA, 272 bp, Zea mays
gaagacgagtgtcaagtgaacctgaaacttgcggtgtcactggctggtatagcctgagtgtgagtgagtgatcgagctagctgagctccgatcctcgctagctagctaggataccgccataccacaagtcttcttcacaagtttaggagtgacagcaacaagagatctcgatggcctctgccaccgtgctcaagtcctccttccttcccaagaagtccgaatggggcgccaccaggcaggccgccgcgcccaggccgcccaccgtctccatg

SEQ ID NO: 32440 - DNA, 266 bp, Zea mays
cttcgccaggtcgagttctacttcagcgacacaacctctcccgcgataagttcctgcgggagacggtcgagcagagcgatgacggattggtgagcttgcccttgatatgctccttctcgcggatgaagtcccacctggggctggacgcagatgtcaagcccgagactgtgccggaggagaccgtgcttgcggttgctgaggtgctccggccttctcctgccctccgcgtatcggaggatggaaagaagattggtagagctagtgaa

SEQ ID NO: 32441 - DNA, 268 bp, Zea mays
atccccctggcctgctgctttcctgacaatcgaccagttccccagtcttgctccctgcagtcctccctcctccatctccagcgttgtgttctgactcacctgcaccaatggctgttctttctgctgctggtgctcccccggcctcagctatcgggtttgagggctatgagaagcgccttgagatcacattctctgaggcacctgtctttgtggacccccatggcagcggtttgcgtgccctctccaggtcccagattgactctgttct

SEQ ID NO: 32442 - DNA, 263 bp, Zea mays
caagtatcaacttttggtcttgcacttgtgaagcttgacatcaggcaggaatctgatcgacacacagatgtccttgattcgataacgacacatcttggaattggctcctatgctgaatggtctgaggagaaacgccaggattggttgttgtctgaactgaggggcaaacgtccattgtttggttctgatcttcctcagactgaagagactgctgatgttttaggcacatttcatgtccttgcagagcttccagcagattgctt

SEQ ID NO: 32443 - DNA, 269 bp, Zea mays
caagcaagcaagcagcgagtacatacatactaggcatccaggcagccatggcgcccaccgtgatgatggcctcgtcggccaccgccgtcgctccgttccaggggctcaagtccaccgccagcctccccatcgcccgccgctcctccagaagcctcggcaacgtcagcaacggcggaaggatccggtgcatgcaggtgtggccggcctacggcaacaagaagttcgagacgctgtcgtacctgccgccgctgtcgacggacgacctgctg

SEQ ID NO: 32444 - DNA, 99 bp, Zea mays
cacgcacgcatacacatcacatagtgatgtaggcatgcgtaaaaagctgtgatctgatcgacatggccgccgccaccatggctctcacctcccgcgcgc

SEQ ID NO: 32445 - DNA, 267 bp, Zea mays
gcggttccgcgagtgcgagctcatccacggccgctgtgccatgctcgccaccctcggcgccctctccgtcgagtggctcaccggcgtcacctggcaggacgccggcaaggtggagctggtggacgggtcctcctacctgggccagccgctgccgttctccatctcgacgctcatctggatcgaggtgctcgtgatcggctacatcgagttccagcgcaacgccgagctcgacccggagaagacgctgtaccccggcggctcctactt

SEQ ID NO: 32446 - DNA, 267 bp, Zea mays
ggagattggatgcttgttggcgatgtaccatgggatatgttcgctgactcttgccgcatcttcaggatcatgaaaggatcagatgcaattggacttgctccaagggcagctgataagtccaagaatcgcaactagaatggttgcttcttacagtccagagcaagagggagatatccagtgactgtagggatctttgtggaagccggaaaacgtctaacagtttcaagaagaattctgccttatggtctgtaccacatgtttttgctg

SEQ ID NO: 32447 - DNA, 185 bp, Zea mays
  unsure (1)..(185): unsure at all n locations
ccggacgctagctcaccaccaacctcagcacatcgangagaagaggagtggccaatggcttcgtcggtggccgccgcggcgagcacattcctgggcacccgcctggcggacccggtgccgcagaacgggcgcatcgtggccctgttcgggttcggccgcggaaagcccaaggctgccgtcccgaa

SEQ ID NO: 32448 - DNA, 226 bp, Zea mays
gcgaggcaaaagcgcaaacgcgaccacagacagagcgcgcttcaaggccttttttttttgagataacaaggaggagaggaggagatggcggtcacgatcacctgggtgaaggcgaggcagatcttcgacagccgcggcaaccccaccgtcgaggtggacgtgggcctcagcgacggcagctacgcgaggggggccgtacccagcggcgcatccactggaatatatg

SEQ ID NO: 32449 - DNA, 306 bp, Zea mays
ctccaatcggcatggcggacaggtcctaaacgccggcgcgctaggatattcccctcctgagttttcaagcaccagcaagccatgcccatctctgaagagcgacgtgtatgccttcggtgtcatcctgctggagttgctgacagggaagattgccggtgagatcatctgcatgaacgatggcgtggtcgacctgaccgactgggtgaggatgctggatctggaggagcgtgtcgcggagtgctacgacaggcacatcacgggtgttgagagctcggaaggcgccccacaggcactggatggcatact

SEQ ID NO: 32450 - DNA, 276 bp, Zea mays
ggcacctccgtgggctccgcgctcgcgccaccgtcatgtacgacgccaacgtcctggccgtcctctccgaggtcctgtccgccgtcttctgtgaggtcatgaacggcaagcccgagtacaccgaccacctcacccacaagctcaagcaccacccggggtccatcgaggccgcggccatcatggagcacatccttgagggcagctccttcatgaagcacgccaagaaggtgaacgagctggacccgctgctcaagcccaagcaggacaggtacgcgc

SEQ ID NO: 32451 - DNA, 299 bp, Zea mays
cttttctgcttccagacattgtccacgagctagtgcactggtgtcgctcgcaaccaaattaaggactgaggcatggcatccaagggcgtcctcttcttggctctcaacctcctgttcttcacagtggccaacgcctgcgagcactgcccgaccccaacgcccccggtcgagccaccgccgccgcctcctgctaccccacccccttcatcctccagtgggaagtgcccgctgaacgcgctcaagttcggcgtgtgcgtcaatgcgctcggcctcgtcaaaggcgaggctggcaaggtacc

SEQ ID NO: 32452 - DNA, 152 bp, Zea mays
agagaatcctaccaaacctagctaccaactcgatcgtcgtcatcacgctcgaccgcacaactgcaccaaggggggaggagacctaaaaactactacatcttttatagctacatctctagccaaagatcgagagggtaaataaggacgagcgg

SEQ ID NO: 32453 - DNA, 266 bp, Zea mays
ctctggatatggcaagcgcaggggtaccagggaggctaggctccccaccaagattctgtggatgaggaggatgcgtgttctgaggcgcctgctccgcaagtaccgtgaggccaagaagatcgacaagcacatgtatcatgacatgtacatgaaggtcaagggtaatatgtttaagaacaagagggtgcttatggagagtatccacaagtccaaggctgagaaggccagagagaagacactttctgatcagtttgaggccaagcgtg

SEQ ID NO: 32454 - DNA, 303 bp, Zea mays
ggacgctggttcacagcgcggaagatggctgaacaggaggccccagtcgcagttgaggcaccaaccccagttcttggggagcctatggacttgatgactgctctgcgctcgtgatgaagaagtcaagtgctcatgacggtcttgtgaagggtctccgtgaggctgccaaggccatcgaaaagcacggcgctcatcttcgcgtgcttgctgaggactgtgaccagccagattacgtcaagttggtgaaggcactctgcgcttagcacaatgttcacctggtcactgttcctgccgctaagactc

SEQ ID NO: 32455 - DNA, 278 bp, Zea mays
ctggagatccaccactccaccagtccggtccatctgctggacctcgattggtttcttcttacctaggaacatccggggatgtcgactcctgcgaggaagaggctgatgagggatttcaagcggttgatgcaggaccctccggccggcataagtggcgccccgcaggataacaacataatgctgtggaatgctgtcatatttggacctgatgataccccgtgggatggaggtacgtttaagctgactctccagtttaatgaagattacccaaaacacca

SEQ ID NO: 32456 - DNA, 227 bp, Zea mays
agaaagaggagtggaagtttgatacactttgtgatctttatgatacactcaccatcacccaagctgttattttctgcaatactaagagaaaggtggattggctcactgaaaaaatgcgtacaaataacttcaccgtatcagctatgcacggtgacatgccccaacaagaaagggatgccattatgggtgagttcaggtctggcgcaactcgtgtgctaataactaca

SEQ ID NO: 32457 - DNA, 189 bp, Zea mays
ggacgggcggacgcgtggctagctccctaactgcaccggccgccacaccactccgaccggaagttccacaacaatggccaccgtcctgggcagcccccgcgcgccggccttcttcttttcgtcgtcctccctccgcgccgcgccggcgcctaccgccgtggcgctgcctgcgtgcaaggtgggcatcat

SEQ ID NO: 32458 - DNA, 274 bp, Zea mays
tttcagcattgcccatccgtatcttcttgctgacaatagacactataccttctatatttggaggaaggttatccaagtaaactggatgatgaagtacatgttgattccactttatgtgtactcatggctctcaatcatcaacatcttagggaaatcacagacaaggatttgggtgttatcatttgtgctgtcagttgcactggtccttgtacctgccccgctggttgaattcagatactacacaattccatgcgtgatactggttcttcactct

SEQ ID NO: 32459 - DNA, 288 bp, Zea mays
ggacgtggggaccagcacctcagcgccgccgccatcgtcggccacgaggcagagtctgggcacagtccgagaacttccccgagttaaagcctgaggaggttgctgggatgataaaggactttgatgaacctggaactcttgcaccaactggtctttttgttggaggtacgaagtacatggtgatccaaggtgaacctggagttgtcatccgaggaaagaaaggcactggaggcattactatcaagaaactggcatgtcttgattacggtactatgatgagcaatgctc

SEQ ID NO: 32460 - DNA, 247 bp, Zea mays
ggccgctttgtcattggtggacctcacggcgatgctggcctcactggcagcaagatcatcattgacacctacgtggctggggagcccatggtggtggcgctttctccggcaaggacccaaccaaggttgaccgcagcggagcctatgtcgcaaggcaggctgccaagagcatcgtcgccagcggccttgctcgccgcgccatcgtccaggtgtcttacgccatcgggtgcaagagcctctctcggtg

SEQ ID NO: 32461 - DNA, 284 bp, Zea mays
gtcttacagtacgtagcagcagcctagcacgacgatggtgtccggcagcatcagcgaggagatcgccgtggccgtcccggcggagcgcatgtggaaggtggccttcgccgagaccaagtcggcgctcttgcccaaggcctgcgccggctacgtggacgccgtcgaggtgtacggcgacggcgggcccggcagcgtcaccaccatgaagcttaacccatcgctgggtgagaacaagacgctcaagagccgcgtggtggcgttggacgcagcgcgccgtggtgaga

SEQ ID NO: 32462 - DNA, 288 bp, Zea mays
cacccgggtcaaggacgaggaaggcatgccggcgttcgcgctcgtcaacaaggccacggggctcgccatcaagcactccctcggccagtcccacccggtcaagctcgcgcctttcaacccggaccaggaggacgcgtcggtgctgtggacggagagcaaggacgtgggcaagggcttccgctgcatccgcatggtcaacaacacccgcctcaacttcgacgccttccacggcgacaaggaccacggcggcgtgcacgacggcaccgccgtcgtgctctgggagtggtg

SEQ ID NO: 32463 - DNA, 80 bp, Zea mays
atcaccagctgccattgccatctactgacctgtgacctccgcatttccaaacagcccgatcgagctagagctagcagatc

SEQ ID NO: 32464 - DNA, 277 bp, Zea mays
cggacgcgtggcgagacgcgtgggatcagcaagtacgtcgaggggaagcacggcggcaatctccccaccaacttccgcaagcagctcaccgtgcagctgaagaagctcgctgccgccggcaagctgacgagggtgaagaactccttcaagctgccggccaccgacgccaagcccaaggccgccaagcccaaggcacccaaggccgcgcccaagcccaagccctcgccgaagcaaggccaagaccgctgcgaacccaaggcggcgtcgccaagcccaa

SEQ ID NO: 32465 - DNA, 279 bp, Zea mays
cacacacacacacacagacaagtggtttccaaagccaagtgtgtgtactagcaaccagctagctcgggcggcacaggcagccatcatgtcggaggagaagcaccaccacttcttcaaccaccacaagaaggacgaggagcagcccgccggcgagtacgggtactccgagaccgaggtggtcaccgccaccggcgagggcgagtacgagaggtacaagaaggaggagaaggagcacaagcacaagcagcacctcggcgaggccggcgccatcgccgccgg

SEQ ID NO: 32466 - DNA, 276 bp, Zea mays
gtatttgagtatctacctcgtggcagtccatctgaagcatgccttatgaggatatttgtggcaacggttgaagctatacttaggagaacttttccttctgaaacatcagagcaatccagaaagccaagaagtcaatctaagaaccttgctgttgctgaacttcacacaatgatacattcactctttgttgaatcctgtgcctcaatggaccttgcctcccggttgctatttgtggtgttaactgtttgtgtcagtcatcaagctttgccagggggg

SEQ ID NO: 32467 - DNA, 315 bp, Zea mays
gtaccctgagtacggtcggaattccgggtcaacacgcgtccgggagcggttggcttctcctccccctccggttcgggttcgggttcgtgaggatatccggggttcggtttcgtgggtgggcggatcgagatggcggcgtcggatgttgagtaccgctgcttcgtcggcggcctcgcctgggccacggacgaccactccctccacaacgccttcagcacctacggcgaggtcctcgagtccaagatcatcctcgatcgggagacgcagaggtcccgcggcttcggcttcgtcaccttctccacggaggaggcgatg

SEQ ID NO: 32468 - DNA, 276 bp, Zea mays
gctggcggagaaggtggggttcctggtggacaagcaggcggcgctgccccggctgggcgtcccgctgtacgagtggtggtcggaggcgctgcacggcgtctcctacgtggggcccggcacccggttctcgccgctggtgcccggggccaccagcttcccgcagcccatcctcacggcggcgtcgttcaacgccacgctcttccgcgccatcggcgaggtggtgtcgaacgatgcgcgggcgatgcacaacgtggggctggcggggctcacgatctg

SEQ ID NO: 32469 - DNA, 272 bp, Zea mays
cggacgcgtggaccagatcctttccaacccggagttccttgcagagggcactgctattgaggacctgttcaagcctgacagagtgctcatcggtggccgggagacccccgagggcaggaaagccgtccaggctctcaaggatgtgtatgctcactgggttcccgaggacaggatcctcaccaccaacctgtggtccgctgagctctccaagcttgccgccaatgcgttcttggcacagaggatctcctctgtcaatgccatctccgctctct

SEQ ID NO: 32470 - DNA, 271 bp, Zea mays
gcgctctgcccacctcgcttccctccagtggccgccggcgcggctcagcggtccatcctcctgacgccacctgcaacggcgccaggcggtgatccattccaactcgcggtcatctcaagtgggtgcggcaaccatgcccaaggttaagaatccccacattttcatggacatatcaatgagtggaggcagcgccgagaggatcacatttgagctactcgcaaatgtagttccaaagacagcggagaacttcagagcactctgtactggtgaa

SEQ ID NO: 32471 - DNA, 268 bp, Zea mays
gaatcttgtactacgaggctcgacacgacggcaacaagcatacacgcagggagggggctatatgtgttatgtgtaataggaggaacgcgcaggcggcgtactaggcctgcttgtagtacacagccagatagatatgctccacctcagatatagccccctccctgcgtgtatgcttgttgccgtcggtgcgaatcttgtactacgaggctccgtcgaacctcgatggcttgcttctttatcagaacatgtttgaataaacgctatttgg

SEQ ID NO: 32472 - DNA, 276 bp, Zea mays
gtccaaactcgtgagcactttctcctcgtccccgacaagccactcgaagccgagatacggccatggactccaccggcaccggagcagcggggaagggaaagaagggagcggccgggcgcaaggtcggcgggccaaggaagaagtcggtgtcgaggtccgtgaaggctgggctccagttccccgtcggccgcatcgggcgctacttgaagaagggccgctacgcgcacgtgtcggcaccggcgcccccgtctacctcgccgctgtcctcgaatacct

SEQ ID NO: 32473 - DNA, 271 bp, Zea mays
caagccaccatcgaccttcaagtctcgctacgtagcagtgcaataaaaaaagcagccgcaatggcgagcagcaccatggccctctcctccacggccttcgccggcaaggccgtgaacgtgccgtcgtcgtccgccttcggcgaggcccgcgtgacgatgcgcaagacggcggcgaaggccaagccagcgtctgcgtccgggagcccgtggtacggccccgaccgcgtgctgtacctgggcacactgtccggcgagctacgagctacctgac

SEQ ID NO: 32474 - DNA, 268 bp, Zea mays
ggacctggtgcataagtccattaagattgccgactttggtgtggctaggattgaagtcaagactgaggggatgacacctgaaactggaacataccgttggatggctcccgagatgatccagcacaggccatacaaccagaaagtggacgtctacagtttcgccattgtcctgtgggagttggtaactgggaatgtccctttcgcaaacatgactgcagtgcaagctgcatttgctgtggtgaacaagggtgtgcgaccagccataccc

SEQ ID NO: 32475 - DNA, 268 bp, Zea mays
gccaccatcgaccttcaagtctcgctacgtagcagtgcaataaaaaaagcagccgcaatggcgagcagcaccatggccctctcctccacggccttcgccggcaaggccgtgaacgtgccgtcgtcgtccgccttcggcgaggcccgcgtgacgatgcgcaagacggcggggaaggccaagccggcggcggcgtccgggagcccgtggtacggccccgaccgcgtgctgtacctgggcccactgtccggcgagccgccgagctacctga

SEQ ID NO: 32476 - DNA, 263 bp, Zea mays
ctttccactccgcctccgctgccgatcgccgtccccgaccgcagtgcaggactgaggatgagtgaagaggataaggctgctgcttctgctgagcagcctaagagggcccctaagctcaatgaaaggatcctctcctctctgtccaggaggtccgtagctgctcatccatggcatgatctcgagatcggtcctggtgctcctgctgtattcaatgttgttgttgagatcacaaagggaagcaaagtcaaatacgagcttgacaa

SEQ ID NO: 32477 - DNA, 262 bp, Zea mays
ggaccgtggccaagcacgtccggttcctccccgcgtcaagctcggcatccagggattcgagcgtgtccaagctggggttcgggtgcatggggctgacgggcgcgtacaactccccgctggacgacgaggccggcatcgccgtcatcgcgcacgctttcagccgcggagtcaccttgttcgacacctccgacgtatacgggcccctcaccaacgaaatcctcctcggcaaggcgctgaagcagctgccgcgggagcaggtgca

SEQ ID NO: 32478 - DNA, 265 bp, Zea mays
cccacgcgtccggtcgcctccctttccccttccctccctccctctccccgcgggccgccagaggcaatttcgccctcgattcgaccccgattcgtccgcccgcgaccgggattccctccgccaagcgcggatctgaacgctgcgctccgtgtcgccgctcgaatccgccatgaagggggccaaatccaagggcgccgccaaggccgatgccaagctggcggtgaagagcaagggggcggagaagcccgccaagggcaggaaaggg

SEQ ID NO: 32479 - DNA, 264 bp, Zea mays
cccacgcgtccgcccacgcgtccgtcacactcctcgccatcacataaaaccagtgcaagcagaagcagcgcaatggcgagcagcaccatggccctctcctccacagccttcgccggcaaggcagtgaacgtgccgtcgtctctcttcggcgaggcccgcgtgacgatgcgcaagacggcggcgaaggcaaagccggcggcgagctccggcagcccgtggtacggccccgaccgcgtgctctacctgggcccgctgtccggcgcg

SEQ ID NO: 32480 - DNA, 289 bp, Zea mays
  unsure (1)..(289): unsure at all n locations
cgacgtggaagacgaagagcgtggagttcatgccgttcctgctctccattgccgtgttcctgtgcggcacctcctggttcatctacggcctcctcggccgcgaccccttcattattatcccgaacgggtgcgggagcttcctgggcctgatgcagctcatcctgtacgccatctaccggaaaaacaagggccccgccgcgccggccggcaagggagatgccgccgcgccgccgcgangtggaggacccaagaaggtgccgctgccgtgtactggccgatgcacgacaac

SEQ ID NO: 32481 - DNA, 318 bp, Zea mays
ctccaagtctgacaagatcgttgtcgagaagtccaccgtccctgtcaagaccgctgaggctattgagaagatcttgacccacaacagcaagggcatcaactaccagatcctttccaacccggagttccttgcagagggcactgctattgaggacctgttcaagcctgacagagtgctcatcggtggccgggagacccccgagggcaggaaagccgtccaggctctcaaggatgtgtatgctcactgggttcccgaggacaggatcctcaccaccaacctgtggtccgctgagctctccaagcttgccagcaatgcgtt

SEQ ID NO: 32482 - DNA, 305 bp, Zea mays
  unsure (1)..(305): unsure at all n locations
ggccggctcccagatcttcagcgagggtggactggactaactcgggaacccgagcctcatccacgcgcagagcatcctcgccatctgggcctgccaggtcgtgctcatgggcgccgtcgagggctaccgcatcgccggcggcccgctcggcgaggtcgtcgacccgctctatcccggcggcagcttcgacccgctcggcctcgccgacgaccccgaggccttcgctgagctcaaggtgaaggagctcaagaacggccgcctcgccatgttctccatgttcggattcttcgtccangccatcgtca

SEQ ID NO: 32483 - DNA, 314 bp, Zea mays
atgcattgtcagagtctgaagccaaaactagtcttcagtctgatattgatcgttttataaatgagaagatagttcttgcagacaaagttattgtcagccatgccatcacaaaggtcagagacaacgatgtcttactgacatatggatcatcaacagttgttgaaatgattttggattatgctcatgaacttgggaggaactttcgagttgtagtggtagattctcgcccaaagcttgagggacagggattgctgcggagattagtggcaaagggcattaattgcacatatacacacataaatgccatctcatac

SEQ ID NO: 32484 - DNA, 310 bp, Zea mays
cgacgcgttcgccaagaaccgggagctggaggtcatccactcccgcagggccatgctgggcgcgttgggctgcgtgttcccggagctgctcgcccgcaacggcgtcaagttcggcgaggccgtgtggttcaaggccgggtcgcagatcttcagcgagggtgggctggactacctcggcaacccgagcctgatccacgcgcagagcatcctcgccatctgggcctgccaggtcgtgctcatgggcgccatcgaggggtaccgcgtcgccggcgtgccgctcggagaggtcgtcgacccgctctaccccggc

SEQ ID NO: 32485 - DNA, 315 bp, Zea mays
gcggcccctgtcgttcagactgtggtgctgaaggttgccatccactgccatggctgcaagaagaaggtccggaaggtgctcaggggcatcgaaggcgtgcaggacgtgacggtggacgcctcgcagcacaaggtgactgtgacgggcaccgtggacgccgacacgctcatcaagaggctgtacaagtccggcaagaagggagtgccctggaagtgtcacccgcccgccaagaacagcgagcccgcgccggaggcccgccagctccgcagcctgccggcgacggcggcaaggatgctgctgctgctgctgctgctg

SEQ ID NO: 32486 - DNA, 313 bp, Zea mays
cactcgagaactccatttcgatcccatttgaaatcaacccatcctcgtttcctccgtctagcagcctctcaccctcatggccaagatcaagatcgggatcaatgggtttggcaggatcggaaggctggtggccagggtggccctgcagagcgacgacgtcgagctcgtcgccgtgaacgaccccttcatcagcaccgattacatgacctacatgttcaagtatgacactgtgcacggacagtggaagcaccatgaggtcaaggtgaaggactccaagacccttctctttggtgagaaggaggttgctgtgttt

SEQ ID NO: 32487 - DNA, 343 bp, Zea mays
tacccgcagtacggtcggaatccgggccaccacgcgcccgagcgtatcccagcatccgagagagctccacaggccaggtccacttcgccgcggcgcttgccccacctctcccccgcccggtagtagcctcgccgccgttgccgagatggggttcgtgtccttcgtcgggagggtgctcttcgtcgccgctttcctcctctccgcctaccaggagtttaatgaattcggtgctgatggtggaccagcagccaaggcccttcggcccaaattcaacgtgtttgtcaaaaatgtatctgctcatctgggagtagctgtgccacacattgagttgaagcatgtgatt

SEQ ID NO: 32488 - DNA, 314 bp, Zea mays
cttggctccaattgctggagctccaaatactgatgggatagatccagattcttgtgaaaatgtggtgataaaaaactgctacatttctgttggtgatgatgggatagccataaagagtggttgggaccaatatggaattgcttatggccgtccatcagctaatattactatccagaatgtcgtaatccgctctatggtcagtgctggagtatcgattggaagcgagatgtctggtggtgtctcggatgttttggtagagaatgttcatgtctgggattcacggcgaggcgtgaggataaagactgcacctggaa

SEQ ID NO: 32489 - DNA, 318 bp, Zea mays
  unsure (1)..(318): unsure at all n locations
cgacgcggcgcaaagcacccgtcctgtcccctcgcaaaaccctagctccagacaccatgaagggcaaggctgacacctccaagaaggacgagggcaggctcacgggcgtggcggcgccgcctggacagcgcaagaaggccgccgcgagctgnaagcccaagcgcccgccctccgccttcttcgtcttcatgtctgaattcaggcaggagtatcaggcgctgcaccctggcaacaagagcgttgcgaccgtgagcaaggcagcaggggaaaagtggcgtgctatgtcagctcaagagaagcaaccatatgtggaccaag

SEQ ID NO: 32490 - DNA, 310 bp, Zea mays
ggacgaggagcagcccgccggcgagtacgggtactccgagaccgaggtggtcaccgcaccggcagggcgagtacgagaggtacaagaaggaggagaaggagcacaagcacaagcagcacctcggcgaggccggcgccatcgccgccggcgccttcgcactctacgagaagcacgaggcgaagaaggaccccgagcacgcgcacaggcacaagatcacggaggaggtcgctgccgcggcggccgtcggcgccggcggctacgtattccacgagcaccacgagaagaagaaggaccacaaggacgccgagga

SEQ ID NO: 32491 - DNA, 297 bp, Zea mays
tattgttgcgtccagtatattgaaaatcattttgatcttttggatttccttgttgtttgctataagaacttggaagtcgcgttgaattgtgggaacatgttgcgagaatgcataaaatatcctacacttgcaaaatatatattggagtcaagcagcttcgagttgtttttccagtatgttgaattgtcaaacttcgatattgcatctgatgctctgaacactttcaaggatttgctaaccaaacatgaagatgccgtctctgaatttctgagctcacattatgaacagttttttgga

SEQ ID NO: 32492 - DNA, 312 bp, Zea mays
ggcactgtaccacaaggattttacggtggagcagggtactataaatcctcctaatggatggaaggcatactatgcggctacaaaagccattattaaccttaatgcagagttctacaatattatcagggaagggtccttaccagcaatgagccgtttttggcttaatgcggactatgtcaagtgtattcatgcgactggggagttctgcactgggggagtgcatttagtggtgcttgatctattgcttggttagcatagatgttaggtctccttgctctgagtctaagggtggcctgggattgcgaaatggat

SEQ ID NO: 32493 - DNA, 310 bp, Zea mays
  unsure (1)..(310): unsure at all n locations
tgacggttgctctagatccgttcatcctggtggttttgtgaggtcgaaagcggcgagcgaattagaagatgctggacaagctgtgggacgacgtggtggccgggcctcgcccggagacgggcctcgagaagctccgcaaggccaccaccgcccgtccgctcgtcatcaacaaagacgcggacggcggcagctacaagcgggcgcagtcgatgccgtcgaccccgacgacgccggtgacgccgtcgtcgtcgtcgtcgtcgacgagncgcgcggcgccggcaacgtgtggcgcacgtcttccacccgggga

SEQ ID NO: 32494 - DNA, 310 bp, Zea mays
ctccctccctctccccgcgggccgccagaggcaatttcgccctcgattcgaccccgattcgtccgcccgcgaccgggattccctccgccaagcgcggatctgaacgctgcgctccgtgtcgccgctcgaatccgccatgaagggggccaaatccaagggcgccgccaaggccgatgccaagctggcggtgaagagcaagggggcggagaagcccgccaagggcaggaaagggaaggccggcaaggaccccaacaagcctaagagggctcccagcgctttcttcgtgttcatggaggaatttcgcaaggag

SEQ ID NO: 32495 - DNA, 298 bp, Zea mays
gctgccattgccatctactgacctgtgacctccgcatttccaaacagcccgagcgagctagagctagcagagcggcaggcacctccctcctcaaggaacatggcccgcacgcagcagttggcagtagtggcgaccgccgtggtggccttggtgctgctggcggcggcggcgacctctgaggcggccatcagctgcgggcaggtggcgtcggccatcgcggcctgcatctcctacgcgcgctgccagggctcggggccctccgccggctgctgcagcggcgtcaggagcctcaacaacg

SEQ ID NO: 32496 - DNA, 306 bp, Zea mays
cccacgcgtccgggagatcagaagcactttgatacatatgacaccagcggtcctcaaaatataagcccaaggattggactcccaaagataaggaaggaatggattgataggagggaaaagctgggtagtcctcggtacacacaaatgtattatgctaaacagggaattgtaacagaggagatgttatactgtgccagccgtgagaaccttagtcctgaatttgttcggacagaagttgcccgtggacgagccataattccttccaacaagaggcacctggaattggaacccatgattgttggaaga

SEQ ID NO: 32497 - DNA, 304 bp, Zea mays
gtcactcaacacagcacaggcagctcgagagagagagagagagaaagatgtcgtggttcgggcaccaccaccacaaccagccggctcccccggcgtcgggccccaaccaggtgttcaagatcttctgccgcgccaacgagaactactgcctggccgtccgcgacgcgccgtcgtgctggccccggtcaaccccaaggacgaccaccagcactggtacaaggacatgcgcttcagcacccgggtcaaggacgaggaaggcatgccggcgttcgcgctcgtcaacaaggccacggggctcgcaatc

SEQ ID NO: 32498 - DNA, 305 bp, Zea mays
ggacgtggttgttgacactgtattgtcgcccttttattcatcgtatatagagaactgcttgtgaagaaaaaaaatacggatttcgaatatattacaaatgcagcaggcttatgctgctctaggatggatggtttttctgcgcctctacttcgcatccttagatagaaaattatgtgcctgcatgtccctcacgttggagagtccatccaccgcgtctccccgctcgaacacagctgctgcccccattccagatccgatacacatggtgacaacaccaaatctgcagtctctgccccggcgcttca

SEQ ID NO: 32499 - DNA, 306 bp, Zea mays
atcttctctccttttgctcggaacgcacacaccgcccgtccccgatctccgatcccctcgtcgatccaaagatgcagatcttcgtcaagaccctcactggaaagactatcaccctcgaggtggagtcttctgacaccattgacaacgtcaaggccaagatccaggacaaggagggcatccccccggaccagcagcggctcatctttgctggcaagcagctcgaggacgggcgcacacttgccgactacaacatccagaaggagagcaccctccaccttgttctccgcctcaggggaggcatgcaga

SEQ ID NO: 32500 - DNA, 302 bp, Zea mays
gagaagttcgacccctcccgattcgaggttgctcccaagcccaacacgttcctgccgttcggcaacgggacccactcgtgcccgggcaacgagctcgccaagctggagatgctcgtgctcttccaccacctcgccaccaagtacaggtggtccacctccaagtccgagagcggcgtgcagttcggccccttcgcgctgccgctcaacggcctgcccatgaccttcgtccgcaagacgtgatgagccgccgacagatgtgtggatcgtggacggagccacaccaaaaccacggcaggccgacg

SEQ ID NO: 32501 - DNA, 305 bp, Zea mays
ctggttagtactccgcatgttcgtttttttacgccgacggaaatcaacctgcgccgctgccttctccgttctcgccgtcgcctccgcctccgctgccgccgcgcaggtcagggtcatgtcgatcttcgagtacaacgggagcgccgtggtggcgatggtggggaagaactgcttcgcgatcgccagcgaccgccgcctcggcgtgcagctgcagacgatcgccaccgacttccgacgggtgttcaaggtccacgacaagctctacatcgggctctcggggctcgccaccgacgcccagacgctgt

SEQ ID NO: 32502 - DNA, 304 bp, Zea mays
ggcctgccgcgacttcctcaaggcggccaaggcggccaagggcgccggcatggcggacggcagctacaccatcatgcacctggacctggcctccttcgacagcgtgcggcagttcgtggacagcttccggcgcgccggcatgccgctcgactcgctcgtctgcaacgccgccatctaccggcccacggcgcggacgccgacgttcacggcggacgggtacgagatgagcgtcggcgtcaaccacctgggccacttcctcctggcgcgcctgctcctggacgacatgcagaagtccgactacccg

SEQ ID NO: 32503 - DNA, 261 bp, Zea mays
ccgcgaccgtggttcgtgaggctctccggggttcggtttcgtgggtgggcggatcgagatggcggcgtcggatgttgagtaccgctgcttcgtcggcagcctcgcctgggccacggacgaccactccctccacaacgccttcagcacctacggcgaggtcctcgagtccaagatcatcctcgatcgggagacgcagaggtcccgcggcttcggcttcgtcagcttctccacggaggagagcgtgcggacgccatcgagggc

SEQ ID NO: 32504 - DNA, 304 bp, Zea mays
ggggaagaacttcaagattggttcactgcagatgttcatggacaacaatggaagcactgaagatatgggtcctcgaccttttcctgtcaaggaggttcataaaatagcagtactagatattaggttagctaatgctgatcgtcatgctgggaatattctagtgtgcaaggagagagaaggtggcaactacaagctgattccaattgatcatggttactgcttgccagagaaggtggttaatatctgttacaatacgtatttggttcatctgcttgcaccttatttgtttcatatggctgattag

SEQ ID NO: 32505 - DNA, 280 bp, Zea mays
ctaagcgataccttgaggatgttattgctcacaagcaggcaattcccttccggagatactgtgggggtgttggtcgcaccgcgcaagctaagtcgcgccactccaatgggcagggccgctggccgttaaatcagccaggttcatcctggatttgctgaagaatgctgagagtaacgctgatgtgaaaggcttggatgtggacaacctctatgtttcacacatccaggtgaatcaagcccagaagcagaggcgccgcacctaccgtgctcacgggcgcatc

SEQ ID NO: 32506 - DNA, 275 bp, Zea mays
ctcccagccgtcgtctgctgcggactccgcctccagtttggtctgtttcttgcaagttgatcttgtggtagttcccccaactgtcaccatgcagaacgaggagggtaagactgtggacctctatgtccccaggaagtgctcggccacaaacaggatcatcactgccaaggaccatgcctctgtccagatcaacattggccacttggatgcgaatggcctgtatgatggtcacttcacaacgtttgctctctctgggtttgtccgtgctcagggcg

SEQ ID NO: 32507 - DNA, 276 bp, Zea mays
cgattccatttctaccccgagacctccagccgtccgcccctgaaccctcagccttctccgtcccgcctcggcactcgacggccgccggcacacaccgcgcagtctcgagacaggaaccggaggaacgaggatggaggatgactcgccgctgacgaagacgatgaagggtgcggtgacaggactcgccgcggggaccatctggggcaccgtcgtcgccacctggtacgacgtgccccgtgtggagcgccacgtcgcgctcactggccttatccggac

SEQ ID NO: 32508 - DNA, 246 bp, Zea mays
cccacgcgtccgagaaaccctagttcgaacgcgccgccgtcaccgtcgtcgctcgcgctctccgcccggatcggagcgagagtaggggcgtgtcgctggtgaaagcgactgcgtcaccatggcggacgaggagcattcggagaggagagaagaggcctccgagcttggccccttcgacccgaccaagaagaagagaaagtagaatgttgtcatccaggaaccttctgatgaagtggactagcttgc

SEQ ID NO: 32509 - DNA, 271 bp, Zea mays
cggcaagttcatcatgccgtcgatcagcacgttcgccagcctcttcttcatcgccctcttcatgtccatcttcgcgacgggcatcctggagatgcggtggagcggggtgagcatcgaggagtggtggaggaacgagcagttctgggtcatcggcggcgtgtccgcgcacctcttcgccgtcgtgcagggcctgctcaaggtcctggccgggatcgacaccaacttcaccgtcacctccaaggccaccggagacgtggacgacgagttcgcc

SEQ ID NO: 32510 - DNA, 273 bp, Zea mays
cgtcaacgtctcccctttcatctacacgtacgccgcgtcggagacgagctgcacgacgaccccagcgtggcgctcttcttccaggagaaggccgtgcagcccggtaagaagatgaccgtccagttcgccagcaccgggacgaccggcgccaagttcctcccgcggagcgaggccgaggccatcccgttctcctcgcagaaggtgcccgagatcctcgcccgcctctcggtggacccggactccgtcgaggcggcggagatggcgcagacgctg

SEQ ID NO: 32511 - DNA, 268 bp, Zea mays
cacacgcgtccgcggacgcgtggcaaagattggcatcaacgggtttgggcggattggcaggttggtcctgcgaattgcaaccagcagagatgatattgaagttgtggctgtgaatgaccctttcattgatgctaagtacatggcctatatgttcaagtatgattccactcatggcccgtttaaaggttctattcgtgtcgtggatgattcaaccctcgagatcaatgggaagaaggtcacaattacaagcaaaagagatcctgcagag

SEQ ID NO: 32512 - DNA, 270 bp, Zea mays
gaaaatgctgcgaggagaattgaagctgcagttacagaaacactgaaccatgggttccgaactggggacatatattctcctggaacaacactggttggatgcaagcggatgggggaggaagtcttgaagacagtggagtcactgaaggaagtggctgctgtgaactgatgcatgctggtacttgattcattgcattttattagaagtcgagccgagcgtaagagagcatggtgtctgggttattgttgatgttgaattgaaagtttagtg

SEQ ID NO: 32513 - DNA, 267 bp, Zea mays
cccacgcgtccgcccacgcgtccgcccacgcgtccgtggcttctcctccccctccggttcgggttcgggttcgtgaggttctccggggttcggtttcgtgggtgagcggatcgagatggcggcgtcggatgttgagtaccgctgcttcgtcggcggcctcgcctgggccacggacgaccactccctccacaacgccttcagcacctacggcgaggtcctcgagtccaagatcatcctcgatcgggagacgcagaggtcccgcggctt

SEQ ID NO: 32514 - DNA, 270 bp, Zea mays
cccacgcgtccgcccacgcgtccggtcgactcctctcttgacaccatacaagatgggcgatttcaacctggcacacagggttgtgctggcgccgctgacgaggtgccgggcgttcgggaacgtgccgcagccggagcacatggctctctactaccgccagcgggcgacgcccggcggcttcctcatcgccgaggcctgcgccgtgtcggagagcgcgcgcgggtacccggacgttccggggctgtggacccaccaacaggtcgtggcctg

SEQ ID NO: 32515 - DNA, 268 bp, Zea mays
ggtggacgtgtctctaatgatgaaatcttgaattttgcaaagctattcaatgatgaacttactctggataacatgaacagaccacgcttggtaaatatgtgcaaatatatgggtatccggccttttggtacagatcactacatgaggttcatgcttcgcaaaaaacttcaggacattaagaatgatgataaactgattcaagctgagggagttgaatctctctctgaagaagagctccggcaagcctgccgggaacgtggtcatctag

SEQ ID NO: 32516 - DNA, 265 bp, Zea mays
gaagctcaagttagaagaagcaccagtgcctgatcgatggcggcccaggctctcctctccggccggcagctgctgggccgccccgtgcagtcggccgtctctaggtcgtcggcgaggaaggcgcccttcgtcgtcagggccagctccagccctccagccaagcaaggtgccgacagcagctgtggttcgcgtccaagcagtccctctcctacctcgatggcacgctgcccggcgactatggcttcgacccgctgggcctctcgga

SEQ ID NO: 32517 - DNA, 265 bp, Zea mays
gcaagctcctcaggcagatgccagtgcaatggccatcgatgaaccaagcaatgtcaagaatgaacctgagagctcaactaaattgcaaggccaagcagctgcgtaccacaagccatagctgcgaccatcaagagttgctgggtttctgctaggcaacttcctgcttgatgtggacagtccagaaaacagaagtgaatccgcaatacgtccctgccatttcaaatttgacttggttacacctatctgtgacaatgttaatgtaatg

SEQ ID NO: 32518 - DNA, 260 bp, Zea mays
cggacgcgtgggcggacgcgtgggttccaagatgtcgaagcgaggacgtggaggttctgctgatcacaagttccggatgtcactgggtctaccagtggcagccactgtgaactgtgctgataacactggagccaagaacctttacatcatttctgtgaagggaatcaaggggcgccttaacaggcttccttctgcctgtgttggtgacatggttatggcaactgtgaagaagggaaagcctgaccttaggaagaaggtga

SEQ ID NO: 32519 - DNA, 263 bp, Zea mays
ggtttcgcaaatcaaggcatcgactaagatacctgtcctcggtcatgcggatggtatttgtcatgtatacattgacaaatcagctgacatgaatatggcaaaacgaatagtgatggatgccaaaactgattacccagcagcctgcaatgctatggagacattgcttgttcataaagaccttataaaggctccaggtcttgatgatatactcctatcactcaaaacagaaggagttgctatttatggagggcctgttgcacatg

SEQ ID NO: 32520 - DNA, 259 bp, Zea mays
ctctccgaaatcaaggtagcgtacaccgctgcagtttctagagccctctctgccactcgtgatcccactagtcacaatgcctgccctcgccaagcccgcctcccgcaccgccaagcccgccgcggctccgaagccgaagcctgccgccgccaagccgaagcgtccaccgctggtgcctcccacccgccttacttcgagatgatcaaggaggctatcacggcgctcaaggagaggaccggctccagctcgcaagcgatcg

SEQ ID NO: 32521 - DNA, 263 bp, Zea mays
ccggagccgctcgaatcgctacaccacgaggtcgagctcgccgtcgttatctcccggcgtgggcgtgacattcctgaagcgtctgccatggacttcgtcggaggctatgcacttgctttggacatgacagcaaggggccttcaatctgttgctaagtctgcaggccttccatggactttggctaaagggcaagacacattcactccaattagtgcagtagttccaaaatcatctgtcactaatcctgacgatctcgagttatg

SEQ ID NO: 32522 - DNA, 261 bp, Zea mays
  unsure (1)..(261): unsure at all n locations
gaacnagcgtccgcggacctggctacgacggcaaactcaagtggcgaccgctggtgcttcctgacaggtacatcgaccatggatcgccggccgatcagctggccgaggctgggctgacgccgtcacacatcgccgcgtcggtgttcaacatcctggggcagaacagggaggctcttgccatcatggcagtgccaaacgcgtagaacttgtgctgatctgggcctatagagatgattgtacattttgtcgttaactagagtg

SEQ ID NO: 32523 - DNA, 259 bp, Zea mays
ggacctggcggacggtgggggaggatggtgaatgggaggcgccaaagattgacaacccagcagtgtgaagagacacctggatgtggcgagtggaagaggccaatgaagcagaatcctgcttacaagggcaagtggcatgcacctatgattgacaaccccaactacaagggaatctggaagcctcaggagatccccaaccctgagtactttgagcttgacaagcctgactttgatccaattgctgctattgggattgaga

SEQ ID NO: 32524 - DNA, 262 bp, Zea mays
atcactgcaggaaagacttgagaggagaagacaaatgccttaccatatgcatataaacctggagcttttggaagccacacactttatctgtgcgatgctgattgaagtccccaatatggctgccagcacctatgacaagcggagacctatgagcaaaacattccgaagcttcttgaagtgagtgaaaggcagacatttgttgggccgcccgagaatgtgagggaccatgtaatggctgccacaagagccctcaacaagggtg

SEQ ID NO: 32525 - DNA, 263 bp, Zea mays
gcagaactctctcgacctcatcggcgttggcggacgcgtgttgaccggagatggcgccgagcgggtggaggaggagcgcggcggcgcgggtcgcctggcgcccggccacggtttgcctgtagctcgcgctcgccgccgccgcactgacgctcgcccaggctaagaaggacctgacggaggttacccacaaggtctacttcgacatcgagatcgacggcaagcccgcaggccggattgtcatggggctttttgggaagactgtt

SEQ ID NO: 32526 - DNA, 267 bp, Zea mays
aagacatcgaagagggtattgaaggttatgaggatgaaaggtcagtgcttatgtcccagaggaaattggagaaacgctttggtcagtctcctattttcattgcatccacctttatgacacaaggtggcataccaccttcaacaaacccagcttctctactaaaggaagctatccatgtcatcagttgtggatatgaggacaaaactgaatggggaaaagagattggctggatctatggttcagtaacggaggatattctgactgggt

SEQ ID NO: 32527 - DNA, 309 bp, Zea mays
gcctgcatatctagcagccggagccggcgccggcgccgcgccgacaatcgttccaactgatatggctacgacgccaccaggattcacgggcaacctgaagaaagcacttgcaggtctgagaagaatcagtttagatgggttgcgatggcgcgtatttgatgctaagggtcaggtgctcgggcgattggcttcccaaatagctgttgtgcttcaaggcaaggataaaccgacctatgcaccacatgtagaaaatggagacatgtgcattgtacttaatgcaaaggatatcagtgttacaggaaggaaaat

SEQ ID NO: 32528 - DNA, 308 bp, Zea mays
aagagtgccagcgtctcacccctgaggccgcgcagagccactgcttgcgtctctgtctctctgtctgctcgtttttctccttctgcgactcgtaggagggtgaggtcttgcctcgcggaatggcggcgtccggggcatggctggcccgtgcgacggcgacggcggtgctgggtttcgtcctggcggtggcgtcactgaggcggcatcgggggacgtggagatggtgttcctcaaggccgcggtggccaaaggcgcagtgtgcttggacggcagcccaccggtgtaccatttctctcccggctccggtt

SEQ ID NO: 32529 - DNA, 307 bp, Zea mays
gtcgcggatcacgcacctggtgttctgcaccacgtccggggtggacatgccgggcgccgactaccagctgaccaaggcgctgggcctgcggcctccgtgaaccgcctcatgatgtaccagcaggggtgcttcgcgggcggcacggtgctgcgcgtggccaaggacctcgcggagaacaaccgcggcgccgggtgctggtggtgtgctccgagatcacggccgtcacgttccggggcccctccgagtcgcacctcgactcgctcgtgggccaggcgctgttcggcgacggcgcggcggccgtggtcgt

SEQ ID NO: 32530 - DNA, 328 bp, Zea mays
gtaccctgagtacggtcggattccggtcgaccatcgcgccccacgtgcgcgacggggcggcgtgacgcgtggcgagacgcgtggacgccactgtccagtagccgcgtcaagactgcttagctaaccgccatggcctccctcgccgccgtctccgtgaagcccgtggccatcaagggtctcgccggcagctccatctccggaaggaagctcgccgtcgccaggccgtcggctcgctccatccgcagccccgcgcagcgccgtggtggccaagtacggcgacaagagcgtctactttgacctcgacgacatcggcaacaccaccggacag

SEQ ID NO: 32531 - DNA, 309 bp, Zea mays
  unsure (1)..(309): unsure at all n locations
ggaagatactaaggacaagatcactaagctattggaggaatacaacactggtggtgacctaggagaagcctgcagatgcatccgtgatcttgggatgcccttcttcaaccatgaggtggtaaagaaggcactggtcatggcgatggagaagcagaatgacaccagcatcttggtcctgctgcaggagtgtttcggcngagggctcataaccatcaaccagatgaccaaaggctttgcacgtgtcaaggaaggccttgatgatctgatcctcgacatcccaaatgcccaggagaagtttggagagtatgt

SEQ ID NO: 32532 - DNA, 177 bp, Zea mays
gatccacaagtttcgtgggtagaggaggcactagatactgtgccagatcggggtctggtagtggcagttgggtgattacgacggagtgggatgggcctcctcgacaagctgtgggacgacaccgtcgcgggcccgcgcccggacaccggcctcggccgcctccgcaagcagcccgcg

SEQ ID NO: 32533 - DNA, 302 bp, Zea mays
gggttggcttctcctccccctccggttcgggttcgggttcgtgaggttctccggggttcggtttcgtgggtgggcggatcgagatggcggcgtcggatgttgagtaccgctgcttcgtcggctgcctcgcctgggccacggacgaccactccctccacaacgccttcagcacctacggcgaggtcctcgagtccaagatcatcctcgatcgggagacgcagaggtcccgcggcttcggcttcgtcaccttctccacggaggaggcgatgctgaacgcatctagggcatgaacggcaaggagc

SEQ ID NO: 32534 - DNA, 289 bp, Zea mays
cccacgcgtccgtcttcgtaagccttcaaaccgacgaatttgagcaactgcacccagagcgcgatccattgccggggaagaagcaacttgttgcgagcctcctctatggcgagctccgaccatggttccaccaccgcccccaaggacgtgccgggcagctacggcctgccgctggtgggcgccgtgcgcgaccgcctcgacttctactacttccaggggcaggacaagtacttcgagtcccgcgtggagcgctacggctccaccgtggtgcgcatgaacgtgccgccgg

SEQ ID NO: 32535 - DNA, 309 bp, Zea mays
ggctgatttcatgggtgcgattggttcaggaactggtatattgctcgctgtgacaatcatataccaatacttcgaaacctttgagaaggaaagggcgactgagcttggtttctttggtttttgattagtagctgtggaaccttaacttggctatagctgaattttcttgtaagtccctgtagtgcttagccagttgtaacttaaagagttctgtttaggttgccttcttgcggccacaatcatgtagcagaatgtgcgtgtgtttcaggttagcgtgggggtatgtgcatctgtccaaagagagtctgc

SEQ ID NO: 32536 - DNA, 300 bp, Zea mays
  unsure (1)..(300): unsure at all n locations
ggacaaggagaaatgaagtacgtccttgtcaccggcggggtagtgagcggcctgggcaagggcgttacagccagcagcatcggcgtcgtcctgaaggcgtgcggcctccgcattacgtccattaagattgatccttatcttaacactgatgctgggactatgtctccattcgaacatggtgaagtgttcgtactggatgatggtggcgaggtggacttggatcttggtaattacgagagatttttggacattaaacttactcgggacaataatataaccactgganagatctatcagtct

SEQ ID NO: 32537 - DNA, 254 bp, Zea mays
agaagaccggcaagatccccgacccggagtccaccgacaacgctgagttcaagatcgtgctcaccatcatccgcgacgggctcaaggctgaccccaagaagtaccgcaagatgaaggagaggcttgtcggcgtctctgaggagaccaccacgggtgtcaagaggctctaccagatgcaggagaccggcgccctcctcttccctgccattaacgtcaacgattccgtcaccaagagcaagtttgacaacctgtat

SEQ ID NO: 32538 - DNA, 300 bp, Zea mays
gcgacgagggtccagacagcaaggcggagggcgagaaggaagcggccgttgttgaccttaggccactgacgatggaagacctgaggcaggcaaagaaccaggttgcagcgagcttcgccgccgagggtgccgtgatgaacgagctcaggcagtggaacgacctgtacggcgaaggggggtccaggaagaaacagcagctgacctacttcttgtagaggtgaagcatttggcaggtggtggagaggaacagagctgggcagacggtggacccatacttgatgaaccgagcatggtttcttc

SEQ ID NO: 32539 - DNA, 296 bp, Zea mays
ggacgtggggcattttgttttggttgacaggtattgtcctggattctggagacggtgtcagtcacactgtcccaatctatgaaggctatgccctcccgcatgccattcttcgtctcgatcttgctggtagggaccttactgattccctcatgaagatcctgactgagaggggttactctttcacaaccactgctgaacgggaaatcgtacgtgacatcaaggaaaagcttgcatatgtcgcgctcgactacgaacaagaactcgagaccgccaagagcagctcatcagttgagaag

SEQ ID NO: 32540 - DNA, 301 bp, Zea mays
cccacgcgtccggcgagatcgtgcgcgcctccgagatctccacgaagttgtggtaacatggggcttaccttcacgaagctcttcagccggctcttctccaagaaagagatgaggatccttatggttggtctcgatgcagctggtaagaccaccatcctctacaagctcaagctcggagaaatcgtgaccaccatccctacaatcgggtttaatgtggagactgttgaatacaagaacattagcttcactgtctgggatgttggaggtcaggacaagatcaggccattgtggaggcactatt

SEQ ID NO: 32541 - DNA, 301 bp, Zea mays
tggagaggtagcaccggagcaggtagaacgctgcacaatccccttcgccgccgccaagatggtgaacgttcctaagaccaagaagacgtactgcaagaacaaagagtgcaagaagcacacactccacaaggtgactcagtataagaagggcaaggatagcctgtctgcccagggaaagcgccgttatgaccgcaagcagtcaggatatggtggtcagaccaagcctgtcttccacaagaaggccaagaccaccaagaagattgttctgaagctgcagtgccagagctgcaaccactactca

SEQ ID NO: 32542 - DNA, 302 bp, Zea mays
ctgctctccatacttcaccaattggaggccactctggcattcctgttacttatagtcgcctcaagaatctctttgcttggaaaaatatgaagaccacagtccaacaatttatacaaacttgccagatatgcttacaggcaaaaccagaccggtcagcataccccgggaaacttcaacccttaccagttccatctggggcctgggaaacgatcacaatggattttattgatgggctcccttcatcaggccatgccaactgtattctagtggttgtggataagtttaccaagtatgctcacttt

SEQ ID NO: 32543 - DNA, 277 bp, Zea mays
cccacgcgtccgcccacgcgtccgatgaagttacatgctactacggtttaatcattcttgagtacctatatattctaataaatcagtacgtttttaattattttgattttactggtacttagatagatgtatatacatgctctaacatgtttagatacatcatataacatgcacatgctgctacggtttaatcattcgtgaatacctatatattctattatatcagtatgccttttaattgttatgattttgatgtacttggacggctgcttatgca

SEQ ID NO: 32544 - DNA, 275 bp, Zea mays
gtgcatcgtgctgaactgctgacgcttcggcgggtccgaggtcaggcagcagcagcacggagtagcaccagggcgaccgcccaggttatcgtcggccgccggcgacctgtaccccggcgaggagatgcatctgagcgcgaacgaggggatcgagggtctgcgattcgcggtgacgggcgggcagggcttcgtcggagctgccctcagcctcgagctgctccgccgcggtgcccgcgaggtccggtccctcgatctccgcgcctcctcctcctggt

SEQ ID NO: 32545 - DNA, 274 bp, Zea mays
ctcgcatttccttgcaaccgattgccttcccccctcccaacccaagaccggtggcgcccaaggccgagaagaagcccgcggcgaagaagccggcggaggaggagcccgcggcggagaagacgaccgccgggaagaagcccaaggcggagaagcggatccccgctggcaagtccgccggcaaggagggcggcgagggcaagcgtggcaagaagaagggcaagaagagcgtggagacgtacaagatctacatcttcaaggtgctgaagcaggtgca

SEQ ID NO: 32546 - DNA, 272 bp, Zea mays
ggacgcgtggggtttgtccgccggattgctgaggcaagcgacgtacacggctgctcgtactggatcctttagggttctaactaacaaagcagttgaaaagaatgaagggaagccattgcctctatttcagaaagcttttattggtctgactgctggtgcaattggtgcttgtgttggtagtcctgctgatctggcactcattagaatgcaagccgattcgaccctgccagttgcacaacgacgcaactataagaatgctttccatgcactct

SEQ ID NO: 32547 - DNA, 272 bp, Zea mays
gctcgaccccatggtggatccggtgacgctctgcacggtgcagacgtagtgtcgggccaacatctcgcggtggctagccctgggccaccggacctgcccgaccacgatgcaggagctctgggacgacgcgctcaccccaaacgccaccctccggcagctcatcgccgcctggttctcccgccggtacacgaggtttaagaagcgctccgccgacttccacggccgcgccgccgacctcgtcgcagcctccgctgcacggcggtgcccaggcg

SEQ ID NO: 32548 - DNA, 275 bp, Zea mays
ccgcggaggaagaaccttggcccgacaccatgctcccaatggccgtccaggggggcaccacgccggccttgtccccgcgcgcccgcgtcttgccgcacaggcctcccatctcctccctggcggacccctcgtcctccccctgccatcgcatcgtcagtttcaaaagcaggaggctgccacttcgctctctccacatcgccgctgccgctgccgccggggcagaggaagaagaggcgcaactaggtggaagtgtgaacgcggtcgacgaggaggaa

SEQ ID NO: 32549 - DNA, 278 bp, Zea mays
ctcatccacagctcgcagccgtattcctgtctcgaatcctctctcggcgctccgatggcccgcacgaagcaaacagcaaggaagtcgaccggcggcaaggccccccggaagcagctggccactaaggctgcgcgcaagtcggccccggccaccggcggcgtgaagaagccccaccgcttccgccccggcaccgtcgcgctccgcgagatccgcaagtaccagaagagcactgagctgctcatccgcaagctccccttccagcgcctcgtccgcgagat

SEQ ID NO: 32550 - DNA, 272 bp, Zea mays
ccgcgtgcgaaccaagcagaccccagcagaagaagcgaagtcgtcgggggagcaggaggaagagcgagcagcaagatgtcgtggcaggcgtacgtcgatgaccacctgctgtgcgacatcgaaggccagcacctcagcgccgccgccatcgtcggccacgacggcagcgtctgggcacagtccgagaacttccccgagttaaagcctgaggaggttgctgggatgataaaggactttgatgaacctggaactcttgcaccaactggtctttt

SEQ ID NO: 32551 - DNA, 271 bp, Zea mays
gttcagagagctacaagagaagcacatgaaagggcattcgccgaggttcgagctaaggctgaaagaatagcattagaaaggatcacctcagcacgtcaaagagcatccgcagaagcccacgagaaagaagagaaggcaaccgctcaagcagctctggagcaggcttcaagggaagctagaatgaaagcagaacgtgcagccgttgagagagcaactgctgaagctcgggagagggcaattgaaaaggcaaaagctgctgcagatgcaaagg

SEQ ID NO: 32552 - DNA, 271 bp, Zea mays
cccacgcgtccgcccacgcgtccggaggagctgttgatcgaggtgagtgaggttgaaaagcaggcggcgaacaaaggcaccatcgtcatggacggcggatactacggcggccgcgatcagcgctacagcggcgggtactacggcggcggtggcatcgcgacgccggggtacgctccggcggtcccgtacgggatgtcgcaggtgaacatcgagggcaacgggtgcgggcgggcgctgccgccgcagccgaccgtgaaggtgtactgccgcg

SEQ ID NO: 32553 - DNA, 267 bp, Zea mays
cagaacctcaagagcgccgccagcaccgccgccgacaggcgccgcctgcaactgcctcaagaacgccgccaggggcgtcacggcctcaacgccggcaacgccgccagcatcccctccaagtgcggcgtcacatcccctacaccatcagcacctccaccgactgctccagggtgaactaaaacctagaccacgcgcgacgacggccgcctgatcgatcgaccaaccattccgccgtcgccgccggccggatcatcgatcgtcgtcatg

SEQ ID NO: 32554 - DNA, 268 bp, Zea mays
caagcgcatacagggctttggaaatactaattacgagccatctagagatgacaagaagtctttccttagcgagcttagcgaggtagtgggtattggaagtgcatccattaagcaggggttgagcaactttgctgcagcgcatgcaatgatgacaaatgacaatggtagcacatacaggagccctaatctccgtagatctttgaccacggaatctgaaagatatggtcggtatgatccaagtgaaattcaacgtgagagccgagcctca

SEQ ID NO: 32555 - DNA, 266 bp, Zea mays
cggaccgtggacgaccctgaggctctgcagaagttcggccgcgcgatgggcgtcggcgtcggcgcgtccggcgaggccggcggcgcagagcacgccgaggcggaggacgacgctggggaggaaggcgagtacgaggacgagtccatcgtccaccacaccgccagtgttggcgacgtcgagggcctcaagaaagcgctggagaacggcgcggacaaggacgaggaggactcggaagggcggcgtggcctccacttcgcgtgcggcta

SEQ ID NO: 32556 - DNA, 266 bp, Zea mays
caccatctttgacgagactgggtaccgccacacagctgccggcttactatcagctggagatgctagcaacctgaaggtgctgctccacgctagtgtgcacaagatagtgtttggctcgcgacaaggacgactgaaggcaagagccatcggagtcgaattcactgatgaggatgggagacaccaccaggcattcttgaacagcaacagagacagtgaagtaattgtatctgctggtgcgattggcaccccccagctgctgctgctca

SEQ ID NO: 32557 - DNA, 261 bp, Zea mays
ggacctggccgattcaaaccgcccgttccccgtgtgggtgccaagcaagccgagcccaacccacaagagccagctgctcggtgctccacgcgatggcgcagaaggagactaatggcagcaacggcgatcacatctccacccgcccgccgccgaccccctcgcccctccgcttctccaagttctttcaggctaacctgcggatcctggtcactggtggggcgggcttcatcggctcgcacctcgtagacaagctcatggaga

SEQ ID NO: 32558 - DNA, 156 bp, Zea mays
cggacgcgtggcgagacgcgtggggtcgtcgagctcttcctccgctacgactccttcgacgtccaggacggcgcctccgagctggggtcgtcggtcaccatcacctcgctcaagaaagccaccttctgagctctgatcgaccgtccgtcaaagttg

SEQ ID NO: 32559 - DNA, 310 bp, Zea mays
cccacgcgtccacacacgcgtccgcggacgcgtgggggctggcaaggtgctgtacagaaccattcctcctacattgtcaagaagattgtgacattggaagatccaacagatgcttaccccaattttaacttcattggccgtctgcttgggccaaggggacactcgctaaagagagttgaagctactacaggttgccgtgttttcatcagagggaagggctccgtaaaagatcctgtgaaagaggaacagctcaagggaaggcctggctatgaacacttgggcgatccaacacatatcttgatcgaggctg

SEQ ID NO: 32560 - DNA, 277 bp, Zea mays
agggaggaaagcgagaggggggccaaacgacgcgagagcgctcgtcttccagataaccaccgcggtggcctcgtaccgccgcctcctcaactcgctcggcacgcccaaggacaccatcacgcttcgtgataacctgcataagactagtcagaacatccttcaattagcaaaggatgcgaaagataagctccaaaaggctgctgaagcagacaagagcactgatacaagtgcagacaagaggatagctgatatgaagcttgccacagattttgctgcc

SEQ ID NO: 32561 - DNA, 209 bp, Zea mays
ctctacgacggccaggaggcgcgccgtcggcatggaggccgccatcacccgctccgattccatcatcaccgcctaccgcgaccactgtacctacctcgcccgcggaggggacctcgtctccgccttctccgagctgatgggccgcgaggctgggtgctcccgcgggaagggcggatccatgcatttctacaagaaggacgccaatttct

SEQ ID NO: 32562 - DNA, 247 bp, Zea mays
cccacgcgtccgcccacgcgtccgctacctcagtgtccacatccggacaaacggtgactggacacaggagctcaagcgcatatttgtggagaactacttctcgccgcatctcaacagaagagcttcgtttagcgagctaggtgcggcagaaccaagaagcttgccaaaattactcgtagatggtccctatggtgcccctgcgcaggattttagaaactacgacgttctacttctcgtcggcctcgga

SEQ ID NO: 32563 - DNA, 248 bp, Zea mays
cggacgctggtcgagacgcgtgggcggacgcgtgggccccggagcctctccttcccggtctcctccgccacgttgccttcgtaccctccatctcaggctgcgtcgccggcgagcccgacaccgcgaatcggatccgccgacaaggtgagagggaagagatggggctcacgttcaccaagctgttcagccggctgttcgccaagaaggagatgcggatcctgatggtgggactcgacgccgccggaaag

SEQ ID NO: 32564 - DNA, 212 bp, Zea mays
cagacgcgtggcgcgtgcgaaccaagcagaccccagcagaagaagcgaagtcgtcgccggagcaggaggcagagcgagcagcaagatgtcgtggcaggcgtacgtcgatgaccacctgctgtgcgacatcgaaggccagcacctcagcgccgccgccatcgtcggccacgacgcagcgtctgggcacagtccgagaacttccccgagttaaa

SEQ ID NO: 32565 - DNA, 306 bp, Zea mays
agtcacatgaccaggacacgaccgatttacacaaatgcatagcttttatagctgagaattattctgccactaacaaatctaaccagctcagcatcttggtccttggagcacttgggggaaggtttgatcacgagatgggaaacatcaatgtgcttcatctcttcccaagcatcaatatcgtcctcctatcagatgattgtctgatctttctgctctcgaaaatgcatacccacgagattcacgttgaaaagtcgatcgagggaccccactgtggattgatcccgattggcatgccgtcgactagca

SEQ ID NO: 32566 - DNA, 307 bp, Zea mays
cttcatcggctcgcacctcgtggacaggctcatggagaacgagaagcacgaggtcattgttgctgataactttttcaccggttcaaaagataacctgaagaagtggatcggacacccaagatttgagctcatccgccatgatgtcactgagccacttcttgtggaggttgaccagatctatcaccttgcttgccctgcttcaccaatcttctacaagcacaatcctgttaagaccatcaagacaaatgttattggtaccctgaacatgctgggacttgcaaagagagttggagctaggattttgttg

SEQ ID NO: 32567 - DNA, 243 bp, Zea mays
aaagaaaaacagaaagcatttgacattggccagaaatacgtacgacatgccgtggcctttgaaggtatttctcctgatgtgcctctctataaagtcaatgaagggaatgaaccttgcttcttcaggacatacttctcctgggatagcgcacgatccgtgattcatggaaactcttttgagaagatactttcagttcttttcggaatgcgttcagagggtggcaataagggctcatgtgatggt

SEQ ID NO: 32568 - DNA, 150 bp, Zea mays
agaagattcctctttaccagcacatcgcaaatcttgctgggaacaaaactctggtgctccctgtacctgcctttaatgtgattaatggagggtcacatgctggaaacaagcttgccatgcaggagttcatgatcctcccaactggtgcct

SEQ ID NO: 32569 - DNA, 294 bp, Zea mays
cttcaggaacatccttgagatcgacaaagagaggatggttgccaaggtcgagccccttgtcaacatgggtcagataaccagagctacctgcccaatgaaccttgcccttgcagtcgtcgccgagctcgacgacctcactgttggtgggctgatcaacggttacggcatcgaggggagctctcacctctatggccttttctccgacacggttgtcgcgatggaggttgttctcgcagatggccgggtcgtcagagccaccaaggacaacgagtactctgaccttttctatggcat

SEQ ID NO: 32570 - DNA, 238 bp, Zea mays
cagacgcgtggcaatattcctaagcttattcgagcctgtgatgaacagcagcactggaaagaacttaccaacctgtacatacagtatgatgaatttgacaatgcagccaccactattatgaaccactctcctgatgcatgggatcatatgcagttcaaggatgtttgcgttaaagttgcaaacgttgagctatattacaaggcagttcacttctatttgcaagagcatcctgatctca

SEQ ID NO: 32571 - DNA, 296 bp, Zea mays
caaaagcaaagcgaccgagagtgtgctttttgggctagcttcagttccatcatgcacatcgatatgctaaaagccgtgtcgattgtttcttttccggatcttgatttggcgctgttgcgtgttgggcgcagtggggtggggctctttccagctgggctactctggcaatgcggatctggagcctgggcggtgccgccggacggacggcaagaaatggcggtgctccagggacgcggtcgccgaccagaagtactgcgagcgacacatgaaccggggacgccatcgttcaagaaagc

SEQ ID NO: 32572 - DNA, 195 bp, Zea mays
cagacgcgtggcgcgctcgccacctcggcgctcctcgtctcgggcgcgacgcggagggcacgcccaagacgctgacctacgacgagatccagagcaagacgtacctggaggtgaagggcacgggcacggcgaaccagtgcccgaccatcgacggcggcgtggactcgttcccgttcaagcccggcaagtaccaga

SEQ ID NO: 32573 - DNA, 272 bp, Zea mays
ggcacacgctgcagccgcccgccgcagccgccgagtccgcacgggaggccaagtctgtgggtttcctggagaagtacccggccctggtcaccggcttcttcttcttcatgtggtacttcctcaacgtcatattcaacatcctcaacaagaagatctacaactacttcccatacccatactttgtgtccttgatccatctagtagtgggtgtcgtatactgcctcatcagctggagtgtcggtctccccaagcgagcgcctatcaatggcacg

SEQ ID NO: 32574 - DNA, 277 bp, Zea mays
aaacacgcgtccgcggacgcgtgggctcgcatatcactgtgcaagacagggatcacaaattcttgacaaaaacagtggaagaagcataccgaggagtcgattgcggtgacggaggtccatttggagtagttgtcgtccgcaatgatgaagtggtagttagctgccataacatggttctgaagcacactgaccctactgcgcatgctgaagtaactgcaatttgagaggttgcaaaaagttcgggaaaatcaagctctctgactgcgaaatttacgtg

SEQ ID NO: 32575 - DNA, 276 bp, Zea mays
gagggagcgccctgcccaagcaaagagaaaccgcggcgcgagaagagggaggaagggcagacgggcgagcaggatgagagagatcatcagcatccacatcggccaggccgggatccaggtcggcaacgcctgctgggagctctactgcctcgagcacggcatcgagcccgatggcaccatgcccagtgataccacggttggcgtcgcacatgatgccttcaacacgttcttcagcgagaccggttctggcaagcatgtgccgagggccatcttcgt

SEQ ID NO: 32576 - DNA, 275 bp, Zea mays
cttccggagcggtgtcgggtgggagttgctcccggtgccgctggacgaggacgagttcgaggtgctgccggggcacgtcgtggaagtgggcggcgcccgccggcggcgcgcgcagtggtggagcggctccaggtggtggccgtcagaggcgaggaggttgtgcaggagtgcgctgtttgcaaggaagggatggaacatggggagctcaccactgggctgccgtgtgggcatttctaccacgggtcgtgcattggtccatggcttgccatccggaa

SEQ ID NO: 32577 - DNA, 185 bp, Zea mays
cccacgcgtccgcggacgcgtggctcgccgcgcggtggcgggaggtccacggcagcaacaactgggagggtctgctggaccccatcgacggcgtgctcctccaggagctcatccgctacggcgagttcgcccaggccacctacgacagcttcgactacgaccgcttctccccctactgcggcagt

SEQ ID NO: 32578 - DNA, 274 bp, Zea mays
gccaataaggtaaggggtgacgaaaatggctccaacgaccgccaccaaggacgacagtggctacggcgacgagcgccggcgcgagctgcaggcgttcgacgacacgaagctgggggtgaaaggtctggtggactccggcgtcaagtccatcccgtccatcttccaccacccgccggaagccctgagcgacataatttctccggcgcctctgccgtcgtcgccaccctccggcgccgccatcccggtggtggacctctcggtgacgcggcgcgag

SEQ ID NO: 32579 - DNA, 270 bp, Zea mays
gcttaaaatttgtggctctgcctgagaatttgaaagctgtcatgcaaaccgatgggtttgattatttgcagcaaagctgcccatccctcctgaccgagcttcttgaatatgtggccaagataggagagcactccgtgagcccctgcctgtattcaactgaagtccttgatggtggagatgccaatggacgacgcgtgaaaccaaggatctaacggctgcccagatgagcctagaagagggagttccttgtttttttttttgttgttgtaa

SEQ ID NO: 32580 - DNA, 271 bp, Zea mays
gtggacctgactaccctttatggaaagattgagagtgcagaatattcattcccagcctggttttcaggtggtgcaaaatcactgattcgtagaattcttgacccaaatccagagacacgaatcaggatagaagagatcagaagcgatgaatggtttcagaaaaattatgaacctatcaaagaaatagaaaatgaggaagtcaatctcgatgatgtcaatgcagcttttgatgatcctgaggacgataatgaggatgctttcgaagatgaaa

SEQ ID NO: 32581 - DNA, 272 bp, Zea mays
ccaccgtcactcaacacagcacaggcagctcgagagagagagagagagaaagatgtcgtggttcgggcaccaccaccacaaccagccggctcccccggcgtcgggccccaaccaggtgttcaagatcttctgccgcgccaacgagaactactgcctggccgtccgcgacggcgccgtcgtgctggccccggtcaaccccaaggacgaccaccagcactggtacaaggacatgcgcttcagcacccgggtcaaggacgaggaaggcatgccgg

SEQ ID NO: 32582 - DNA, 263 bp, Zea mays
ggacgcgtggtgcagctgctgctgcccctgctgcagacgagaagaaggaagagcccaaggaggagtctactgacgacatgggcttcagcctgttcgactgagaccctcgctacccagccattagcaaattcgcttatgctgtccaagacttatcttacgttatgtctgtaggcttttgttattacaagtactcaagttttgagtttttgagatgtggctatgacaatgtgatgaagaaccctaaaccatcgtattagagtgaa

SEQ ID NO: 32583 - DNA, 263 bp, Zea mays
cggaccgtggcgaacgcgccgccgtcaccgtcgtcgctcgcgctctccgcccggatcggagcgagagtacgggcgtgtcggaggtgaaagcgactgcgtcaccatggcggacgaggagcattcggagaggagagaggaggcctccgagcttgcccccttcgacccgcccaagaagaagaaaaagaagaaggttgtcatccaagacaccttctgatgaagtggacaagcttgcagagaagacagaaacactggcagtcgcagaa

SEQ ID NO: 32584 - DNA, 263 bp, Zea mays
  unsure (1)..(263): unsure at all n locations
cggacggtggngcagacgcgtggggtcgtcgagctcttcctccgctacgactccttcgacgtccaggtcgaccgcctccgcgcacgggtcgtcggtcaccatcacctcgctcaagaaagccaccttctgagctctgatcgaccgtccgtcaaagttgctagaggcgggcacgtgcaccaccgaatccctctcagaactttttttcctagtgctatgcctatgctactgtgcgatcgtcaggtataacaaaatgtatattctta

SEQ ID NO: 32585 - DNA, 264 bp, Zea mays
cggacgctgggcggacgcgtgggctttggaggtggagtcctcggacaccatcgacaatgtgaaggccaagatccaggacaaggagggcatccccccggaccagcagcggctcatcttcgccggcaagcagctcgaggacggtcgcaccctcgccgactacaacatccagaaggagtccacactccacctggtgctccgcctccgcggcggcgccaagaagcgtaagaagaagacgtacaccaagcccaagaagatcaagcacaa

SEQ ID NO: 32586 - DNA, 265 bp, Zea mays
cccacgcgtccggacgcgccagggtttcaggcttccacgaatctccccgccgccctcaattcccctcggcgccgccgccctcaattcccctcggcgccgccgcctcctcccctcgcttcggtcctcggttagttaaccatccaggttctgtcaagatgtctgatagccatgagactgacaggaacattgagatttggaaaattaagaaactgatcaaggcattggaatcagccagaggcaatggcacaagcatgatctctctaat

SEQ ID NO: 32587 - DNA, 255 bp, Zea mays
cttatcatccccatccgcacctctctccatctccctgctcctccgccttcttcttgatccagccaagccagggatcgccatgtcggactcggaggagcaccacttcgaatcgaaggccgacgccggagcgtccaagacctacccgcagcaggctggcaccgtccgtaagaacggcttcatcgtcatcaagaaccgcccctgcaaggttgtggaggtttctacctcaaagactggtaagcatggtcatgccaaatg

SEQ ID NO: 32588 - DNA, 158 bp, Zea mays
attaaaaagacaccaatagtcgtcgggaactgtactggctttgcagttaataggatgttctttccatacactcaatcagcactcttttatgttgatcttggtatggatgtttataagattgatcgtgcttgtaccaaatttggaatgcctatgggtcc

SEQ ID NO: 32589 - DNA, 230 bp, Zea mays
cggacgcgtggcgagacgcgtgggcggacgcgtgggcggacgcgtgggcaaagatatgttaggaaagacgttctcctcaagtccaaaattggctgttgcagctaaacatggttacttcttgaggtggtctagcgaagaagagtggcaaacatgcactcaggccatggactttggatggatgcaaatggcaaagccagtgatgaatttgtatacagaagcaactgatggat

SEQ ID NO: 32590 - DNA, 230 bp, Zea mays
cggacgcgtggggaggccgacctgtccttcttcgtcgagtccgggacgtccatgtcgacgccgcaccagagcggcgtcgcggctcctcaagagcctgcacccggactggtcgccggcgcgatcaagtcggcgatgatgacgacgtccgacgcggtggaccgcacggggctgcccatcaaggacgagcagtaccggcacgccaccttctacgccctgggcgcgggctacgt

SEQ ID NO: 32591 - DNA, 234 bp, Zea mays
gcagttccccgaccacaccgttcctccgagcccaggagcagccccgcgccaggaggaagtttgttcttttaacaatatgtcgagggaggagaatgtttacatggccaagttggctgagcaggctgaaaggtatgaggagatggttgagtatatggagaaggtggctaagactgtagatgtggaagagctcactgttgaggagcgtaaccttctgtctgttgcatacaagaatgt

SEQ ID NO: 32592 - DNA, 147 bp, Zea mays
cggacgcgtggcaaggacgacgccgccgagtgcctgctttatgtcaagctcatagaggagctggacagatgcatcctcggatattttgcgttccactgggaccatgccacctacctcatcacctcggccttgaccgcggacaccggc

SEQ ID NO: 32593 - DNA, 151 bp, Zea mays
ggcaaaaggtctaatgaagtaccaaccagatgtaattatcagtgtacaccctttaatgcaacatgtccccctccgaattctaagatcgaaaggtctcttggataagatcccattcgcaactgttatcacggatctcagcacttgtcaccca

SEQ ID NO: 32594 - DNA, 240 bp, Zea mays
  unsure (1)..(240): unsure at all n locations
anacgcgtccgcggacggtggcangaggtgggctggcttctcctccccctcttatcaagtcctcctcgggttagggttcattagggttttatggaggggcgatggcggcggctgatgtggagtaccgttgcttcgtcggcggacttgcctgggccaccagcaacgagtcgctggagaatgccttcgcctcctacggcgagatactcgactccaaggtcatcaccgaccgggagacgggga

SEQ ID NO: 32595 - DNA, 245 bp, Zea mays
cccacgcgtccgagagaggcggctctagggcggcagtggacgagcgctacgcgcagtggaagtcgctcatccccgttctctacgactggtttgccaaccacaacctcgtttggccatccctctcctgccggtgggggccacagtttgagaaagctacctacaagaatcgtcaacgcctttacctatctgaacagaccgatgggagtgtgcctaatactctggttatcgcaaactgtgaagttgtg

SEQ ID NO: 32596 - DNA, 203 bp, Zea mays
cccacgcgtccgcccacgcgtccgggcagagggagagattggagggaggcccctgcccaaggcaagagaaaccgcggcgcgcggagatggaggaagggcagacgcagacgcagacgggcgaacaagatgagggagatcatcagcatccacatcggccaggccgggatccaggtcggcaacgcctgctgggagctctactgcct

SEQ ID NO: 32597 - DNA, 189 bp, Zea mays
aaagatctgtggctctgaagaaagggctgcccattcttggtgttttcaggagctttgcggctgttggagtggatccagctgttatgggcgttggtcctgccgtggccattcctgctgctgtgaagtctgcaggccttgagattggagacattgatttgtttgaactgaatgaggccttcgcctctcagt

SEQ ID NO: 32598 - DNA, 183 bp, Zea mays
agaacttatatatgtgaaaattcctgttggtaaaggatgtggttttgtacagtatgcatctagggcatcagctgaagaggcagtacaacgtcttcatggcacaatgattggccaacaagctgttcggctttcatggggccgaagtcctgcgagtaaacaggattcatcagctgtgtggagtca

SEQ ID NO: 32599 - DNA, 189 bp, Zea mays
aacctgacgctgcgggcttcggcttcatcgaccgcatcaaggcgctgctcgagaaggagtgccccggcgtggtgtcctgcgccgacatcgtcgcgctcgccgcccgcgactccgtcggcgtcatcggcggtccgttctggagcgtgccgacggggaggcgcgacggcaccgtgtccatcaagcaggagg

SEQ ID NO: 32600 - DNA, 146 bp, Zea mays
gcggctcaccggctgcctcagctgctgcagcggcggcggctgcgttcccggcgacttctctctacgtgggtgacctgcacgagagcgttcaggacgcacagctcttcgacgtcttcagccacgtcggcggcgtcgtctccgtgcgc

SEQ ID NO: 32601 - DNA, 247 bp, Zea mays
cccacgcgtccgcacagccacaccaagccatatgtgcgctccaagggaaggaagttcgagaaggctcgtggcaggaggaacagccgtgggttcaaggtttaagaaagttgtgggccatcagcatagtaatcacttcctaccgagtagtagcacattttgttgccttggcttggattttgaaagatatttaaggattttcgtgccttgtctactggttactggttgagcaagaagacaatgttctttt

SEQ ID NO: 32602 - DNA, 300 bp, Zea mays
cgctctggagggcgttacttttcagcagctagtacggatgccaagcgctctgtacgcgtcgacgtcggatgtttttgaggccagcgcgtatcttgctctggaggatttccttcacgcaggcgttaaaggactgtggcaaactttctggggtcctgatgaagcgatgccgttctcggttgcctgtgtacacagcacgagctccagattttatcctgctgagaaggctataagcagtggaaggctcgatggtgtttgcgcgactgctgtgctgctgaagaatttgaagccttcacaaggaag

SEQ ID NO: 32603 - DNA, 208 bp, Zea mays
ccacgtcctatcagccgccgatccagccttgcttccatccatccatccatccatctcgtcgcttctctctgttccgcgtgcgatcgagtagatcaaaaggaggaggaggatggcgaggagttcgttcaagttggagcaccccttcgaaaggaggcaagctgaggctaaccgcatcagggagaaataccctgacagaatccctgtcatt

SEQ ID NO: 32604 - DNA, 182 bp, Zea mays
gatcaaatcatcgaccggagtatccaggatgcatacgtaaacgccatacggagggcgaagaacttcatctacattgagaatcagtacttccttggaagttcatacggctggaagcccgatagcatcaagccggaagaaatcggtgctcttcacttgattccgaagagctctcgctgaagatt

SEQ ID NO: 32605 - DNA, 176 bp, Zea mays
cccacgcgtccgtgcacttcttcatggtcggctttgctccgctgacctctcgtgggtcgcagcagtaccgtgccctcacggtccctgagctgacccagcagatgtgggatgccaagaacatgatgtgcgcggccgacccccgccacggccgctacctgacggcctcggccatgttc

SEQ ID NO: 32606 - DNA, 173 bp, Zea mays
cccacgcgtccggtaccactggtattgtcctggattctggagacggtgtcagtcacactgtcccaatctatgaaggctatgccctcccgcatgccattcttcgtctcgatcttgctggtagggaccttactgattccctcatgaagatcctgactgagaggggttactctttc

SEQ ID NO: 32607 - DNA, 272 bp, Zea mays
ggacaactccagttgtccttggtggatatcaggcaatgatgactgtcatcttcttttgggctgcatacaagacaaactttttcccaaaaatatttcatgtggaaagccttgagaagacagctcaagatgatttccaaaagcttgcatctgctgtttacctgcaagttagcaccatcagccaggccctcatcttcgtgacaaggtcccggagctggtcatttgtcgagcgcccagggtttctattggtctttgctttcttggttgcgcactga

SEQ ID NO: 32608 - DNA, 272 bp, Zea mays
cccacgcgtccgcccacgcgtccgcccacgcgtccgccaacaccagccgccgtcatgtcgaagcgaggtaggggaggttcggctgggaacaagttccgcatgtcactgggtctaccggtggcggccacggtgaactgcgcggacaacacgggcgccaagaacctctacatcatctccgtcaagggcatcaagggccgcctcaaccgcctcccgtccgcctgtgtcggcgacatggtcatggccaccgtaaagaagggaaagcccgacctcag

SEQ ID NO: 32609 - DNA, 271 bp, Zea mays
caagctcggccacgactggtgcggaggggcatcaacctcgtctatggcggcggcagcatcggtctgatgggcgtgattgctcggacggttcgtcacggcggctgccatgtcctcggggtgattcctaaagcgctcatgcctattgagatatcaggtgaaagcgtgggagaggtgagggtcgtggacgacatgcaccagaggaaagccgagatggctcgtcagtcccaagccttcatcgctctcccaggggggtacgggacgatggaggagc

SEQ ID NO: 32610 - DNA, 276 bp, Zea mays
ctgcttctgaattcttcggtgagaaagacaagacttatgatcttaatttcaaggaggagaacaacgatggctcaaacaaaatttcaggcgacagctgaaagacctgtacaagtcctttgtttctgagtaccctatcgagtcgatcgaagacccatttgatcaggatgactggagcacttatgccaaactcactgatgagattggacagaaagtgcagattgtaggagatgatcttctcgttaccaaccccaccagggtcgccaaggccatcaatga

SEQ ID NO: 32611 - DNA, 278 bp, Zea mays
ccactcccaagccagtacccacagtcctacgagcagtcgcacgcaagtgtcaagagacaaaacggtcgacatggctcgcacgcaatctgccgtagcggtcgccgtggtggccgcggtgctgctgctggcagcggcggcgacgacctcggaggccgccatcacctgcgggcaggtgagctccgccatcgcgccctgcctctcctacgcccgcagcacggggtccggcccctccgcgtcctgctgtagcggcgtcaggaacctcaagagcgccgccagca

SEQ ID NO: 32612 - DNA, 273 bp, Zea mays
tgtcatcaagcctgtcatccctgagcagtaccttgacgagaagaccatcttccaccttaacccatctggccgctttgtcattggtggacctcacggcgatgctggcctcactggccgcaagatcatcattgacacctacggtggctggggagcccatggtggtggcgctttctccggcaaggacccaaccaaggttgaccgcagcggagcctatgtcgcaaggcaggctgccaagagcatcgtcgccagcgagcttgctcgccgcgccatcgt

SEQ ID NO: 32613 - DNA, 269 bp, Zea mays
ggacgcgtggtgctcctgcaacatcttctccacgcaggaccacgccgccgccgccatcgcgcgcgacacggccgccgtgttcgcctggaagggggagaccctcgaggagtactggtggtgcaccgagcgctgcctcgactggggcgaggcgggcggccccgacctcatcgtcgacgacggcggcgacgccacgctgctcatccacgagggtgtcaaggccgaggaggattacgagaagaccggcaagatccccgacccggagtccaccg

SEQ ID NO: 32614 - DNA, 269 bp, Zea mays
cactcccgctgggccatgctgggcgcgctcggctgcgtcttccccgagctgctcgcccgcaacggcgtcaagttcggcgaggccgtgtggttcaaggccggctcccagatcttcagcgagggcgggctggactacctcgggaacccgagcctcatccacgcgcagagcatccttgctatctgggcctgccaggtcgtgctcatgggcgccgtcgagggctaccgcatcgccggcggcccgctcggcgaggtcgtcgacccgctctaccc

SEQ ID NO: 32615 - DNA, 266 bp, Zea mays
gaccacgcgtccgggacgctgggccgctggatctgatacgcctcagcctcgacgagcgcatctacgtcaagctccgatccgcccgcgagcagcgcggcaagctccatgcgtatgatcaacatttaaacatgatacttggagatgttgaagaggtcgtgacaactgttgagatagatgatgaaacatatgaagaaattgtgcgcaccacgaaacgcactatcccctttctttttgtccgaggtgatggtgtcatattggtttctcca

SEQ ID NO: 32616 - DNA, 270 bp, Zea mays
ttcgtctccgccttccggcttcctctagaattcgattccctttcccaagaaaccaagaacccagcccctcaccatgacgagctcctcctctccttccagaaaggcgctgagcaagatcgcttgcaatcggctgcagaaagagctcgccgagtggcagcaaaacccccccgccgggttcaagcacaaggtctccgataacctccaaaggtgggtaattgaggtcaccggagcggcgggcaccctttacgccggcgaggcttaccagttgca

SEQ ID NO: 32617 - DNA, 269 bp, Zea mays
gcaaagggaagatttacaaggtccctgccactgatatggaggctctgaagtcccctttgatgggtctattcgagaagcgcagagcaaggaacttcttcatttatgtccaagattacaatgaagctgatccaaggacacatcaaggattagaccttactagggtgacaactagagaacttatagcaaaatatggtttaagtgatgatacagtggatttcattggacatgcacttgctcttcatagagatgatcgctatcttgatgaaccg

SEQ ID NO: 32618 - DNA, 271 bp, Zea mays
cccacgcgtccgagctgcctccagcgcgaacgtccagcgagtggtggtggtgtcgtccatggttgccgtcgagatcagccccaaagattggcctgaaggtaaggtccgagatgagaggtgctggtcagaccgagagttctgcaggagcattgagagctggtacccggtggctaagatcatctcagaggaggcggcgctggcgtacgggcagcaaaccgggctcgacgtggtgactatcaatccagggttggtgttcggccccatgctgcag

SEQ ID NO: 32619 - DNA, 270 bp, Zea mays
cggacgctggttttttttaaccatgtatgccttacattcgatgttccataaaaaaattaagtcttaaaagcatcacggtttcaacgaaagtaataatacttcatgaccaggcaaacattgccatcatagattacttgttcacgcgacaactgcaaggatgtcaacaagacgagatattttaagcttccacgaggtaaccaacaagcaagcacagcaccagacagatagatcatttcttcttggcagcagccttcgtcaccttggctccag

SEQ ID NO: 32620 - DNA, 269 bp, Zea mays
cggacgcgtgggcgggctcatgttgcagtagattctagtgctgcaagagataggataatgtctattattgactccagtagtttcgagccttcagaactactggctgatatggagaaccagatacttaaagcaaatgaggagtccttaagcagaaaggacatattggagagggttgataggtggatgtcagcatgtgaagaagaaagctggcttgaagactacagccgggacgataacaggtacagtgcaactcggggtgcacatctgaa

SEQ ID NO: 32621 - DNA, 268 bp, Zea mays
cccacgcgtccgcccacgcgtccgcacgcatgcaagcagccatggctgatgacgctgtgcgcgtgcgtctgcgctcgtggttttgatttgcaggcgacggaggggatggacgtgaaggaggagtgccagcgctggttcatggagatgaagtggaagaaggtgcaccgcttcgtggtgtacaggatcgacgagcggtcgcgcgccgtgctggtggacagggtgggcggccccggggaggggtacgaggagctcgtggccgcgctgcccg

SEQ ID NO: 32622 - DNA, 263 bp, Zea mays
cccacgcgtccggcagaccacagcaagaagcgtagtcgtcgccggaaggaaaggcgcggacaagatgtcgacgcaggcgtacgtcgatgagcacctgatgtgcgagatcgaaggacaacatctcagcgccgccgccatcgtcggtcacgaggcagcgcttgggcgcagtccgagagcttccccgagttaaagcctgaggaggttgctggtatcataaaggactttgatgaacctggtactcttgcaccaactggtcttttcgt

SEQ ID NO: 32623 - DNA, 261 bp, Zea mays
gttggcttctcctccccctccggttcgggttcgggttcgtgaggttctccggggttcggtttcgtgggtgggcggatcgagatggcggcgtcggatgttgagtaccgctgcttcgtcggcggcctcgcctgggccacggacgaccactccctccacaacgccttcagcacctacggcgatgtcctcgagtccaagatcatcctcgatcgggagacgcagaggtcccgcggcttcggcttcgtcaccttctccacggaggag

SEQ ID NO: 32624 - DNA, 266 bp, Zea mays
tgctatgggattatggtcaaaggttaaaggatctggaaccagtttcaaaaaccctaatgccattggacaggccattgccaagaacttgccttcttctgatattattgaatccacatctgttgctggacctggttttgtgaatattgtcttatcaaaccgctgggttgcacagagaatacaagacatgctcgttaacggtatcaagacttgggcaccaattcttccagtaaagaggacagtgattgatttttcatcacctaatattg

SEQ ID NO: 32625 - DNA, 264 bp, Zea mays
gtcactgccatcaaggaggaaatcaacaaggtcgttaagctccaagaagagcttgacattgatgtgcttgtgcatggcgagcctgagagaaacgatatggttgagtacttcggtgagcagctctccggttttgcgttcactgccaatggctgggtgcagtcttatgggtcaaggtgcgtcaagcctccgatcatctacggtgacgtgagccgccccaaccccatgaccgttttctggtcgaaacggcgcagagcatgacgtctc

SEQ ID NO: 32626 - DNA, 197 bp, Zea mays
gccatgactacgcgctgctgcctggtcgtcgccactctcctcgcggcgctgctctcggtcagtgccagcctcgagttcggtttctacaacaagacgtgccccagcgccgagaccatcgtgcagcagaccgtggccgccgcgttcaccaacaactccggcgtcgctccggcgctcctccgcatgcacttccatgactg

SEQ ID NO: 32627 - DNA, 128 bp, Zea mays
cccacgcgtccgcggacgcgtggcttcgccgacctcaccaacgacgagtaccgcgccacctacctcagcgtcaggatcatggccgcagatggagaggaggctcggtgacaggtacctggccggcgaca

SEQ ID NO: 32628 - DNA, 199 bp, Zea mays
aagagattgaacggctgaaaagggacaagaatgttcttatgcaagagcttgtaaggctgagacagcaacagcaaacaactgaccatcagctccagactttgggcaagcgtcttcaagggatggagtcacggcagcaacagatgatgtctttcctggccaaagcaatgcaaagtcctggtttcctagcacagtttgtaca

SEQ ID NO: 32629 - DNA, 199 bp, Zea mays
gttttgccctctactgaaaagggtataacgactatttcgggtaaaccaaaaagcgagtccaaggacaaagagaagaagcataaaaagcacaaagacagagagagggacaaagacaaggaacataagaagcacaaacatcggcataaggatcggagtaaggacaaagataaagacaaagacaaggataagaaaaaagata

SEQ ID NO: 32630 - DNA, 123 bp, Zea mays
tgctgagctcgttaccaagattgataggcgatccggcaaggagctggagaaggagcccaaatttctcaagaacggtgatgctggtatggtgaagatggttcccactaagcccatggtggtgga

SEQ ID NO: 32631 - DNA, 249 bp, Zea mays
actacacacaggttgccgtgctcgcggatgacatattgaaaaatgtggaatatgatgctctgagggttattttcaacaagttccaatctgtcatatcgtttaagcccacaatggtaacaatactttcccccgaggttgcagaaaaagaatcagaagctggtgggaagatgggtgacctagattcttatgagattgaaggcggcgagacaaaatcagagattttgcagaatctagctgagttccagtttt

SEQ ID NO: 32632 - DNA, 217 bp, Zea mays
agacggtggccgagctggtcaaggcctgcaccaccatcatctggatcgcgtcggcgctccacgcggccgtcaacttcgggcagtacccgtacgccgggtacctcccgaaccgcccgtccgtcagccggaagccgatgccggcgccgggcagcgacgagtacgcggagctggagcgcaagccggagaaggtgttcgtgcgcaccatcaccagccagtt

SEQ ID NO: 32633 - DNA, 192 bp, Zea mays
atctgaaggttgtctttatcccaaattacaatgtatcagtggctgaagtgcttattcctggtagcgaattgtcacagcatattagtactgctggtatggaagcaagtggaacaagcaacatgaaattctctctgaatggttgtgttatcattggcacccttgatggagctaatgttgaaataagagaagagg

SEQ ID NO: 32634 - DNA, 276 bp, Zea mays
cggacctggctgacgcgtgggcggagctctccttcccggtctcctccgcccgttgccttcgtccactccatctccggacgcgtcgccggcgagcccgacaccgcgaatcggatccgccgacaaggtgagagggaagagatggggctcacgttcaccaagctgttcagccggctgttcgccaagaaggagatgcggatcctgatggtgggactcgacgccgccggaaagaccaccatcctctacaagctgaagctcggcgagatcgtcaccaccatc

SEQ ID NO: 32635 - DNA, 277 bp, Zea mays
cacacaggaagttgagatcagaaaaatgcaggctgccgctactgccgccgggttctcggccgtgctgcccgccaagggaggccggcggcgaggagcagggtggtggcccgtgtccccgccacaaggaggagcgtccgtgtagctgccgtcgtcgcgaccgaggccgcgcagatcgactacagctcaagcgtctcggtgttcccgatggaggcctgcgacctgcttggtggcgacgcgtgcaacgggcccatgttcccggaggccaagcccgcctcgg

SEQ ID NO: 32636 - DNA, 277 bp, Zea mays
ggccaccgtctccatcgtgacgtcgtgctgcgtcttcggcctgccatggctggcgccgtgtcggccgtgccccacgacgggtccactttcgtcgccggacgggacctgccacgcgctgaaccgtttccggcggttccactgcccaaagggccactacaacgatctcgccagcctgttcctcaacatcaacgacgacgcgatccgcaacctctactccaccggcaccaacgacgtgtaccacccggtttccatggtcatcttcttcgtggcgtcctac

SEQ ID NO: 32637 - DNA, 277 bp, Zea mays
caactcgccgtcgtcttctgcggttctgccgtctacgcctccaatttggcctctctcccttgcaagtttaagcttcatcttcagccatgggtaaggagaagtcccacatcaacattgtggtcattggccacgtcgactctggcaagtcgaccaccaccggccacctgatctacaagcttggaggcattgacaagcgtgtaatagagaggtttgagaaggaggctgctgagatgaacaagcggtccttcaagtatgcttgggtgctcgacaagctcaa

SEQ ID NO: 32638 - DNA, 272 bp, Zea mays
ctggcctcaagcctggcctccatgggttccatgtacatgcacttggtgacaccaccaatggatgcatgtcaactggaccacactacaatcctgcgagcaaggagcatggggcaccagaagatgagaaccgccatgctggtgatcttggaaacgtgacagctggagcagatggtgttgctaatatcaatgtcactgacagccagatcccactgactgggccaaactcaatcattggcagagctgttgttgttcacgctgatcctgatgatctt

SEQ ID NO: 32639 - DNA, 270 bp, Zea mays
cccacgcgtccgcccacgcgtccgcgcgaggtcctgcttcctgctgcgatggggggcgagacgcacctgagcgtgcaggagctggcggcgtcgctgggcgcgctaccgccggagttcgtgcggtctgagcaggaccagccgggcgcgaccacgtaccgcggggccgccgtgccggacgcgccggtgatcgacatgtcggagcccgggttcggcgcgcgcatggccgcagccgccagggagtgggggctgttccaggtggtgatacacggc

SEQ ID NO: 32640 - DNA, 269 bp, Zea mays
ggaggagctcaggcaatctcagcaatggcatggggaactgcatcgtgcccaaaggctgagaagatttttggacctggtaaccagtatgtaacagctgccaaaatgattcttcagaacagtgaagctatggtatctatagacatgcctgctggcccttctgaagttttagtcattgctgataaatacgcgaacccagttcatgttgctgctgatctgctatcccaggcagaacatggtccagatagtcaggttgttctagttgttgctgg

SEQ ID NO: 32641 - DNA, 271 bp, Zea mays
gcaggatgtcgcaccgtaagttcgagcacccgaggcacggctccctcggcttccttcccaggaagcgctcctcccgccaccgcggcaaggtgaagtcatttcccagggatgaccccaagaagccttgccatctcactgccttccttggctacaaggctggcatgactcacattgtccgtgaggttgagaagccaggatccaaactccataagaaggaaacttgtgaggctgttaccatcattgaaacccctcctcttgtcattgttgggct

SEQ ID NO: 32642 - DNA, 271 bp, Zea mays
caaaggattaaatataccattgagaccttcaccaagggcatccctgatgcacggacttacttgaatactcttcaacagctcagaataaagagtggtcttatagatcatcttggaattgagcctttgatgatggaagctcttgagaagattgagaaggacattaagaaaccacttttgaggagcgacaagaagaacatggccaccctcttggcagagtttgacaagattaacaaaaagcttggctttcggaaggaggatcttccaaagatcg

SEQ ID NO: 32643 - DNA, 255 bp, Zea mays
cccttgcatttctaagaatggatcacattcaaatttaaaggattccatgaagattatcatacctggaaaaaacaatggtatcaataatgagctacacagtagcatcagctcagcaattattcatactcgtagaattcttgccatcctcgaagcccttttctccttgaagccatcatcagttggtacctcataacaaatgcatattcgtgatacagagaatggggagttccgttccaaggccaaactcgtactgag

SEQ ID NO: 32644 - DNA, 67 bp, Zea mays
ggttcgtgaggttctccggggttcggtttcgtgggtgagcggatcgagatggcggcgtcggatgttg

SEQ ID NO: 32645 - DNA, 270 bp, Zea mays
cggacgcgtggggcaaccggtccagcactttcacgctcagctccagcaatggctgcctccaccatggcgatatcctccacggcgatggccggcacccccatcaaggtgggctccttcggcgagggccgcatcaccatgcgcaagaccgtgggcaagcccaaggtggcggcgtccggcagcccctggtacggccccgaccgcgtcaagtacctcggccccttctccggcgagcccccgagctacctcaccggcgagttccccggcgactac

SEQ ID NO: 32646 - DNA, 268 bp, Zea mays
aaaactccaggaagagtgggtggaaaatgcagaccgctgggtggctggtttcttagagaagtttgacgaagggtgccactcaatggggacggccatcaaggagaggatccaggagaggctcatcaaggcacaatccagcgactttggcagcctcctacagtacgacagctacgattctgatgaagccaaagaaaacgacgaggacgaagacgaactctttgaagacgtcaaggaatagcacatccgtacatatacaatggttttgtag

SEQ ID NO: 32647 - DNA, 269 bp, Zea mays
cgcacgcgtccgcatttccccatctcccagatccaattcgcgagttctccctcctctgcggccatggcgctctctgtggagaagacctcgtctggacgggagtacaaggtcaaggatctctcgcaggcggacttcggccgcctcgagattgagctggccgaggtcgaaatgcccggcctcatggcgtgccgcgccgagttcggcccgtccaagcccttcgccggcgctaggatctcggggtctctccacatgaccatccagaccgccgt

SEQ ID NO: 32648 - DNA, 268 bp, Zea mays
cggacgctgggcgcattgcattgcattccttcagttcagtagtgtgctctgacagtgagatggcgagcgtgcaggttttcgggtcacccacctcggcggaggtcgcccgcgtgctcatgtgcctcttcgagaaggaggtggagttccagctgatccgcgtcgacgcctaccgcggcaccaagcgcatgccccagtacctcaagctgcagccgcaaggcgaggcgctcaccttcgaggacgagagcctcaccctctccgactccagggg

SEQ ID NO: 32649 - DNA, 204 bp, Zea mays
ctcaagcagctgggcctccagtacaccgtcgtcagcgtggggaagaagggcaacgcctacttccagcgccgcccctacatcccgttggagcgcgatctggaggtgagcagcgtgcccaccgtcaaggactcgcaggccatctgcgacctcgtctactcgctcttcgtctccgaggaggtggacaaggtggagctgctctactcc

SEQ ID NO: 32650 - DNA, 266 bp, Zea mays
ctagctcccgcaactgccgccgccactcccacgcccgcagccatgccgcccaagctcgacccgtcgcaggtggtggaggtgttcgtccgtgtgaccggcggcgaggtcggcgcacgtcttcgctggcccccaagatcggcccgctcggtctttcccccaagaagatcggagaggacatcgccaaggagacggccaaggactggaagggcctccgcgtcaccgtcaagctcaccgtccagaaccggcaggccaaggtctccgtcgtc

SEQ ID NO: 32651 - DNA, 264 bp, Zea mays
cccacgcgtccgcggacgcgtgggtttagtgttggtcgcgttgtgctatgcaagaacatgggctttgttgtctgtgtagcaaacattcggggtggtggagagtacggggaggagtggcacaaagctggagcacttgcaatgaaacaaaattgttttgatgactttgctgcctgtgctgaattcctcatttctaatggttacaccagttccagacgtttatgtattgaaggcggaagcaatggtggtcttctggttgctgcttcc

SEQ ID NO: 32652 - DNA, 263 bp, Zea mays
tccgcttgcttgattgttccagatattcgcagttgaccgggtcctcggagcacgatgaagtttgttgctgcctacttgcttgctgtcctcgctgggaacgccagcccctccgctgaggatttgactgccattctggagtcagttggctgtgaagttgacaatgaaaggatggaactcctgctgtcccaactgagcggtaaggacatcaccgagctcattgccgcgggcagggagaagtttgcttcagtcccatgtggtggcgg

SEQ ID NO: 32653 - DNA, 202 bp, Zea mays
ctccacccaactcgccgccgccgctgccaacgccgcctgctgccgcagccgccatgggggcgtacaagtatgtgtcggaactatggaggaggaagcagtcggacgtgatgcgcttcgtgcagcgcgtgcgctgtgggagtacaggcagcagccgtccatcgtccgcctcaccaggcccacccgccccgacaaggcccgtcgt

SEQ ID NO: 32654 - DNA, 262 bp, Zea mays
agttgggcgcagagaatccccaagcaaacaaacagggtagaggtagagggagaggagaggagaggagaggagaggagaggttgggtctgggacaccatggctccgatgaagctgtacggggcggtgatgtcgtggaacgtgacgaggtgcgcaacggcgctggaggaggctggctccgactacgagatcgtgcccatcaacttcgccaccgccgagcacaagagccccgagcacctcgtccgcaacccgtttggtcaggttc

SEQ ID NO: 32655 - DNA, 239 bp, Zea mays
ctgtactcaggcaagcagtgagcatcctcttgccaaagctattttggactatgcattgcatttccatttctttggcaagcttccttcatcaaaagatggcattgagcaacgaaaagacaaggtattatcccagtggctgcttgaagctgaagacttctctgcagtacctggcaaaggagttcagtgctcgatcaatgggaagcatgttttggtcggaaaccgttctttgatgactgaaa

SEQ ID NO: 32656 - DNA, 251 bp, Zea mays
caaacgaggaggtccagaaggctgcagctgctttgaggggatctgaccaccgccgttctaccactgtttctgctagattggatgctcagcagaaaaagctcaaccttcctgtccttcccacaaccacaattggttcattccctcagactgtggaactcaggagggttcgccgtgaatacaaggcaaagaagatcaccgaggacgaatacatcagtgacatcaaggaagaaatcagcaaggttgtcaagatc

SEQ ID NO: 32657 - DNA, 129 bp, Zea mays
cgaccttcaagtctcgctacgtagcagtgcaatagaaaaagcatccgcaatggcgagcagcaccatggccctctcctccacggccttcgccggcaaggccgtgaacgtgccgtcgtcgtccgccttcgg

SEQ ID NO: 32658 - DNA, 165 bp, Zea mays
ggcgccgtgtgcctcgcgcccaccaacccgcgcgacgagtaccagcactggatcaaggacatgcgccacagcaacagcgtcaaggacgaggaagggtacccggccttcgcgctcgtcaacagggtcaccggcgaggccatcaagcactcccagggcgagggccac

SEQ ID NO: 32659 - DNA, 164 bp, Zea mays
tgattttgaaacatggattgagtgatgacactgtggattttattggccatgcactcgctctgcacagggatgatcgttacctaaatgaacctgcccttgatactgtaaaaaggatgaagctttacgctgagtctcttgcacgttttcaaggaggctcgccttat

SEQ ID NO: 32660 - DNA, 241 bp, Zea mays
gacgccgccgaggaggagccgctgccgccgtggctgacggaggaggacgtgggccacttcgcgtcggagttcgagcggacgggcttcacggggcccatcaactactaccgcaacatggaccgcaactgggagctggcggcggcgtgggcggacgccaaggtgcgggtgcccaccaggttcatcgtcggcgacggcgacctcagctaccactacccgggcatccaggactacatccacaagg

SEQ ID NO: 32661 - DNA, 232 bp, Zea mays
gccaaggatccatagagatgtgtttgttgctcccagtgcagcagtcattggggatgttgagattggtcatggatcgtcaatctggtacggatccatattgagaggtgatgtcaacagcattcatattggatctgggtctaatatacaagacaattcccttgtacatgtttcaaaagctagcattagcgggaaggtcctcccaaccataattggaagcaacgtgacagtgggt

SEQ ID NO: 32662 - DNA, 158 bp, Zea mays
cccacgcgtccgcggacgcgtggaccacgaccaccccgcgtcgccgccgcgcagcagcagcagatcagagcagatagccgatctcgacaccttcctcttcacctcggagtccgtgaacgagggacaccctgacaagctctgcgaccaggtctcagatg

SEQ ID NO: 32663 - DNA, 158 bp, Zea mays
cagtcacctgcgccgccgcttcgttcgtgtggaggggagaagagaggaaatggcggcgaccgagggcgtgctcctggggctgggcaaccccctcctcgacatctccgccgtcgtcgatgacgccttcctgacaaagtatgacatcaagctgaacaatg

SEQ ID NO: 32664 - DNA, 240 bp, Zea mays
cccacgcgtccgtgcctagacttcaaccagagaatattgtcaagaatgctaagatattcgagcatgtgaatgcaatggcagctaaaaaaggatgcacaccatcacagctagcattggcatgggttcaccatcagggaaacgatgtttgccccatacctggaacaacaaaaatcgagaacttcaaccagaacgtgggggcgctttctgtgaagttgacaccagatgagatggccgacctcg

SEQ ID NO: 32665 - DNA, 237 bp, Zea mays
gtcgtctgctccaagaagaagatcaagaccgacaagccctacgggattgggggtggcctgaccgtcgacgtcgacgccaacgggagaaagggcaagggcaagggcgtgtaccagttcgtcgacaagtacggcgcgaacgtcgacggatacagcccaatctacaacgaggatgactggtctcccaccggcgacgtctacgtcggtggaaccactgggcttctgatctgggccgtcacc

SEQ ID NO: 32666 - DNA, 238 bp, Zea mays
ggcggggaacaagttccgcatgtcgctgggtctgccagtggccgcgacggtgaactgcgcggacaacaccggcgccaagaacctctacatcatctccgtcaagggcatcaagggccgcctcaatcgcctcccgtccgcctgcgttggcgacatggtcatggccaccgtcaagaaggggaagcccgacctcaggaagaaggtgatgcccgccgtcatcgtccgccagcgcaaccgtggc

SEQ ID NO: 32667 - DNA, 292 bp, Zea mays
tctcaataccacaagtcatgccaagaatttgcagagttctataagaacgctcttctctatctggcctacacaactgtggagtctctatctgagtcattcaagctagacttggcttttgatctttctctagcagccttgctgggtgataacatttataattttggagagttattagctcacccgattatcaatagtcttattggaaccaaggtggagtgggtttatcatatgttacaagcattcaacacgggcaaccttgctttctaccaagaactttgcagggttcacaatg

SEQ ID NO: 32668 - DNA, 170 bp, Zea mays
ggacgcgtggatcgaccacccaacgcccccctccgccccgcgcttcgcctgggtaccggcgtccgccacaccccgtcccgtccaggaacaggaagagcagtaacccatccatcggggatcaccaggggagcaagatgtcgactgccgccgccccaagattgcccgctccc

SEQ ID NO: 32669 - DNA, 287 bp, Zea mays
cccacgcgtccgggtacctggccggcgacaacgaggacctgccggagtccgtcgactggcgggccaagggcgccgtcgcggagatcaaggaccagggcagctgcgggagttgctgggctttctcaacaatagcggctgtggaaggcatcaaccagattgttactggcgacatgatctccttgtctgagcaggagcttgttgactgtgacacttcatacaaccaggggtgcaatggaggtctgatggactatgcgtttgagttcatcatcaacaatggcggaatcgac

SEQ ID NO: 32670 - DNA, 239 bp, Zea mays
cttccagatcaacaccgcggttgccacgttccagcgcctcgtcaacacgctcggcacgcccaaggatacccccgacctccgcgacaggatacataaaacacggcaacacataacacaactagtgaaggatacatcagacaagcttaaacaagctagcgaggcggatcatcgcgttgaagtcagcgctaccaaaaagattgctgatgcaaagctagctaaagatttccaagcagtcctaa

SEQ ID NO: 32671 - DNA, 273 bp, Zea mays
cgcccgtttctctctcgtcgcgcaacatcagagcacaagcgaggaacccagtccagtcccgggaatggagtgcgtattgggcgtggttggccgcgacttcgtgctggtggcggccgacacctccgccgtgcagagtattctcgtccacaagaccgacgaggacaaggtgatggtgctcgactcgcaaaagctgatgggcgcttcaggggagcctggtgatcgggtgcaatttacggagttcatacagaagaacctccaactgtaccagttccg

SEQ ID NO: 32672 - DNA, 268 bp, Zea mays
aaaaccgcatcctctcatcagcttccttccacattcgtctcgagatctcgccccgtcgccatggacgcgatcgacagcgtggtggatcccctccgcgacttcgccaaggacagcgtccgcctcgtcaagcgctgccacaagcccgaccgcaaggagttcaccaaggtggcggcgcggacggcgatcgggttcgtcgtcatgggcttcgtcggcttcttcgttaagctcatcttcatccccatcaacaacatcatcgtcggttccggct

SEQ ID NO: 32673 - DNA, 258 bp, Zea mays
cggacgcgtgggccgtcatcgatctcgtttcaaatccatccatcctcgtttcctccgtcccgcagcatctacaccccatggccaagatcaagatcgggatcaatgggttcggcaggatcggaaggctggtggccagggtggccctgcagagtgacgatgtcgagctcgtcgccgtgaacgaccccttcatcagcaccgactacatgacctacatgttcaagtacgacactgtgcacggacagtggaagcaccatgaag

SEQ ID NO: 32674 - DNA, 278 bp, Zea mays
ggaccgtggtgacgggcgagttcccgggcgactacggctgggacaccgcggggctgtcggcggaccaggagacgttcgccaagaaccgggagctggaggtgatccactcccgctgggccatgctgggcgcgctcggctgcgtcttccccgagctgctcgcccgcaacggcgtcaagttcggcgaggccgtgtggttcaaagccggctcccagatcttcagcgagggcgggctggactacctcgggaacccgagcctcatccacgcgcagagcatcctt

SEQ ID NO: 32675 - DNA, 288 bp, Zea mays
atctgctgtagtaatcatcaggaaaggaaagggttgaactatgagcgccgtggcggtttcgtcgtcgctgaacccggacgcgccgctcttcatcccggcggcgctgctgcaggtggaggacttctcgccgcagtggtgggacctcatcaccaccactgcctggttccgcgaccactggtcccgcgagcgcgcccacctggacgagatggccgagcagatcgacgcggccggcctcctccccgacgacgaggacctcttctacgacgaccagctcgagcagggccccgt

SEQ ID NO: 32676 - DNA, 276 bp, Zea mays
cccacgcgtccgagaccttcgccaagaaccgcgagctggaggtgatccactgccgctgggccatgctcggcgcgctcgggtgcgtgttcccggagctgctcgcccgcaacggcgtcaagttcggcgaggcggtgtggttcaaggcgggctcccagatcttcagcgagggcgggctcgactacctcggcaacccgagcctggtccacgcgcagagcatcctggccatctgggcgtgccaggtggtgctcatgggcgccgtcgtagggtaccgcgtcg

SEQ ID NO: 32677 - DNA, 274 bp, Zea mays
cagagaataggaggtagacgtgtcctgctactgtcatttgtattgtggtcaatgatatgtggtttaattccacttgatcccaacagagtaaccattctggtcctttctcgcctattcgttggtgtagcacaaggtttcatatttcctgccattcacactgtcctggcacaatgggtgccgccgcaggagcgctctcgctcagtatctcttactacctcagggatgtatcttggtgcagcctgtggcatgcttttcttcccaagtctggtgaagc

SEQ ID NO: 32678 - DNA, 276 bp, Zea mays
gcatactgcatacacaacacagagcatcagaaggagctgcgatctgatcgacatggctgccgccaccatggctatcacctcccgcgcgctcatcggcaagccggcggctggcacgagggacgtcttcggcgagggccgcatcaccatgcgcaagaccgccgccaagcccaagccggcggcgtccggcagcccctggtacggtgccgaccgcgtcctgtacctgggcccgctgtccggctcgcccccgagctacctgaccggcgagttccccggcga

SEQ ID NO: 32679 - DNA, 277 bp, Zea mays
ctcccgcgccgttggtggatgcggccccagatgcgcccgccgacgccccggcggcgcctgctgccgacgcgaaccggccaaggccaagaaggccaccgcgccgaagaagcgcgccagcccgacccacccgccgtacgccgagatggtctcggaggcgatcacgtcgctcaaggagaggacggggtccagcagctatgcgattgccaagttcgtggaggacaagcacaaggacaagctcccgcccaacttccgcaagcttctgaacgttcagctcaag

SEQ ID NO: 32680 - DNA, 275 bp, Zea mays
gccttctgcgcctccatttcggcctctgtcccttgcaagttcaatctcacctccaaccatgggtaaagagaagtcccacatcaacattgtggttattggccacgttgactctggcaagtcgaccaccacaggacacctgatctacaagcttggaggcattgacaagcgtgtgatcgagaggtttgagaaggaggctgctgaaatgaacaagcggtccttcaagtacgcatgggtgctcgacaagctcaaggctgagcgtgagagaggtatcacca

SEQ ID NO: 32681 - DNA, 217 bp, Zea mays
gctgtaccccggcggcagcatcgacccgctcgggctcgccgacgacccggaggcgttcgcggagctcaaggtcaaggagatcaagaacggccgcctcgccatgttctccatgttcggcttcttcgtgcaggccatcgtcaccggcaagggtcccgttgagaacctcgccgaccacctcgctgaccctgtcaacaacaacgcctgggcctacgctacc

SEQ ID NO: 32682 - DNA, 270 bp, Zea mays
atggtccccatccgtgtccacaccgtcctcatctccacccagcacgacgagacagtgaccaatgatgagatcgctgctgacctgaaggagcatgtcatcaagcctgtcatccctgagcagtaccttgacgagaagaccatcttccaccttaacccatctggccgctttgtcattggtggacctcacggcgatgctggcctcactggccgcaagatcatcattgacacctacggtggctggggagcccatggtggtggcgctttctccgga

SEQ ID NO: 32683 - DNA, 275 bp, Zea mays
cccacgcgtccgcccacgcgtccgcacgataccacccctagttgagtctgacaaagaagcagatgaacgccattatcaactttggcggatagaaaatggagtcgcagaaggttcgactgagatcccaaaaggcgaacaatcccgctggagtacaatcttgctggcttgaacgccatttcgttcgagaagggctgctacatcgggcaggagcttatcgctcggacgcaccatcgcggtgtcatccggaagcgcctaatgccaatgaagttcgtcga

SEQ ID NO: 32684 - DNA, 265 bp, Zea mays
  unsure (1)..(265): unsure at all n locations
cggacgcgtggngaacagaagagcggcggcgcgggcggacaaggagcaggcggaggaggagttgtgccaagccacaatgggtatctcgcgtgactcgatgcacaagcgccgagccaccggtggaaagcagaaggcctggaggaagaagcgaaagtatgagcttggtcgccagccagccaacaccaagttgtcaagcaataagacggtgaggagggtccgtgttcggggaggtaatgtgaaatggagggctcttcgccttgatact

SEQ ID NO: 32685 - DNA, 263 bp, Zea mays
cccacgcgtccgcggacgcgtgggtggatggtcagtgggtgcattgctcggatatgctcagggtgcgaaccacaagcgtgtgatatccttcattggtgatgggagcttccaggttacagcacaggatgtgtcaactatgctgcgatgtgagcagaacagcataatcttcctgatcaacaacggtgggtacacgattgaggtggaaatccatgacgggccatacaacgtcatcaagaactggaactacactggctttgtggacg

SEQ ID NO: 32686 - DNA, 264 bp, Zea mays
gtagctgtagactgtagttctgttcctccccactcactcctgcgcttcctcgccgcgcggttccttctccctgatcctcctttggcttcgcggttcatggcgatgtggagggccgccgctaggcagctggtcgaccgggcgctcggctcaagggccgcgcacacgtctacaggcagcaaaaagatagtcggggtgttctacaaggccggggagtatgccgacaagaaccccaacttcgtcggctgcgtcgagggtgcactcggc

SEQ ID NO: 32687 - DNA, 67 bp, Zea mays
cggacggtgggatcgctgctgacctgaaggagcatgtcatcaagcctgtcatccctgagcagtacct

SEQ ID NO: 32688 - DNA, 328 bp, Zea mays
cccacgcgtccgcccacgcgtccgcccgaagtatctgtattccttgatcaacatgtcgcgggaggagaatgtttatatggccaagctggctgagcaagcagaacggtacgaggaaatggttgaatacatggagaaggtggctaagaccacagatgtgcaagagctcactgttgaggagcgtaaccttctatctgttgccttcaagaatgtgattgcggccccccgtgcctcatggcgcattatctcctccatcgagcagaaagaggagtcccgtaagaatgaggaacatgttgcacagatcaaggaataccgtggcaagattgaggct

SEQ ID NO: 32689 - DNA, 325 bp, Zea mays
cccacgcgtccgggaggctaaggcgctcggtgttgataccgtgccagtacttgttggaccagtctcgtacctgttgctctcaaagcccgccaagggtgtggagaagggattccctcttctttcccttcttagcagcatcctcccagtctacaaggaggtcattgctgagttgaaggcagctggggcttcatggattcagtttgatgagcccactcttgtcctcgaccttgattctgacaaattggctgcattctctgctgcatacgcagaacttgaatctgtactttctggattgaatgtgcttgttgagacttactttgctgat

SEQ ID NO: 32690 - DNA, 310 bp, Zea mays
atcctggggctgtcggaggccttcaacctcatcagccagatcgagttctactacaaggagatcccggagcacatgcgcacgtggccggggcgctcgccttctgcaacctggcgctcggcaactacctcagcggcttcctggttaccatcgtgcaccggacgacggggtccgggcagaactggctggcgcaggacctcaacaagggccgcctcgacctattctactggaccatcgccggaatcggcgtctttaacttcatctacttcgtcatctgcgccaggtggtacaggttcaagggggccagcaactg

SEQ ID NO: 32691 - DNA, 326 bp, Zea mays
gcatcccgtcccaagaggagaaactccggccggcgacgcgggggaaaatggggaagacgccggtgcggatgaaggcggtggtgtacgcgctgtcgcccttccagcagaaggtgatgccggggctgtggaaggacatcaccaccaagatccaccacaaggtcaccgagaactggatctccgccacgctcctcctcacccccgtcgtcggcacctaccaatacgccatgtggtacaaagagcaggagaagctttcccacagatactaaatgggatgtcctccaagttgctgcggcttgtcgcagttgaattttccatgatgggttgta

SEQ ID NO: 32692 - DNA, 302 bp, Zea mays
acaagcgccgggacgcgtggttttatttttttttttttttttgaagaaaaaattgtaccatgtataagtattgacagtaataataattttgggagcaacaaaagaaattttagagcaaatgtacagagctcaagctcaatcgctggtagtactagtagtaagcaagaatgaacgaagaaataaatctagctgatgctcctctccatcatctcgttgtactgtagccacgagatctggcgctgcagcttcatctgcgcgtagaacctggcaatgaactcggccgccttgacgtccaccccggc

SEQ ID NO: 32693 - DNA, 322 bp, Zea mays
ggaccgtggtccaaatccaatgacgagaataacaatcccagaaatattagaggatgagtggttcaaacagggctacaagcgcccagaatttgatgaacaatatgacaccacattggatgatgtggatgccgtcttcaatgattcagaagagcaccatgtgacagaaaagaaagaagaagaaccagtagctctgaacgcattcgaactgatttcgatgtcagcgggcctaaaccttggaaacttatttgactcagagcaggagttcaaaagagaaacaaggtttacatcaaaatgtccccccaaagaaattgtccgcaagatc

SEQ ID NO: 32694 - DNA, 326 bp, Zea mays
ctctccgcttcccgctccgatcgacctgctccctccccaccaccgagcccatggcggaccagctcaccgacgaccagatcgccgagttcaaggaggccttcagcctcttcgacaaggacggggatggttgcatcacgaccaaggagctgggcactgtcatgcgctcgctggggcaaaatcctacagaggctgagctccaggacatgatcaacgaggtcgatgctgatggcaacggcaccatcgatttcccagagtttctcaaccttatggctcgcaagatgaaggacaccgactctgaggaagagctcaaggaggccttccgtgtg

SEQ ID NO: 32695 - DNA, 323 bp, Zea mays
ggcgtcaagagaaggtcagggaggcctgcgccaagaacggcgtcgtcgtcaccgccttctcgccgctgggcgcgatcggcacggcgtggggatccaacgccgtcatggaaagcggcgcgctggaggacatcgccgccaggagaggcaagaccattgctcaggtagcgttgaggtggcttcacgagcaaggggtgtgctttgtggcgaggagctttaacaaggagaggttgaagcaaaacatggagcttttcgattgggagttgagcgtcgatgacaaggagaagatcatggggattccacagaggagagcatgccgtgcagag

SEQ ID NO: 32696 - DNA, 326 bp, Zea mays
gatgaagaactttttgagaaaatgtctttgctacagcaatttgtaaggcctgaaaacttggatataaaaccagagtaccagaatgaaacatcctggctgctcgcacagaaggagctgcagaaaataaacatgtataaagctccaagggataagcttgcctgcattctgaactgctgtaaagttataaataacttacttctaaatgcttcaattgtgtccaatgaaaccccccctggagctgacgaatttcttccagtccttatctacgtcaccataaaggctaatcctccgcagctccactcaaatctgttgtacatacaaagata

SEQ ID NO: 32697 - DNA, 257 bp, Zea mays
cccacgcgtccgcccacgcgtccgcccacgcgtccggttgcctgccgcagaagcttgccataccaaggaaaaacgacagcgatcttgatcagtatggctgtctcaagacctataacagagctgcagttgcgttcaacgccgcgctgggcagcctctgcgacgagctgagtgcgcagatgaaagacgcgacgcttgtgtacacggacctgttccccatcaagtatgatcttgtcgccaaccacactaaatatggcttt

SEQ ID NO: 32698 - DNA, 246 bp, Zea mays
gaacctggcgcgccggtgcacggcccctcgccttgttcctcctgctcctggtgggggcacgggcagcgccgaggagacggcgccgcaggaacccacattgccagccaccggctccggcgctaccggcgcggcggcggtcggggtcaactccaactccgtgcttgtggcgctgctggattcgcactacacggagctggcggaactggtggagaaggcgctgctcctgcagacgctggacgacgccgt

SEQ ID NO: 32699 - DNA, 316 bp, Zea mays
cgacgactccgtgattccctagtcctacccagatcggcgcccgacgcaaggccgagcaggcgatggccgcagcggcgtcaatggggcacccttacgcgccaccgagctggaccttccgggtttcgtgccgctgaagctgtcccaggtcgagatcctcgtgtcctacctcggcgcctccgtcttcgttttcctcgccgtctggctcgtctccggaagatgtgttagattatccaagaccgaccgtctgctcatgtgctggtgggcattcacagggttgacccacataatgatcgaggggcccttcgtcttcactcct

SEQ ID NO: 32700 - DNA, 316 bp, Zea mays
cagtcatccacactaacgaacgaactgaggtcgacgacgactgatcgagcagcgacgatggcggctgtgctgaacagcaggaagacgccgcagtggttgccgtgctggtggcggcggcgctgctggcgtcgtccgcttcggcggcgatcacctgcgggcaggtggggtcgtcgctggctccgtgcatcccgtacgcgacggggagggccagcgcgctccccgcgtcgtgctgcagcggcgtcaagagcctcaacagcgcgtgcgcgaccagcgcggaccgccaggcggcgtgccgctgcctcaagagcctcgccaa

SEQ ID NO: 32701 - DNA, 316 bp, Zea mays
gaagaaaccaaagagaagaaaaatgctgtggaagcttatgtctatgacatgcgtaacaagctctacgacaggtacaacgattttgtgacacctgatgagaaggaagggttgattggaaagcttcaggaggttgaagattggctatatgaagatggtgaggatgagacaaagggagtctatatttctaaactggaagaccttaagaagattggtgacccaattgaggcacggtacaaggagtcgacagaacagggttcctctgtagatcaactggtctactgcatcaacagtttcagagaggctgctttgtccagtg

SEQ ID NO: 32702 - DNA, 317 bp, Zea mays
agccaaaccaataactaccacagggctgatggtcagaacactggcaacttccttacggaccgtccttcaaccaaggtccacgctgctcctggcggtggctcttccctgggctacctgttcggtggcaactgatgcccgtgctggtgcgctcaccaaagttatcctcccctgcctgctgcgtgctatgtctaaatcgtgaacaaccgttgtcatttcatgtgtgtaccccgtgcaatgctttgtgcgcatggttgatttctctgtggcaaacttcccgtcctgcatggggttgtaagctgtctctaaatttcacggca

SEQ ID NO: 32703 - DNA, 318 bp, Zea mays
agttggagccgttgcaacaataatggctggtgaccagattttccccagaattggcatggttgctcctccatggtactactcgcttcgtgccaatagattcggaaccatggcaacaatctggctatttggcaactttgctcaatcctttctacaaagctctggtgcctttgaagtttactgcaatggagatttggtattctcaaaacttgctgagcagaggttccctagcgagttcgagttgcgggaccttgttggcagcagattgcctgggtctccatttgggaggaatccggggaaaaccctgacttgatgatgacc

SEQ ID NO: 32704 - DNA, 319 bp, Zea mays
caacggtccgcgaccgtggcaagtacggcgaccacaccagcaccatcagagaggcggacctcgagaacaagctcgagggcctgaccgtgcagcaggcgctgcacggcaaccggctctacatcctggaccaccacgacaacttcatgccgttcctggtcagggtgaacagcctggagggcaacttcatctacgccaccaggaccgtgctgttcctgcgcggcgacggcacgctggtgccggtggccatcgagctgagcctgcccgagctccgggacggcctgatcaccgccaagagctccgtgtacacgcccaagtcgac

SEQ ID NO: 32705 - DNA, 306 bp, Zea mays
cggaccgtggttcggcggccatcaccaaccagtacacctgcctcgacggcttcgcgtaccagatcggcgggcgcgtgcggcgctacatcgagccgaccttccaccacgtgtcccgcatggtgagcaactcgctggccatggccaagaagctgcccggcgccggcgcctcagcggcgccagcgccgccgcggcagccgttcacggggtacgggcagatggtgaaggggttcccccggtgggtgcgtcccggggaccggcgcctgctgctggccccggcgtcggccgttgccgccgacgcggtggtgg

SEQ ID NO: 32706 - DNA, 310 bp, Zea mays
cctgatgccactaagagttgtcaaagaccaaagggtttgtagtccaggccccctcgaaaccagaccgctctttgtggcaccttcccaaggtgtggccaccagagagggcaacaatgtcctgatcgctcaagcccatctgcttgccaaaaacttgcctcaggtggtcagaacccttagtggcatcaggaaggcggccctcaagtgggggctgaggcttgtcctccctaccggggtggaagggaatctcaggcccaccggtgacctcacaggccacaactcccgcgagctggtagaaatcggcgtaagagag

SEQ ID NO: 32707 - DNA, 310 bp, Zea mays
gcacttgttccagctagctaggagagagagctttgtttaggcggcggcaagatgaacaggaagccaggagactgggactgcagggcgtgccagcacctcaacttcagccgtcgggatgcatgccagcgctgcagtgaaccacgtggagttggtgatcgtagcggcggtggtggcgacttgggtgggcgtggtggttcctccttcggcggtggctttggtgctggctctgatgtccgccctggtgactggtactgctcctgcggcgcacacaacttcgccagccgctccaactgcttcaggtgctctgcct

SEQ ID NO: 32708 - DNA, 306 bp, Zea mays
cggacgcgtgggcaacaagctgccccgcagcaacgaacacgaaccttggcagaacgaagctgaagtagttcgatgtgaacccagtatggcaaacgcgccgaggatcctggccctcggcctgctgctagcgctcctgtgcgctgccgccggcccggccgccgcgcagaactgcggctgccagcctaacttctgctgcagcaagttcggctactgcggcacgaccgacgactactgcggcgacgggtgccagtcgggcccgtaccgctccggcggcagcggcggcggcggccgatgcggaggcagtgg

SEQ ID NO: 32709 - DNA, 311 bp, Zea mays
caagagttggaaactgccaagaacagctcttcagttgaaaagagctatgagctacctgatggacaagtaatcaccattggtgcagagagattcaggtgccctgaggtcctcttccagccgtcgatgattggtatggaggctgctggaatccatgagacaacatacaattcaatcatgaagtgtgacgtggatatcaggaaggacctctatggtaacattgtgctcagtggtggttcgactatgttcccgggtatcgctgatcgtatgagcaaggagatcacttcccttgcaccaagcagcatgaagatcaa

SEQ ID NO: 32710 - DNA, 312 bp, Zea mays
cggacgcgtgggaattgaggaaacaaaatccccgggttatgcagctaatccaggaaaaccaagcagagtttatgcggttgattagtgagccactagagggagacgaagagaatgaaatgatgctggatcagatggcagatgcaactgagaccattgcagtcactccagaggagaatgaagctatacttcgtcttgaagggatgggctttgaccgggcactcgtcctggaagtgttcttcgcctgcaacaagaacgagcagctggccgccaactacctcttggatcacatgcacgagttcgacaacgatgacg

SEQ ID NO: 32711 - DNA, 121 bp, Zea mays
ctcgcacgcaatctgacgtagcggtcgccgtggtggccgcggtgctgctgctggcagcggcggcgacgacatcggaggccgccatcaccttctggcaggtgagctccgtcatcgcggcctg

SEQ ID NO: 32712 - DNA, 277 bp, Zea mays
gcccttagtggcgatctgggaactttcatggcctgggtggatgatgttagaaagctcaaggtcctggctaacgccgatacccctgatgatgcattgactgcgcgaaacaatggggcacaaggaattggattatgccggacagagcacatgttctttgcttcagacgagaggattaaggctgtcaggcagatgattatggctcccacgcttgagctgaggcagcaggcgctcgaccgtctcttgccgtatcagaggtctgacttcgaaggcattttcc

SEQ ID NO: 32713 - DNA, 275 bp, Zea mays
ctgcgtcttccccgagctgctctcccgcaacggcgtcaagttcggcgaggccgtctggttcaaggccggctcccagatcttcagcgagggcgggctggactaccttggcaaccccagcctgatccacgcgcagagcatcctcgccatctgggcctgccaggtcgtgctcatgggcgccgtcgagggctaccgtattgccggcgggccgctcggcgaggtcgtcgacccgctgtaccctggcggcacttcgaccccctcggcctggccgacgaccc

SEQ ID NO: 32714 - DNA, 277 bp, Zea mays
ccgtccccaaatcgaccgagcgaattcaccacagcttctcaccaccgctaccttcgatggcacccaaggcggacaagaagccggcggcgaagaagcctgcagaggaggagcccgcgacagagaaggcggagaaggctccggcggggaagaagcccaaggccgagaagcgcctcccggcgggcaagtccgccggtaaggagggcggcgagggcaagaaggggaaaaagaaagcgaagaagtccgtggagacctacaagatctacatcttcaaggtgct

SEQ ID NO: 32715 - DNA, 272 bp, Zea mays
cggacgcgtggcggacgcgtgggcaagggggtgatgagggatgagagcaaggttgcagtgaagcgtggtaacccaaagtactcagcaaggtctcaacgagttccgtacagagattgagctcctctcacgtctgcgccaccgccatttggtgtctctgattgggtactgtgatgaaaggaacgaaatgatcctggtctacgagtacatggagaaaggcactctcaagagccatctctatggctccgataacccctcgctcaattggaagcaga

SEQ ID NO: 32716 - DNA, 278 bp, Zea mays
gtgcactggtgtcgctcgcaaccaaattaaggactgaggcatggcatccaagggcgtcctcttcttggctctcaacctcctgttcttcacagtggccaacgcctgcagcagctgcccgaccccaacgcccccggtcgagccaccgccgccgcctcctgctaccccacccccttcatcctccagtgggaagtgcccgctgaacgcgctcaagttcggcgtgtgcgtcaatgcgctcggcctcgtcaaaggcgaggctggcaaggtaccagctgagccat

SEQ ID NO: 32717 - DNA, 283 bp, Zea mays
tccaagtcattcttgcatagagatatcaagcctgacaattttctcatgggtctcgggaaaagagcaaaccaggtttatgttatcgattttggacttgcaaagaagtacagagatacatcaacacaccagcacattccatacagagagaacaagaacttgactggaacagcaagatatgcaagtgtaaatacccaccttggaattgaacaaagccggagggatgacatggaatctcttggatatgtactgatgtacttcttgcgaggaagccttccatggcagg

SEQ ID NO: 32718 - DNA, 239 bp, Zea mays
cagcggaatcgtcatttaccagtatcgaagagttccttgagccacttgagctgtgctacaaatcactgtgtgactgcggcgacaaggccatcgcggacgggagcctcctggacctcctgcgccaggtgttcacgttcgggctctccctggtgaagctggacatccggcaggagtcggagcggcacaccgacgtgatcgacgccatcaccacgcacctcggcatcgggtcgtaccgcgag

SEQ ID NO: 32719 - DNA, 125 bp, Zea mays
gggggactcgcgtgggaaacccacaaggagacgatgaggaagtacttcgagcagtttggggagatcctggaggcagttgtcatcactgacaacaacactggcagatccaagggctacggatttgt

SEQ ID NO: 32720 - DNA, 267 bp, Zea mays
ggcaaatgacactcaaggaactgttgaagcggcaaagtggttacacaaagtggtcaaccgccccaatgtctacataaagatcccagctactgcagaatgtgttccttccatccaggaagttatcgctaatggcattagcgtcaacgtcacgcttattttctcaattgcaagatatgaggctgtgattgatgcttacctcgatgggctagaggcttctggcttgagtgacttatcccgagttactagcgttgcatccttctttgtcag

SEQ ID NO: 32721 - DNA, 272 bp, Zea mays
ccccgagacctccagccgtccgcccctgaaccctcagccttctccgtcccgcctcggcactcgacggccgccggcacacaccgcgcagtctcgagacaggaaccggaggaacgaggatggaggatgactcgccgctgacgaagacgatgaagggtgcggtgacaggactcgccgcggggaccatctggggcaccgtcgtcgccacctggtacgacgtgccccgtgtggagcgccacgtcgcgctccctggccttatccggacgctcaagatg

SEQ ID NO: 32722 - DNA, 124 bp, Zea mays
agatcattgaagcaccctaacattattaggtttaaagaggtattttaacaccgacccatcttgctattgtcatggaatatgcctcggcggtgagctttttgagaggaagtagaacgtgcgattc

SEQ ID NO: 32723 - DNA, 271 bp, Zea mays
ccgggaccgtggcgctcgggtgcgtgttcccggagctgctcgcccgcaacggcgtcaagttcggcgaggacgtgtggttcaaggccgggtcccagatcttcagcgagggcgggcttgactacctcggcaacccgagcctgatccacgcgcagagcatcctggccatctgggcgtgccaggtggtgctcatgggcgccgtcgaggggtaccgcatcgccggtggcccgctcggggacgtggtcgacccgctgtaccccggcggcagtttcga

SEQ ID NO: 32724 - DNA, 245 bp, Zea mays
ggccaagcgtcacgtcagctcgtgctccccgtcgccatctccgtgctcgtcaacgagtgcggcaagcacgtgccctccagcttccagtgcccgtaataactatattagggcgcgtacttactgatcgatcatcatctgcatatgtactgctactctactgtatatatatgatgtatcgtcactaaactatatacgtcatatatgtacacgtacggtcaagttatatatacatccatatataacac

SEQ ID NO: 32725 - DNA, 264 bp, Zea mays
  unsure (1)..(264): unsure at all n locations
ggacgcgtggtggtccgtggccatggcgtcgtccatgctctccgctaccaccgtgccactccagcaggacgggcggcctgtccgagttctccgggctcaggagctccgcgtcgctgcccatgcgccggaatgccacctccgacgacttcatgtccgccgtctccttcaggacccacgcggtcggcacgagcggcgggtcgcggcgggcgccgacggaggcgaactgnaaggtggccatcaacgggttcggccgcatcgggcgca

SEQ ID NO: 32726 - DNA, 269 bp, Zea mays
gagaagccaaggatgaggggtcccaaaagggcctccaagatcaggaagctgttcaatcttgcaaaggatgacgacgtgcgcaagtacgtgaacacgtaccgcaggacattcactaccaagaatggcaagaaggtgagcaaggcacctaagatccagcggcttgtgacccccttgaccctccagaggaagcgtgctagaattgctgacaagaagaagaggatcgctaagaagaagtctgaggctgctgagtaccagaagcttcttgccca

SEQ ID NO: 32727 - DNA, 265 bp, Zea mays
cggacgcgtggaccaggtcgagaaggccagcgcgtggctcaagaagtacgagaggaagcttgaggagaagcgtgccaaggcgatggagaaggcgcagaacgaggtggccaaggcgcggcggaaggcggaggagaagcgcgcgtccgcggaggccaagcggggcaccaaggtggcgcgagtgctggagctcgccaacttcatgagggccgtggggagggcgcctacaccaagcgctccttcttctgaacccaccggcctcttcttc

SEQ ID NO: 32728 - DNA, 123 bp, Zea mays
ggccggcaagtaccagatgaagaagctgtgcctggagccgacgtccttcaccgtcaaggcggagggcatcgccaagaacgccccgcccgagttccagaagaccaagctcatgacccgcctcac

SEQ ID NO: 32729 - DNA, 298 bp, Zea mays
atcaaggtccgcgaccggcacttcgttcactggtatgtcggtgagggtatggaagcaactgagatctcagaagcccgtgaggacttggctgctcttgagaaggactatgaggaagtcggtgcagagggtgccgatgatgagggtgacgagggagacgactattgagtagctggctaataagtagttctctggtggttaatggttgggttattttgagtatatactctatggttccactccattggatactgctgctgtgtgtgtttccattttgtactatgtagtaaattgttcgtag

SEQ ID NO: 32730 - DNA, 302 bp, Zea mays
  unsure (1)..(302): unsure at all n locations
ggacgcggcanggacgcgtgggatgcacctagatccatgcgaaggagtacatgataatccactactgtacgagaaagggtggaacaagaagttaaattatgttattgcgatttctaaagatggagtacgggacgtaacaaaacgctacaccagaaagtggcatgaggttctctctaggcgaataattacctccgaagaaactgttgtgtctgttctatcatctataacagggaagtatcgcacaggtttgtcacctgatgctctatcagtcatagaaaaccgtgaaaaggagagtctgagga

SEQ ID NO: 32731 - DNA, 268 bp, Zea mays
ggacgcggcgagacgcgtggtgcggcgcagagaatccccaagcaaacaagcagggtagagagcgaggagaggagaggagaggagaggttgggtctgggacaccatggctccgatgaagctgtacggggcggtgatgtcgtggaacgtgacgaggtgcgcaacggcgctggaggaggctggctccgactacgagatcgtgcccatcaacttcgccaccgccgagcacaagagccccgagcacctcgtccgcaacccgtttggtcaggtt

SEQ ID NO: 32732 - DNA, 304 bp, Zea mays
ggacgtggcgcgacgcgtggtcgtttatgcaactgctatcagaaactgagttccggaaggagctcttatgctgtatgtttcaaagatgattccagcatctgacaagggcaggttctttgcctttggtcgtgtcttctcagggaaggttgctactggtatgaaagttcggatcatgggtcccaactatgtccctggccagaagaaggacctgtatgtcaagagtgttcagcgtactgttatctggatgggaaagaaacaagagtcagttgaggatgttccttgtggtaacactgttgctatggtt

SEQ ID NO: 32733 - DNA, 303 bp, Zea mays
cccacgcgtccgaggaagagagcactggcatgagcatggaccgcatggcgcggcgttccgtgtccttgctcctcgctctggctctcctggccgccgcggcgtcggcggactcgtggctgtacgagaagttcacgacggagggcaacgtgcgcgcggactacaacgcgcaggggcagcaggtgacgtctctgatcctgacgcagcagtccggcggcgccttcagctcgcggcagaagtacctgtacggggagttcagcatccagatgaggctgatcccgggcaactccgcgggcaacgtgacct

SEQ ID NO: 32734 - DNA, 240 bp, Zea mays
aggacgtgggcgagacgcgtgggggccccggctaatgcagcatggattcagtgatagccattgcaaaaactggcttgacaaagtttgttagtgacctattcttggttggactgttctaccatctgtacaaccagattgctacgaacaccttggagcgagtggctcctctgacacatgctgtgggcaatgtgttgaagcgtgtgtttgtcattggcttctcaatcgttgtttttggccaca

SEQ ID NO: 32735 - DNA, 298 bp, Zea mays
gtgaaggacaaatccttgctcaggttaaacaagttgtgaggagtggacagaacagtggaggcttgggaaagaacatcgataggatgttcaaggatgcaatcactgctggaaagcgtgtccgcagcgagaccaacatatcatctggtgctgtttctgtcagttcagcggcggttgaactggccctgatgaagcttccgaagtctgaagcactgtcagctaggatgcttctgattggtgctggtaaaatgggaaagctagtgatcaaacatctggttgccaaaggatgcaagaaggttgt

SEQ ID NO: 32736 - DNA, 299 bp, Zea mays
gcaaagatctgcacgtctccgttactatgccatctattgaggttggcacagttggtggaggcacgcagctggcctcacaatctgcctgcttggacctgcttggcgtcaaaggtgctaacagggaatccccagggtccaacgcgcggctcttggccacggtggttgccggtgcggtcctagccgcggactgtccctcatctctgcgcaggccgctggccatctggtccagagccacatgaaatacaacaggtccagcaaggcccttgcagaggaaacagacaaacccaagaaatgttgaa

SEQ ID NO: 32737 - DNA, 299 bp, Zea mays
cccacgcgtccgagcaactgcaaagcagcaagctctactcttcttctgtactgaacgtgtgactagataacaataagcgtgaaccatggcggacgagtacggccgcagcggctacggcaggtccggcgccggcgacgactacgacagcggctacaacagcaagtccggcactgatgactacggccgtggcgaaggtggctacaacaagtcgggcggcgatgacgactacggccgcagcggcggctgatgggtacggcaggtccggcggcgacgactacggccgtggcaccggcggcggt

SEQ ID NO: 32738 - DNA, 269 bp, Zea mays
ccctaatcggcgatggcgacggtggcgatggacatctcgaagcccactccagtggcgtccggcgacgaggccgcggcggcggcaaggggaggagcggcggagggggcgaggggctgcggcagtactacctgcagcacatccacgacctgcagctccagatccggcagaagacccacaacctcaaccgtctcgaggcccagcgcaatgacctcaactcccgagttagaatgctcagggaagagttgcagttgcttcaagagcctggctca

SEQ ID NO: 32739 - DNA, 301 bp, Zea mays
gaacgccatctccgaagagcaacatcgtttcttttcaccgagtaccaatatgttggtatcttcatggctatcttcgctgttgtgatcttcctcttccttggttcggttgagggattcagcacgaagagccagccctgcacatatagcaaggacaagtactgcaagcctgcgctgttcactgcactctttagcactgtgtccttcttgcttggagccatcacctctctggtctctggtttccttggcatgaagattgccacatatgcgaatgccagaactaccctggaagctaggaagggtg

SEQ ID NO: 32740 - DNA, 214 bp, Zea mays
ggacgtgggacagcagcctgtggcacttactcttgctggccttccgaggagagacgatgctgaggcctgtgccttctacatgaggtctggcacgtgcgggttcggtgcgcgctgcaagttcgaccaccctcctcgccaggacgatgtctaatacggtgtactccctccgtttcgttttagttgtcgctggatagtacaaaattgaactatccag

SEQ ID NO: 32741 - DNA, 244 bp, Zea mays
cccacgcgtccgcccacgcgtccgctcgacgccgaagctcaagttcgtgtgccggcggaacctgttgctgagcatcaacatcgacaagagcagcgagcaggacctgcagctggccgtggacagcgcggccaaggtcctggcggcggagaagctggaggtggtggactacagcagccacgcggaggtgtcgcgcgacccgggccactacgtggtgttctgggagttgaacgcggacgccgcgacg

SEQ ID NO: 32742 - DNA, 215 bp, Zea mays
ggacgtgggctacgggtcaaaccctaagcagggagttgatttatccgctgcagccaagagtaagttgcagtctgagtctgtcaaggatgccatctcccagattgttggggatgccaaggagaagaataggaagttcactgagactgtggaacttcagattggtctgaagaattatgatccacagaaggacaagtgtttcagtggctctgaaaagt

SEQ ID NO: 32743 - DNA, 290 bp, Zea mays
agcaagcaagcagcgagtacatacatactaggcagccaggcagccatggcgcccaccgtgatgatggcctcgtcggccaccgccgtcgctccgttccaggggctcaagtccaccgccagcctccccatcgcccgccgctcctccagaagcctcggcaacgtcagcaacggcggaaggatccggtgcatgcaggtgtggccggcctacggcaacaagaagttcgagacgctgtcgtacctgccgccgctgtcgacggacgacctgctgaagcagtggactacctgctgcgc

SEQ ID NO: 32744 - DNA, 288 bp, Zea mays
gaagacgagagctagaagcgaaggagaaaagcagttcttcagctaggcaggagggcacaggaaggaggagatggcgtcaaagaggattcagaaggagctcaaggatctgcagaaggaccctcccacctcgtgcagtgcaggtcctgttggtgaagacatgttccactggcaggcaacaataatgggtccatctgatagcccatattctggtggagttttcctagtcacaatccattttcctcctgattatcctttcaaaccaccaaaggtggcatttcgtactaaggt

SEQ ID NO: 32745 - DNA, 290 bp, Zea mays
gagcgtgtgcgtgaccggcgctggcggcttcgtcgcgtcggagctggtgaagctcctcctctcccggggccaatacgcggtccgcggcaccgtgcgcgaccctggtgctagcaagaatgcccatctcaaggtgctggaaggagctgaggaaaggttgcagcttctcaaggctgatctgatggactacaacagcattgcatcagcagttgccggctgtgagggtgtcttccatgtagccagtcctgtcctttcccatcgaccctccaaccctgaggtggaggtcatagctc

SEQ ID NO: 32746 - DNA, 291 bp, Zea mays
gctagcgcctccctagctctcgttgtcagcaatggccaccaccgccgcgtccagcctcctcaagtcgtccttcgcgggctcccggctcccttcggccacgcgcaccaccaccccgtcgtccgtggccgtggcaccccgcgcgccggcggcgccccatccgcgcgtccatctcctcctcccccaccccgccctacgacctgacgtccttccggttcagccccatcaaggagtccatcgtgtctcgcgagatgacccggcgctacatgacggacatgatcacccacgccgaca

SEQ ID NO: 32747 - DNA, 270 bp, Zea mays
ggacctggggtccggggtcagaggaatggcggcgacgtcgcggctggcgctggccctactgctggccgccttggtggcggcgtggcagctgccggcggcggcggtggcggccaactacacggtgggcgacgagaaggggtggaaccggacgtggactacacggcgtgggtgaagaagcacaagccgttctacaagggagactggctcatcttcgagtaccagaacgggcggtcggacgtggtgcaggtggacgaggtcggctacgacaac

SEQ ID NO: 32748 - DNA, 275 bp, Zea mays
cagccaagctttggagtgcggttcccaaccatggcggcctcccccacttcctccctcgccccgccggtggtgcctatggagcttcacgccggcaaccgctaccgcctcgtcgccgcgctccgggccacatctccgcctccgcgcgcccgctccacggcctcgtcctccttcagggcggggaggagaagacacggtactgcaccgatcacctcgagctcttcaggcaggagagctacttcgcctatctctttggagtgcaggaaccagggttctac

SEQ ID NO: 32749 - DNA, 279 bp, Zea mays
tgcagcgccgcctggatcgagcagccgagcgactaagcgaagactcccttttccccgagcacaagagaaccatggcggcggcggcagtttacggcggcttcaaagggaagcttggcgtcgaggatgcccccgagctgcagctcaaccgcatccgcatcacactctcatccaagaacgtcaagaacttggagaaagtttgtgcggatttggtaaagggagccaaggacaagcatttgagggttaagggacctgtccggatccctactaaggttctccaca

SEQ ID NO: 32750 - DNA, 277 bp, Zea mays
ggacctggtgcaagaacaaggagtgcaagaagcacactctccacaaggttactcagtagcaagaagggtaaggatagcctgtctgcccagggaaagcgccgttatgaccgcaagcagtcaggatatggtggccagaccaagcctgtcttccacaagaaggccaagaccaccaagaaaatcgtattgaagctgcagtgccagagctgcaagcactactcacagcacgcaattaagaggtgcaagcattttgagattggtggagacaagaagggcaagg

SEQ ID NO: 32751 - DNA, 271 bp, Zea mays
ggtcacctcgcagagaacgagcgcgacggggaggggtcgagctcgtcgccgtgaacgaccccttcatcagcacggattagctgacctacatgttcaagtatgacactgtgcacggacagtggaagcaccatgaggtcaaggtgaaggactccaagacccttctctttggtgagaaggaggttgctgtgtttggctgcaggaaccctgaggagattccatggggttcggttggcgctgaatatgttgttgagtctactggtgttttcactga

SEQ ID NO: 32752 - DNA, 109 bp, Zea mays
ccgacgcgtccgggatattcttgaaggcgatccattcctgaagcaggggctggtgctgcgcaacccctacatcaccaccctgaacgtgttccaggcctacacgctgaag

SEQ ID NO: 32753 - DNA, 266 bp, Zea mays
gcacacgcgtccgggacctggctcaagttagaagaagcaccagtgcctgatcgatggcggcccaggctctcctcaccggccggcagctgctgggccgccccgtgcagtcggccgtctctaggtcgtcggcgaggaaggcgcccttcgtcgtcagggccagctccagccctccagccaagcaaggtgccgacaggagctgtggttcgcgtccaagcagtccctctcctacctcgatggcacgctgcccggcgactatggcttcgacc

SEQ ID NO: 32754 - DNA, 261 bp, Zea mays
cccacgcgtccgcccacgcgtccgcggaagcctcggcgcactggcaggcgcgcttccgccgcaccgatcgctggccggctcaggcgccacggcccgctcatgcacctgcgcctcggctcctaccacgcggtggtggcctcgtcggcggacaccgcccggctagtcctcaaggtccacgacctcgccttcgccgaccggccgcgcacggccgccggcgaggtcgcctcctacggctacctcggcatcgtgcacatcccgtac

SEQ ID NO: 32755 - DNA, 268 bp, Zea mays
ggacctggggagcggtgctgtgacaaaggttgggccatggggcggaagcggagggtctccagctggagctgacagagacggagacgcccatgcgtctggagagcatcaccgtccgcagcggcgtggccgtcaactccatctcattctcctacgtcgactctgccggccacaagcgctctgctggtccctggggtggttccggtggacagcctgatcaggtccagctcgccgagtctgaggtggtcacacaagtgtccggaacatacgg

SEQ ID NO: 32756 - DNA, 271 bp, Zea mays
cccacgcgtccgcccacgcgtccgggcttctcctccccctccggttcgggttcgggttcgtgaggatctccggggttcggtttcgtgggtgggcggatcgagatggcggcgtcggatgttgagtaccgctgcttcgtcggcggcctcgcctgggccacggacgaccactccctccacaacgccttcagcacctacggcgaggtcctcgagtccaagatcatcctcgatcgggagacgcagaggtcccgctgcttcggcttcgtcacctttt

SEQ ID NO: 32757 - DNA, 272 bp, Zea mays
cccacgcgtccgaccagttcaaggcgtcgctgtggcaggtggagacggggcggcgcgacggcacggtgtcgctggcgtccaacacgggggcgctgccgtcgcccttcgcgggcttcgcgggcctgctgcagagcttctcggaccgggggctgaacctgacggacctcgtggcgctgtcgggggcgcacaccatcggcgtggcaagctgctccagcgtcaccccgcgcctgtaccaggggaacgccagcagcgtggacccgctgctggactcg

SEQ ID NO: 32758 - DNA, 272 bp, Zea mays
cccacgcgtccgcatggatgaggcgcaagttgtggagtcaaaggatggaaccatctcagttgcttctgcatttgttgctcatcaggaagctgtacaagacagggatcacaaattcttgacaaaagcagtggaagaagcataccgaggagtcgattgcggcgatggaggtccatttggagcagttgtcgtccgtaatgatgaagtggttgttagctgccataacatggttctgaagcacactgaccctactgcgcatgctgaagtaactgcaa

SEQ ID NO: 32759 - DNA, 266 bp, Zea mays
ggaccgtggaccttttggattctttaacggccagagatgccagatgtgcctccggtctgaacctttgctgaaggtgatggagcgactggctaatcctggggtgcggcgggtgttcattgtggaagctgggagcaaacgtgtggagggcatcatatcactaagtgacattttcaagttcttgctgagcttgtgaggagagaggggcatggcggagttttttttaacagtagcaaccctctgggcctttgggtccttgcggataattg

SEQ ID NO: 32760 - DNA, 290 bp, Zea mays
taagcgagtacggtccgaatccgggtcaccacgcgaacggacaggtccgggacctgggagctggcggacgcgtgggataaaaacttgtctcagaaggatctacaatgcatagcaacttccgtcttacattgctgcactatctgtggcaccttatgacaaaaaatatggtgcatctcatcttgagacagagaatgagaaggagcgtaacatgaggatggccaaccttgttaacttctcgcttgattccaagcgtgaaaatagggaaatgccttcaagagcatctcttctat

SEQ ID NO: 32761 - DNA, 264 bp, Zea mays
aggatggatattgactactcaccaacagggcgtgaatttgtcactggttcatatgatagaacagtaaggatttttaattatcttggagaccacagcagagagatttaccacaccaagaggatgcaaagggtgttttgtgtgaagtacacctatgatgggacctatttagtctctggcagtgatgatacaaatcttcgtctgtggaagtccaaagcttcagaacaacttggagttcttcttccacgggagcgcaaaaagcaagag

SEQ ID NO: 32762 - DNA, 263 bp, Zea mays
cagtcatccacactaacgaacgaactgaggtcgacgacgactgatcgagcagcgacgatggcggctgtgctgaacagcaggaagacgccgcagtggttgccgtgctggtggcggcggcgctgctggcgtcgtccgcttcggcggcgatcacctgcgggcaggtggggtcgtcgctggctccgtgcatcccgtacgcgacggggagggccagcgcgctccccgcgtcgtgctgcagcggcgtcaagagcctcaacagcgcggcg

SEQ ID NO: 32763 - DNA, 267 bp, Zea mays
ggccaaactgctagctgatattatgattcgtgacgaaaagatgaagcaaatggatgaccacctaaatcagcttcagttagagcatgccaagctgatggcagaatttgacaatgcacacaggtccttgtcagagctgcatgcgcaggtttctgagctggaagacgaggtagagaagcagaagcttgtgatatccgagagtgcagagggaaagcgggaggccatcaggcagctgtgcttctccattgaacactaccgcagcgggtatca

SEQ ID NO: 32764 - DNA, 266 bp, Zea mays
cttgccacgaatcgccgacactccaacccggaagaggcaacgaggtgactccgcgcctcggtcatgggtgacagccaatactccttctcgcttaccactttcagcccgtcgggaaagcttgtgcagatagagcacgcgctcacggctgtcggatccgggcagacctccctagggatcaaagctgccaacggggtagtgattgccaccgagaagaaactgccttctattttggtggatgaaacatctgtgcaaaagattcaggcact

SEQ ID NO: 32765 - DNA, 266 bp, Zea mays
aacgacgcgtccgcggacgcggggctgaagttgaatacacgattgggccaatccctgttgacgatgacgtaggaaaggatggttatcacacagttgacagcaaatatgagtacaaacagtacattttatacagattccaatggaagggatttcctcaaaagggtgagaaactacagggaggattggaaccttcaagtgactcaaccagttgcaggaaattactacccggttaatctcggagtgtacatagtagatgagaaatatga

SEQ ID NO: 32766 - DNA, 266 bp, Zea mays
gttcggtgtcataactgatgtggttgtgatgtatgatcacaacacacagagaccgaggggctttggattcatcacctatgattcagaagatgctgtggacaaagccctgcacaagagctttcatgagctaaatggtaaaatggttgaggtcaagaaggctgttccaaaggagcagtctcctggacctgttgcacgctcacctgcaggagtggggcagaactatgctatgaacagggttcatagcttcttgaatgacttcaaccaag

SEQ ID NO: 32767 - DNA, 267 bp, Zea mays
gtctcacgctactatcgctatctagagctccggccgtcacagacacgagctagagctagagctgcagggaagaagaagaaggaggaggaggagaagatgagggcgtccgcgctggtctgcttcgtggcggtgtcggcgtgcatagcgtgcatcgcgcatggcggcaacttctaccaggacacggagatgacctgggggcaggggcgcggcaaggtggtggacggcgggcgcgggctggacctgagcctggacagggcctccgggtcc

SEQ ID NO: 32768 - DNA, 267 bp, Zea mays
cccacgcgtccgcccacgcgtccgggataaacaagcccttcagaggcttactgaggcagcagagaaagctaagatggaactgtcaacgctgacacaggcaaatattagcctaccattcattactgctactgctgatgggccaaaacacatcgaggcaaccctctcgagagccaaattcgaggaactatgttcagaccttatagacaggcttaaaactcctgttaataatgcactgagagatgccaagttgtctctcagtgatctgga

SEQ ID NO: 32769 - DNA, 265 bp, Zea mays
gatgccagttgatgtgttagcaaaatggattgctgacaaagctcaagtttacacgcaacatgcatacatgagaccccttggagtagttgctatggtcttgggctacgacgaagagaaaaatgcacaactattcaaatgcgaccctgcgggtcacttctttggacataaggcaactagtgccgggctcaaggagcaggaagcaataaattttttggagaagaaaatgaaggatgacccgaaattcacctatgatgaaactgttcag

SEQ ID NO: 32770 - DNA, 263 bp, Zea mays
cccacgcgtccgcccacgcgtccgcccacgcgtccgctcctcgccatcacataaaaccagtgcaagcagcagcagcgcaatggcgagcagcaccatggccctctcctccacagccttcgccggcaaggcagtgaacgtgccgtcgtctctcttcggcgaggcccgcgtgacgatgcgcaagacggcggcgaaggcaaagccggcggcgagctccggcagctcgtggtacggccccgaccgcgtgctctacctgggcccgctgt

SEQ ID NO: 32771 - DNA, 303 bp, Zea mays
gtacacagccccgatccgaatcgtcctcctcgcgagcctcgccgatcccccactcccctcccctcgcttcaagatgcagatctttgtgaagaccctcaccggcaagactatcaccctcgaggtggagtcttctgacaccattgacaatgtcaaggctaagatccaggacaaggagggcatccctcctgaccagcagcgccttatcttcgccggcaagcagcttgaggacggccgcacacttgctgactacaacatccagaaggagtcaacccttcatttggtgctgcgccttaggggaggcat

SEQ ID NO: 32772 - DNA, 206 bp, Zea mays
acaacaaatacacaaccgtgcagtttacaggcgaggttttgaaaactcctgtctcactcgatatgcttgggcgcatttttaatggttctggaaaacctattgacaatggccccccgatattacctgaagcctacttggatatctctggaagttctattaatcccagtgagagaacctatccagaggagatgatccaaactgggata

SEQ ID NO: 32773 - DNA, 254 bp, Zea mays
catttcgtcgcagtagtcggcagtcgaaaccctagtcccctcgctttccttccactcgccgtcgcgggccgatagagccagagctgaaaggcgtaggaaaagctggtggaggaggggatggaccggatcgtaggcagcaagtacaagctgggtcgcaagatcggaagcggttccttcggggagatctacctcgcgacgcacgtcgacacctacgagatcgtcgccgtcaagattgacagcagcaaaccaatcat

SEQ ID NO: 32774 - DNA, 224 bp, Zea mays
gaaaggaatggttgttggtttgacctgtcgagtcggccgagctgttactgggcatgttgacatggtccgtgatctcctaaattacaaagaaagtatcctatttttgggaaggcctggggtcggcaagactactgttatgcgtgagattgcgcgtgttttagcagatgaatttcagaaaagagtggtaattgtggacacaagtaatgatattggtggggaggggg

SEQ ID NO: 32775 - DNA, 240 bp, Zea mays
tgtggaaagaaggatgggcttaagggttactggtaaggaaaccttccacaggtcattcgcagaattccttacagtgcagtgcaactcttctcgtatgaagtttacaagaaaattttccggagaaaggatggagagctttctgtatttgggagacttgccgctggtgcttgcgcgggcatgacatctacacttgtaacttacccactggatgttctccggctcaggctagcagttcaatct

SEQ ID NO: 32776 - DNA, 243 bp, Zea mays
cattgccatgcttgcctgtgcccgcattggtgccgttcactcggttgtgtttgctggcttctcagcagattcgctagctcaaaggattgtcgattgcaagcctaagcttgtcatcacgtgcaatgctgtgaagcggggagtcaagcccatctttctcaaagatatagtggatgcagctttggttgaaagtgagaagaatggagtctctgtaggtctctgtttgacgtatgaaaaccagtcagc

SEQ ID NO: 32777 - DNA, 215 bp, Zea mays
cccacgcgtccggtcatgcgccaggccaagacgcttaagatctgcgcgaaccacctcgtggcccccaccacgagaatgcaggaacatgccggcagcgacaaatcgtgcgtctggcacgcttctgactttgcggatggcgaactcaaggaggagatgtttgccatcaggtttggttcggtagaaaactgcaagaagttcaaggagttggttgagga

SEQ ID NO: 32778 - DNA, 218 bp, Zea mays
cacaaagacagtcctgctgctaagtatttgatggagcgtggtgtggaccggaaggacttcaactcatatggtagccgtcgtggtaatgatgaagtaatggcaaggggaacgtttgcaaacattaggatcgtgaacaagtttttgaacggagaagttggacccaagaccattcatgttcctactggggagaagctttctgtttttgatgcggccatgag

SEQ ID NO: 32779 - DNA, 188 bp, Zea mays
agcgagtacgggagcacgctcgacgatgaccagcgctacgccgacgctgctgaggtgctcgccgcttccgcgtcctccgccaacttcccctccgccgcctccgattactgctctgataaggatgatcaagatcctggtgatgttgaaggatcaatgctaggtcttcaaaggtagtgggatgcttccta

SEQ ID NO: 32780 - DNA, 236 bp, Zea mays
acggcgcgcagggcgacttcctatcctcctccctcggcaggtggcagaaccgcggctccaaccccgaccgatccctcatcctcgccttccgcaccatcgccaacatggctgaccggctaggtcttgtggctactattaaggaccgagcaaatgaaatctacaagaaagttgaagatctcaaatctatcaggggaagaaatcaagatgccatattagctgcatgcctaaatattgct

SEQ ID NO: 32781 - DNA, 283 bp, Zea mays
ccgacattcacgtgcagctgtcgggagcaggcaatggcgccggatctaagcgaactcgccgccgccgctccagcccgtggcgcctacctcgccggcgtcggtgtcgcggtcctcctcgctgcctccttcctcccagtagccgagtcgtcctgcgtgcgagataactcattggtgagagacataagccaaatgccgcaaagcagctatgggattgaaggattgtcacatataacagttgctggtgcgctcaatcatgggatgaaggaggtggaagtgtggcttc

SEQ ID NO: 32782 - DNA, 130 bp, Zea mays
gtacacagccccgatccgaatcgtcctcctcgcgagcctcgccgatcccgggggcatctcacctcgtttcaagatgcagatctttgtgaagattctcaccggctagactaacaccctcgaggtggagtct

SEQ ID NO: 32783 - DNA, 274 bp, Zea mays
acaacaaatacacaaccgtgcagtttacaggcgaggttttgaaaactcctggctcactcgatatgcttgggcgcatttttaatggttctggaaaacctattgacaatggccccccgatattacctgaagcctacttggatatctctggaagttctattaatcccagtgagagaacctatccagaggagatgatccaaactgggatatccaccattgatgtgatgaactccattgctcgtgggcaaaaaatccccctattttctgctgctggact

SEQ ID NO: 32784 - DNA, 273 bp, Zea mays
catttcgtcgcagtagtcggcagtcgaaaccctagtcccctcgctttccggcgactcgccgtcgcggcgccgatagagccagagctgaaaggcgtaggaaaagctggtggaggaggggatggaccggatcgtaggcagcaagtacaagctgggtcgcaagatcggaagcggttccttcggggagatctacctcgcgacgcacgtcgacacctacgagatcgtcgccgtcaagattgaaagcagcaaaaccaatcatccacagttgctatatga

SEQ ID NO: 32785 - DNA, 272 bp, Zea mays
ggagcgcgtgtggaagctgctcgccgacgtcgaggacctccacctgctgatggacccggacgagttcctacggctcaagagccagctcgccgtacgagcggcgccggggtctgagtccgcgtccttctgtttccggtccagggcgctcctgcacgtcgctagcgccactagggacctcaagaagcgtgtgccctgggtgctcggtgtcgaggcggaccccagcggcggcccacgggtgcaggaggcggccatgaagctgtaccacagccgta

SEQ ID NO: 32786 - DNA, 277 bp, Zea mays
gccatgggctccaccgccggcgacgtggccgcggtggtggacgaggaggcgtgcatgtacgcgatgcagctggcgtcgtcgtccatcctgcccatgacgctgaagaacgccatcgagctgggcctgctggaggtgctgcagaaggaggccggcggcggcaaggcggcgctggcgcccgaggaggtggtggcgcggatgcccgcggcgcccagcgaccccgccgccgccgcggccatggtggaccgcatgctccgcctgctcagctcctacgacgtcg

SEQ ID NO: 32787 - DNA, 278 bp, Zea mays
cccacgcgtccgcccacgcgtccggactgtttataattgttgttgttcggggacttctttgccggacgaaaaagaccctggaaaagcagcattcaaaggcactctcaagagccatctctatggctccgataacccctcgctcaattggaagcagaggctggaggtttgcatcggagcagcaagggggttgcactaccttcacactggatctgcgaaggccatcatccatcgtgatgtcaagtccgcaaacatcttgctcgacgagaacctcctcgcca

SEQ ID NO: 32788 - DNA, 286 bp, Zea mays
cagaccctgcaataccaatccaaaattcccaaatcaacccacacatccaccaaatataacacaagagccgagaaagtactaacttactacttgatgtaccgcagtgatattattcctaagaatatcaacgctacaattacaaccatcaagaccaaaagaactgtccaatttatggactaataccccactagattcaaatatagcatcaactatcagacaccctctaatatccctgaaagtaacctaagcaaaatccaacgtgccgtatgcataatgcacaacaaca

SEQ ID NO: 32789 - DNA, 267 bp, Zea mays
cggacgcgtggcggacgcgtgggcggacgcgtgggcggacgcgggggatcagacaggttccaggaaagtcacattctccgctaacatcctggcagatcccgataagaggcggcagtacgatacatcaggatttgatgcaatcgaatctgatagtcaggaactggagctggacttgtcgagtctcaacactgtaaacacggtgtttgcagctccttttagtaagcttggtgtgccaattaaaacaactgtttcagctacagttttaga

SEQ ID NO: 32790 - DNA, 269 bp, Zea mays
caagtccgcgcaggacctcgccgactcgctgctcagcgccggcgacaaactcgtggtcgtcgacttcttctccccaggctgcggcggctgccgcgccctccaccccaagatcgcccagttcgccgagaagaacccgggcgtgcagttcctgcaagtgaactacgagacgcacaagtccatgtgctacagcctccgcgtccacgtcctccctttcttcaggttctaccggggagccgagggccgggtcagcagcttcagctgcaccaacg

SEQ ID NO: 32791 - DNA, 267 bp, Zea mays
cactcccaagccagtacccacagtcctacgagcagtcgcacgcggggtcaagagacaaaacggtcgacatggctcgcacgcaatttgccgtagcggtcgccgtggtggccgcggtgctgctgctggcagcggcggcgacgacctcggaggccgccatcacctgcgggcaggtgagctccgccatcgcgccctgcctctcctacgcccgcggcacggggtccggcccctccgcgtcctgctgtagcggcgtcaggaacctcaagagcg

SEQ ID NO: 32792 - DNA, 264 bp, Zea mays
ggatttggtatcctgttaaaggagcaaggggccaggggtttcgggaggggatgggtgcctactttgcttggttacagtgctcagggggcttgcaagtttggcttctatgagttctttaagaagtattactcggacattgcagggcctgagtatgcccaaaagtacaagactctaatctacctcgcaggatctgcatctgctgaggtaattgctgatgtggctctctgcccttttgaagctgtgaaggtacgtgtgcagacacaa

SEQ ID NO: 32793 - DNA, 268 bp, Zea mays
ggcacgcccagcatccatccactcctcccctgctccggctccgggtccggcactgccatgggcctttcaacagtttactccccggccggaccgcacctcgtgccggcccctctcggccgctgccgctctgcccagccccgccgcccgcgccgggcccagctcgccaccgtccggtgctccgtcgacgccaccaagcaggcgcaggatggcgtggcgacggcggtcgcgacggaggcgccagcgtcgcggaaggagtgcttcggggtct

SEQ ID NO: 32794 - DNA, 267 bp, Zea mays
ctccgttcaccccgtccatttgatttgcgttcactgcgttgcggggccttggaagggattgttctctcctctcctttggattggaggtccctccttcttctcctctctctctcagaggaaggcctgaggatccaggaagaggacagcaatgggggaaggtgcaggtgaccgtgtcctgagccgcctccacagcgtcagggagcgcattggcgactcactctctgcccaccccaatgagcttgtcgccgtcttcaccaggctgaaaaa

SEQ ID NO: 32795 - DNA, 269 bp, Zea mays
cggacgcgtggctcatcaaatatgggaacattcgttgaccgggagaatagttgatagaattttcgacacagatcccaaggaaattcacaagcatgacagaaggaaagatgggttatgaagactttgtttactttatattatcagaggaagacaaatcatctgagcctagtcttgaatactggtttaagtgcatcgatcttgatggtaatggtattttaactttcaatgaaatgcaatttttctacgaggagcaattgcaccgaatggag

SEQ ID NO: 32796 - DNA, 264 bp, Zea mays
cccacgcgtccgcccacgcgtccgcccacgcgtccgctcagggacagctcgcagccgtattcctgtctcgaatcctctctcgccgctccgatggcccgcacgaagcaaacagcaaggaagtcgaccggcggcaaggccccccggaagcagctggccactaaggctgcgcgcaagtcggccccggccaccggcggcgtgaagaagccccaccgcttccgccccggcaccgtcgcgctccgcgagatccgcaagtagcagaagagc

SEQ ID NO: 32797 - DNA, 264 bp, Zea mays
cccacgcgtccgcggacgcgtggggcgcatcatctcctcgggcgagcagaaggaggagggccgaggcaatgaggaccgagtaacactcatcaaggattatcgtggcaagattgagactgagctgaccaagatctgtgatggcatcctcaagctgcttgagacccatcttgtgccgtcttccactgcccccgagtccaaggtcttctatctcaagatgaagggtgattactacagataccttgctgagttcaagactggagctga

SEQ ID NO: 32798 - DNA, 158 bp, Zea mays
cccacgcgtccgctgtttctctcatccccttcatcactctgctggtctccctcttccacctctggtcttggccatggcctccagcgcctcccggttcatcaagtgcgtcacagtgggggacggcgccgtgcgaaagacctgcatgctcatctgctaca

SEQ ID NO: 32799 - DNA, 156 bp, Zea mays
cacacgcgtccggctggcttctcctccccctcttatcaagtcctcctcgggttagggttccttagggttttgtggaggggcgatggcggcggctgatgtggagtaccgttgcttcgtcggcggacttgcctggggcaccagcaacgagtcgctgga

SEQ ID NO: 32800 - DNA, 156 bp, Zea mays
gtggtctctacttttggtgatggtcttgaaagagaattaccagcatgccttcccatactcgttgacaggatgggtaatgaaattacaagacttacagctgtcaaggcattttcagttattgcgaattcacctctacgtattgatctctcgtgtgtc

SEQ ID NO: 32801 - DNA, 266 bp, Zea mays
cggacgcgtggtgagtgacgcccatcatcatcatcctcgtcaacatcatcggctccgccgtggccttcgccataggtgctggacggcgagtggacgcactggctcaaggtggccggcggcgtcttcttcaacttctgggtgctcttccacctctaccctttcgccaagggcatcctggggaggcacggcaagacccccgtggtggtgctcgtctggtgggccttcgacttcgtcatcaccgccgtgctgtacatcgacatcccaca

SEQ ID NO: 32802 - DNA, 150 bp, Zea mays
gttttcgcgccgccgccgccgccgccgccgcagccgcaacaatgccgtcgcacaagaccttccggatcaagaagaagctggcgaagaagatgcgccagaaccgccccatcccctactggatccgcatgcgcactgacaataccatcaggt

SEQ ID NO: 32803 - DNA, 150 bp, Zea mays
cccacaccccccgagctcagcttagctccactccagctccaatcacagtcgtgaccagagcgcgagagctagctagagggccgtgaaaatgccgatcaataggatcgccctggggagccaccaggaggtgtaccacccgggcgccctcaa

SEQ ID NO: 32804 - DNA, 269 bp, Zea mays
  unsure (1)..(269): unsure at all n locations
cgaacgaactgaggtcgacgacgactgatcgagcagcgacgatggcggctgtgctgaacagcaggaagacgccgcaggtggttgccgagctggaggcggaggcgctgctggcgacgtccgcatcggcggcgatcacctgcgggcaggaggggacgacgctggctccgtgcatcccgtacgcgacggggagggccagcgcgctccacgcgtcgtgctgcagcggcgtcaagagcctcnacagcgcggcgcggaccagcgcggaccgccag

SEQ ID NO: 32805 - DNA, 304 bp, Zea mays
cccacgcgtccggcaaaataaaagccaggcggcggcatatggcgctcagcaaggagcaaaaactcacaattcctgatcaacaacacacaacaagcagcgaacagcaggtggcgctggatgccgagctccagctgtggaaccacactttcggctacgtcaagtccatggcgctcaaggccgcgctcgacctcggcatacccgatgccatccaccagcacggcggctcggccaccatcccacagatagtcaccaggatcacgctccacccgtccaagacaccatgcctgcggcgcctcatgcgcgt

SEQ ID NO: 32806 - DNA, 149 bp, Zea mays
cccacgcgtccgcttggttgctcggcagcagctagcaatggccgccaagggaggtgatgagctgaagctgctgggcgtgtgggacagcccgtacgtcaacagggtccagatcgtgctcaacctcaagggcctcagctacgagtacgtgg

SEQ ID NO: 32807 - DNA, 301 bp, Zea mays
cccacgcgtccgaacaaaacggcagctagagatgatggcatcctccctcctctttgttgtcgtcctcctcgcagcgctgtcatcgccgccgccgtcagccgtcctggcggcggacgacgacggcaccacgcacctgcacttcttcatgcacgacgtggcgaccgggagcaacccgacggcggtgcaggtgatcaagggcgcggggtcgtcggtcgtcccggggctggcgttcggcgacaccacggtgatcgacgacgcgctgacggagacgtcgtcgcacacgtccgccgccgtgggacgc

SEQ ID NO: 32808 - DNA, 147 bp, Zea mays
cccacgcgtccgcacacgcgtccggtggacagcttccggcgcgccggcatgccgctcgactcgctcgtctgcaacgccgccatctaccggcccacggcgcggacgccgacgttcacggcggacgggtacgagatgagcgtccgcgtc

SEQ ID NO: 32809 - DNA, 143 bp, Zea mays
cttctcgcctctcgctatatccccgggggccggggacctcacagccacatctctccactgctccgtccagcgcgtccacctcccaaacccctactcccccaggaagcaatggcttcccccaccgagggccaggtcatcacctg

SEQ ID NO: 32810 - DNA, 295 bp, Zea mays
  unsure (1)..(295): unsure at all n locations
ggacggtggnaccgagctgccctgctacacggtcccctgccaagatccatcttcccggttacgccgcctgatcgaagtgaacaagcaaggaagagccatggcgagcgagcacgcggcggggggcgaggctaagcatgaccagaagcagagcctgatggacaaggcgaaggggttcgttgtggagaagatcgcgcacatccccaagcccgaggcgacgctggacggcgtgacgttcaagggcctgagccgggagtgcatcacgctgcacagcagcgtgaacgtgtccaacccctac

SEQ ID NO: 32811 - DNA, 143 bp, Zea mays
cccacgcgtccgcacacgcgtccgcggacgcgtggcgcacctccgagatctccacgaagttgtggtaacatggggctcaccttcacgaagctcttgagccggctcatctccaagaaagagatgaggatccttatggttggtct

SEQ ID NO: 32812 - DNA, 143 bp, Zea mays
aacttctatactgttacggtttacgagaagggtgctgaagttgtcagaatgtacaagaccatgtttggagcatcagggttccgaaagggcatggatctttattttaaaaggcatgatgggcaagctgtcacttgtgaagactt

SEQ ID NO: 32813 - DNA, 249 bp, Zea mays
  unsure (1)..(249): unsure at all n locations
ccctcgcccacggacccaaccaaatcctcctccacctcctccatctccagccccgtccctacccagctcgtgtaacctcccgatgtccgggggcggaggcggcgcaggcgcgggctcgtcgtccggcggcggctgcggaggtggatggggcggcagggaggtcgactgggactgcggcnactgcggcaaccggaactacgccttccgctcgctctgcaaccgttgcaagcagccgctcctcctcgtcga

SEQ ID NO: 32814 - DNA, 234 bp, Zea mays
gacctctaaaacctagcagaggcccgcgccgccgccgccaaccgcgacgaggaaggaagcaggaacgcgatgccgaagtcgaagcgcaaccgcccagtgaccttatcgaagaccaagaagaagccaggtttagagcgcaagggcaaagtagtcgccgagataaaagatgctgtcgacaaatacagcagcgcctatgtttttacctacgataacatgaggaatcagaagctcaag

SEQ ID NO: 32815 - DNA, 118 bp, Zea mays
gttccaaggtgctgtggatgctgctcgcaaggctaacagtgccaaaacatggaaggaggtctgttttgcttgtgttgacgccgaggagttccgtcttgcaccaatttgtggtctcaat

SEQ ID NO: 32816 - DNA, 256 bp, Zea mays
aaacatccgacttggagatggcaccaatcgccgtggtcaagtcctggaagttgatggcgaaaaagctgttgtgcaggtctttgaaggaacttctggaatagacaacaaatacacaaccgtgcagtttacaggcgaggttttgaaaactcctgtctcacttgatatgcttgggcgcatttttaatggttctggaaaacctattgacaatggccccccgatattgcccgaagcctacttggatatctctggaagttct

SEQ ID NO: 32817 - DNA, 257 bp, Zea mays
ggacgcgtggtggctccacaccccaagtacaagcgccgggagcgcatcaagaagaagtaccagacgcacgaccccgacaaccagttcaaggtcggcgacgtcgtcgagctccaaccctcccgtcccatctccaagaccaagcacttcctcgccatcccgctcccgccccgcgacactcgccgcaagtctcagctcctaccgccgctccagtccgacgacgaccaggagccgtcctcgcgagagtgattgattgtgat

SEQ ID NO: 32818 - DNA, 257 bp, Zea mays
cccacgcgtccgacagatcatatcatctctaaccacctccctgaggtttgatggtgctatcaatgtggatgtcaccgagttccagaccaatcttgttccatacccacgtatacatttcatgctttcctcatatgcccctgtaatctctgctgagaaggcttaccatgagcagctctctgttcctgaaatcaccaatgccgtctttgagccctcaagcatggccaagtgtgacccaaggcatgggaagtacatggctt

SEQ ID NO: 32819 - DNA, 260 bp, Zea mays
ggaccctccacaacaatggccaccgtcctgtgcagcccccgcgcgccggccttcttcttttcgtcgtcctccctccgcgccgcgccggcgcctaccgccgtggcgctgcctgctgccaaggtgggcatcatgggccgtagcgccactcgcaggcgcaggctgcgcgcgcaggccacctacaacgtgaagctgatcacgccggatggggacgtggagctgcaggtgcccgacgacgtgtacatcctggaccatgccgagga

SEQ ID NO: 32820 - DNA, 258 bp, Zea mays
gttctgtgactacaagtacaatgatgagaacaccgtctcctttgtgaccctgaacaaggttggtggattcctgcagcggatggacctgtgccgcaagtacgcctttgggaagatgctcgtgataggctctgagccacccttcaagctgaagggcctttggctcttccgtggccaggatgttcccaagtttgtaatggacgaggtctatgacatggagctctacgagtggaccaatgtggacatctctgatgaggccca

SEQ ID NO: 32821 - DNA, 113 bp, Zea mays
cggacgcgtggcggacgcgtggggcaacggatatctcggctctcgcatcgatgaagaacgtagcaaattgcgatacctggtgtgaattgcagaatcccgcgaaccatcgagtt

SEQ ID NO: 32822 - DNA, 253 bp, Zea mays
acaagtcgtcgtaggcagcgagcgtctctcctctcccacgcatcgcgccaaggaagagagagagatcgccgctccccttctcggcgtcggtggtgcgggtgccctccctcctcgagcgagatctgtctggtcacagatctatctgacaaaatggtgaagatctgctgcatcggtgctggctatgtcggtggcccaaccatggccgtcattgccctcaagtgcccagacattgaggtcgtcgtcgttgacatct

SEQ ID NO: 32823 - DNA, 251 bp, Zea mays
gaagtggctgtgaagaggctaccaaagggtttagatcaggggctagaggaactaaaaaatgagctaggtttgatggcaaaacttcatcacagaaatcttgttcgactggagggtttctgcttagaagagggagagaggttgctcgtctatgagtacatgcccaacaaaagccttgacaatattctttttgatcatgagaagaaaagacaactagattggaggaaacgattcaacataattgaaggagttgc

SEQ ID NO: 32824 - DNA, 156 bp, Zea mays
agattattgatgttatcgagaagggagagaaacagcccaacatcactattggcattttggtctccgttgtcatcgtgttcgttaccgttctcttcaagctcctgtttggtggcaagaaaccagtggcacctgtgaaacctgcagctgaggcgaaga

SEQ ID NO: 32825 - DNA, 305 bp, Zea mays
cggacgcgtgtctgaagccaggcagtgtcatattgtgtgctgatggtaccatcactcttactgttcttcactgtgataaagaacaaggcttggttcgctgccgctgtgagaacactttcaagcttggcgagaggaagaatgttaatcttccaggagttattgttgatctccccacactcacagacaaggacaaggaggacatccttaaatggggtgttccaaacaagattgacatgattgccttgtcatttgttcggaagggttcggatcttgtggaagttaggaaggtacttggtgagcatgcc

SEQ ID NO: 32826 - DNA, 310 bp, Zea mays
ggacgcgtggacctgctcgcctctcgctccgaagcttctcctctcgcgtatcctaccaggagggtgggacgacccagggagcggaggtgtgcgaactcgcctcgcaccacgcgctgcggcctgcggggcgagagatcggggcctgagctagggtctggtggcggagatgtcgacgccggcgaggatacgcctgatgcgggacttcaagcgcctgcagcaggacccgcccgccgacatcagcggcgcgccgtacgacaacaatatcatgctctggaacgccgtcatattcgggccggatgacacgccgtgg

SEQ ID NO: 32827 - DNA, 311 bp, Zea mays
ccaagaggccttcagacaagcccctgcgtctgcccctccaggatgtgtacaagattggtggtattggaactgtaccggttggtcgtgtggagactggtgtcatcaagcctggtatggttgtcacctttggtccaactggcctgactaccgaggtgaagtctgttgagatgcaccacgaggcgcttcaggaggctcttcctggtgacaatgttggcttcaacgtgaagaacgttgctgtcaaggatctcaagcgtgggtttgtggcctccaactccaaggatgaccctgccaaggaggctgccagcttcacc

SEQ ID NO: 32828 - DNA, 305 bp, Zea mays
ggcttcgacccgctgggcctctcggacccggaggcaccgggggcttcatcgagcccaagtggctggcctacggcgaggtgatcaacggccgctacgccatgctgggcgcggtgggcgccatcgccccggagatcttcggcaagatgggcatcatcccgccggagaccgcgctgccgtggttcaagacgggcgtcatcccgcccgcgggcacctacaactactgggccgactcctacacgctcttcgtcttcaacatggcgctcatgggcttcgccgagcaccgccgcctccaggactggtacaac

SEQ ID NO: 32829 - DNA, 304 bp, Zea mays
aaagttgataaaggtggtctggataaaatgacacttattgaggttggccccaggttctgtttgaatccaatcaaaatatttggtggtagttttggtggtcctacatggtatgagaacccatactacatttcccccaatcagatccgtgcactagagaagaggcagaaggcaggcaaatatgccaagaaggtgaaggccaaggtgaggcggaagatgcacgagatggagaacacgctggagcctgatgagtttgctgagctctggaaaggggagtaactggtctttgatcgaccctgttaaagtc

SEQ ID NO: 32830 - DNA, 295 bp, Zea mays
gccgaggaggtggtggcgttctgccaggcgcgcctgccgcggtacatggcgccccggacggtggtgttcgtggccgagctgcccaagacagccacggggaaggtgcagaagttcgcgctccgggagcaggccagggccatgggcagcatctccagctccgagcagcaggatggggcagggacgaggagcaagctctgatctgaactcgcatgcccacatggatgtctcctccattccactgacgagtagttgagcagcaacgaacctaagtgtgctgagctgtgctgtgctgtgc

SEQ ID NO: 32831 - DNA, 136 bp, Zea mays
caactttcaatcatggcggacgtcgatgtcgaaccggacgttgccgccggagctcccaagaagaggacgttccgcaagtacagctaccgcggcgtcgacctagatgcgcttctcgacatgtccacggacgacctcg

SEQ ID NO: 32832 - DNA, 294 bp, Zea mays
gagctatatacattcaaatggactaccttattgatacctcctaccaccttgcttctattgaacttcattggtgtggtcgctggcgtttcaaatgcgatcaataacggatatgagtcatggggccccctctttgggaagctattctttgcattttgggtgattgtccatctttatccctttctcaaaggtttggttggaaggcaaaacaggacaccaacgattgtcatcgtctggtccattctgctggcttcaatcttctcgctcctttgggttcggattgatcctttccttgcg

SEQ ID NO: 32833 - DNA, 296 bp, Zea mays
ggacctggcggacggtgggctcgtccgagtctgccctgctcgccaagctgggtatccgccccttctcgtacggcctccaggtcaccagtgtctacgaggatgggtccgtgttcagccctgaggtgctcgacctttctgaggaggacctgattgagaagtttgccactggtgtctccatggttgcctccctgtcactggcgatctcgtacccgacccttgctgctgtgccccacatgttcatcaatgggtacaagaatgtgcttgctgttgctgtcgagacagactactcataccca

SEQ ID NO: 32834 - DNA, 137 bp, Zea mays
gtacagtcaggcagcttcaaaccttgtatctggcaacaatctaggacagactatccaacaaattcttgacatgggtggtggtacatgggaacgtgatactgttgtttgtgctctacgtgctgcatacaataaccccg

SEQ ID NO: 32835 - DNA, 290 bp, Zea mays
cccacgcgtccgcagattgtccgtcaatcaccatttaatgctaaagggcttcggcagacaagctttgctggtgttgaggttatgcctcttctaccagaggaatccatggctgtggacatacctgaagaggacctggagataagcttcacaagagctggaggtaaaggaggccagaacgtgaacaaggtggaaacggctgttcgcatggttcatattccaactggaattgcagttcgttgctcagaggagaggagccagctggccaacaaaataaaggccctcagccggct

SEQ ID NO: 32836 - DNA, 304 bp, Zea mays
gcataatctcagtgccactcggcgtgctcaaggcgaacgtaataaagttcgagcctgagctgccccagtggaagagctccgccatcgccgacctcggcgtgggcaccgagaacaagatcgccatgcacttcgacagggtcttttggcccaacgacgaggtgctgggaatggtcgggccgacgcccaaagcctgtgggtacttcctgaacctgcacaaagccaccggcaatccggtcctcgtgtacatggccgccggaaagttcgcccaggaggtggagaagctgtcggacaaggaagccgtcgg

SEQ ID NO: 32837 - DNA, 304 bp, Zea mays
tgaaaaaaaaaacaggcaaggaaaatggctccgaccgccgccaaggacagtggctccgccgatcgctggcgcgaggtgcaggcgttcgaggacagcaagctgggtgtgaagggcctggtcgactccggcgtcaagtccatcccggccatgttccaccacccgccggagtccctcaaggatgtcatttctccaccagctctgccctcctccgacgatgcgccggccatcccagtggtggacctgtccgtggcgcggcgcgaggatctggtggcccaggtgaagcacgcggccgggacggtgggct

SEQ ID NO: 32838 - DNA, 185 bp, Zea mays
  unsure (1)..(185): unsure at all n locations
ctcgtgaccaaagggtaatctgaaccatcgagccantgccgccaagcagacncgtctccacagtcngcgcgtacgtcttngngccacctnctcctctcatcccaatgaactgatagcactctagtccaggtatgtccaccatggcaattgaatgcgtcagcgccatcagctgctttcggagtatg

SEQ ID NO: 32839 - DNA, 126 bp, Zea mays
cggacgcgtggatgaacctggccctttggctgggcctaatgtgatgaacgtcgtcgtggtggcttctgaatgtgctcctttctgcaagacaggtggccttggagatgtcgtgggtgctttgcctaa

SEQ ID NO: 32840 - DNA, 285 bp, Zea mays
gttcttgccactggtgtcacaaccacgatcttggacagagctggccggagaatcctcctcattatttcttcttctgggatgaccctaagccttctggcagttgctgttgtattttgcatcaaggataacattgcacaagactctgacttgtacaacatcttaagaatagtgtccttggttggtgtcgtggcttatgtcactgccttctccttcggtatgggttccattccatggatcataatgtctgagatccttccggttagcatcaagtgtgtggcaggaagc

SEQ ID NO: 32841 - DNA, 294 bp, Zea mays
cggacgcgtgggccgcagatcaaagaagatggcagctgtcgacacattcctcttcacctcggagtctgtgaacgagggacaccctgacaagctctgtgaccaggtctcagatgccgttcttgacgcttgccttgctgaggaccctgacagcaaggttgcttgtgagacctgcaccaagaccaacatggtcatggtctttggtgagatcaccaccaaggccaatgttgactacgagaagattgtcagggagacctgccgcaacattggttttgtgtcaaacgatgttgggcttga

SEQ ID NO: 32842 - DNA, 292 bp, Zea mays
ggacgcgtgggttgagactggtatcatcaagcctggtatggttgttacctttggtcctagtggccttactactgaggtgaagtctgttgaaatgcaccatgaggctctccaggaggcccttcctggtgacaatgttggcttcaatgttaagaatgttgctgtgaaggatctgaagcgtgggtatgtggcctccaactctaaggatgaccctgccaaggaggctgctagcttcacatcccaggtcatcatcatgaaccaccctgggcagattggcaacggctatgccccagtg

SEQ ID NO: 32843 - DNA, 301 bp, Zea mays
gccatgagggtgagaggctgctagacggaggaaacgaggatgggtttggcaggatcggaaggctggtggccagggtggccctgcagagcgacgacgtcgagctcgtcgccgtgaacgaccccttcatcagcaccgattacatgacctacatgttcaagtatgacactgtgcacggacagtggaagcaccatgaggtcaaggtgaaggactccaagacccttctctttggtgagaaggaggttgctgtgtttggctgcaggaaccctgaggagatcccatggggttcggttggcgctgaata

SEQ ID NO: 32844 - DNA, 287 bp, Zea mays
cggacgcgtggcggacgcgtgggtcaacgacgcgctggataagcatctcgagaaggcggtcgcgtcgcagtccacgtcgaacgggtcggcgggcggcgggcgcgaccaccaccgcctcgtcgtgccgtcctccgtgtcgtccatccccaagggccgctgctccgatagggagtctgattctgatagtgaagcatcggatgttagcggctctgaaggagaagacacctcatggatttcatggtattgcaacttaagagggaatgagttcttctgtgaagtcgacgatg

SEQ ID NO: 32845 - DNA, 284 bp, Zea mays
ggatgaggacaccggcgcccaggtcgcgcccatcgtgaagctggaggaggtcgccgttaccaccggagaggaggacgaggacgcgctcctggacatgaaggcgaactctaccggttcgacaaggaggggaaccagtggaaagagcgcggcacaggcactgtgaagctgctcaagcacaaagacaccgccaaggtccgcctcgtcatgcgtcaggcgaagacgcttaagatctgcgccaaccatctcgtggtggcgacgactaagatgcaggagcacgcggggag

SEQ ID NO: 32846 - DNA, 272 bp, Zea mays
ccgggttccagtcccggcacgagtacctgttcggcaagatcgacatgcagctgcggctggtgccgggcaactccgccggcaccgtcaccgcctactacctgtcgtcgcagggcggcgcgcacgacgagatcgacttcgagttcctgggcaacgtgtccggcgagccctacacgctgcacaccaacgtgttcacgcgggggcaggtgcagcgggagcagcagttccgcctctggttcgaccccacgccgacttccacacctactcgatcctct

SEQ ID NO: 32847 - DNA, 283 bp, Zea mays
gaggtccaccaaccttgactggtacaaaggcccgaccctgcttgaggctcttgaccagatcaccgagcccaagagaccttcggacaagcccctgcgtctccccctgcaggatgtgtacaagattggtggtattggaactgtaccggttggtcgtgtggagactggtgtcatcaagcctggtatggttgtcaccttcggtccaactggcctgactactgaggtgaagtctgttgagatgcaccacgaggctcttcaggaggcccttcctggtgacaatgttggc

SEQ ID NO: 32848 - DNA, 287 bp, Zea mays
ctcttctaaaaaattggcttgagccattacctgatggaagcatgccaaacatgaatattcgatctgctgtactgaaattattaactgattttccaattgacttggaacagtatgaccgaagagagcagcttaagaaaagtggtctgggaaaggtcattatgtttttgtccaaatctgacgaggagactactgcaaataggaaattggctaaggagctggttgataaatggagtcgaccaatattcaacaagagcacgagatttgaggacatgaagagatatgatgat

SEQ ID NO: 32849 - DNA, 280 bp, Zea mays
gagcgtgtggatttgggggagcttcttcactggagagtggagagctccggtagcgaggcgaaggaaggaagagggaggaggggaatcagagaggtctccccgatggcggactggggccccgtgatcgtagcgacggtgctgttcgtggtcctcacgccggggctgctctgcacgctgccgggccggggccgcgtcgcagagttcggcagcatgcacaccagcggcctggccatcctcgtccacgccgtcctctacttcgcgctcatcaccatcttcctca

SEQ ID NO: 32850 - DNA, 279 bp, Zea mays
cccacgcgtccgcccacgcgtccgcccacgcgtccggcaagctcgatctactactactactagctggtacacatactagccagcctgccagccagcttgccatggcgcccaccgtgatgatggcctcgtcggcaaccgccgtcgccccgttccagggtctcaagtccgccgccagcctccccgtcgcccgccgcagcaccaggagcctcggcaacgtcagcaacggcggaaggatccggtgcatgcaggtgtggccggcctacggcaacaagaagttcg

SEQ ID NO: 32851 - DNA, 277 bp, Zea mays
ggttcattgtacctcatctccattggtacggggggcgtcaagtcagctttacttcccttgggagcagatcagtacaatgatgtgaacgccgaagagagcaaaagcaagcaactgttcttcagttggttcttcatggctgtcaaccttggagtgttcatctctggcactgttcttgtctggatacagcaaaatgtcgcttggtctcttggattcggcatctcctcgatatgccttgttatcgccgcagttgcctttttggttggaacacgctttacag

SEQ ID NO: 32852 - DNA, 279 bp, Zea mays
cccacgcgtccggctatccttggttgccgcttcctccaaagccactccaaacccccgcttccagaaccttctcgaaactctccgcctcctcctctactcgctccgatggcgaaggaaccgatgcgcgtgctcgtcactggcgccgcagggcaaattggatatgctcttgttcccatgattgctaggggagttatgcttggtgcagaccagcctgttattctgcacatgcttgatattccgccagcagctgaagcccttaatggtgttaagatggagttg

SEQ ID NO: 32853 - DNA, 279 bp, Zea mays
cggacgcgtgggagctctgggaccttattgaaggactggaggaaaatcagttgcttcattatacccatttagtaacaggttatataggctcagtttcctttttagatactgtgctacaagttgttgagaaattgcgatcagttaatcctgatcttgtatatgtttgtgacccagttctaggtgatgaaggaaaactatatgttcctcaggagctaatatctgtttatcaacagaaggttgttccagttgcttcaatgcttacacctaaccaatttgaag

SEQ ID NO: 32854 - DNA, 281 bp, Zea mays
  unsure (1)..(281): unsure at all n locations
cggacgcgtggngggaaaatcaggctccgtgctgaagatgtgcaaggcaggaatgtgctcacaaacttctgggtcatgaattttaccaccgataagctcagatctctagtaaagaagtggcagacattgattgaagcccatgttgatgtcaagacaaccgacaactacatgctgcgtttgttctgcattggttttaccaagaggcgcccaaaccaggtcaagagaacctgctatgctcaggcatcccagattcggcagattcgccgcaagatggttgagat

SEQ ID NO: 32855 - DNA, 280 bp, Zea mays
tgccctctgagggtgccaaagtggcacatttctgctcaatgtgtgggcccaagttttgttcaatgaaaatcacggaggatatcaggaagtatgctgatgaaaatggttatggaacagtagaggaagctgtgatacaaggaatgaatgctatgagtgctgaatttttggctgcaaggaaaacaattagtggggaacaacatggtgaagcaggaggggagatctatgtaccagaaagctatgcagctcagaaataaggtttcctcggagccatccattctaa

SEQ ID NO: 32856 - DNA, 270 bp, Zea mays
ctcacgcgtccgcggacggtgggtgggaggatgaattagtcaaacgtgcaagtggccttgttgttagttcaggaatggataatgatgcagacctaggtccagtgatcagccgacaggcaaaggatcgtatctgtaaattagttcaaagtggtgttgacagtggtgctcgtatattgcttgatggaagaaagatagtggttcctcgctatgaagatggaaattttgttggcccaaccattctggctgatgttaaaagtgacatggagtgtt

SEQ ID NO: 32857 - DNA, 270 bp, Zea mays
tccgtcctcgacctcccggtcctggacatgttgcagaggaaggggaggtcgaggacggaatcgctgtggcacgcgtcgacgacggcgtggagcttggcgccgggcaccagcggccggacgatggtctcgttgatctcgtcgtccaggatggggcccttctggaacgagtccaccgggcagatggcctcgtcgtacccgtcctgctcgtcgcagtccgcgtcggcgacctgcgcgcccagcccagagaagtgagacaccagggagtcgccg

SEQ ID NO: 32858 - DNA, 276 bp, Zea mays
caagcaagcaagcaagcagcgagtacatacatactaggcagccaggcagccatggcgcccaccgtgatgatggcctcgtcggccaccgccgtcgctccgttccaggggctcaagtccaccgccagcctccccatcgcccgccgctcctccagaagcctcggcaacgtcagcaacggcggaaggatccggtgcatgcaggtgtggccggcctacggcaacaagaagttcgagacgctgtcgtacctgccgccgctgtcgacggacgacctgctgaag

SEQ ID NO: 32859 - DNA, 155 bp, Zea mays
tttcacgctcagctccagcaattgctgcctccaccatggcgatctcctccacggtgatgaccggcacccccatcaaggtgggctccttcagcgagggccgcatcaccatgcgcaagaccgtggacaagcccaaagtggcggcgtccggcagcccc

SEQ ID NO: 32860 - DNA, 313 bp, Zea mays
cggacgcgtggctgcattggtgcagctcgtgggcttcactaccttcacactggtgcaaagcacaccatattccaccgggatgtgaagacaacaaacatccttctggatgagaaatgggttgccaaggtttcagattttggtctgtccaagactggcccatctatggaccatactcatgtgagcacagttgtcaaaggcagtttcggataccttgatcctgaatactttcgcaggcagcagctcacagagaagtctgatgtatactcttttggtgttgtgctgtttgaggtcctctgtgcacggcctgccttga

SEQ ID NO: 32861 - DNA, 314 bp, Zea mays
cccacgcgtccgccgaagattcagaaattatgacaggcgaaatatttgggcccttgcttcctattgtgacggtcgaaaagattgaggaaagcttcgacttgatcaatgccaagcctaagccactagccgcctaccttttcaccaagaataggaagctgcaagaggagtttgtggcgagcgtccctgcaggagggatgcttgtaaacgacactgcgctacatctcaccaacccgtacatgcccttcggcggcgtcggcgacagcgggatgggctgttaccacggcaagttcggcttcgactgcttcagccacaag

SEQ ID NO: 32862 - DNA, 304 bp, Zea mays
cacacgcgtccgcgacggtgggcgtacacacgccattagcttactatgatcacaacgtcattgccaacacaaatgttctagacgttatgtctgctcacggttgcaagaagttggtgttctcatcatcagctgcactttatggatcaccacaaactcaccctgcacagaaaattttcctcttactcgacacaatccatatggcaaaacaacagctcgttgttgaagatatctgccgggatatctaccgttcagatcctgaatggaagatcattttacctaggtacttcaatccagttggtgctca

SEQ ID NO: 32863 - DNA, 318 bp, Zea mays
attttcaaggtacagtcctctccatcaggctagcttgtgcttggactctgtcattatctgtagtctaggctacttcaagttatcttgtaaattcattgatgaaatccttcggtttgtggagcttgtgctattaatgaatttacaagataacttgaagtagcctagacaacagataatgacagagtccaagccacgcacgcatacacagcacagagtgaggtaagcatccgaaaaaagctgtgatctgatcgacatggccgccgccaccatggctctcacctcccgcgcgctcgtcggcaagccggcgggcagcaccag

SEQ ID NO: 32864 - DNA, 309 bp, Zea mays
ccgatccgtgggcgggagcgtgaggccgacgcatggtggcattttacgcggcgccgatgctcatctcacatcgatctagaagactcctgctcctcgacgtccgatacgatggccggcttctccgacctccacaccgccgacggcctcaagtccctcgaggctcagctcgctggcaaaacctatgtatctggtgactccattactaaggatgagattacggtcttcgccgcggtgccgtcgaagcctggcgctgaatttcgtaatgccgctcgatggtacgagaccgtctctacggctgtaagctcaaga

SEQ ID NO: 32865 - DNA, 305 bp, Zea mays
accgatcctcgcctgctgcagccatggcgacctccgcggcgctctccaccgccgccaatcccacccagctctaccggtcccgcgcttcgctgggcaagccggtgaaggggcttggcctgagcatgggccgcgagcgcgcccagcggagcattgtgtgccaggcggcgagcagcatctccgccgaccgcgtccccgacatggagaagcggaagctgatgaacctcctcctcctcggcgccatctcgttgcccaccgtcggcatggtcgtcccctacggcgccttcttcgtccctgccggctccggg

SEQ ID NO: 32866 - DNA, 310 bp, Zea mays
gtggacgacatctcgaagtcgatgacagaaatcgaggtaacagatgtcgacatgccacctctgatccgggagaattctggcttcaccttcctacaccaaagaaaggactaacagggtggtccttccagctgcatgtccctttttgcacattctttttctccgctcaacctgtgcataactcatgtacatacgctcgtgccttttgctctctggtcagggcttgttagatgtattgtctttggtttgattggttggttggttctttcctcgatcctctcccaattttgttgggcgaagggtccacaatcta

SEQ ID NO: 32867 - DNA, 294 bp, Zea mays
ggtgggcatggcggtgttgaaccatttgtttcatccaaggagttcaaagatatgaacgtggcattagtccttgatgaagggcttgcctctccaggggaggagtaccgtgtgttctatgcagagcgtacccttggtggcttactataaaagcaacgggcgcaccagggcacggtgcgaagttgtatgatggtagtgcaatggagaatttgatgaagagcgtggaggctattaggagattcaggacatcacagtttgatctagtgaaatctggagagaaggctgaaggagatgttg

SEQ ID NO: 32868 - DNA, 131 bp, Zea mays
  unsure (1)..(131): unsure at all n locations
tgctactacggggtggacaccgcggggctgtcggcggaccctgagaccttcgccaagaaccgcgagctggaggtgatccactgccgctgggccatgctcgncgcgctcgggtgcgtgttcccggagctgct

SEQ ID NO: 32869 - DNA, 296 bp, Zea mays
cacaacacgctccactaaccctagcgacacctcgggtcgtcgtttgatccccgcggggagctctagttccgccaagcgtgcgtaccggcgtccggatccgggaccgaagatgacggagtccctggtgcggaacaagccggggatggccagcatcaaggagatgccggtggtgcaggacgggccgccgccgggcggtttcgcgcccgtgcgcttcgcccgccggatccccacctcggggcccagcggccaccgccatcttcctcaccaccttcggtgctttcgcatatggcatgtac

SEQ ID NO: 32870 - DNA, 295 bp, Zea mays
cggacgcgtggggtggccgagacaccgagcacgtactaccagcaagatggtggcgtctcccagattcaagccaatcgaggagtgctgctcggaggggcggtcggagcagacggtggccgccgacctggacggcacgctgctcatctccaggagcgcgttcccctactacctcctcgtggctctcgaggccggcagcgtcctccgcgccgcgctgctgctcctgtccgtgccgttcgtctacgtcacctacgccttcttctccgagtcgctggccatcaacacgctggtgtacatc

SEQ ID NO: 32871 - DNA, 294 bp, Zea mays
cggagccgtgggacaaaagcccacagcttcttctccctactcctccagtcctccgtcatccgtttcgctctctgccgccgccaccgcacaagaagctagctcctgcctgtaccgccccgtcatggcgatgctatcccgcgcacctcctccgcggcccggcgcccgctgctgccgccgcctaggcttctggcggtgagggcgatggcgtcgtcgctcttcggccacgtcgagccggcgcccaaggaccccatcctcggcgtcaccgaggctttcctcgccgacccctcgtccgac

SEQ ID NO: 32872 - DNA, 281 bp, Zea mays
gggtgatgagaatgatgcgaggaactacacatatagcctagaggttggtggtaacgggaggaagatggtgtgggaaggtactcctagaagcatccgtgacagccaccgcaaggtccgtgacagccatgatggcctcatcatccagaggaacatggcgctgttcttctcgggcggtgacaggaaggagctgaagctgagggtgactgggcggatctggaaggagcagaccaacccggacggggcctgcattcctaacctttgcagctgagcaagggagacgt

SEQ ID NO: 32873 - DNA, 302 bp, Zea mays
cggacgcgtggcggacgcgtgggcggacgcgtgggcgccgcctgatcgaagtgaacaagcaaggaagagccatggcgagcgagaacgcggcggggggcgaggctaagcatgaccagaagcagagcctgatggacaaggcgaaggggttcgttgtggagaagatcgcgcacatccccaagcccgaggcgacgctggacggcgtgacgttcaagggcctgagccgggagtgcatcacgctgcacagcagcgtgaacgtgtccaacccctacgaccaccgcctcgccatctgcgaggtgacctac

SEQ ID NO: 32874 - DNA, 287 bp, Zea mays
cggacgcgtggggttcattttatggcccttccgagaagctttagattcaaatccaagatttggagataagacgacgtaccagatgaacccagccaactacagagaagccctcatagaaaccgcagcggacgaggcagaaggagccgacattctgctagtgaaaccgggattgccgtacttggacatcatccgactgcttcgggatcattcagccctaccgattgctgcttaccaggtctcgggcgagtactcgatgatcaaagccggcggggccctgggcatggtgg

SEQ ID NO: 32875 - DNA, 280 bp, Zea mays
cacaacaacacccagctctgccccagcccgccacaggagttcccgcatctccctctggtccggtcacaggagctccgagacctctccaatggcggttaagatctacgttgtgtactattccatgtatgggcatgttggcaaactagctgatgagatcaagaaaggtgccttatctgttgaaggtgttgaggctaaaatatggcaggtccctgaaattctctctgaagaagtgcttggaaagatgggcgcgccccctaagcccgacgtgccagtcatcaca

SEQ ID NO: 32876 - DNA, 280 bp, Zea mays
cggacgcgtggcggacgcgtgggcatttatgctttatatttagaggagaggctcgaatgtttccgagtgatgaagtatgatgtagaaacagatcctccgagaactaaggatcttgatactgttgctttgcttgatcatctaccatcattgcagcaactccttttccgtcttcttgcttgccagccacaaggagcgtcgtcttacaatgttataatccagcatgcactctcaatggttgctttagagagtattaagatctacactgcgattagtgatggaa

SEQ ID NO: 32877 - DNA, 279 bp, Zea mays
ctctcgtgcgctctccgtgggagcgaggactcgcggccggcggcagcggcaggttctcctagatctccggcatcatcagtaacaaatggctgacggtgaggacattcagccccttgtttgtgacaatggaactggcatggtcaaggctggttttgctggtgacgatgcgccaagggctgttttcccaagcattgtcggacgcccccgtcacactggtgtgatggttggcatggggcagaaggatgcgtatgttggtgacgaggcccagtccaagagggg

SEQ ID NO: 32878 - DNA, 279 bp, Zea mays
ggcaagtgccccgtggacacgctgaagctgctggcgtgcgtggacgcgctcaacggcctcgtgcacgccgtcgtcgggaccaacgccagcgacacctgctgcccgctgctgtccggcgtggccgacctcgacgccgcgctctgcctctgcaccaccatcaaggccaaggcgctcagcgtcagcctcgtgctccccgtcgccatctccgtgctcgtcaacgagtgcggcaagcacgtgccctccagcttccagtgcccgtaataactatattagggcgcg

SEQ ID NO: 32879 - DNA, 282 bp, Zea mays
gtagagttctttcgtggaggaagcgggtgcaactggaggagggtagaggtagctcaatagatctactgctgtcgggggagttaatgcaaagctgagttgctgcacgttggctttcttcagagatggcttcagctggtgtagccccatctgggtacaaaaacagcagcagcactagcattggtgccgagaagttgcaagatcagatgaacgagctaaagattagagatgataaggaagttgaagcaaccataattaatgggaaagggactgaaactgggcaca

SEQ ID NO: 32880 - DNA, 276 bp, Zea mays
cccacgcgtccgaagaaatgcacgcctggtagcaaatccagggtgttatcccacatctattcaacttccgctcgttcctttggtaaaggcaaaactgatcaagctaaccaacattattattgatgcaaaatctggagtcagtggtgcaggacgtggggctaaggaagcaaatctttacactgaaatcgctgagggtatccatgcttatgggataacaagccatcggcatgtgcctgagattgagcaaggacttacagatgctgctgaatcaaaagt

SEQ ID NO: 32881 - DNA, 276 bp, Zea mays
ccccgagctcagcttagctccactccagctccaatcacagtcgtgaccagagcgcgagagctagctagagggccgtgaaaatgccgatcaataggatcgccctggggagccaccaggaggtgtaccacccgggcgccctcaaggcggcgttcgctgagttcatctccaccctcatcttcgtcttcgccggccagggctccggcatggccttcagcaagctgaccggcggcggcccgacgaccccggcgggcctgatcgcagcggcggtggcgcacc

SEQ ID NO: 32882 - DNA, 273 bp, Zea mays
cgccagtcaccaaccttccactccctccctccgtcgccatggcgcgcaagaagatccgggagtacgactccaagcgcctcctcagggagcacctcaagcgcctcgcgggcatcgacctcaccatcctctccgcccagatcacgcaatcaacggacttcgcagagcttgtgagccagcagccatggctgtcaaccatgaagctagtggtgaagcccgatatgctgttcgggaagcgtgggaagagcggcctcgtggctctcaacttggatttcg

SEQ ID NO: 32883 - DNA, 277 bp, Zea mays
aataccccacaaggccactccaaagagctagtaatggaaccgaagatgttcgggaacatcggaaagatccccatcatcggcgacctgacgggcagcaacaagaatgcgcacctcaagggcaacgtggtgctcgtgcgcaagaccgtgctcggcttggacgtcaccagcatcgccggctccctcctcgacggcgtcggcgagttcctcggccgcggcgtcacctgccagcttatcagctccaccgtcgtcgaccctaacaacggcaaccgcgggaagt

SEQ ID NO: 32884 - DNA, 273 bp, Zea mays
gcattctccacaatccatgtgacgcccgaggacggtttcagctacgccagttacgaggttatgggcttggatgccactgctctgtcttatggtgaccttgtcaagagggtcctccggtgctttggcccctcagagttttccgttgccgtgaccatcttcggcgggcgtggccatgccgggacatggggaaaggcacttggtgcagaggtctatgactgcaacaacatggtggagcaggagctgcctggaggcgggctcctcgtgtaccagagc

SEQ ID NO: 32885 - DNA, 278 bp, Zea mays
cccacgcgtccgcccacgcgtccgggggtttccaaggacgcgtcacaggatgacctcaagaaggcctaccgcacagccgccatcaagaaccaccccgacaagggcggcgaccccgagaagttcaaggagctagctcaggcttatgaggtcctcagcgaccctgaaaagagagagatctatgaccagtatggcgaggatgccctcaaggagggaatgggaggcggtggtgggatgcatgatccctttgacatattccagtcattctttggtggtggaag

SEQ ID NO: 32886 - DNA, 260 bp, Zea mays
cccacgcgtccgaacaaggacatcacagcacaaatcatctctgctagtatagcaggtgatatggttcttgcttctgcttactcgcatgagttgccacgatatggtcttgaagttggtctgaccaactatgcagctgcctactgcactggccttctgttggctcgccgtgtgctcaagacccgtggtttagataaggaatatgagggcaatgttgaggccactggtgaggacttctctgttgagccagctgatgagaggag

SEQ ID NO: 32887 - DNA, 213 bp, Zea mays
cgaccggttcctcggagcacgatgaagtttgttgctgcctacctgcttgctgtcctcgctgggaacgccagcccctccgctgacgatttgactgccattctggagtcagttggctgtgaagttgacaatgaaaagatggaactcctgctgtcccaactgagcggtaaggacatcaccgagctcattgccgcgggcagggagaagtttgcttca

SEQ ID NO: 32888 - DNA, 267 bp, Zea mays
atctcctcgcattttccttgcaaccgattgcctatccccctcccaaccaaagaccgatggcgcccaaggccgagaagaagcccgcggcgaagaagccggcggaggaggagcccgcggccgagaagacgaccgccgggaagaagcccaaggcggagaagcgggtccccgcgggcaagtccgccggcaaggagggcggcgagggcaagcgtggcaagaagaagggcaagaagagcgtggagacgtacaagatctacatcttcaaggtgc

SEQ ID NO: 32889 - DNA, 269 bp, Zea mays
  unsure (1)..(269): unsure at all n locations
cggacgcgtggngcggacgcgtgggtgccgatatacatccaggtgcaacacattacagggacaacaatagcatgacataagttacaggacagtccctgccaaacgccgttccattgctaagatgctacctgcatctagaggatcaatttgtcagccagggagagatcctaattgtgagtttgaaagcaaggttgtatatcggcatcttcaagatggtgacattgtacttgtcaataggcagcctactcttcacaagcccagcatgatgg

SEQ ID NO: 32890 - DNA, 262 bp, Zea mays
agctcccatatccgctcccctacctctccagcatcctcccgtctccgtcgtctcgtctccgctcctcacctcgccagccatgggcaagatcaagatcggaatcaacggtttcggaaggatcggcaggctcgtggccagggtcgccctgcagagcgaggatgtcgagctcgtcgccgtcaacgaccccttcatcaccacggattacatgacgtacatgttcaagtacgacaccgtgcacggccaatggaagcacagcgacatc

SEQ ID NO: 32891 - DNA, 265 bp, Zea mays
caagaaggaggccttctggttctaccgcttcctctccatcgtgtacgaccacgtcatcaatccgggccactggaccgaggacatgcgcgacgacgcgctggaacctgccgacctcttcagccgccacctcacggtcgtcgacgtcggcggcggcacggggttcaccacgctcggcatcgtcaagcacgtcaacccggagaacgtcacgctgctcgaccagtccccgcaccagctcgacaaggcccggcagaaggaggcctcaagg

SEQ ID NO: 32892 - DNA, 266 bp, Zea mays
gcccgttcgcacgaatcactgctctgctttcaccccccgcatcgaacctcacccccgatctgatcgaatcgaaggctgcggcggcgatgggcggtgaccatggcggtgggcacgccggcggcgacttccgccagaaggtatggagcatgacgggcggcccgtactgccgccccgtccactggcgccgtaacaccgccatcgccatgttcggcgtcttcctcatctgcatccccatcgctatgaagtccgcagagctcgagcaacgc

SEQ ID NO: 32893 - DNA, 331 bp, Zea mays
ggacgcgtggttttttttttttttttttgactcgtcgctgccatttcatatatccaagtactcataaatggataactatttgtttgagttgtgtgtttccaaccaaaataaatgctgtaagcaaacattttcggaccatttaagcagattacaaacgccagttctctcactaagactaatagcgctgctgatgagtctcacatatataagccctccggcacgccttctttcttcttgaacataaccttttctttggccttcttgaagtctgcatgcgtcaccttcatccgccgctctctcaaagcaagcaagccagcttcagtacaaatgg

SEQ ID NO: 32894 - DNA, 291 bp, Zea mays
gccgtccgccttgcccttcacgaatgcttggtcctcctccttgtatctccactccccccttcacagatccgttcctccagctagggttagcgttcctctgcagcgatggcgatcaagcggactaaggcggagaagaagatcgcgtacgacaagaagctgtgcagcctgctcgatgagtacaccaaggtgctcatcgccctggccgacaacgtggttccaagcagctccaggacatccgcggggcctcagggcgactcgtggtgctcaggggaagaaccgctgtcggggttt

SEQ ID NO: 32895 - DNA, 297 bp, Zea mays
tgcattttacaggcttagtaacaccagggagcaaatccagtcatatgtctttgatgtcatcagggcaagtgttccgaagatgaacttggatgatgcctttgagcagaagaatgaaatcgccaaagctgtagaaaatgaacttgaaaaggcaatgtctatgtatggatacgagattgtgcagactctgattgttgatattgagcctgatgagcatgtgaagagagctatgaatgagatcaatgcagctgctaggctgaggttggctgccagcgatatagctgaggcagagaaaatact

SEQ ID NO: 32896 - DNA, 325 bp, Zea mays
gaaaatctttggctgggattttgccagcaattgatgtcataggcaagaatgctattgtggggatattttacttcgttggattcggcttgttctgccttgaatcacttatgagtatcggtgtcattcagcaagtatacatgtatttccgtggaagtggaaaagctgcagaggttaaacgtgaggcagcacgtatcgtctaagttcagccttctgatgaacatctttttgtaaggtctggttacagccagtcgatggatcgaagggaacgagatgtgccgattgagccacgggacggtgtcttgtacatcactgcagtacgtggatt

SEQ ID NO: 32897 - DNA, 290 bp, Zea mays
ctgacgctgtggcagatctgatgtccctggcgaccgtgaagcagcttcaatcgtcggcatggcgcgcggaacgcatagtggggctgggtacaagaatgcctgtcaaagcacttattgctgcagaatacagtgggatcaaggttgagttgaccaaggattttgagatgggtgtctccaacaagacccctgagtgtcttaagatgaacccccttgggaaggttcctgttctggagactcctgatggccctgtgtttgagagtaatgctatcgcacgctatgttgctcgcttt

SEQ ID NO: 32898 - DNA, 328 bp, Zea mays
gcagagaaccctagctagagtttggcgagtggtgcggaggcgcggctgctcctgctcgtcgcgacgtcgaatttcagcgccgcccgcgcgatccttggtctcttcgcccgtgaggagaggcgcgacaatggctgggaaaggcgggccgaccaacctggagaaggagcagatgtttgggatggcggagaaggagatggagtacagggttgatcttttcaacaggcttacaaagacctgttttgagaagtgcgttgaaaaaaggtataaagaagctgagctcaatatgggtgagaacagttgcattgatcgatgtgtttcacagtattgg

SEQ ID NO: 32899 - DNA, 252 bp, Zea mays
cgagacgcgtgggccagacctctttcagcgagcctcgcctgctcatccttactgacccaaggactgaccatcacgccaatcaaggagtctgctctggggaacatcccgaccattgccttctgcgacactgactctcccatgcgatatgtcgatatcggcatcccagccaacaacaaggggaggaacagcattggatgcctgttctggcttttggccgagatggttctgcagatgaggggcactatcctccct

SEQ ID NO: 32900 - DNA, 259 bp, Zea mays
ggacgctggttcctctacaagacacatccagcgaatgtcgaagcctccgccgagcatcgatcatgtcggcctactgcgggaagtacgcggattagctcatcaagaatgctgcctacatcgggacccctggcaagggtatccttgctgctgatgattcgactggcaccattggcgagcgcctttccagcatcaatggcgagaacgttgatgagaatcgtcgggctctccgtgagctccggatctgctgccctggttgcct

SEQ ID NO: 32901 - DNA, 309 bp, Zea mays
  unsure (1)..(309): unsure at all n locations
cccacgcgtccgcccttgtattcacaaatgggaatgcaattcctagcactaaagttcttaccttctttaaatccagtacatttgaagttgatgttttgtatgtcgacccaaacggcttacaaattccacaaaaaataagcacatacacaattggctctttccaaacctccgaaggagagaaggccaaactgaaagtgaaagtgcgtctcaacatccatgggaccgttacagttgattcagcaataatgctggaggatgatgtggaagttccagtttcatctgcanatgaagctccaaatgatactatga

SEQ ID NO: 32902 - DNA, 321 bp, Zea mays
cggacgcgtggggagccgcatcgcctactggcgcaactccctcgtcgtccgcgtgctcaccatgctccgggtaccgcccaagggcgtctccgaggtgcacgagatgctctacgagaccgcgcacacctcacccgcagcggcgagaccggcatcttcacgcccatgcacatggtgctcctccgcaagcccgccgccgccgcctccaccgaggaggccaactagtgtaagactacacaccgccaccaatcagttactactcgcccaccgcaatggggagaaaatgtgggaggaggaaaaagatgcaagcagcagcagcaccag

SEQ ID NO: 32903 - DNA, 311 bp, Zea mays
cggacgcgtaggcggacgcgtgggcgccggcgtgctcgtgatctcaagccaaggcgtgcctccgctcgggtcacccgtcgctccgcgcgatcatttcgaggaggaagaccagggagcccaaggaggagaacgtcacccttggacccactgtccgtgaaggagagtatgtctttggtgtcgctcacatctttgcatccttcaatgacaccttcattcatatcactgatttgtctgggagggaaactctggttcggatcaccggtggcatgaaagttgaggctgaccgtgacgagtcgtcagcttacgctgct

SEQ ID NO: 32904 - DNA, 256 bp, Zea mays
ctaaaagaaaaaaatacagtcgcatctcgcctccagcagggtgagttcgcctcggcagggtgtggcataccatggagagctcgtcgccgtcagtgccgttcccgctgctgcaggcgccggtcgagagcacctaccgcgcctgcaccaccccctaccgtttcccctccgacaacccgcgcaaggccacccctgtcgagatccaatggattgacctctttctcagatctgtcccgtccttaaaagaggggcggagacg

SEQ ID NO: 32905 - DNA, 257 bp, Zea mays
accggtccaacactttcacgctcatgcgctcagctctagcaatggctgcctccaccatggcgatctcctccacggcgatggccggtacccccatcaaggtgggctccttcggcgagggccgcatcaccatgcgcaagaccgtgggcaagcccaaggtggcggcgtccggcagcccctggtacggccccgaccgcgtcaagtacctcggccccttctccggcgagcccccgagctacctcaccggcgagttccccggc

SEQ ID NO: 32906 - DNA, 227 bp, Zea mays
agcaaggccacacacacacacacaccactagtaggctagcctagccttttagtcgtcgaggatgagcaagaagggcgcgcacgcaagcaggcaagcaagaagagagccgatcgaccgagagctagcacgcgatggcgaggtcttccaagatgatggtggcggcactctgctggccttggccctggccgtgtcgaccgccgaggcgaggagcatcaagaccacgacga

SEQ ID NO: 32907 - DNA, 288 bp, Zea mays
cgtacctgggtcgggctggacaaggccaggatgcgcgccacccgccacgtcctctccgagtacggcacacatgtccagcgcctgcgtcctcttcatcctcgacgagatgcgcaacgctccgccgaggacggacaggccaccacgggcgagggcctcgactggggcgtcctcttcggcttcggcccgggactcaccgtcgagaccgtcgtgctccacagcgtccccatcaccaccggagcggccaccgcctgattcatcatcaacgatccaattcgtcgtcgtctcgtt

SEQ ID NO: 32908 - DNA, 214 bp, Zea mays
ctcaaggagaggaaggggtcgagctcggtggccatcagcaagtacgtcgaggggaagcacggcggcaagctccccaccaacttccgcaagcagctcaccgtgcagctgaagaagctcgctgccgccggcaagctgacgagggtgaagaactccttcaagctgccggccaccgacgccaagcccaaggccgccaagcccaaggcacccaaggccg

SEQ ID NO: 32909 - DNA, 232 bp, Zea mays
cccacgcgtccggtcatccacactaacgaacgaactgaggtcgacgacgactgatcgagcagcgacgatggcggctgtgctgaacagcaggaagacgccgcaggtggttgccgtgctggtggcggcggcgctgctggcgtcgtccgcttcggcggcgatcacctgcgggcaggtggggtcgtcgctggctccgtgcatcccgtacgcgacgtggagggccagcgcgctcccc

SEQ ID NO: 32910 - DNA, 300 bp, Zea mays
cttcatcaccaccattgggattgacttcaaaataagaacagttgagcttgatggtaagcgcataaagttacagatatgggatactgctggtcaagaacgttttcgaactattacaaccgcctactacaggggtgcaatgggaattttgcttgtctatgatgttactgatgagtcatctttcaataatataagaaactggataaggaacattgagcaacatgcttccgacaatgtgaataaaattttggtaggcaacaaagctgacatggatgaaagcaaacgcgctgtaccgacttcaaa

SEQ ID NO: 32911 - DNA, 280 bp, Zea mays
agacctccttcaccttcgatttcacaacgggcagagcttcggtggacgggtccttcccatacggcctgcggcgtgcgcacggcgcgctgaacgtgttcgcgtggggagtcctgctgcccatcggcgccatcctggcgcgctacttccggcggatggacccgctctggttctacctccacgtgggcgtccagctcgccggcttcatcatcggcctggccggcgtcgtcgccggggtggcgctgtacaacaagatccaggccgacatccccgcgcacagggg

SEQ ID NO: 32912 - DNA, 277 bp, Zea mays
atacccaaccctgagtactttgagcttgacaggcctgattttgatccaattgctgctattgggattgagatctggacaatgcaggatggcatcctgttcgacaatatcttgattactgatgatgagaaagttgccacctccattctcgagaagacctggaagcccaagtatgatgttgagaaggaaaaggagaaggctgaggaggctgctgctggtgcagatggtctttctgacttccagaagaagatttttgacgtcctgtacaagattgctgata

SEQ ID NO: 32913 - DNA, 243 bp, Zea mays
catccccatccgcacctctctccatctccctgctcctccgccttcttcttgatccagccaagccagggatcgccatgtcggactcggaggagcaccacttcgaatcgaaggccgacgccggagcgtccaagatctacccgcagcaggctggcaccgtccgtaagaacggcttcatcgtcatcaagaaccgcccctgcaaggttgtggaggtttctacctcaaagactggtaagcatggtcatg

SEQ ID NO: 32914 - DNA, 189 bp, Zea mays
tggcttcaatggagcctttgctgtacgctgctcatgtggatatggtaatagcaggtcatgtccatgcttatgaacgtgcggacgagtctacaattccagacctgatccttgtggcgctgtccacataactatcggcgacggtgggaaccgtgaaggcttggcccgcaggtaccgtaacccgaagccagc

SEQ ID NO: 32915 - DNA, 282 bp, Zea mays
cccacgcgtccgcccacgcgtccgcccacgcgtccgcggacgcgtggtgggtgagaggcgtaaagctcttcttcaggacattgccattgttacaggtgctgaatatcaatccaaagatcttggtctactagttgaggatacaacagtggagcagcttggcatagctcggaaagttacaatctcaagttcctcgacgaccattatagcagatgctgctagcaaagacgatatccaggccagaatcgcgcagctgaagagagagctttctcagacggactcgac

SEQ ID NO: 32916 - DNA, 279 bp, Zea mays
caacgagccaacagctgcagctatcgcctatggtcttgacaagaaggctaccagtgtcggtgagaagaatgtcctcatctttgatcttggaggtggtacctttgatgtctccctcctcaccattgaggaaggaatctttgaggtcaaggccacagctggtgacacccatcttggtggtgaggactttgacaacaggatggtcaaccacttcgtccaggagttcaagaggaagaacaagaaggatatcactggcaaccccaggggctctccggagctgag

SEQ ID NO: 32917 - DNA, 278 bp, Zea mays
ggagatgaagtggttccgcggcctgctcgacctactctgccccggcaacctcgcaggttgctcggatatgatgaaccaatctctcttcttagttggagaaatcgggggcaatgactacaacggacctcttctttctggagttcccttcgaggaaattcgcgccatcactccgagtgttgttgcgaaaatttcttctacaatcagcgaattgattcagctaggagccaagactcttgtggttccaggaaaccttcctattggatgtgtcccaaaatatc

SEQ ID NO: 32918 - DNA, 203 bp, Zea mays
cccacgcgtccgcccacgcgtccgcggacgcgtgggtgggttggcttctcctccccctccggttcgggttcaggttcgtgaggttctccggggttaggtttcgtgggtgaacggattgagatggcggcgtcggatgttgagtaccgctgcttcgtcggcagcctcgcctgggccacggacgaccactctctccacaacgcctt

SEQ ID NO: 32919 - DNA, 277 bp, Zea mays
gacaagagcaaggaaatgattaaagcagagactgaatctggtgatgtcggtcctcttgttactgaggcagatattcaacatattgtctcctcttggactggaattcctgtggagaaagtgtcgtctgatgagtctgaccgtctcctaaagatggaagagacactgcatacacgtatcattggccaggacgaggctgtcaaagctattagccgtgctatccgccgtgctcgtgttggcctgaagaatccaaataggccaattgccagcttcatattct

SEQ ID NO: 32920 - DNA, 276 bp, Zea mays
  unsure (1)..(276): unsure at all n locations
cggacgcgtggngcggacgcgtggggtgatgacaactccatggtcgtttccaccatgcctggaacacttggagacatggcaccagagtatggatctcttggaaaggcatcgcgcaagagtgatgtgttcagctttggaatcatgctttttgaagtcttcactgggaagaggcccacagatacgatgtttgagggagaactgagcattaggcagtgggttcaacaagcatttcaatctaagcttgacactgtcgtggacacacactgctgcaggatc

SEQ ID NO: 32921 - DNA, 275 bp, Zea mays
gacgcaattgacatcccctcgcctaccccagctctacccgcgacgaagcatcaccaggaaggatgacgtgctcaatggatctcccggccaagggcgggttcagcttcgacctgtgccgccgcaacagtatgctggagaagaacgggctcaaactcccgggattcaggaagaccggaacaaccatcgtcggcctcgtctttcaggatggggttgttcttggggcagacacaagagcaactgaggggcctatagttgctgataagaattgtgagaag

SEQ ID NO: 32922 - DNA, 318 bp, Zea mays
cggaccgtgtgcgcgacgcgtgggttgacaatgggctcaatacaatggggcttgcaattgacagccctaccataacgtcataaatgtggttgtggtagatagacgacctttcctgctgcattgcggtatcatccttgaataaagatcatagttagttataaatatgagaggtaagggcaggaaagggggaaaattatgaactggtcttgtgcgctttctttgctggagaggaacattagagcgatttccagaatgatgggatgctattatgtgatttcatatgattcagaagcagtacaataactccctagatgagct

SEQ ID NO: 32923 - DNA, 325 bp, Zea mays
gcgcatcgcccgccgcgacctcatcgatcaccttcagctttcaatcatggcggacgtcgatgtcgaaccggagttgccgccggagctcccaagaagaggacgttccgcaagtacagctaccgcggcgtcgacctagatgcgcttctcgacatgtccacggacgaccttgtccagcttttccccgcgcgcgccaggagaaggttccagaggggtctgaagaggaatcccatggcgctcatcaagaagctgcgcaaggcgacaaaggatgctcctgctggtgagtagcccgaaccagtcgtgacacatctccgtaacatgatcattg

SEQ ID NO: 32924 - DNA, 314 bp, Zea mays
acccacgcgtccggaagatcgtcgacccagacaccagcgcgtcgctgggacggaaccagccaggcgagatatgcatccgcggcgaacaaatcatgaaaggttatctgaatgatccagaggcgacaaagaacaccattgataaggacggatggctgcacaccggggacattggttatgtggacgatgacgacgagatcttcatcgttgacaggctgaaggagataatcaaatacaagggcttccaagtacctcctgcggacttgaagcccttctcatcacacatcctgaaatcaaggatgccgctgttgtctcga

SEQ ID NO: 32925 - DNA, 308 bp, Zea mays
gaaaagggtttcaaaatgagtaaatcaattggtaatgtagtggacccagagaaaatcattgttggtggcaaaaaccatagggaagaacctggctatggagcagatgttctccgtctatgggtttctagtgttgattacactacagatgtgttgattggcccacaaatcttgcgccagatgtctgacatgtatagaaaactacgaggcacgatgcgatttcttttgtcgaatctccatgattggaagccggataattctgtgccgtacaatgatctgccaaaaatcgacaagtatgcacttttccattt

SEQ ID NO: 32926 - DNA, 308 bp, Zea mays
caaatccccaaagcctccgacccccttcctctctccctccgccgccgctgcgcacgagggaacaagcgacatgggcgtctacacctttgtgtgccgcaacaacggcggcgagtggaccgccaagcagcactccggcgagatcgaggcttccgccgctaccccatacgagctgcagcgccgcctcgtcgctgccgcctccgcggccgactctgcctacggcgtccagtcgtccttctccatggtcacccccagctccgccgtgttccaggtgatcgtcggtgctgtcggtggtggtgcaatgatggtga

SEQ ID NO: 32927 - DNA, 297 bp, Zea mays
ggacctggtctatagcaaccggtccagcactttcacgctcagctccagcaatggctgcctccaccatggcgatctcctccacggcgatggccggcacccccatcaaggtgggctccttcggcgagggccgcatcaccatgcgcaagaccgtgggcaatcccaaggtggcggcgtccggcagcccctggtacggccccgaccgcgtcaagtacctcggccccttctccggcgagccccggatctacctcaccggcgagttccccggctactacggctgggacaccgccgggctgtccg

SEQ ID NO: 32928 - DNA, 310 bp, Zea mays
cccacgcgtccgggcgtcaccgccccaaatctagcaaacggaaatcccatctcgccgccgccgcgatgtctcgccgctatgacagtcgcacgacgatcttctcgccggaggggcgtctctaccaggtggagtacgcgatggaggcgatcggcaacgcgggtcagccctcgggatcctggcggccgacggcgtagtcctggtcggcgagaagaaggtgacctccaagctcctccagacctcccgctccgccgagaagatgtacaagatcgactcccacctggcgtgcgctgtggcagggatcatgtccgac

SEQ ID NO: 32929 - DNA, 204 bp, Zea mays
ggaggatcacctgggatttcaggaggttgacggaggaggaagcagattggggcagcaagctgcttttcttgccggctgcaaagaacatgtcgatgctcgtggtggagtcgagcccgtggaattcaaatgattttggaataccatatcctacgtacttccacccggccaaggacgctgaggttttcctttggcaggataggatga

SEQ ID NO: 32930 - DNA, 293 bp, Zea mays
gcgaggtcgtgcatgccgacctcaagtacgagcacgggtggcccaagatgcagacggtgccgtagctcgtgaaggcctgcaccaccatcatctggatcgcgtctgcgctacgcgccgccgtcaacttcgggcagtacccgtactgcgggtaccacccgaaccggccggcctttagccggcggcccatgccggtgccgggctccgacgcgtacaaggagctggagaagaacccggagaatttcttcgtgcgctccatcaccgcccagttccatgccgtcgtcggcatctcgctg

SEQ ID NO: 32931 - DNA, 301 bp, Zea mays
ggaacatggtccggctccaacttggcggcaaccggctcaccggcgcgatacctgacgaactaggcaatctgacaaggctcagcatgcttgacctttcgctcaacaagctctccagcgacatcccggcagagctctccaactgcgttcagctcgcccatctgaagctcgacgggaacagcctgacgggcaccgccctgcatggctcggcagcctcaggtcgctcggcgagctcgacctctcgtggaaccgttgactggaggcatcccgccgagctaggcaactgctcggacctgctgaagct

SEQ ID NO: 32932 - DNA, 304 bp, Zea mays
cccacgcgtccgcgcacgcgtccgcacacgcgtccgcggactctgggtgtaagagattgtgaaggaattctcgtcctacctcaagaaagttgggtacaaccctgataagattgcctttgagtaattgggagtgattgcatccatcttgttgcatcggcaagtcatctgcttcgctccaaggttggacgcatagatagcatggtcacatgtctggtcatccttggggataccagcctcaaaaccgacagttgtgtagtcaatggtaatgacagcgcagtcagcctgggaggtaccagtggtcatg

SEQ ID NO: 32933 - DNA, 302 bp, Zea mays
gacctttccgaggaggacctgattgagaagtttgccactggtgtctccatggttgcctccctgtcactggcgatctcgtacccgacccttgctgctgtgccccacatgttcatcaatgggtacaagaatgtgcttgctgttgctgtcgagacagactactcgtacccacatgctgacaagatcaaggagtacctcaaggacccaagcaagtttgctgttgccgccccggttgctgctggggactctggcgctgcagctgctcccaaggaagaagagaaggctgcggacctgaagaggagtcg

SEQ ID NO: 32934 - DNA, 305 bp, Zea mays
cacacgcgtccgcggacgcgtgggctagctgagagcctccagctcagtgtgctagctagctagagcaagagaagggctagtaacgaggagatcgatcgagatggctttcctcaacatggagcagcagacctgggccttcacctttggtatcctaggtaacatagtctcactgatggtgtttctttcgccgctgccgacgttctaccgcgtgtaccgcaacaagtcgacggaggggttccagtcgacgccgtacgtggtgaccctcttcagctgcatgctgtggatcttgtacgccctgctcaagc

SEQ ID NO: 32935 - DNA, 306 bp, Zea mays
cttgaagatcatttgcacgatatacctcttgataaagaggccttggactggaacaccaggatgaaaattgcagcaggtgctgccaaaggactggagtacctacacgacaaagctaatccaccagttatttatagggatttcaagtcgtcgaacattctgttggatgaaagtttccacccgaagctgtctgactttggacttgccaagttgggtccagttggcgacaaatcacacgtctcaacacgtgtaatgggtacatatggttattgtgccccagaatatgctatgacagggcagctgacagtg

SEQ ID NO: 32936 - DNA, 305 bp, Zea mays
ggaccgtggcgcggtctgctcgttcgatctgtgcagcagatctgaggtcccgggcgaccgtgaagcagattcaatcgtcggcatggcgctcgtattgcatagtggggctggaaacaagaatgccttcaaagcacttaatgctgcagaatacagtgggatcaaggttgagttgaccaaggattttgagatgggtgtctccaacaagacccctgagtttcttaagatgaacccccttgggaaggttcctgttctggagactcctgatggccctgtttttgagagtaatgctatcgcacgctatgttg

SEQ ID NO: 32937 - DNA, 206 bp, Zea mays
caatgggatcctgcttccagcttgtctttgcaccaatcgatgagcttttccctgatgatgctccattggtatcttcaggctttcgcgtgatcccgttggacataaaaacagacggaccaccctctggaagaacgttggatttggcctctagccttgaagttggcgcaaccacgcaacaagtggcaggggatggatctcaggacgtt

SEQ ID NO: 32938 - DNA, 224 bp, Zea mays
cccacgcgtccgctctacccagcacgacgagacagtcaccaacgacgagattgctgctgacctgaaggagcacgtcatcaagccagtcatccccgagcagtacctcgacgagaagacaatcttccacctcaacccgtctggccgcttcgtcatcggcggacctcacggcgacgctggcctcactgtccggaagatcatcatcgacacctacggtggctggggag

SEQ ID NO: 32939 - DNA, 278 bp, Zea mays
ccgatctgccacctcgccgtctcgcacgttcctttccccaactccccagcgcctctccgcgccgcgatccagatccaggttgttcagcatgggtctggtgaaggaaggcgtcgacatggaggagggaaccctagagatcggcatggagtacaggtctgtatctggtgtggccgggcctctggttatcttggataaagtaaagggcccaaagtaccaagaaattgtaaacatccgacttggagatggcaccactcgccgtggtcaagtccttgaagttg

SEQ ID NO: 32940 - DNA, 270 bp, Zea mays
caaaactacaggtcagggaagtaccgagaggctctagagcatggtaatgtcgtttacgagaagaatccacgtcgaactgataacctcctcctccttggagctatatactatcagattcgtaattatgacatgtgcattgcaaaaaacgaggaggctcttgccatagatccacattttgctgaatgctacggcaatatggcaaatgcttggaaggagaaaggtgatattgatcttgcaattcgttactatcttactgctattcagctgcga

SEQ ID NO: 32941 - DNA, 278 bp, Zea mays
aggccaagggtctaagaaaggagttctgatacttagcgagtttgctggggcagcacaatcacttggagctggtgccattctagtaaacccttggaatattacagaagttgcagactcaatacggcatgctttaacgatgccatccgatgagagagagaaacgacacagacacaactacgcacatgtcacaactcacacggctcaagattgggctgaaacttttgtatttgagctaaatgacacggttgctgaagcactactgaggacaagacaagttc

SEQ ID NO: 32942 - DNA, 278 bp, Zea mays
tatgagtaagggagagagacactcgtcccccgtaccgtggcggaggcagacgtgactggttacaggaatgttgagtttgctgatgactctgagaggccaccacggagaaactatgagcgccacagcgggactggccatggctatgagatgaagcgtgatggtgcagggcgagggaactggggtatgccactgatgaacttattgcccaggatgcagaggactctccgaagatggaggaggctgctcctgttgctgagaaacaaggtgagcagaatgat

SEQ ID NO: 32943 - DNA, 276 bp, Zea mays
atctgagtcaaagtgctatgagtgtggtgagactgggcactttgcacgtgaatgtcgtctgcgcattggctctggaggtctaggcagtggaagacgtcgcagcaggagcaggagccgcagtcgcagccctagataccgcatgagtccgagctagaatagaaggagctatagccctcgttatcgttctccaaggcgccgtactccttcaccggctcgtggacgcagctatagcaggtcgccatagtacaactgtgacaaatatgcatctccctcgtt

SEQ ID NO: 32944 - DNA, 276 bp, Zea mays
ggaaggcgaccgccatgggggactccagcggctccgtgtcggtcgacgtcgaacggatcttcttcggcggcaaggagcatcgagtaagaacgaggcatggctctctttcggtttctgtgtatggagacgaggacaagcccgtgctcgtaatttatccggatgtagccttaaatcacatgtcgtgcttccaaggattgttcttctgtccggaggctgcgtccctgttgcttcacagtttctgcgtgtaccacatcacacctcaaggacacgagttgg

SEQ ID NO: 32945 - DNA, 272 bp, Zea mays
gccggtcgctaaccaaaagggcccagataattatctagagttcgaattcttctagtttgctgatggcacttgctttgggcgacactcgagctcgaggggctttggtatgtccggagggctcgcgcaccttatgagagcccagttcacgctctcgaagaaagggtgctgccccacgcgtcctgtttctggttcatcagcaaaggatgttgctaagcagctcaaggaacaacaaatggtgatgccaggacatcgtgagtcaaacttgcagaagg

SEQ ID NO: 32946 - DNA, 271 bp, Zea mays
actcgaccagccctctccgctcttgtctccgatggcggctcgcgtcctcgcggccctcgcccttgccctcgccctcgccctcgtcgccgtacccgctcccacgcgggcgtccaacgacgagggggacgcgctctacgcgctgcggcagttgctgtcggaccccaacggcgtgctgcagtgctggcatcccacgctcgtcaccccctgcacctggttccacatctcctgcgaccaggtcagccgcgtcgtccgcctggacttgggcaactcc

SEQ ID NO: 32947 - DNA, 260 bp, Zea mays
ggaggcccttcctggtgacaacgttggcttcaatgtgaagaacgttgctgtgaagcatctcaaacgtgggtacgtggcctccaactctaaggatgaccctgccaaggaggctgctagcttcacctcccaagtcatcatcatgaaccaccctgggcagattggcaatggctatgccccagtgctggactgccacacctcccacattgctgtcaagtttgctgagctcataaccaagatcgataggcggtctggcaaggagc

SEQ ID NO: 32948 - DNA, 318 bp, Zea mays
ctgactgacaagttatgggcaaccaaaaggttttgcttacgtggaatttgttgaagttgaagctgttcaggaagctatcaagttgaacgagtcagagttgcacggtcgccaactcaaggtggcaccgaagaggactaacgttcctgggatgaagcaaccccgcggtcgaggtttcaatccgtaccatggccacccctacatgaggccgtatggttagtccttatggttatgggagattccccagattccgccgcccgcgaagaccttatttttgaagctcggttcccatttggcagaacatgggcgataatcggccgc

SEQ ID NO: 32949 - DNA, 318 bp, Zea mays
gcggccaagaaccaggtcgccatgaaccccatcaacaccgtctttgatgccaagcgtctcattggcaggaggtttagtgatgcctctgtccagagtgatattaagctgtggcccttcaaggtcattccagggcccggtgagaagccaatgatagttgttcagcacaagggggatgagaaacagtttgcagccgaagagatctcctctatggttctcatcaagatgcgtgagatcgctgaagcttaccttggcagcacgatcaagaatgctgttgtcacggtccctgcctatttcaacgactcgcagaggcaggccaca

SEQ ID NO: 32950 - DNA, 277 bp, Zea mays
ggtagctgcaggacggtccgagttccgggtcgctcacgcgtccggggcgtggtttccccggcggctacggctgggacgccgcggggctgtccgcacacccggatactttcgccaaggaccgctagctggaggttatccgctgccgctgggccatgctgggcgcgcgcgggtgcgtgttcccggagctgctcgcccgcaactgcgtcaagttcggcgaggccgtgtggttcaaggcctggtcccagatcttcagcgagggcgggcttgactacctcgg

SEQ ID NO: 32951 - DNA, 318 bp, Zea mays
cccacgcgtccgcacaagcacaagcgcactctagcaatggcttctgaggttgtccgccctagcgacgccgagctactaaaggcacaagccgacatatggcggctcagcctctcctacctcacgcccctgtcactgaggtgcgccgtggagcttggcatccccacggcgatctaccgccatggcggggctgcctcagccgctgagctggtcacggcgctgtctctcccctccactaagctgccgttcctccgccgcctgctgcggctcctcgccgcgtcgggcgtgttcaccgtcgacaagcagagcacggaggaggag

SEQ ID NO: 32952 - DNA, 319 bp, Zea mays
atcgccaagaacgccccgcccgagttccagaagaccaagctcatgacccgcctcacgtacacgctggacgagatcgagggcccgctcgaggtcggctccgacggcacgctcaagttcgaggagaaggacggcatcgactacgccgccgtcaccgtgcagctcccggggggcgagcgcgtgccgttcctcttcaccgtcaagcagctcgtcgccaccggcaagcccgagagcttcggcgggcgcttcctcgtgcccagctaccgtggctcctccttcctcgaccccaagggccgcggctgctccaccggctacgacaacg

SEQ ID NO: 32953 - DNA, 313 bp, Zea mays
  unsure (1)..(313): unsure at all n locations
cccacgcgtccggacgacctgaanggtaccgagctccgccttggtctgccggggtccggttcgccggaccgccgtgttgtggctgccaccgcaaccaccctggacctgctcccggctaagggcgccaagcgcgggttttctgacgaggcgccgacgccatcgcccggtgcagcttccgggaagggaaagaaggtagcggaagaggaggacgacaagaaggttgcagcgacgccgcagccggtcgcaaaagctcaggtggtgggatggccaccaatccgaagctaccgcaagaacacgatgtctaccacccagc

SEQ ID NO: 32954 - DNA, 309 bp, Zea mays
gctagcatcgatgactggtggagaaacgagcagttttgggtcattggaggcgtgtcttcacatctctttgctgtgttccagggactcctcaaggtcatagctggtgtagacacgagcttcactgtgacatccaagggtggagacgacgaggagttctcagagctgtacacattcaaatggacgacccttctgatacctccgacaaccctgctcctactgaacttcattggagtggtagctggcatctccaatgcgatcaacaacggatatgaatcatggggccccctgttcgggaagctcttctttgca

SEQ ID NO: 32955 - DNA, 310 bp, Zea mays
cttgaggtgattgagcatgtcgccaatcctttggagttctgtgaatccctctcggctttgacaattcctaatggtgccactgtgatttccacaatcaaccgatcaatgcgagcatatgccactgcaatagttgctgctgagtatatcctcagatggcttcctagaggcacacatgagtggtccaaactggttaccccggaggagcttgtcctaatgctgcaaaaggcttccgtctccgtcgaagagatggcagggttcgtttacaatccgttgagtggagaatggtccctgtcagatgatatcagtgtga

SEQ ID NO: 32956 - DNA, 314 bp, Zea mays
ggtgagttgaagcttccaagtcgctaccttgtttccccaccagagatagatagaacatctggggagtacttggtgaagaatggcatccgcacctttgcttgcagtgagacagtgaaatttggccatgtcacatttttctggaacggcaaccgctcgggatactttgatgaaactaaggaagagtatgtagaagttcctagtgacagtggtattacattcaatgttgcacccaagatgaaggcgcttcaaattgctgagaaagctagggacgctctcctaagtggaaagtttgaccaggtacgtgtcaacctgcc

SEQ ID NO: 32957 - DNA, 309 bp, Zea mays
ccacgcgtccgcgacctggctgatattgagctctcacacatgtatgttgataatgctgcgatgcactagttaggaatcctaagcagtttgacacaattgtcacaaacaatatttttggtgacatattatctgatgaagcatcaatgattacgggaagtattggaatgctcccatctgccagtgttggtgaatcgggacctggtctttttgaacctattcatggctctgcccctgatattgctggacaggacaaggccaatccattggctacaattcttagtgcagcgatgctattgagatatggcctag

SEQ ID NO: 32958 - DNA, 305 bp, Zea mays
gccaagaaccgcgagctggaggtgatccactgccgctgggccatgctgggcgcgctcgggtgcgtgttcccggagctgctcgcccgcaacggcgtcaagttcggcgaggccgtgtggttcaaggccgggtcccagatcttcagcgagggcgggcttgactacctcggcaacccgagcctgatccacgcgcagagcatcctggccatctgggcgtgccaggtggtgctcatgggcgccgtcgaggggtaccgcatcgccggtggcccgctcggggaggtggtcgacccgctgtaccccggcggcac

SEQ ID NO: 32959 - DNA, 302 bp, Zea mays
ggacgtgggtggcaatctcattcatatcgctgcttgccatgtctgctgtattagctacctgtttctttgtgagaaggcatcgaataaggagagaccaccctagaatcccagaagctagagagttccatggaatgagcagtcagttagttaaggctatgccaagtcttattttcacgaaagtgcaagaagataactgcacatcatcgatgtgtgccatttgtttggaagactacagtgtcggagaaaagctcagagtgctgccttgtcgtcacaagttccatgcagcttgtgtggacttgtgg

SEQ ID NO: 32960 - DNA, 308 bp, Zea mays
cgagaagaccagggagcccaaggaggagaacgtcacccttggacccactgtccgtgaaggagactatgtctttggtgttgctcacatctttgcatccttcaatgacaccttcattcatatcactgatttgtctgggagggaaactctggttcggatcaccggtggcatgaaggtgaaggctgaccgtgacgagtcgtcaccttacgctgctatgcttgctgctcaagatgtcgcacagcgctgcaaggagcttggcattactgcactgcacattaagcttcgtgccaccggaggcaacaagaccaaga

SEQ ID NO: 32961 - DNA, 298 bp, Zea mays
gtggaggcggactggccaagggcggcaaggccgagttcaacaagctcaacgacgtcacctccttcgacttcatcggcgaggcctacttcggcgtgcgcccctcggcgaccgagctcggcaagggcgggccgagcaaggcggccaagtggctcatctggcagctccacccgctggtcacgctcggcctccccatggtcctggaggagccgctgctccacacgttccacctcccgcctttcctcgtcaagggcgactacagggcgctgtacaagtagttctccacggtggcgaacaggcg

SEQ ID NO: 32962 - DNA, 300 bp, Zea mays
cccacgcgtccgcccacgcgtccgcccacgcgtccgggctatgacacagggtcaaatcctcctcaaaggtgcaccagatgcgctgctggtgggaattcagcaaccgaaccttacatagttgctcataattttctcttggcacatgctactgcagttgcaagataccgtacgaaatatcaggctgctcagaagggtaaggtcggaatagtcctggacttcaactggtacgaggctcttacaaactcacctgatgaccaagcagcagcccaaagagccagggacttccacattggctggttt

SEQ ID NO: 32963 - DNA, 167 bp, Zea mays
ggtcgttcaacgacgtcttcgacgccgacctggaggatgccatcaaggtgtaccagcgcaacttcggcctgggcatcacgggcgtgatggacgcgtccacggtggcgcagatgatggctccgctgtgcggcgtcgccgacatcatcaacggcacgtccaccatgggc

SEQ ID NO: 32964 - DNA, 300 bp, Zea mays
ctgaaactggaagccatccaaaaggaggttgcgcagtataatgctggtgaaccaacgttttcccagtgggcggcagcagccggaaccgatgagaacactctgcggagacgcctgaatcatggagtctactgcaagaacaggatggtgaaatctaacgtgcggcttgtaatctcgattgcaaaagaacacgaaggccccggatggagttctctgatcttattcaggatggaatgcaaggcctgataagaggcgcggaaaagttcgacgcttccaagggttttagattctccacctactctc

SEQ ID NO: 32965 - DNA, 298 bp, Zea mays
gaagatgatgacgagtgatggagctcctcgagacaatggaccgtgcttcatccaacaatggagcggctacacaaggccccgtggcgatcacaaaaaaggagcctatatccatgtactagaattattcagtttcactccacatcgtgatgttttatttttacttttgtcgtgctataacggatagcgctcctcgttggcgccactggcgggtggttctgcctctggtctggtgtgtttgtgtgtggtcacacttgccagccagcagaggcgcctgcttgtacctagattactgtttcca

SEQ ID NO: 32966 - DNA, 299 bp, Zea mays
gcaaccggtccagcactttcacgctcagctccagcaatggctgcctccaccatggcgatctcctccacggcgatggccggcacccccatcaaggtgggctccttcggcgagggccgcatcaccatgcgcaagaccgtgggcaagcccaaggtggcggcgtccggcagcccctggtacggccccgaccgcgtcaagtacctcggccccttctccggcgagcccccgagctacctcaccggcgagttccccggcgactacggctgggacaccgccgggctagtccgcgaccccgagacctt

SEQ ID NO: 32967 - DNA, 297 bp, Zea mays
cccacgcgtccgcccacgcgtccgcccacgcgtccgttttttttttttttttaaaaaggaaattttcactttagagatacaattccttggacctgtctcgaatgcacataatgtgaatccattacaactcaacaaacgtgcttattattttactacaccccacgcaattattactgccacacgtctaagactcatgcattcttggataggaggcggcggcggcacagtaactagctagctagacggccctaggaacaaggtagagcggctcgttcctgcgaacgatcagcccgaacg

SEQ ID NO: 32968 - DNA, 297 bp, Zea mays
gcctccgctgccggtcgccgactccgaaactccgacagtccgaccacaaggatccacagaaggatgagtgaagaggataaggctgctgcttctgctgagcagccgaagagggcccctaagctcaatgaaaggatcctctcttctctgtccaggaggtccgtagctgctcatccgtggcatgatcttgagatcggtcctgatgctcctgctgttttcaatgttgttgttgagatcacaaagggaagcaaagttaaatatgagctcgacaagaaaactggactgattaaggttgatcga

SEQ ID NO: 32969 - DNA, 220 bp, Zea mays
gcagtcaccactcccaagccagtacccacagtcctacgagcagtcgcacgcaagtgtcaagagacaaaacggtcgacatggctcgcacgcaatctgccgtagcggtcgccgtggtggccgctgtgctgctgctggcagcggcggcgacgacctcggaggccgccatcacctgcgggcaggtgagctctcgcatcgcgccctgcctctcctacgcccgcgg

SEQ ID NO: 32970 - DNA, 292 bp, Zea mays
ctgacaatccagattattcgctccgcacttttacaggtcattcagcatctgtcatgtcacttgattttcatccgaacaaagaagacatcgtttgttcgtgtgatagtgatggtgaagtgcggtgttggagcataaataatggtagttgtgtgacctgcgttagggttttcaatggaggagctactcggttaagatttcaacctcgccagggtaaatatctggcagctgcctcagaaaagggaatatccatactggatgccgagacattacaagtttgtagaactcctttgca

SEQ ID NO: 32971 - DNA, 291 bp, Zea mays
cggacgcgtggcgcacggcggcggcagccttcctccactcccatgccaccagcttcgggtacaagcagattcgcgaagaggataagagcaaattggttggcaacgtgttcagcagcgtggcttctagctacgacctcatgaacgatctcatgagtgtcggcctgcataggctgtggaaggacaggcttatttccaagctgaacccctttccggggatgaagcatctcgatgtggctggtggaacaggtgatgttgcttttcgtgtactggaaatagttaagagtgtgggtc

SEQ ID NO: 32972 - DNA, 288 bp, Zea mays
cacctccctcatacaacgccgcgcgtgccctagtggtagcaccagctgcgggcctgtggcaacagtgatggccaatgccactgtccccgagttgcagccgcaggtgcaagctgcgggtggccgcaaggtggtggacgaggtgtccggctggctgcgcgttctggacgacggcagcgtcgaccgcacgtggaccggcccacccgaggtcctcccgatgatgcagcccgtggcgccgtacgacgtgccccgcgacgggcacacgctgcacgacctcccaggggagcccaa

SEQ ID NO: 32973 - DNA, 291 bp, Zea mays
cggaccgtgggcaggttcctgctcccggtgtcagattgtgagattgctctcagcacgttgctggacgagctgcagcctgaccaatggccagtcgaggctgggaaccgtgcgatccgttgcactggtgttgcgctcagtgtagctgctgggttacttggtgcttgcatgcctggaacaggtgcaaggatcatcgcattgctaggtggtccgtgtactgagggacctggaatgattgtttcaaaagatttgtcagaaccagttagatcacataaggatcttgacaaggatgca

SEQ ID NO: 32974 - DNA, 293 bp, Zea mays
cacacgcgtccgcacacgcgtccgcccacgcgtccgcccacgcgtccgaattgatgaaccattcaaagccatgggtgttgataacacaggagatgctgtgattcacagcttggagagtcataatgtccgtcagctttatccaaagggtcccaatattgacttcaagaaggagcttaggaccctcaacagagagcttcaattgcatattttggagctggcagatatattagttgagagaccatctcaatatgctcgtagggtagaagatattacgctcatattcaagaacttac

SEQ ID NO: 32975 - DNA, 289 bp, Zea mays
tgggaacccgctgcgtcgccctgctgctcctcgcggcggtgctgctcctccaggcgctcctccccgcgtcgtcggatggcctggtgctggtcgcgctgaagaagctgcccgtctaccagaacggccgcgtcgccgcgcgcctctccgccgaggagaggcagcgcctcctcctccgcggctccaacgctctgggctcaggcggcgacgacgactccgacgtcatcgcgctcaagaactacatgaacgcgcagtactttgtggagatcggcgtcggctcgcgcagcagaag

SEQ ID NO: 32976 - DNA, 293 bp, Zea mays
atttgaactagtttagtaacactgctcatccaaatgtgctgtattgattcattctacgctctcatcaggtgattagctggattgttacggtatttctgatgcttatcaacgggtatcttatactatctttctacattactgatgtccggggtgcattgcttcgctcaagcttgtgtgttgtgttggttgtttaccttgcattcatcgtctatcttattgtgcgaaatacttcgctgtattctcgcctttgctcatcaacgtcaaagagctcgtgagcatttcaatgtcgtcat

SEQ ID NO: 32977 - DNA, 287 bp, Zea mays
cccacgcgtccggcgggccgccagaggcaatttcgccctcgattcgaccccgattcgtccgcccgcgaccgggattccctccgccaagcgcggatctgaacgctgcgctccgtgtcgccgctcgaatccgccatgaagggggccaaatccaagggcgccgccaaggccgatgccaagctggcggtgaagagcaagggggcggagaagcccgccaagggcaggaaagggaaggccggcaaggaccccaacaagcctaagagggccccagcgctttcttcgtgttcatg

SEQ ID NO: 32978 - DNA, 285 bp, Zea mays
gaagttccagtctgctgcttactccaactgcgcgaagaagccatcctgatatcccttttggcttcctcattctagtagtttaggatttcttttctgacactttgattctgaccaatctctctggcctgctgcttcctgataatcgaccagttccccagtcttgctccttgcactcctccctccatctccagcattgtgttctgattcacctgctccaatggctgttctttctgctgctgatgcttccccggtctcagctatcgggtttgagggctatgagaagcg

SEQ ID NO: 32979 - DNA, 286 bp, Zea mays
aacgaagcaggatcaggccaagctggctgcctcctctatcgacagcatcgtgaacggcagcgacgccgtcatggagccggttgttgctggcagcaacacggtagtagctgttgcccaagttgagttgcaaacaatgaacgtgcagcagcccgctgatgttgccggacccagcgagggggtggcggcgatctccaaaggggggaaggtagggccgaaccggtgcagcgcctgcaggaagagggttggacttacgggattcaactgccggtgtgggaacttgtactgc

SEQ ID NO: 32980 - DNA, 283 bp, Zea mays
ctccggcatccgcttcgagatcctcgaggccatcaccaagctgctcaacaccggggtcagcccgtgcctgccgctccggggcaccatcaccgcgtcgggcgacctggtcccgctctcctacatcgccggcctcatcacgggccgccccaacgcgcaggccgtcaccgtcgacggcaggaaggtggacgccgccgaggcgttcaagatcgccggcatcgagggcggcttcttcaagctcaaccccaaggagggcctcgccatcgtcaacggcacctccgtgggc

SEQ ID NO: 32981 - DNA, 284 bp, Zea mays
cggacgctggtgcctacctagcggtatcaatacccggctgcagctcaccaccaccaccaaccaaccaacacacccacagttcccatataggcagccatcggctacacagcctcgcctccgtaagcagagtgtgtcgttgcggaggcaggaagagagacgacggcggccatggcgacctccttccaggggacgaccaccaagtgcaccgcctgcgacaagactgtgtaccttgtggacaagctcaccgccgacaaccgcatctaccacaaggcctgcttccgctg

SEQ ID NO: 32982 - DNA, 285 bp, Zea mays
ctatagcaaccggtccagcactttcacgctcagctccagcaatggctgcctccaccatggcgatctcctccacggcgatggccggcacccccatcaaggtgggctccttcggcgagggccgcatcaccatgcgcaagaccgtgggcaagcccaaggtggcggcgtccggcagcccctggtacggccccgaccgcgtcaagtacctcggccccttctccggcgagcccccgagctacctcaccggcgagttccccggcgactacggctgggacaccgccgggctgt

SEQ ID NO: 32983 - DNA, 290 bp, Zea mays
ggcggcatcatgagctctgcagtcagtagataagccgtaacctgcgcgattctattcttgcgacggaagcaaaatctgcacgagagacagacgacgagatggccgatgcggaggacgccgccgccgcgcgccgacgggccgccataaccgactaccgcaagaagctgctcaactgcagggagctcgagtcgcgcgtcggcaccgtgagagaaagccttaaaaatgcaaagagggattttaccaagactgaagacgacttgaaatctctgcagagcgtggggccaataatt

SEQ ID NO: 32984 - DNA, 321 bp, Zea mays
gcacctcatgtggacaagaaggcagattttgattcactgagcaccaacgtaacaactgagagcaagcaacatgaagaaaagaagcctaccaacatgaatgcatttgatataatatctctatcaactggtttggacctctctggtttatttgaagaatctaacaagaagagagaatccaaattcacatctaccaacacaagctcgacaatcatatcgaagatcgaagatattgcaaagaatttgcggttgaatttgacaaaaaaggatggtggcttgttaaagatggaagcttcaagccccggaaggaaaggggaatgggta

SEQ ID NO: 32985 - DNA, 227 bp, Zea mays
cgtacgctgatgtacgtccggattccgggtcgagcacgcgtccgggactcgtggcggacgcgtgggcggccctcgtccaggcgcgcggccaccgcatcgagaccgttcccgagactgccctggttactctccgactcggcagagtccatcgagaagacctcccaggcgctcaagatcctcaagcaggtcggcgcctacgccgacgcctgagaaggccaaggactccg

SEQ ID NO: 32986 - DNA, 263 bp, Zea mays
gtacagggtgctcagccttgcacgtactatgcccaaaatggatattgcagatatggagttgcatgcaaatatgatcacccaatgggtacactaggctacagttcatctgctttacccctatctgacatgccaattgctccctaccctatgggcttctctgttgcgacgttggctccatctccatcttccccagaatatatctcaaccaaagatccatctatcaaccaagtagcatcaccagtggcggcacctgaacctgtggg

SEQ ID NO: 32987 - DNA, 333 bp, Zea mays
caaagaattccctcccctagccgccgccgccgccgctcgtctccctgagaggtgccgggaccgaggaactggccgagtactaggtagagaatcggtttttcttgtctcagcccggggtctgctgcgtctggtggtggtgaaggggagaaattcgtgagatctgttccggatcaggcgtgcgagctcgggaatcaggggtttcacacatagcttcgtcgatttgaatttgatgtactaatggagtctaagggtggcaaaaagtctagcagtagtcgtgctatgatgtataaagctccccttggctacagcattgaggacgttcgacctgccggg

SEQ ID NO: 32988 - DNA, 303 bp, Zea mays
ggagaagccgccgcaccagcaatcacagcagcccggagaacgccctggtccaacaagatgcagatcttcgtgaagacgctgacagggaagaccatcaccctcgaggtcgagagcagcgacaccatcgacaatgtcaaggccaagatccaggacaaggaagggatcccgccggaccagcagcggctgatctttgccgggaagcatctggaggatgggcgcacccttgggggatagaacctccaaggagagtcgacgctccacctcgtgcataggctccgggggagaatcattgagccctctctg

SEQ ID NO: 32989 - DNA, 322 bp, Zea mays
cggacgcgtggttcgtcaactccactcctcttggccgccgcattacctcctcttcgccgctgccgccaccactccaccgggcagccagccagccatggatgaggagtacgacgtgatcgtgcttggcacggggctcaaggagtgcatcctcagtggtctcctttccgtcgacggcctcaaggttttgcatatggacagaaacgactactatggaggagattccacctcgctcaaccttaatcagctctggaagatgtttagaggggaagacaagcccccagcacatctaggtgcaagcagagactacaatgtggacatggtg

SEQ ID NO: 32990 - DNA, 326 bp, Zea mays
ctagcagccgctcactccagccattacccgcagctagcaaacaaatggccaccgtcctgagcagcccccgcgcgccggccttctccttctccctccgcgccgcgccacgcccactaccgtggccatgacccgtggcggtggcgccacagcaggctgcgcgcgcaggccacctacaacgtgaagctcatcacgccggatggggaggtggagctgcaggtgcccgacgacgtctacatcctggactacgccgaggaggaaggcatcgacctgccctactcctgccgcgcggggtcctgctcctcctgcgccggcaaggtcgtctccgg

SEQ ID NO: 32991 - DNA, 325 bp, Zea mays
gtagtccggtacagatagtgtggtcccaagcttacaacactgtacgtaatatctttgctctggtaaacctacttcgacagccagtagatgaagatgagaaacgctcctctccttttcccccctccctgcacagcgccgctcaccgtcaccggaccacagcagcgatcgatggctgaggtacacaacgagcggcccgtggggatggtgggcggcgtccgggacgcgccggtgggccgcgagaacgacctcgaggccatcgagctcgcgcgcttcgcggtcgccgagcacaacagcaagaccaacgcgatgctggaattcgagagct

SEQ ID NO: 32992 - DNA, 327 bp, Zea mays
cggacgcgtggtatgggtgctacaaaccgaccaaacagcattgatcctgctcttcgaagatttggaaggtatgatcgggaaattgacattggagttcctgatgaagttggccgtctcgaggttctccgcattcacactaagaacatgaaactagctgaagatgttaatttggaactcatttcaaaagatacccatggatatgttggtgctgatcttgctgccctttgcactgaggctgctcttcagtgcattcgtgagaagatggacatcatagatcttgaggatgagacaatcgatgcagagatattgaactcaatggctgttaca

SEQ ID NO: 32993 - DNA, 202 bp, Zea mays
agaggttttctgggcgcggacgggaggcggcggcggctatggctgcggcggaggaggagatcgcggtgaaggagccgctggatctgatacgcctcagcctcgacgagcgcatctacgtcaagctccgatccgaccgcgagctgcgcggcaagctccatgcgtatgatcaacatttaaacatgatacttggagatgttgagga

SEQ ID NO: 32994 - DNA, 319 bp, Zea mays
gttgtggatatgaagacaaaacaggctggggaaaagatattggttggatttatggatcagtcacagaagatattcttactgggtttaagatgcactgccatggttggcggtcaatttactgcatacctaaacgggccgccttcaaaggttccgcacctctcaatctttccgatcgtcttcaccaggttcttcggtgggctcttggttcaattgaaattttcttcagcaaccactgccctctctggtatgggtatggtggtggactaaagttcctggaaaggttttcgtacattaactccatcgtatacccttggacatc

SEQ ID NO: 32995 - DNA, 226 bp, Zea mays
ggagaaccgccgtgccctccgtgagctcctattctgctgccctggtgctctccagtacatcagcggtgtgatcctcttcgaggagaccctgtaccagaagaccaaggatggcaagccttttgttgatgtcctcaaggagggaagcgtcctccctggcatcaaggttgacaagggcaccattgaggttgttggcactgataaggagaccaccacccaaggccatgac

SEQ ID NO: 32996 - DNA, 248 bp, Zea mays
cgcgcgagagacagacgcgtatacccaggcggcggttgaggaggaggagaagaagaagaagcagatggcttcctccgcgtacgcctcatggtccaagcggtggatccgtcccgaggtgtacccgctgttcgtgccgatggccgtggccctgggtatctgctcgtaccagcttgtgcgcaacatcacgggcaaccccgaggtgcgggtgaccaaggagaagaaggcggccggcgtcctggacaaccacg

SEQ ID NO: 32997 - DNA, 267 bp, Zea mays
cccacgcgtccgcgtgttcttcgcccggaagcagaaccggtacggccaatcttcaagacgcacatcctgggctgcccctgcgtgatggtgtccagcccggaggcggcgcgcttcgtgctcgtcacgcaggcccacctcttcaagcccaccttcccggcgagcaaggagcgcatgctggggccgcagcagtcttcttccagcagggcgactaccacgcccacctccgccgcctcgtctcccgggctttctccccgaggcatccggggt

SEQ ID NO: 32998 - DNA, 285 bp, Zea mays
gctcggtgccgagcactcgcagcggctagagtcgtacttccagtcgattcctggccttcagatggttgcctgctccactccttacaacgcaaagggcctgatgaaggcggccataaggagcgagaaccccgtggtgctgtttgagcacgtcctcttgtacaacctgaaggagaaaatccccgacgaggagtacatctgctgcctggaggaggcggagatggtgcggccaggtgagcacgtgaccatcctcacgtactcccgcatgaggtaccacgtgatgcaggc

SEQ ID NO: 32999 - DNA, 187 bp, Zea mays
ggagatgccactggttctgcgcaacaaggcgccgaggtggcacgagcagctgcagtgctggtgcctcaactttcgcgggcgcgtcaccgtggcctcggtcaagaacttccagctgatagctcctgcaaagacgcagccgcagccgcagcctccggccccccgccgccggcgccgccgtcgtcgtcgt

SEQ ID NO: 33000 - DNA, 230 bp, Zea mays
cccctccgagcctcagttcgcatccacgcgcgccgccgccgcctcgccggtcgacgctcaccgcgcaccatggcggaacagactgagaaggctttcctcaagcagccaaaggttttcctcagctcaaagaaatctggcaagggtaagaagcctggcaagggcggcaaccgattctggaagagcattggccttggcttcaagactcccagggaagcaatcgaagggaccta

SEQ ID NO: 33001 - DNA, 280 bp, Zea mays
cacacgcgtccgcggacggtgggggaggagaagggtggaaatggaggaccggcatgtggccgaggtcgctctcggcagagaaccccaagtggacgctctttggtgtattcgatggtcacgggggcaaaaatgcggcagagttcgctgcggagaacatgcccaagtttttggccgaggagttcaagaaggtgaacggcggaggagagatcgaaggagctgtcaacaggggttacctcaagacggacgaggaattcctcaagagggacgagagcgggggcgc

SEQ ID NO: 33002 - DNA, 282 bp, Zea mays
gcttcccaccgatccatttcagccgccgccgcgcgtacaagcaggagcagcaaggatgccggctggccacgggctgcgctcgcggacgcgcgacctgttcgcgcgccccttccgcaagaagggctacatcccgctcaccacctacctccgcacctacaagatcggcgactacgtcgacgtcaaggtgaacggcgccgtccacaaggggatgccgcacaagttttaccacggccgcaccggtcgcgtctggaacgtcaccaagcgcgccatcggcgtcgagat

SEQ ID NO: 33003 - DNA, 278 bp, Zea mays
cccacgcgtccggcagttccccgaccacaccgttcctccgagcccaggagcagccccgcgccaggaggaagtttgttcttttaacaatatgtcgagggaggagaatgtttacatggccaagttggctgagcaggctgaaaggtatgaggagatggttgagtatatggagaaggtggctaagactgtagatgtggaagagctcactgttgaggagcgtaaccttctgtctgttgcatacaagaatgtgattggggctcgccgcgcttcatggcgcattg

SEQ ID NO: 33004 - DNA, 278 bp, Zea mays
aaccacgcgtccgcggacgcgtgggcgccgccgcagccatccgcttcttctcttcggttcagctctcgagtttccaggatgaaggtaatagctgcctacctgcttgctgttctgggtggaaacacttccccgactgctgatgatgttaagagcattctggaatcagttggtgctgaagctgatgaagaaaaactagagttcctgctcacagaactcaaagacaaggacataacagaagtgattgcagctggaagggaaaggttatcctctgtgccttc

SEQ ID NO: 33005 - DNA, 273 bp, Zea mays
cggacgcgtggcggacgcgtgggcggacgcgtgggcggacgcgtgggcggacgcgtggggagagatccggaccttggcgcggacgccggagagaacggcatggggctctgggactcgctcctcaactggctccggagcttgtttttcaagcaagaaatggagctctccctcgttgggttgcagaatgctgggaagacgtcgctggtcaatgccgttgctacaggtggctacagtgaggacatgattccaacggtaggcttcaatatgcggaaa

SEQ ID NO: 33006 - DNA, 265 bp, Zea mays
cccacgcgtccggttaacccaattggagtcaggagttgttatgatgagggtaagcgtgtagcagagacgctgatgttcgactatcacaggcagcatggcattgaaatccgaattgccaggattttcaacacctatgggccaaggatgaacattgacgatggccgtgttgttagcaacttcattgctcaggctgtgcgtggcgaaccccttactgtccagaagccaggaacacagactaggagcttctgctatgtcgccgaaatgg

SEQ ID NO: 33007 - DNA, 261 bp, Zea mays
cccacaccgggcacaccccccgagctcagcttagctccactccagctccaatcacagtcgtgaccagagcgcgagagctagctagagggccgtgaaaatgccgatcaataggatcgccctggggagccaccaggaggtgtaccacccgggcgccctcaaggcggcgttcgctgagttcatctccaccctcatcttcgtcttcgccggccagggctccggcatggccttcagcaagctgaccggcggcggcccgacgacccc

SEQ ID NO: 33008 - DNA, 271 bp, Zea mays
cggacgcgtgggcagctatgcctgaatcctgaatgtatgccattttacctggttaatgtttggatgctccatttagtggttgaaataagtaactgatgttctgttatgcaccgcagaccaagatttcacggagcttgcgcaaaaagtccccagtggctgtctctttaccatagtttctgattcgtgccacagtggagggctacttgacaagaccaaggagcagattgggcacagcaccaagcagaagcagaagcagacccagacccagacc

SEQ ID NO: 33009 - DNA, 258 bp, Zea mays
cggacgcgtgggagaagagcaagatcttcttcatcgcctggtctcctgacacggcgcgcgtgaggagcaagatgatctacgccagctccaaggagaggttcaagcgggagctggacggcattcaggtggatctccaggccaccgactccgccgaggttggccttgacgtcatccagggacgtgcaagctgaggatgcccagcgatgaactgcccatgccagaggatgtatgagcatcatcagttcagatgagaacttg

SEQ ID NO: 33010 - DNA, 267 bp, Zea mays
tcagatgcagcccgccgccgttaggctccggttgccgcctgctcgcgccgcggacacttcgtcctcccagtcgccggcgcgcctgacggcggtgctggagcaggtggaccagttgctaagccaggggaacgacatggccgcgctctccctcgtgcgcagtacgcaggggggtgacggcgggctccgggcctttggcgccgccaggcaggtatattttggtggtggggtgagaaacttggttcttgatacaattggtcactatctcag

SEQ ID NO: 33011 - DNA, 268 bp, Zea mays
aagatcaacccacaggcacccttagataaagtctgcctgctcggttgtggtgttcctactggtcttggagcggtgtggaatactgcaaaggttgaatctggctcagttgttgctgtttttggccttggaacagttggacttgcagttgctgagggagcaaaagctgctggtgcttctcgagttattggcattgacatcgacaataaaaagtttgatgttgcaaagaactttggagttacagaatttgttaacccaaaagagcatgaca

SEQ ID NO: 33012 - DNA, 273 bp, Zea mays
cggacgctgggcggacgcgtgggcaaaagttcggcatcatcaagggcaccatgaccaccacccactcctacaacggcgaccagaagctgctggacgcgagccaccgcgacctgcgccgcgcccgcgccgccgcgctcaacatcgtgcccacgtccaccggcgccgccaaggccgtctcgctggtgctccccaacctcaagggcaagctcaacgggatcgcgctccgggtgcccaccccgaacgtctccgtcgtcgacctcgtcgtgcaggtct

SEQ ID NO: 33013 - DNA, 303 bp, Zea mays
gggagacgagcagcctagaaaccctagcgcccgagtcagatgcgaccgcccgtcggagcgcggaaccctgcccccggccgccatggagatgagcgatgctgacggctgttcttcttcgagatggcctgcaacaactccgaggtcgcgtacgagcagaaccccaacgacgccgacaacttgacgcgatggggcggacgctgctggagctatcgcaactgcgtaacggccccgacagcgtcaagctcctccaagatgcggaagccaagctggaggaggcactgcaagttgatcccagcaagtctg

SEQ ID NO: 33014 - DNA, 306 bp, Zea mays
cccacgcgtccgcctgactgcttccctgaggttcgatggtgctctgaacgttgatgtgaacgagttccagaccaacctggtgccctaccctaggatccacttcatgctttcgtcctacgctccagtcatttctgctgagaaggcctaccacgagcagctgtccgtggccgaaatcaccaacagcgccttcgagccatcctccatgatggccaagtgcgacccccgccatggcaagtacatggcatgctgcctcatgtaccgtggtgatgtggttcacagagacgtgaacgctgctgtggccacaat

SEQ ID NO: 33015 - DNA, 292 bp, Zea mays
cggaccgtggcaacgccaggaggcagtatcccactgtctccgcgtctccgctggttggtctacccgagttttcgcatctcggatggggccattggtttactctcagggatttggagcatgcgaccaatcgcttctccaaggaggatgtcattggggaaggtggatatgggattgtttaccgatgtcgcctcgttagtgggaccgatgtcgcgattagaaagctccttagtaacatgggtcaggcagaaaaggagttcagggttgaggttgatgcaattgggcacgtcaggca

SEQ ID NO: 33016 - DNA, 313 bp, Zea mays
cggacggtggtcgtggagatactgcaggccaagaacgtttccgcacaattagcactgcctactaaaggggagcaatgggcatcttacttgtgtatgatgtcacagacgagtcatctttcaataacataagaaattggatcagaaacattgaacaacatgcttcggataatgtgaacaaaattctggtggggaataaagctgatatggatgaaagcaaacgggctgtgcccacttcaaagggacaagctctcgcagacgagtatgggataaagttctttgaaacgagcgcaaagacaaacctgaacgtcgagca

SEQ ID NO: 33017 - DNA, 299 bp, Zea mays
cccacgcgtccgcgcgcgcgtccgcggtcgtcttttgtcgtttggggcctctggggtttgccccagtcggcagtcgcagcagcacctgtagcagccgtggacgccagcggagccggtagcaaggggaagaatggggcggccgggcgcaatgcaggcggccccaggaagaagtcggtgacgcggtccgtcaaggccgggctgcggttccccgtcggccggatcgggcgctacgtcgagaagggccggtacgcgcacgcgtgggcactggcgcccccgtgtacctcgccgccgtcctggag

SEQ ID NO: 33018 - DNA, 311 bp, Zea mays
cagaaaatgaccttaagaaggtttttggtgaagttggtgagatcactgaagttcgtctgatgatgagccctgccacaaagaagaataaaggctttgccttcctgcgatgtgcaactgtagagcaagcaaggcgtgctgtttcagagctaaagaatccactggtgcggggtaaacaatgtggtgttgctccaagtcatgacaatgatacactctttgtcggcaatatctgcaaaacatggacaaaagaacatttgaaggataaactgaagagttatggagttgaaagttttgacgacttactactggttgag

SEQ ID NO: 33019 - DNA, 300 bp, Zea mays
cttaaacagatacgataatattgtaggataagataatggtccacaacacatcctaaccgattacaaagttcaccttgagaaaattgcaaaccaaacaataattccaactcaaacgataacaactaattgtccctcactgctcctcttcgatcacacccttgtcgctcacatagataccatccagaaacttcctgatatccttcttcttgacatggcatttctggttgatgagggcggcggacgcagagactaactcgacgtcgttgccatcgagaataagctcgtccttgaccttctcgg

SEQ ID NO: 33020 - DNA, 272 bp, Zea mays
cccacgcgtccgcacacgcgtccgcggacgcgtggtcgcatcccatctgctatccttggttgccgcttcctccaaagccactccaaaccccaccttccagaacgttctcgaaagtctccgcctcctcctctactcgctccgatggcgaaggaaccgatgcgcgtgctcgtcactggcggcgcagggcaaattggatatgctcttgttcgcatgattgctaggggagttatgcttggtgcagaccagcatgttattctgcacatgcttgatat

SEQ ID NO: 33021 - DNA, 222 bp, Zea mays
cgcgctttgctgggcaagccggtgaaggggcttggcctgagcatgggccgcgagcgcgcccagcggacagttgtgtgccaggcggcgagcagcatctccgccgaccgcgtccccgacatggagaagcggaagctgatgaacctcgtcctcctcggcgccatctcgttgcccaccgtcggcatggtcgtcccctacggcgccttcttcgtccctgccggctcc

SEQ ID NO: 33022 - DNA, 299 bp, Zea mays
cccacgcgtccggttcaagcggttcggcgcgcggctgaccgagatcgagaaacgcgtggaggccatgaacaaggacccgcgcttcaagaaccgctacagcgcggcccagttcccctacaccctgctcttccccaacacctccgacaagggcgataacaccggcgtcaccgccaagggcatccccaacagcatttccatctgattcgatcgagtcctggccagcgtttcacccaaaaaagcagagctagcggtgattcccgtatgtcatccgtttcattttttacatgaatgagaagcgt

SEQ ID NO: 33023 - DNA, 219 bp, Zea mays
cagacgcgtggcgagacgcgtgggccggcgactacggctgggacaccgccgggctgtccgccgaccacgagaccttcgcacaagaaccgcgagctggaggtgatccactcccgctgggccatgctcggcgcgctctgctgcgtcttccccgagctgctctcccgcaacggcgtcaagttcggcgaggccgtctggttcaatgccggctcccagatcttc

SEQ ID NO: 33024 - DNA, 242 bp, Zea mays
ccgacgcatactgctgtcggccgtcggcctgcacttcttccagcaggcctctggcagcgattccgtcgtcctgtacagcccgaccgtgttcaagagcgcgggaatcaccgacgacaacaagctcctgggcgtcacctgcgctgtgggcgtcgccaagacgctcttcatcctggtggccacgttcctgctggacctgcgccgggcgtcggcctctgctgctgacgagcacgggtggaatgatt

SEQ ID NO: 33025 - DNA, 243 bp, Zea mays
cggacgcggggtgcagcgccgcctggatcgagcagccgagcgactaagcgaagactcccttttccccgagcacaagagaaccatggcggcggcggcagtttacggcggcttcaaagggaagcttggcgtcgaggatgcccccgagctgcagctcaaccgcatccgcatcacactctcatccaagaacgtcaagaacttggagaaagtttgtgcggatttggtaaagggagccaaggacaagca

SEQ ID NO: 33026 - DNA, 276 bp, Zea mays
cccacgcgtccgatgaagatttgggagctaaaatacccaaaggtgctctacttgtaggccctcctgggacagggaagactttgctcgccaaagctacagcaggagagtctggtgtgccatttttgtctatttctggttcagatttcatggaaatgtttgttggtgttggaccgtccagggtacggaacttgttccaagaagctaggcagtgtgctcctagtattgtattcattgacgaaatcgatgctattggtcgtgcaagaggacgtggaggtt

SEQ ID NO: 33027 - DNA, 281 bp, Zea mays
cacacgcgtccgcggacgcgtgggcagcgagatcgtgcgcacctccgagatctccacgaagttgtggtaacatggggctcaccttcacgaagctacttcagccggctcttctccaagaaagagatgaggatccttatggttggtctcgatgcagctggtaagaccaccatcctctacaagctcaagctcggagaaatcgtgaccaccatccctacaatcgggtttaatgtggagactgttgaatacaagaacattagcttcactgtctgggatgttggagg

SEQ ID NO: 33028 - DNA, 255 bp, Zea mays
cccaagtcccaacacccgtcggcgtcgagcagcggcagcggcggcggcgatgacgacgagcctgaagaagaaccggaagaagcgcgggcacgtgtcggcggggcacggccgcatcggcaagcaccggaagcacccgggaggccgcggcaacgccggcggcatgcaccaccaccgcatcctcttcgacaagtaccacccgggctacttcggcaaggtgggcatgcgctacttccacaggctccgcaacaagttcca

SEQ ID NO: 33029 - DNA, 247 bp, Zea mays
gtacgagctctccaaggaccccgccgtgagcatcgccatcgtggagcagtcggtgtcgccgggcggcggcgcgtggctgggcgggcagctgttctcggccatggtggtgcgcaagccggcgcacctgttcctggacgagctgggcgtggcgtacgacgaggccgaggactacgtggtcatcaagcacgccgcgctcttcacgtccacggtcatgagcctgctcctggcgcgccccaacgtgaagctg

SEQ ID NO: 33030 - DNA, 281 bp, Zea mays
gaggagaggagaaagggcaaaaggcaacaccgcccgcgacgaccacgatggcagcctcgctccaagtccaagccgcggccaccttgatgcaaccggccaagatcggcggccgggcgccgtccgcctcgctgccgtcgtcccgcccgtcgtcgcaactcgccagggcgttcggcgtcgacgccggcgccgccaggatcacgtgctccctccagtccgacgtcagggacgtcgccagcaagtgcgtcgacgccgccaagctcgacggcttcgcgctctccacc

SEQ ID NO: 33031 - DNA, 263 bp, Zea mays
ctcatatcctgagccagagatcaaagaaaccagagggagcgaggcatggcagcaggcttgcaggtgtttggccagccggcgtctactgatgtctccagggttctgacatgcctgtttgagaagaaactggagttcgatcttgtccgcatcgatacattcaagacgcatcacaagcttcccgagttcatcaggcttcgggatcctaatgggcaagtgaccttgaagcacggcgacaaaactctcgttgattcgagggacatctg

SEQ ID NO: 33032 - DNA, 218 bp, Zea mays
cccaagaagaaggaggcgctgccgtggtacaccccgtacgtgtacaacaacccggtcggccgggtggtgcacatcgtggtgcagctcaccctcgggtggccgctgtacctggcgaccaacgcgtcggggcggccgtacccgcgcttcgcctgccacttcgacccctacggccccatctacaacgaccgggaccgcgcccagatcttcgtctcggacgc

SEQ ID NO: 33033 - DNA, 278 bp, Zea mays
aggggtaccgcatcgccggtggcccgctcggggaggtggtcgacccgctgtaccccggcggcagcttcgacccgctcgggctcgccgacgacccggaggcgttcgcggagctcaaggtcaaggagatcaagaacggccgcctcgccatgttctccatgttcggcttcttcgtgcaggccatcgtcaccggcaagggtcccgttgagaacctcgccgaccacctcgctgaccctgtcaacaacaacgcctgggcctacgctaccaacttcgtccccggc

SEQ ID NO: 33034 - DNA, 276 bp, Zea mays
cggacgcgtgggcggacgcgtgggaacctggccaagaacgaggccggcggcatcatcggcacccggttcgagtcctccgacgtcaagtccaccccgctccagccctacagcgaggtgttcggcctccagcggttccgcgagtgcgagctcatccacggccgatgggccatgctcgccaccctcggcgccctcaccgtcgagtggctcaccggcgtcacctggcaggatgctggcaaggtggagctggtggatgggtcctcctacctgggccagccg

SEQ ID NO: 33035 - DNA, 273 bp, Zea mays
ctccgccgcagctcgccaactacaactccttcgagggagtgctctactgcaggcctcacttcgaccagctgttcaagaggacagggagcttggacaagagcttcgaaggtatcatcgttttccccccttccctttgcagtacgaaatagatccagtggtgttcttgcgtgtctcctcacctacaaatggcttcaggaactccgaaggttgtcaagccagaaagaaacgttgggaatgaggtatatgcaacgccttaatattcatgtgtttatg

SEQ ID NO: 33036 - DNA, 276 bp, Zea mays
cccacgcgtccgctagtaaagatctgacattggatcagtggaacagagtggcaaattctattgggtctacactcgagaataatccagacatagaggtcatgagaaagattctatctatcagttattttgatctaccacattatctgaaaacttgtcttctttatataagtatcttcccagaagattacatcataaatagaaagagtttgatagttagatggattaatgaaggatttgttcaagaagaatatgggaaaaatgcacatgatataggtg

SEQ ID NO: 33037 - DNA, 259 bp, Zea mays
gacgcgctgtccgagaccgccgagttcgcgcgccgctgggtgcccttctgcaagaagttcgccgtggagccgcgcgccccggagttctacttctcgcaaaagatcgactacctcaaggacaaggtgcagccgacgttcgtcaaggagcgccgcgccatgaagagggagtacgaggagttcaaggtgcgcatcaacgcgctagtggccaaggcgcagaagaagcccgaggaggggtgggtcatgcaggacggcacgccgt

SEQ ID NO: 33038 - DNA, 279 bp, Zea mays
aaagacccggttatcgttgctactggccagacatacgagcgggcattgatcgagaaatggctagcttccgggcaccatacctgtccaagcactcaacagaggatgccaaacacgacgctgacaccgaactatgttctcagaagccttatcacgcatggtgcgaggccaacgggatcgatccaccgaagcgcccgacgcagcagcctgacagacctacatcttcatgctcttcgagcgagcgcgccagcatcgacgctcttctctccaagctatgctccg

SEQ ID NO: 33039 - DNA, 185 bp, Zea mays
ggaaaagatgacacaaatcatgtttgaaactttcagtgttcctgctatgtatgttgctattcaagctgtcctttccctttatgctagtggccgtaccactggtattgtcctggattctggagacggtgtcagccacactgtcccaatctatgaaggctatgccctcccgcatgccattcttcgtc

SEQ ID NO: 33040 - DNA, 269 bp, Zea mays
gacgatgtctacctcaagctcctcgtcaagctctaccgtttcttggtcaggaggaccaagagcaatttcaacgctgtcattctcaagaggcttttcatgagtaaaaccaaccgaccaccaatctccatgcgccgccttgtcaagtttatggaaggaaaggagaagaacattgctgtcattgttggcacagtcacagatgacaaaaggatccaggaggttccagcaatgaaggttactgccctgaggttcacggagacagcaagggccag

SEQ ID NO: 33041 - DNA, 270 bp, Zea mays
tcccacaccccccgagctcagcttagctccactccagctccaatcacagtcgtgaccagagcgcgagagctagctagagggccgtgaaaatgccgatcaataggatcgccctggggagccaccaggaggtgtaccacccgggcgccctcaaggcggcgttcgctgagttcatctccaccctcatcttcgtcttcgccggccagggctccggcatggccttcagcaagctgaccggcggcggcccgacgaccccggcgggcctgatcgcgg

SEQ ID NO: 33042 - DNA, 264 bp, Zea mays
cccacgcgtccgcccacgcgtccgacggcccgcgcgttctcgccatggctggtgtcacatccaacagcttgctcctgagcctcaacatcctcttcggcgttgccaaggttggctccatcctcatcgccatggctctagccgaccgcgtcggacggcgcccactcctgctggtcagcactagcggcatgacggtggcgctgctcgtcctaggctccctgttcgcggtgttcgcgggagccaaggatgacgctacggtggctgcgg

SEQ ID NO: 33043 - DNA, 265 bp, Zea mays
caaggccgtagcccgcagcttcgtctgttacgctacgtccggttccccaccgcgccgtgtgaaaaaaatggctgtgccggatgtggtggtggacggcgtcgtcttcccgccggcggcccgcccgccgggctccgcgggctcgcatttcctcggcggcgcaggcgtgcgtggcctcgagatcgaaggcaacttcgttaagttcacggccatcggcgtgtacctggaggacgcggccgtgccggcgctggcgaggaagtgggccggc

SEQ ID NO: 33044 - DNA, 266 bp, Zea mays
cccacgcgtccgcggacgcgtgggcgcccggcgcggaggccaaggacagggccaccccggagcaggtggccgcgtacaccctcaagatcctccaccgacggatccccccctccgtgcccgggatcatgttcctctccggcgggcagtcggaggtggaggcgacgcagaacctcaacgccatgaaccaggggcccaacccgtggcacgtgtccttctcctacgcgcgggcgctgcagaacacctgcctcaagacctggggcggccag

SEQ ID NO: 33045 - DNA, 271 bp, Zea mays
cccacgcgtccgggcagcaagtgctgctggaaaggcccctgttaagaaacagtctgctggggagctccgtcttcataaagatattagtgagctcaacctgccgaagaccacgtcaatttcttttcccaatggcaaggatgatctgatgaattttgagaccaccatccgacctgatgaaggatattacatgggaggcactttcgttttcacctttcaagtgtccccatcttatcctcatgatacctccgaagtcaaatgcaagaccaaggtg

SEQ ID NO: 33046 - DNA, 213 bp, Zea mays
tgcagatccggacattatccgtcttcctaggctctttcgctttctgcagaagccacttgcaaaattcatatcagaagtgagagcaccaaaaagtaaggaaggttatgcatccataggtggcggttctcctctacgacaaattactgatgcacaggctgaagcactgagggaggcattacatgggaaagatgccctgccaacgtgtatgttgga

SEQ ID NO: 33047 - DNA, 216 bp, Zea mays
cggacgcgtggacgaaaaagagcaaccatgtcacgaggaagcttgagaagcgcaaggagggacgtacccttgacccacacattgaggagcaatttggcagtggacggttgctggcatgcatttcttcccgccctggacagtgtggccgagctgatgggtacatccttgagggtaaagagcttgagttctacatgaagaagctacagaggaagaagg

SEQ ID NO: 33048 - DNA, 212 bp, Zea mays
agggcagcgtgtactggatgcactattcccctcggttctgggaggcacttgtgctattccaggagcatttggctgtggtaaaactgtcattagtcaggcactttccaagtactccaattccgaagctgtggtttatgtgggctgtggtgaacgaggaaacgagatggctgaggttctcatggactttccccagttgacgatgacattgcctg

SEQ ID NO: 33049 - DNA, 214 bp, Zea mays
aagacgctgctgccggcgctggggagcgacaagatcaggaacgtcatggacatgaacaccgtgtacggaggattcgcaggcagcctcgtcaaggaccccgtctgggtcatgaacgtcgtctcctcctacggcccaaactccctcggcgtcgtctacgacagagggctcatcggcgtcaaccacgactggtgtgaggcgttctcgacatatccac

SEQ ID NO: 33050 - DNA, 199 bp, Zea mays
gcaagatccagacccctacggatgaggtggtggtgccctacgataccgtcgcgtcgcctcccgaagatctcgaggagacgaagaagctgctggataagctcgttgtgctcaagcttaacggagggctcgggacgaccatgggctgcactgggcccaagtctgtcattgaagtccgcaatgggttcacattcctggacct

SEQ ID NO: 33051 - DNA, 144 bp, Zea mays
cggacgcgtggcgcatactgcatacacaacacagagcatcagaaggagctgcgatctgatcgacatggctagcggccaccatggctatcacctcccgcgcgctcatcggcaagccggcggctggcacgagggacgtcttcggcg

SEQ ID NO: 33052 - DNA, 198 bp, Zea mays
gggacagatggagtaaatattattggtataaaaagatctgacaaatataatattttacatacatcgctacaccactttttacatagaaatatcaccaataatactagttgcaacaaatcacgacatcccattattcatcatcaggactcctacaatatatagttactgacgaagaacagagtcactttattccttgca

SEQ ID NO: 33053 - DNA, 200 bp, Zea mays
aagaagcttcgcaacgtgctcgtggagcgcgccctcgccaacggcgctgccgagttcaacgcggagacatccgtgttcgccaatgtcgcccagttcgaggacgacctgcgtgcggcgctgcccaaggcggtggaggctgcacgggcggctgtcgagaacggcagcgcagggataccgaacagaatcgccgactgccgctc

SEQ ID NO: 33054 - DNA, 193 bp, Zea mays
cggacgctggttggcaatattggccttgttattcgatgataacggatgctttgactatggaaattattacgtcaaaagagatgttacaaagttggagatgaggaggaggctggtattcatctgtaaatttgctgtaaacgcacggccatctagaggaaacttgaaacaggtgtatggtttcctcagcagtcaa

SEQ ID NO: 33055 - DNA, 170 bp, Zea mays
ggctcacttctccaggtaaggaaagtgttcgtcctcatggcgccgccgcagccgaagtcgggcctcttcgtgggcatcaacaagggccatgtcgtcaccaagcgcgagctgcctctgcgcccgtcccaccgcaaggggaaagcaacgaagagggtgtccatggtcagggg

SEQ ID NO: 33056 - DNA, 202 bp, Zea mays
cacgcatactgcatacacaacacagagcatcagaaggagctgcgatctgatcgacatggctgccgccaccatggctatcacctcccgcgcgctcatcggcaagccggcggctggcacgagggacgtcttcggcgagggccgcatcaccatgcgcaagaccgccgccaagcccaagccggcggcgtccggcagcccctggtac

SEQ ID NO: 33057 - DNA, 205 bp, Zea mays
tgtatagtagcaatccataataaactgtgacatccaacagacaaccaaactgacgacgacacatgcagcaacagaagagtatgctgcgccacacgacaattaacagttttaaacaccgacaccaggcaagcaaaacaaacttattgaaataatattatcaagttcggccattagcagtagagcagcgtggcctcttcactcgtcg

SEQ ID NO: 33058 - DNA, 201 bp, Zea mays
gggagatcgggatggtctccggcatccctgaggagcatctccgccgtaaggttctaatttattcaccagctaggactgcatcccagcaaggttcaggcaaagtcgggaggtggaaaattaattttttgtcaacccaaaagtgggagaacccgttgatgggatggacatctactggggatccatatgctaatgtcggtgaag

SEQ ID NO: 33059 - DNA, 203 bp, Zea mays
ggaggcggacaaggtaagcagcaatcgcaggaaccctagcgccgccgcacccgcagaatgggtatcgacctcgtcgccggtgggaggaataagaagaccaagcgcactgcgcccaagtctgacgatgtctacctcaagctcctcgtcaagctctaccgtttcttggtcaggaggaccaagagcaatttcaacgctgtcattct

SEQ ID NO: 33060 - DNA, 253 bp, Zea mays
gatctttcccccgtcctccctcgccttcgcctcgccggcaggagatttccaccaccaccgccggaccaccccgaccctccttccctctcgcgctatggcccagactgttgtgctcaaggttggcatgtcctgtgagggctgtgttggagctgtcaagcgggtcctgggcaagatggaaggcgtcgagtcctacgacgtagacatcatggaacagaaggtcaccgtgaagggcaatgtgacacctgacgccgtc

SEQ ID NO: 33061 - DNA, 198 bp, Zea mays
cggacgcgtggcagccaggcagccatggcgcccaccgtgatgatggcctcgtcggccaccgccgtcgctccgttccaggggctcaagtccaccgccagcctccccatcgcccgccgctcctccagaagcctcggcaacgtcagcaacggcggaaggatccggtgcatgcaggtgtggccggcctacggcaacaagaag

SEQ ID NO: 33062 - DNA, 256 bp, Zea mays
gcgactcagcgagcgagagcagcacacactgcacgcagctagctaggagcagcagcagcggcggcgatggcggcctccatgatctcctcgtcagctctggcggtggcgcctcagggcctgccgcccctcggccgccgcgcctcctccttcgccgtcgtctgctccaagaagaagatcaagaccgacaagccctacgggattgggggtggcctgaccgtcgacgtcgacgccaacgggagaaagggcaagggcaagg

SEQ ID NO: 33063 - DNA, 278 bp, Zea mays
aattggtggggtcttcgggggcctgttcaactttctcttggataggattctccgagcttatagttttatcaacgagagaggtgctccatacaagatccttctcaccgtcacaatatcaatcatcacatcagcatgctcctatgggctaccttggctcgccccatgcactccgtgccctgctgatgctgtggaggaatgccctaccattggccgctctgggaattttaagaactttcagtgcccgccgggctattacaatggtcttgcgtcgttgttct

SEQ ID NO: 33064 - DNA, 278 bp, Zea mays
cggacgcgtgggcgagggcatcgagtacgacccccagatcaacaacaagttcgacgtggtcatcaacgtagcccgggaggacgccgcgagggtggggcctaaggacagcgagtacgccggcagcttcagcgccgtgcccagctccaacgccgccggtggcacgctggtgggcaagttcacgctcgccctcgacggcgtgctcgccgacctcgggctcgccggcgcgacgccgtcgacatcgtgctcgtccctcacacggagggcgagatcaagctgta

SEQ ID NO: 33065 - DNA, 276 bp, Zea mays
gtcttggatatgatgggggtgatggccatccttggtattcagctcaatgcaatttctgttgtaaaccttgttatgtcgataggaattgctgtcgagttctgtgttcatatcacgcatgcctttatgattggcactggggacaaagaaactcgtgcaaggcaggctctatccacgatgggtgcgtctgtattcagtggaatcaccttgaccaaacttgtgggagttattgtcctacgttttgcgaaatctgaagttttcgtggtttattacttccaa

SEQ ID NO: 33066 - DNA, 278 bp, Zea mays
cagcaacctttccaaggaactcctctgatgctacagtaataatagaagaaagatggagctgctcagcatcattctagttatagcatctctactcccattcgcagcatctgatggtcaaggtgatgccttgtacgatatgaagctgaaactaaatgctactggcagtcagctttctgattggaaccaaaatcaagttaacccatgcacctggaattctgttatttgtgacaacaacaaccatgttgtgcaagtaacattggcttctatggggtttactg

SEQ ID NO: 33067 - DNA, 279 bp, Zea mays
atttaactccaaacctgtcagctatccgcctccgagggagaagtgtgcaggcccatcgtgcacaaacccgtacaagtaccgccactccaagactctggtccctctctgcagccttgcttgctataaggccgtcgaggaccgtcctcctgcccaggggagtgaaggtggtggtggccagggaagcgatgctgggcagggaactgatgccgcccaggagagtgctgggaagcaagcatgatgaatctagctgcctgacgcgattcaacgtgaccgtcagtt

SEQ ID NO: 33068 - DNA, 302 bp, Zea mays
tgaccgcagtacggcgaatccggtcacccgcagccgacaggcgcgacctggcgacctggcgcggtttgcctctctgcctccctccctcagatcctccctaagaatgccatggcacaccagctcaccgacgaccagatcgccgagttcaaggaagcattcagcctcttcgacaaggacggcgacggctgcatcaccaccaaggaacttggaactgtgatgcgctcgttggggcagaaccctactgaggctgagcttcaggacatgatcaacgaggttgatgctgatggcaatggaaccatcga

SEQ ID NO: 33069 - DNA, 282 bp, Zea mays
gttctagatcgcggacggccaccctttttttttttttttttttttttttttttttttttttttttttgcatgcaattcaaccgtcccaaacaaatttattgataattaatactaaacagtagggggcataaaaccatagaaaatacagggtccagaatgtaaccacagataatgcagacacggtgcaacacccagcgatccctgcacttgtgtttgccatagcaaaagccagctcaagccagatggatgtctctgtagcaatccttgatacacttctttttt

SEQ ID NO: 33070 - DNA, 284 bp, Zea mays
agaagaagacgagtgtcaagtgaacctgaaacttgcggtgtcactggctggtagcctgagtgtgagtgagtgatcgagctagctgagctccgatcctcgctagctaggataccgccataccacaagtcttcttcacaagtttaggagtgacagcaacaagagatcgatggcctctgccaccgtgctcaagtcctccttccttcccaagaagtccgaatggggcgccaccaggcaggccgccgcgcccaggccgcccaccgtctccatggtcgtccgcgcctccg

SEQ ID NO: 33071 - DNA, 272 bp, Zea mays
cccacgcgtccgcacgactatgtgttgaagaggttcatcgtgtattgttagacatagtcaatgcttccgcaaatgccacaccaggacttgggagatatcctccattcaagcgtgaggttgttgcaatagcatcaaatgcattggagaccttcaaaaacgacgccaaaaagatggtcgttgcgcttgttgatatggaacgtgcttttgttcctccccaacatttcatccgcttagtacaaagaagaatggaaagacagcgtcgggaggatgag

SEQ ID NO: 33072 - DNA, 272 bp, Zea mays
agaggtttcaggtgaggaacatcgtggaacaggcggccatcagggacgtccaggaagcatgcgtctatgatggctacgtcctcccgaagctgtacgccaaggtgcaccactgcgtctcgtgcgcgatccacgctcacatcgtccgcgtccgatcccgtgagaagcgcagggaccgcaagccgccggagcgcttcaggcgcagggaggataggcctgctggtggacaaggaggcccccgccctggtcctggtgctgctgctacagctccagct

SEQ ID NO: 33073 - DNA, 271 bp, Zea mays
gcgccgggttcgcggcgaacggaggcagatctgccaggcgcaggccggggccagcgacggcaacctggcgccgctggacgccatgagctccgtcaggttcgacaacggctacttccgcaacctcgtggcccagttcggcctgctccactccgaccaggagctcttcggcagcggcgccgtcgactccatcacggcgcagtacgcgcgcaacggcgccgccttctcgcgggacttcgtcacggccgtcctcaagatgggcagcatcggcccg

SEQ ID NO: 33074 - DNA, 272 bp, Zea mays
acttgaaggaacattcaggttcatgcactcgagactgcggacacatgctgaatcaattgctttctttggtggtggttcaagagaaaaagcgatggttgaggctaaattcgtcaagttaattaaccactcaaagattcttttgaggaaacagtggctttatggtattgttgatgattttgtaacaaagcaacttccacacaatgtaacgtggggtctgagtctgttgtatgctttggagcacaagggagatagagctttaacctcaactcaag

SEQ ID NO: 33075 - DNA, 272 bp, Zea mays
cccacgcgtccgcccacgcgtccgcccacgcgtccgcgcgttcgctggcctcttcttcctcttccgccgcgcgcagggcgggcccggcgccgggcctggtggcctcggcgggcccatggacttcggccgctccaagagcaagttccaggaggtgcctgagacgggtgtcaccttcctcgacgttgccggcgcggaccaggccaagctcgagctgcaggaggtcgtcgatttcctcaagaaccccgacaagtacaccgcgctcggagccaaga

SEQ ID NO: 33076 - DNA, 268 bp, Zea mays
  unsure (1)..(268): unsure at all n locations
gggacccttgatgatgtttatgcaactgctatcagaaactgtgatccggnaggccctcttatgctgtatgtttcaaagatgattccagcatctgacaagggcaggttctttgcctttggtcgtgtcttctcagggaaggttgctactggtatgaaagttcggatcatgggtcccaactatgtccctggccagaagaaggacctgtatgtcaagagtgttcagcgtactgttatctggatgggaaagaaacaagagtcagttgaggatg

SEQ ID NO: 33077 - DNA, 267 bp, Zea mays
cacacgcgtccgcggacgcgtgggctaccgtccgagaccccaagcaccagcgcggcggcggcggcggcggcgaccatggctgtcgggaagaacaagaggatctccaagggaaagaagggtggcaagaaaaagaccgtcgaccctttctctaagaaggattggtatgacatcaaggcaccgtcggtgttcagtgtgcgcaacatcgggaagactctcgtatccaggacacagggtaccaggattgcttctgagggtctgaagcacaga

SEQ ID NO: 33078 - DNA, 264 bp, Zea mays
cccacgcgtccgcccacgcgtccgggatgcaagaaggttgttgtggtgaaccgctccgtggaaagggtggatgctattcgtgaggagatgaaagatatagagatcgtgtacaggcctctctcagacatgtatcaagctgctgctgaagctgatgtcgtgttcaccagcaccgcatctgaaacttcattgttcgcaaaagaacacgcagaggcactcccccctgtctctgatactatgggaggtgttcgcctgtttgtcgacata

SEQ ID NO: 33079 - DNA, 265 bp, Zea mays
cccacgcgtccgcggacgcgtggggaacttacccctggattgaaggagaaactgccacctacagactcaagattacgaccagacaagagatgtctggagaacggtgaatatgaaagggcaaatgctgagaaattgaggcttgaacagagacaacggcaggcacgaaagatgcaggagagcggatggaagcctcggtggtttgcgaaggataaagctactgacacataccgttacgtcggtgggtactgggaatccagagaaaaga

SEQ ID NO: 33080 - DNA, 266 bp, Zea mays
gcttgcggcgtcggcgtgcgcggccggggacagcgccgcctaccagaggtcctcctccttcggggacgatgtcgtcgtcgtcgctgcctacaggacgccgatatgcaaggccaagcgaggaggcttcaaggacacctacccagaggacctcctcactgttgttctcaaggctgttctggacaacactagaatcaatccagctgacatcggtgacatcgtcgttgggacggtgctcggccctggttcccagcgtgcaaacgagtgca

SEQ ID NO: 33081 - DNA, 268 bp, Zea mays
cccacgcgtccgcgcaggtggccagccacgcccagaagtacttcctccggcagaccaaccccggcatgaagaagcgccgggcgagcctcttcgacgtcggtatcgcggactacaaggacaaccaggtgccaggccctcagagcatcgtcgctgccaaaccggcgcctacgcaggagataatccacaccgaccgcggcgacgtccccataccaagacgatatagaggcctcggagagattttaggcagtaacatgcaggttaatcaact

SEQ ID NO: 33082 - DNA, 267 bp, Zea mays
cccacgcgtccggaacgtgtgactagataacaataagcgtgaaccatggcggacgagtacggccgcagcggctacggcaggtccggcgccggcgacgactacgacagcggctacaacagcaagtccggcactgatgactacggccgtggcgaaggtggctacaacaagtcgggcggcgatgacgactacggccgcagcggcggcgatgggtacggcaggtccggcggcgacgactacggccgtggcaccggcggcggtggctacaac

SEQ ID NO: 33083 - DNA, 272 bp, Zea mays
gtaagtgctcttattgatatgaaactggagaaatacaaaaacatacgcgaagaatcagctttcttctatggagagatttctgaaggaaccctcaaatttgatagaaaagaagcagaggttgctgcactgagggagctcaagaaggaagagttggtaggcttcttcaatgatcatgtcaaggtcaatgcaccacaaaagaagattcttagtatacaagtgtacggtggtctccattctgccgagtacgaaaccatagtgcaaaatgctccgcc

SEQ ID NO: 33084 - DNA, 269 bp, Zea mays
aatccgccctcgtatcctcacgcccacaaaacacccgaagaaaagaagagactgaacgccgcgagttcacgtgacgatggagaacgccgcctccgccatcgctaagccgtcgctgtccaagaagccctcgccgtcgttccgcctccggaacggcagcctcaacgcactgcgcctgcgccgcgtgttcgacctcttcgaccgcaacggcgacggcgagatcaccctcgacgagatggcctcggcgctcgacgcgctcggcctcggcgccg

SEQ ID NO: 33085 - DNA, 270 bp, Zea mays
gcacatgaaaacaagtcaggcagtgtcgtcaccatccaggggttaacaccaactgggtacttacatgctattggtgaggataacaaaagctatgagttgcacccagatggcaacagctttgatttcttcactggattggtgaggaggaagatggaagcttagggtatcaatacaatgggatacatggatagattcaacagactgtacaaatgaatggaatgagaacatgatttaagcatcagccccctccatctgtattcaaaccttgtg

SEQ ID NO: 33086 - DNA, 189 bp, Zea mays
cgccgcgtggcaggtcgccgaggtggccaaggtcaacaaccgcttcaagcgcgaggaggtcgtcatcaacggatgggagggcgaccaggtcgagaaggccagcgcgtggctcaagaagtacgagaggaagcttgaaggagaagcgtgccaaggcgattggagaaggcgcagaacgaggtggccaaggcg

SEQ ID NO: 33087 - DNA, 306 bp, Zea mays
cccacgcgtccggcgatcaagaaggaagtcgaggatcttgaggctggtggtattcaggttatccaaatcgacgaggctgcactgagagaagggctgccgatccgcaaggctgagcatgcattctacttggactgggctgtccactccttcagaattaccaactgcgagatccaggacaccacccagatccacacccacatgtgctactccaacttcaacgacatcatccactcgatcatcgacatggacgcggacgtgatcaccattgagaactcgcggtccgacgagaagcttgctctccgtgtt

SEQ ID NO: 33088 - DNA, 271 bp, Zea mays
agttcagcagaatgaagagttactagactccagtaaaataaaggagtcgaccactatctttcatggtcagagggtgcctgaacttagtataaagctgtatgcagagcgtattttcaagtatgcaaagtgcagcccatcttgctttgtgctagcacttatctacatggagagatatctacgacaaccaagcatttacatgacgtcatttagtgttcatcgcctgcttattacaagtgttgttgttgctgccaaattcatagatgttgcgttt

SEQ ID NO: 33089 - DNA, 194 bp, Zea mays
ctgaggcgatggaggaagatgaagtggacgagattgccgagatcaaagcagctcacttcgaggagtctatgaagtatgctcggcgcagtgtcagtgatgctgatatccgcaagtaccaggcgttcgcccagacgttgcagcagtcccgtgggttcggcagcgagttccgcttctcagagcagtcggcgacagct

SEQ ID NO: 33090 - DNA, 260 bp, Zea mays
aaacgactgactgactatgagagtcctggtggggaggctgccttcttgcgtgaggttgagcttatcagtgttgcagttcaccgcaatctcttaagattaattggcttctgcacaacacaaacagagcgcttgttggtctatccatttatgcagaatttgagtgttgcctaccgcttaagagattttaagcctggagaagccatcctagattggctttcaaggaacgggtggctataggtacagctcgtggactggagtat

SEQ ID NO: 33091 - DNA, 222 bp, Zea mays
cgaaccgaatcctccgcaactcgccgccgccgggaccgaccgacccggtcctatcgatcgaggatgtcgtacgcctacctcttcaagtacatcatcatcggcgacacaggcgtggggaagtcgtgcctgctgctgcagttcacggacaagcgcttccagcccgtgcacgacctcaccatcggcgtcgaattcggcgcccgcatgatcaccattgaaaataac

SEQ ID NO: 33092 - DNA, 209 bp, Zea mays
ggacgaggcgcgccatgctgggttcttgaacaaggggctgtctgacttcaacttggcgctggacctggggttcctgaccaaggctaggaagtacaccttcttcaagcccaagttcatcttctacgccacctacctgtccgagaagatcgtgtactggaggtacatcaccatcttcaggcacctcagggcgaacccggattaccaggtgt

SEQ ID NO: 33093 - DNA, 207 bp, Zea mays
ccgtcgtctaagttaggctagggttcgaccagctagcggaaatggtggccttcaggttccatcagtaccaggtggtggggcgcgcgctgccgacgcccggcgatgagcaccccaagatctaccgcatgaagctctgggccaccaacgaggtccgcgccaagagcaagttctggtacttcttgaggaggttgaagagggttaagaaga

SEQ ID NO: 33094 - DNA, 259 bp, Zea mays
ttaccctgagtacgtccgaattccgggtcaccacgcgaacgacacgcgtccgcgaccgtggcgaccgtggcttgagcgctgggcaccagatggaggagattcagagtgtatataacacgagaagtaataccggagaggaaataggagctgggaccagtttgaaaccaatgcagcattatttggggtaaagagtactttcaatgaggaaatttataccacaaagcttgagaaaggtcctcacatgagagagcttgaaaag

SEQ ID NO: 33095 - DNA, 299 bp, Zea mays
ggtggaccactgggcttctgatctgggccgtcaccctcgctgggatcctcggccgccgcgcctcctccttcgccgtcgtctgctccaagaagaagatcaagaccgacaagccctacgggattgggggtggcctgaccgtcgacgtcgacgccaacgggagaaagggcaagggcaagggcgtgtaccagttcgtcgacaagtacggcgcgaacgtcgacggatacagcccaatctacaacgaggatgactggtctcccaccggcgacgtctacgtcggtggaaccactgggcttctgatc

SEQ ID NO: 33096 - DNA, 302 bp, Zea mays
cgcaccaggcctgcacccaaagcttccggagaattcctcccttgccccgccgtcgcatcctcttcgaagttcgaatcgaatcgcgccgcgatcacccacctcatggcggacaaggagcctgtcgtggagcggccagaggcgggtgaggaggaggaggacgcctcagccgccgccgccgcgggggaggaggaggacacgggcgcccaggtggctcccatcgtgcggcttgaggaggtagccgtcaccaccggcgaggaggacgaagacgtcctgctcgacatgaaggcgaactgttaccgatt

SEQ ID NO: 33097 - DNA, 209 bp, Zea mays
tgatgtggttaccacaaccacgcacaagtccctcagagggccaagggctggcatgatcttctacaggaaaggccctaagccccccaagaagggccagcctgagggtgctgtttatgattacgaagacaagatcaactttgcagtgttcccatctctccaaggtggccctcacaaccaccagattgctgcacttgctgtggctctacagc

SEQ ID NO: 33098 - DNA, 213 bp, Zea mays
cccacgcgtccgcccacgcgtccggacgcgtgggtttttttttttttttgtgttttttttgtgtgttgttttctttatcaggaagttcctttatttaaaacgcgctgctaatgcaggctacgtgttacaaatttattattattcaaaaccacggccatgtggataccacgtcgatgcatttttttggccccatcaaacatgtaggggctgttg

SEQ ID NO: 33099 - DNA, 200 bp, Zea mays
cggacgcgtgggcggacgcgtgggcgaggagatggttgagttcatggagaaggtagccaagactgttgactacgaggagctcaatgtggaggagcgaaacctcttgtctgttgcatacaagaacgtcattggagcccgccgcgcctcatggcgcatcatctcctccatcgagcagaaggaggagggccgaggcaatgggg

SEQ ID NO: 33100 - DNA, 295 bp, Zea mays
ccttggacaaggtggttttggctatgttcacagaggattgctgcctaatggcaaagagattgctgtaaaacaactgaaactgggaagtggccagggcgagcgtgagttccaggctgaggttgagattatcagccgagtacatcacaaacaccttgtgtctttggttggctattgcatttctggaggcaagaggctgcttgtctatgagtttgtccccagtaacacattggaattccacttacatgcgaaagatcgaccagcaatggagtggcctgctagattaaggatcagtttg

SEQ ID NO: 33101 - DNA, 299 bp, Zea mays
acgctggagcgcaaccggagaaggtgttcgtgcgcaccatcaccagccagttccaggccctcgtcggcatctcgctgctggagatcctgtccagccactcctccgacgaggtgtacctcggccagcgcgacaccaaggagtggacgtcggacgccaaggcgcaggaggcgttcaagcggttcggcgcgcggctgaccgagatcgataaacgcgtcgtcaccatgaacgcggaccctcgcctcaagaaccgcaacggcccggccgagttcccctagacgctgctctaccccaagacctgg

SEQ ID NO: 33102 - DNA, 215 bp, Zea mays
gaccaacctggtgccctaccctaggatccacttcatgctttcgtcctacgctccagtcatttctgctgagaaggcctaccacgagcagctgtccgtggccgaaatcaccaacagcgccttcgagccatcctccatgatggccaagtgcgacccccgccatggcaagtacatggcatgctgcctcatgtaccgtggtgatgtggttcccaaggacg

SEQ ID NO: 33103 - DNA, 271 bp, Zea mays
cacatcctgcgatcctcgaagcctccgccgagcatcgatcatgtcggcctactgcggcaagtacgcggatgagctcatcaagaatgctgcctacatcggcacccctggcaagggtatccttgctgctgatgagtcaactggcaccattggcaagcgcctttccagcatcaatgtcgagaacgtggaggagaaccggcgggctctccgtgagctcctgttctgctgccctggtgccctccagtacatcagcggtgtgatcctcttcgaggag

SEQ ID NO: 33104 - DNA, 271 bp, Zea mays
tctacttctgcttcttcgtcatggggttcgggcccgtccccaacatcctctgcgcggagatcttccccaccacggtccgcggtgtctgcatcgccatctgcgccttggccttctgggtcggtgacatcatcgtgacgtacactctccccgtgatgctgaacgtcgtcgggctcgccggcgtctttggggtgtacgccgtcgtgtgcatcctagccctcgcgttcgtgttcgtcaaggtgcccgagacgaagggcatgcctctcgaggtcat

SEQ ID NO: 33105 - DNA, 273 bp, Zea mays
gggcaagagactgctcgaccggaccgacgagcgacgaagcgcgcagaaagagaagaacctcggagctgagatggcacaagccatggcgtcgatgaccggcctctcgcagggcgtcctgcccagcaggcgcgccgacagcagaaccaggacggccgtcgtcatcgtcagggcgtccgcggagggcgacgccgttgcgcaggcgggccgccgcgccgtgatcgggctggtggccactggcatcgtcggcggcgccttgtcgcaggcggcgcgcgc

SEQ ID NO: 33106 - DNA, 266 bp, Zea mays
gcgcttcccgtcttgtgaagcgctggcaatggtcgatttggcccaggggaaaggatggagacaagtgggagcggaagctcatgcgtgactttggttcccctgtctggagggtgtcctggtccttgactgggaacatattatccatagctgctggtgggaacaatataaccctctggaaggaagggtcagatgggcaatgggaggaggtgatgaaggttgaaacataggatgtccgtcaagttttctgaagataaagtgtgttttac

SEQ ID NO: 33107 - DNA, 272 bp, Zea mays
cggacgctggtcctcctccaccctcgtccgtccccttccggcgcacgagctcgcccgagatggcgaacgagagatcgggtgtcgctgtgaacgatgagtgcatgctgaagtttggcgagctgcagtcgaagaggctgcaccgcttcataactttcaagatggacgacaagttcaaggagatagttgtggaccaggttggggatcgcgctaccagctacgatgacttcacaaacagcctccctgagaatgactgccgatacgcgatctatgat

SEQ ID NO: 33108 - DNA, 281 bp, Zea mays
ggagaagagaagaaacagctcattgggatggcacgagcaacctcagaccatgccttcaatgcaacgatttgggatgtccttgttgatccttcataccagggtcagggtcttggtaaagcactcatggagaaagtaattcgtactttgctccagcgagacatcaacaacattacactgtttgcggataacaaagttatagatttctacaagaacctggggttcgaagttgatcctcaaggcatcaagggcatgttctggtaccccagattttagcaccagca

SEQ ID NO: 33109 - DNA, 267 bp, Zea mays
ggaaaggacctgcaattgctgcaactgtaggtgtggcagttcctcaagtcgaggataagactatcgccgtgcagcctatgcatgtcgctgaaaccagcgaggctgctgctgttatcgcgaaggccaaggaaggcccaaaccggtgcgcaacctgtaggaagcgtgttgggttgacgggttttaactgccgatgcgggaacacgtactgttcgatgcaccgctactccgacaaacacgactgccagttcgactatcgaactgcagcta

SEQ ID NO: 33110 - DNA, 266 bp, Zea mays
cccacgcgtccggtcgtggcttgacaggaggttcaccacggacggcaccgtccgcacgggatacgacgattcgggccagcaggtggtgatgctccgcctcgaccagcactccggcgctgccggcttcaactccaaggagcagtacctttacggcgagttcagcgtcgagatgaagctcatccgggggaactccgccggcaccgtctcgtgcttctacctctcttccggcgacggcgacgggcgcgacgagatcgacatggagttca

SEQ ID NO: 33111 - DNA, 265 bp, Zea mays
ccgctccacgcgtccgggacgctgggcttggatgttggccttattaggactacaactgggaaccgtgtctttggtgccctcaagggagctttggaaggtggactggatattcctcacagcgagaagaggtttgctggtttcaagaaggatgacaagcagctggatgctgatatccatcgcaagtacatctatggtggccatgttgctgactacatgaggaacctcgctgaagaggagccagagaagtaccagtctcacttcagtg

SEQ ID NO: 33112 - DNA, 158 bp, Zea mays
ctgccacacacacctcgccagcaccacagccaccgccacagtcacacagtcagcgagagagaagcatggacctgctgaaccccgagcagatctccgagttccgggaggcgttcgcgttcttcgacaaggacggcgacgggtgcatcacggtggaggag

SEQ ID NO: 33113 - DNA, 265 bp, Zea mays
cggacgcgtgggcgccagcaccgccgcatcaccgaagttcgcaaagatggcggtgccgctgctgacgcagaacatcgtgaagaagagggtcaagcagttcaagaggccccatcttgatcgctacaagtgccttaagccaagctggcgcaggcccaagggtatcgactcccgcgtcaggcgtaagttcaagggatgcaccttgatgcccaacattggatatggctccgacaagaagaccaggcactaccttcccaacaagttcaaa

SEQ ID NO: 33114 - DNA, 264 bp, Zea mays
ctcctcgcctcgttccccatttgctgcgtctccttgcccgcgccgccgctcgccgtttgcccctcgtctccgcaccgcgcgctgttgtccatccttgtgcagcaaaaatgacggctggctacattgttggctcactggtcggatcctttgccattgcatacctgtgtgacacatttatctctgacaagaaggcatttggaggtagcacccccaagactgtttctgagaaggagtggtggcaagccacagacaccaagttccagg

SEQ ID NO: 33115 - DNA, 274 bp, Zea mays
cggacgcgtggctctcctgcgctgcgccgtccttcacctccgccgccgaatccgagactctgatctcgggtatcaccgcagcgcacagagcacccccgactcccgtcccgatccgcgctctcctctacgacgcttcagtcatggcaggaatggcacccgagggttctcagtttgatgctaagcactatgattctaaaatgcaggagctgctgagcactggtgagactgaggagttcttcacttcatatgatgaagtttttgaaagttttgatga

SEQ ID NO: 33116 - DNA, 259 bp, Zea mays
cggacgcgtgggcggacgcgtgggcccacctgcgctgaaggatgatgtttggagattagaaaagattggcaaagatggcgcattcacacaagaagttaaatgccagtgggatctatacagttgaagatttcctccggcttcttgttagggatcagcagagattacgtagcattctgggcagtggaatgtcaaataagatgtgggacagccttgttgagcatgcaaagacatgtgtcttaagtggaaagcattatgtata

SEQ ID NO: 33117 - DNA, 151 bp, Zea mays
tagcaaccggtccaacactttcacgctcaggcgctcagctctagcaatggctgcctccaccatggcgatctcctccacggcgatggccggtacccccatcaaggtgggctccttcggcgagggccgcatcaccatgcgcaagaccgtgggc

SEQ ID NO: 33118 - DNA, 226 bp, Zea mays
tcgccgtctgccttctgcgcctccatttcggcctctgtcccttgcaagttcaatctcacctccaaccatgggtaaagagaagtcccacatcaacattgtggttattggccatgtcgactctggcaagtcgaccaccacaggacaccttatctacaagcttggaggcattgacaagcgtgtgatcgagaggtttgagaaggaggctgctgaaatgaataagcggtcc

SEQ ID NO: 33119 - DNA, 285 bp, Zea mays
gagacgccgccgccgcaagccgtccgccttgcccctcgaaggcttggtcctccttgtatcccgacctcctccgccacagacccgtttccccgctagagttatcgttcctctgcagcgatggcgatcaagcggaccaaggcggagaagaagatcgcgtacgacaagaagctgtgcagcctgctcgatgagtacaccaaggtgctcatcgccctcgccgacaacgtcggtccaagcagctccaagacatccgccggggcctcaggggcgactcggtggtgctcatgg

SEQ ID NO: 33120 - DNA, 214 bp, Zea mays
cccacgcgtccgcattcggctagttggggaggccaatgattatgttggaaagggtatggctggtggagaactggtggtagttcctgtagacaaaacaggatttgttcctgaggatgctactatagttggaaacacttgtctgtatggagctacaggtggtcaggtatttgtgagacgcaaggcaggagaaagatttgctgttagaaactctcta

SEQ ID NO: 33121 - DNA, 304 bp, Zea mays
ccacgcgaggagacaatgatgtggcaattgacctaatcgttcagcatattcggactaaacttggacaacatgatcttcgtaaaatacaccctaatctgtatgtaattcagactacttatcagatacgaggcatgcacacaataataagggatgctgccacagcaacacatgatttcatattttatgctgatcggttgattcgattggttgtcgaacatggtcttggtcatcttcctttccaggaaaagcaggtcatcactccgactgggtctgtttacactggtgtggagttctccaaaaggtt

SEQ ID NO: 33122 - DNA, 311 bp, Zea mays
gacaagctctggcatttatttatgagaagcatatcgtccatgccttgtttgctgaggttgcagacaggtatggagaccgagaaggtggctacacaaggatcatcccgacgttcccgacgcggggagataatgcacctatggcgtacattgagcttgtttaggattttccatcggttgctgtggtttcattggtgccatgcaggctgggtggtctcatgtttgcgcattgtcatctggagatctgtttctttcttcccttatcaagttgttctgtaccaaagtgtagatcacgcgtgaaatttggaactcgt

SEQ ID NO: 33123 - DNA, 219 bp, Zea mays
gggcggtggaggatcccatgttgatccatttgacatcttctcatcattttttcgaccctcttttggaggaggtggtggaagcagcaggggaagaaggcaaaggaggggagaagatgtagttcacccacttaaagtttctctggaagatctttacaatggcacctcaaagaagctctctctttcgcgcaatgtcatctgctccaagtgcaagggcaaggg

SEQ ID NO: 33124 - DNA, 196 bp, Zea mays
gtgaaggctgaccgtgacgagtcgtcaccttacgctgctatgcttgctgctcaagacgtcgcacagcgctgcaaggagcttggcattactgcactgcacattaagcttcgcgccaccggaggcaacaagaccaagacccctggacctggtgcccagtctgccctcagggcgcttgctcgttcggggatgaaaatcg

SEQ ID NO: 33125 - DNA, 305 bp, Zea mays
ggacgctggcgagcgagcgagcgagcgagccaccgcccgagagagagagagagggagagggagagtggcgattcaagtttcaaactcactatcgaggggggataggaaggtggtcactcatcggtccagctagctcgtcgccccccatggctgactggggccccgtggtgatcgcgacggtgctgttcgtgctgctcacgccgggcctgctgttccagctgccggcgcacggccgcatcgtcggcttcggcaccatgcacaccagcggcatcgccatcctcgtccacgccgtcgtctacttcgcg

SEQ ID NO: 33126 - DNA, 306 bp, Zea mays
cccacgcgtccggattagcgttgataatccaactgaataatgaaggcatacaaacattcttcgaagcctttttcagggtgccgagatggatgtggcgaggatttcttggctcgaccctttcatccgtcgatctcatactattctcattctacatgtttgcgataccccaaatcaattgcgaatgaaccttgtcaggcatctcctctctgacccaactggctcatccatgatcaagacctacctgaccttataaaaccatttgcaccaggctgcaagctgcaagaactcttagaaactgtacagttt

SEQ ID NO: 33127 - DNA, 178 bp, Zea mays
cggacgcgtggcggacgcgtgggtaaaaagaacgcatggctattgtattatttcattattatctgcggtaacatttattaaacatatcacagataataatgaaataaaaagaacgcatggctattgtattattaaaaaaaaaaaaaaacaaaaaaaaaaaaaaagggcggccgctcta

SEQ ID NO: 33128 - DNA, 211 bp, Zea mays
caaaatgctccaggtgctaggtggaaaagtccgcagaaggaaattactgtcacctaaagataggaatgtccgtccaatgatggaagttgtccgaggagcagcctttgacattttacagtcagctggtggttctcctgcttcactcagaccgggtcggtggctagacttgtatagtggtactggatccgttggaattgaagctatgagccga

SEQ ID NO: 33129 - DNA, 254 bp, Zea mays
cccacgcgtccgcagcaacccccaacagcgccactgtccagtgcgcgcgtcaagcttgcttagctagccgccatggcctccctcgccgccgtctccgtgaagcccgtggccatcaagggtctcgccggcagctccatctccggaaggaagctcgccgtcgccaggccgtcggcccgctccatccgcaggccccgcgcaccgccgtggtggccaagtacggcgacaagagcgtctactttgacctcgacgacatc

SEQ ID NO: 33130 - DNA, 297 bp, Zea mays
ccattcccgagtctccagccaaccacatccagtccaccccatccccctcgaccccgacaaccccgagtcccgacccgatggcgcccaaggccgagaagaagccagcggagaagaagccggcggccgaggagaaggcggagaagacgaccgcaggcaagaagcccaagtccgagaagcgcctgcccgcctcgaagtcctccggcaaggagggcggcgagaagaaggggaagaagaaggccaagaagagcgtggagacctacaaaatctacatcttcaaggtcctaaagcaggtgcacc

SEQ ID NO: 33131 - DNA, 294 bp, Zea mays
gctgcctgctacacccctgccaagatccatctttccggttccgccgcctgatcgaagtgaacaagcaaggaagagccatggcgagcgagcacgcggcggggggcgatgctaagcatcaccagaagcagagcctgatggacaaggcgaaggggttcgtcgcggagaagatcgcgcacatccccaagcccgaggccacgctggacggcgtgacgttcaagggcctgagccgggagtgcatcacgctgcacagcagcgtgaacgtgtccaacccctacgaccaccgcctccccatct

SEQ ID NO: 33132 - DNA, 291 bp, Zea mays
cgcgacgccaccaccacacgttcacggtagcgagagcttatcgtcgtcggcggcgaagatggtgtcgctgaagctgcagaagcggctcgccgcgagcgtcctcaagtgtgggaaaggcaaagtctggcttgaccccaatgaagtcagcgagatctccatggctaactcccgccagaacatccggaagttggttaaggatgggtttatcatcaggaagcctcagaaggttcactctaggtcccgtgcaagaagggcacatgaggccaagcagaagggaatgcactctggata

SEQ ID NO: 33133 - DNA, 283 bp, Zea mays
ggaggatgcagctaacaactttgcccgtggccactacacggttgggaaggagattgtcgatctatgcctggaccgtgtgcgcaagcttgcagacaactgcactgggctgcagggattcttggtgttcaatgctgttggtggtggtactggctctggacttggttcactgctgttggagcgcctttcagttgattatggcaagaagtctaagcttggtttcaccatttatccttccccacaggtgtcaacagctgttgtagagccatacaacagtgtcctctcg

SEQ ID NO: 33134 - DNA, 281 bp, Zea mays
cggacgcgtgggatatgattctcctgggcagacctttgtcgcttttgagaagccagaaggtgtcattgctaatggcaagttctcaaatatcctgaaattcattgttaaggaggttgatccatccacgggtgaaactgaagatgatggtgttgaggatgagtaccagcttgaagatcttgaaatagtttctgctgattatatgttgaaggtgggagtatctaacttccgaaatgcctgggaaaacatggatccagagactgagcgagttgatgagtatgggc

SEQ ID NO: 33135 - DNA, 285 bp, Zea mays
caagaaaatatccttcttcaggtagggcatatgtatttatttcttcaccatatatgcttctactctaacatatttggatatgagactaagaaaacaatacctttgcaagaggtaacagatgttcgtaaagcaaagacggctgccattttttctaatgccattgaaattgttgctggtagtagaaggcacttctttggatctttcttgtcacgtgatgaagcctatcaaattatagtagatggctgggaacaacatgttagtaatgcaagattgctccttgaacgt

SEQ ID NO: 33136 - DNA, 234 bp, Zea mays
cccacgcgtccgcccacgcgtccgcaccagctgccattgccatctactgacctgtgacctccgcacttccaaacatcccgttcgagctagagctagcagatcggcaggcatctccctcctcaaggtacatggcccgcacgcagcagttggcagtagtggcgaccgccgtggtggccttggtgctgctggcggcggtggcgacctcggaggtggccatcagctgctggcaggttg

SEQ ID NO: 33137 - DNA, 284 bp, Zea mays
cggacgcgtgggcgccaaaccacaggaagaagcgagcagggcaccgagttttctcgagcgatggcatcggcacctgccgattcctacgggtgcgcggcgtgcggcgcgcccctgaacctgtcggcggcgcacctgtacccggcggacttctacttcgaggccgggaacaagggcacgctgtccttctcgtgggtggacgagtcgcgcctgcggttcgcgcccgaggaccgcatccgccccttcttcgagacccgcaactactggggcatccagcggaagcgcac

SEQ ID NO: 33138 - DNA, 286 bp, Zea mays
cggacgcgtgggtcatccactcccgctgggccatgctgggcgcgttgggctgcgtgttcccggagctgctcgcccgcaacggcgtcaagttcggcgaggccgtgtggttcaaggccgggtcgcagatcttcagcgagggtgggctggactacctcggcaacccgagcctgatccacgcgcagagcatcctcgccatctgggcctgccaggtcgtgctcatgggcgccatcgaggggtaccgcgtcgccggcgagccgctcggagaggtcgtcgacccgctctaccc

SEQ ID NO: 33139 - DNA, 285 bp, Zea mays
ccagcgggaaagaaggagctgtacacataccagacacttgatttctgggaacagatcaaaaccccagggatgtctttgagatgctctgggttatatctctctcagtttcgccatacctctcctcatcttttagcctcaggagatggcaaaagaactgccactattgttggcgatgtctatatccatccatctgccaaggtgcatcctacttcaaagattggcccaaatgtctctatatcagcaaatgcacgcgttggagctggtgccaggcttatcaattgcata

SEQ ID NO: 33140 - DNA, 279 bp, Zea mays
cggacgcgtgggcgccgtcgcaacaggccaagacgcagcagtagaagcaccaccaccaccaccaccggcacacgaccccggcggcagcgagtgccggttctgcgagatgacgcggcagcaccagccgcagtgcgcgcggcggctgccgaagcgcatcatcctggtgcggcacggcgagagccagggcaacctggacatgtcggcctacaccaccacgcccgactaccgcatcccgctgacggcgctgggcgtggagcaggcgcgcgccgcggggcagcg

SEQ ID NO: 33141 - DNA, 276 bp, Zea mays
cggacgcgtgggcggacgcgtgggcacggtcatactggccgagtacacggagttcaccggcaacttcaccaccatcgcctcccagtgcctcatgaagctccccgcaagcaacaacaagttcacctacaactgcgacggtcacactttcaattacctcgtggaagacggattcacatactgtgttgttgctgttgaatcggtggggcaacaaattcctattgctttcatggataaggttaaggaggatttcacaaaaaggtatggtggtgggaaagc

SEQ ID NO: 33142 - DNA, 279 bp, Zea mays
cacagagctgcagcagcatcagctgccacctcctgcctctcctccttccttcctgcctgcataggttgttgctacacgtatatattctgaagaagagatcgagatgaccagcgtgtggaagaccaaggttctgcctggcctcaacaagatctttgacaaggatggcaagaaggctgcagctgcaggcttcttgaagtccttcaacaaggaggagattgacaaggagattgaggacaagaagacagagctggagcccaaggtcgtggaggcctacgaagc

SEQ ID NO: 33143 - DNA, 279 bp, Zea mays
atcaccgccgcgacgacgatggcagcctcgttccaagccgcggccaccctgatgcagccggccaagatcggcggccgggcgccctttgcctcgctgccgtcccgctcgtcgtcgcaactctccttcaggtcgttcggcgtcgacgccggcgccgccaggatcacgtgctccctgcaggacgtcgccagcaggtgcgtcgactccgcgaactcgccggcttcgcgctcgccacctcggcgctcctcgtctcgggcgcgagcgcggagggcacgcccaaga

SEQ ID NO: 33144 - DNA, 278 bp, Zea mays
gtcgctgatgagatccacctcccagctcctccgccgccggagctactcctccgcatccgggcagcccgagcggaaggtggccatcctcggggcggcggggggcatcgggcagccgctgtcgctgctcatgaagctcaacccactcgtctcctccctctcgctctacgatatcgccggcaccccaggtgtcgcggccgacgtctcccacatcaactcccccgccctggtgaagggtttcatgggtgatgagcagcttggggaagcgctagagggctcgg

SEQ ID NO: 33145 - DNA, 280 bp, Zea mays
ccaagacctcctcagacccgagaagcgcactgcggccatggacgccaccggcactggagctggagggaaggcgaagaagggagcggccggtcgcaaggccggcgggccgaggaagaagtcggtgacgaggtccgtgaaggccgggctccagttccccgtcggccgcatcgggcgctacctcaagaagggccgctacgcgcacgcgtcggcagcggtgcccccgtctacctcgcggccgtcctggagtacctcgccgctgaggtcctggagctcgccggca

SEQ ID NO: 33146 - DNA, 280 bp, Zea mays
cggacgcgtgggcggacgcgtgggtcccacctgctcaagtacgactccacgctcggcatcttcgatgccgacgtcaagcccgtcaccgacaacgccatctccgtcgactgcaaggtcatcaaggtcgtgtccgaccgcaatcccagcaacctgccgtggggcgagctcggcatcgacctcgtcatcgagggcaccggcgtcttcgtcgaccgcgagggcgcggggaagcacatccaggcgggggccaagaaggtgctcatcacggcgcccggcaagggcg

SEQ ID NO: 33147 - DNA, 282 bp, Zea mays
aggggatctcgttctcagatctaatgtatgtcaccaagcgcaacatggcaaatgctgtttcaagcatgactaaacatttggagcaagtgcaaagttctcttgctgctgctaaaaggcatttgacacagcgcattgaaaagttggacgataaattggatcagcaaaaggctctatctggacaaataagaaatgatgttactgatgcacgtctgaagcttgagaatattggttcagaaattaagaacatcaaagaattagtttggggtctggatgggaaaattg

SEQ ID NO: 33148 - DNA, 279 bp, Zea mays
cccacgcgtccgcgtttttcatccgccttcgcctccaaccgcgtgcgctccacgcctcctccaggaaagcgagagcttctacataagaacaacaaatcaaaagcgtgatcagctcggtgccaacaaaacctcaacaaccaagtttcatgtctgatctcgacgtccagcttccatctgcctttgatccgtttgctgaggcaaatgctgaggactctggtgctggtcctggaacgaaggattatgtgcatgtgcgcatccagcagcgcaacggcagaaaga

SEQ ID NO: 33149 - DNA, 277 bp, Zea mays
cggacgcgtggggcagcggacaagaaggagaaggcgctcgcggacaggaagaaggcgctcgagagccgcaagatacatcttcgcccgcgccaagcagtacgccgaggagtaccacgcccaggagaaggagcttgtgcagctcaagcgtgaggcccggttgaagggtgggttctatgtgagcccagaggccaagcttctgtttgtggttcgcatccgtggtatcaatgccatgcaccccaagacccgcaagatcttgcagctcctgcgattgaggcag

SEQ ID NO: 33150 - DNA, 278 bp, Zea mays
cccacgcgtccgacccagcatctgtaccgcgccgcgcgagcacgtccggcgccggtgcggcaggcgaaatccgagagcactcctcccccgctacgccgcaccgcccatggccgcagctagccgcagatagagagaggcgcaggcgagggcgtgcagatccagatccggtgggcgggaaggacttgatcgcccccaccaccatggccggcgcggtgtcggcgctcttcctgctggacatgaagggccgcgttctcgtctggcgcgactaacgcggcgat

SEQ ID NO: 33151 - DNA, 249 bp, Zea mays
ctgaaggcaacaagtaaatgggttatgatgaacaaactcactaggaagcttgcaagaattccagatgaagtgcggactgaaatagagccatacttttttgagcattctgctattgttgacgaagacaaccgcaagcttccaaaactgccagagggacaaagcacgtctgtagctaaatatgtgaggacaggcctgactcctcgttgggctgatcttgatataaatcagcatgtcaataatgttaaatac

SEQ ID NO: 33152 - DNA, 277 bp, Zea mays
aactgaaagaaggaatggttatcacagtggagccaggctgctatttcattgatgctttgctaactaaaacaagggatgatccaatttcctcaaagttcttcaactggcaagaggttgaaaagtataaaagctttggtggcgttcgcattgaaagtgatgtgtatgtgacggctcaaggatgccggaacctcacaaactgccctcgagaaacctgggagatcgaggctgtaatggctggcgcaccatggcctctgccggcttcaagttctatggtggt

SEQ ID NO: 33153 - DNA, 275 bp, Zea mays
ctcgcatttcttcccatccgatccccccttcgcaaccaaaaccccaactcgccccgcatcgatggcgcccaaggccgagaagaaacccgcggcgaagaagccggcggaggaggagcccgcggccgagaaggcgcccgccgggaagaagccgaagcggtagaagcgggtccccgctggcaagtccgctgccaaggaaggcggcgagggcaagaggggcaagaagaagggcaagaagagcgtggagacctacaagatctacatcttcaaggtgctga

SEQ ID NO: 33154 - DNA, 278 bp, Zea mays
ctccgcttcccgctccgatcgacctgctccctccccaccaccgagcccatggcggaccagctcaccgacgaccagatcgccgagttcaaggaggccttcagcctcttcgacaaggacggggatggttgcatcacgaccaaggagctgggcactgtcatgcgctcgctggggcaaaatcctacagaggctgagctccaggacatgatcaacgaggtcgatgctgatggcaacggcaccatcgatttcccagagtttctcaaccttatggctcgcaagat

SEQ ID NO: 33155 - DNA, 290 bp, Zea mays
agactatgcggccaagccaacattcattgataactttttcactgattggagaaaagttcttggtaaaaatcatattattaagaactttgagctttgtgatttcacaccaatatatgaatggcacctcagagagaaggagaggaagaagcagatgacaacagaggagaaaaaaacattgcgggaagacaaattgaaacaagaggagaagtacatgtgggctgttgtagatggtgttaaagaaaaggtcggaaatttcagagtagaaccgcctggcttgttcaggggacgtg

SEQ ID NO: 33156 - DNA, 277 bp, Zea mays
cagcagctagcacgctcctcgagcccagcagagaaaggccggcagagctaatcgtaatagccatgggctccaccgccggcgacgtggccgcggtggtggacgaagaggcgtgcatgtacgcgatgcagctggcgtcgtcgtccatcctgcctatgacgctgaagaacgccatcgaactgggcctgctggaggtgctgcagaaggaagccggcggaggcaaggcggcgctggcgccagaagaggtggtggcgaagatgcacgaggcgcccagcgaccc

SEQ ID NO: 33157 - DNA, 284 bp, Zea mays
ggccaacaccacgggggagcgcgcgctcaaggagaggctgttccgggcggacccgcccgaggtctggtccgtccactacctggggatgaagccatggacgtgctacagggactacgactgcaactggaacgtggcggaccagagggtgtacgccagcgacgaggcgcacgcgcgctggtggcaggtgtacgaccagatgggggaccacatgcgcgggccctgccgcctctccgagcggaggaaggtggagatcgcatgggacaggcacgtcgccgaggagctcg

SEQ ID NO: 33158 - DNA, 283 bp, Zea mays
cccacgcgtccgcccacgcgtccgcggacgctgggcgcgttcgcccactcgctccagccgcttcaccgcgccgccaccgccaccgcgaggatggcgttcaagaggttcgtggagatcgggcgcgtggccctggtgaactacggggaggactatggccgtctcgttgtcatcgtcgatgtggtcgaccagaacagggcacttgtggatgcccctgatatggtcaggtgccaggtgaacttcaagcggctctcacttactgacatcaagattgacatcaaacgtg

SEQ ID NO: 33159 - DNA, 284 bp, Zea mays
ctcacggtgacagattttaatgtgcaagcagcacagcaagggatggtgtacatagacgaggttgataagatcacaaaaaaggctgaaagtcttaacatcagcagagacgtatctggtgaaggtgttcagcaggcattgctgaaaatgctggaaggcacgatagtcaacgttcctgaaaaaggagcaaggaagcatcctcgtggtgataatatacagatagataccaaagatattctttttatatgtggtggcgctttcgtggatttggagaaaactatatcgga

SEQ ID NO: 33160 - DNA, 281 bp, Zea mays
cacccgcaaccgcacagagaaacgggaggaggctctctacccagcgcacccgagcacccctcagccccggatcgggacccctgctctgcgcaatccacccatggcggaggaatcaggccgccccttgccaaagtttggcgattgggatgttaatgatccagcttctgcagacggattcactgtcatattcaacaaagccagagacgagaagaagggtgggaacggccaagacactgagtcaccttccaaggacaccaggactgagagggtggaatcttatg

SEQ ID NO: 33161 - DNA, 278 bp, Zea mays
cccacgcgtccgcccacgcgtccgctctttatggcaattcacacacttccagttcggccaagtcacacactactggtagctatgcttcatcttggccatccaacctgtgccgccatttctctttcgctgagatcaaggccgcaacgaacaactttgatgagtcccttattcttggtgtgggtggatttggtaaagtttatcgcggtgaggttgatgggggcacaactaaggtggctatcaagcgtggcaacccgttgtctgagcagggtgtgcatgag

SEQ ID NO: 33162 - DNA, 282 bp, Zea mays
gaacactcctagctgaagatctcgagtgcaacgcaacgttggcgcttggcggccagtagtagcagctaatttagcgtcgctccttcctactagacgagagatcgagaaaccatggccaagctccaagtcactcctggcgccgcgttcaccgagtgcaatgaactcaacttccagggcctgtacatgtaccacacgcccctgggtcccaaggccaaccaagctgcgatcctagagagcaaggccaagatcggcatcggtgccaccgtggttaacaactgggca

SEQ ID NO: 33163 - DNA, 279 bp, Zea mays
cggacgctggcaagggtctaagaaaggagttctgatacttagcatgcaacatactcgtagctcacaaggttcatcccatctctcagtgatgttacaagagcaacatcagtgggaacttatagagagctttttgcctgttctcgacaactttgaaagagcgaaagtgcaaataaaggtggaaacagagggtgaggagaaaataaataatagctaccagagcatttataagcaattcatcgagattttgaattcattgggcgttgaagatgttgaaacggt

SEQ ID NO: 33164 - DNA, 279 bp, Zea mays
gcccaactgtctatgaggccatgctattagattggatgaggaaccttgaagttggaatccctgaactccttgagagcgacatcaaagtgttgatttatgctggagagtatgacctcatatgtaactggcttgttggtagcatgagtatgtgtacacaaactggtggtattgttatctcagagaaggacagttttcgttgcataacagcaggaagacaatactgctgaattgctgatactgaccatctattcttccccattactgtttctatattatgta

SEQ ID NO: 33165 - DNA, 283 bp, Zea mays
ctcacggcagatcaatttgaccgaaaggtggggtaacacacaatatgcttgatgacatccacaaccattggaaacgtgcagaggctgtgaggatcaaatgtctgggagtgccaacgctcgacatggacaacatttgcttccatctcgaggataaaacaggcggcaaagtcgtatcccgcagcataaacatcattatactgtaccgcggtcggaactatgacccccagaaaaggcctggcgtaccattgatgctgtggaaaccgttagctcctatctatcctaa

SEQ ID NO: 33166 - DNA, 277 bp, Zea mays
cggacgcgtggtcgctagggaggcacacccctggtaccttcaccaatcagctccagacctctttcagcgagactcgcctgctcatccttactgacccaaggactgaccatcagccaatcaaggagtctgctctggggaacatcccgaccattgccttctgcgacactgactctcccatgcggtatgtcgatatcggcatcccagccaacaacaaggggaggaacagcattggatgcctgttctggcttttggccaggatggttctgcagatgagggg

SEQ ID NO: 33167 - DNA, 275 bp, Zea mays
cagaggatcggcaaggtgcgcgtgcggctatcgacgctggagatcgaccgcgtgtacacccacttctacccgctgatgacgctgacgcccggcgggctgaagaagaccggcgagctgcacctggcggtgcggttcacctgcacggcgtgggccaacatgctgggcatgtacggcaagccgctgctgccgaagatgcactacagccaccccatctccgtgctgcagctggactacctccggttccaggcgatgcagatggtggcggcgcggctggg

SEQ ID NO: 33168 - DNA, 275 bp, Zea mays
tgacaataatgcgcactcttccacgggaggtggatcctgtggtatataacatgcttcatgaagatccaggaaatgtcagttactctgctgtaggtggtctgtctgatcagattagagagctcagggagtccattgagttaccacttatgaatcctgaactctttcttcgggtgggaattaagcctcctaagggtgttctactctacggtcctccaggaactgggaagaccctattggcaagggctatcgcaagtaacatcgatgccaactttttg

SEQ ID NO: 33169 - DNA, 277 bp, Zea mays
cccacgcgtccgcccacgcgtcagcccacgcgtccgcccacgcgtccgcccacgcgtccgcccacgcgtccgcccatccgtcgattggaacccagatccgcaggccgcagcacaagagggtgggatcggaccggatcggatcggagcagagggggacaaccgaccagaatccgccggcgaccaccatgggctccgcgagccgtgccgtctcgtgcctgtgctgcccctgcaagtgcctggcgtgcgggctcctgagctgcctgtgcagcatcctcgt

SEQ ID NO: 33170 - DNA, 277 bp, Zea mays
cccacgcgtccgtggaaagcaaatattgtctggtctagctgatcaaaccttttgcatttgggatttagatggtaaggaagtagattgctggaaagggcagagatcggcaacaacatctgattttgctgtagcaaaagatggaaatcttataataagcttgagtagggacaatgcaattcttctatttgatagggagacaaaacatgagagaataattgaagagggtagtacaattacttcattttctctatcagaagatggtgatttcctgcttgta

SEQ ID NO: 33171 - DNA, 286 bp, Zea mays
cgcgtcgtcaccatgaacgcggaccctcgcctcaagaaccgaaacggcccggccgagttcccctacacgctgctctaccccaacacctccgacacgaagggcgacgccgccggcatcaccgccaagggcattccaaacagcatctccatttgagttctgtctgagatgaggacgtacggtcgtcgcactagttgtttgcgtttccccgttccgttccgtgaagtgtggttctcacttgcgcggtattgtgcaaatagccaagtactccttacggaagtcgctacgt

SEQ ID NO: 33172 - DNA, 284 bp, Zea mays
ggcggaaagggaggagcgtggagcggcgaattattgtttgtttccccaagatgtcttctccaagcaagcgccgggagatggacctcatgaagctgatgatgagcgactacaaggtggagatggtgaacgatgggatgcaggagttctttgttgaatttcgtgggcctaacgaaagcatttatcaaggaggtgtatggaaggttagagtagaattgccagacgcatatccttacaaatccccatcgatcggtttcatcaataagatatatcacccaaatgtcgat

SEQ ID NO: 33173 - DNA, 275 bp, Zea mays
ttctcctcctcctccggttcgggttcgggttcgtgaggttctccggggttcggtttcgtgggtgagcggatcgagatggcggcgtcggatgttgagtaccgctgcttcgtcggcggcctcgcctgggccacggacgaccactccctccacaacgccttcagcacctacggcgaggtcctcgagtccaagatcatcctcgatcgggagacgcagaggtcccgcggcttcggcttcgtcaccttctccacggaggaggcgatgcggaacccatcgat

SEQ ID NO: 33174 - DNA, 283 bp, Zea mays
aacgaagaggtgatcaggaagtccacaaagtaactgaggagagacctggctggtgtagcgaccctcacctgccaccatgtgcagcgtttgttgaaattatggcaactgtattctcaagggatgcatggcgctgtgtatggcatatgattcagaacgacttggtccatggatggggccttgattttgctcttaggaaatgtgtggagccagcccatgagaaaattggagtggttgactcccagtggattgttcatcaagtcatcccttcgcttggtaaccaggg

SEQ ID NO: 33175 - DNA, 283 bp, Zea mays
ggagtactggtggtgcaccgagcgctgcctcgactggggcgaggcgggcggccccgacctcatcgtcgacgacggcggcgacgccacgctgctcatccacgagggtgtcaaggccgaggaggattacgagaagaccggcaagatccccgacccggagtccaccgacaacgctgagttcaagatcgtgctcaccatcatccgcgacgggctcaaggctgaccccaagaagtaccgcaagatgaaggagaggcttgtcggcgtctctgaggagaccaccacgggt

SEQ ID NO: 33176 - DNA, 278 bp, Zea mays
cggacgcgtggaaacaacatcaagctctatgtgcgcagggtgttcatcatggacaactgcgaaaagctgatccctgagtggctgagcttcgttaagggtattgttgactctgaggaccttcccctcaatatctctcgtgagactcttcagcagaacaagatcctgaaggtgatcaggaagaaccttgtgaagaagtgtgttgagctcttctttgagattgctgagaacaaggaggactacaacaagttttacgaggctttctccaagaacctcaagct

SEQ ID NO: 33177 - DNA, 272 bp, Zea mays
acacgcgtccgggacctgggccccgctctccgtcatgaaaatggtgatccagacaaagagcgtggaatacaagcccctgatcctgtcgctggcttccctcgtgaatggcatctgctggactgcttacgcgctcatccgcttcgacctctacattactatccccaacgggctgggcgtgctgttcgcggtggcgcactgagtgctgtacgccatctactacaagtccacccaggagatcatcgaggcgcgcaacgcaaggccgaccagatcgc

SEQ ID NO: 33178 - DNA, 277 bp, Zea mays
cccacgcgtccgctcgcatcatggcgttccctcagatctcccgcagagccctcggcctcctgctcgtcatcgccgcagcggccgcgatcgtctcgcccgccaccgccgacgaggtggtggccctgacggaagccgacttcgagaaggaggtcggccaggaccgcggcgccctcgtcgagttctacgcgccatggtgtggccactgcaaaaagcttgcccccgagtatgaaaaacttggcgccagcttcaagaaggctaaatctgtactgatagcaaa

SEQ ID NO: 33179 - DNA, 278 bp, Zea mays
cccacgcgtccgcaagaagtatggatgcaatgtccctttacttctgatgaactctttcaacacccatgatgacacacagaagattgttgagaagtattccaactccaacatcgaaattcatactttcaatcagagccagtatcctcgcattgttaccgaggacttcttgccacttcccagcaaagggaaatctgggaaggatggctggtatcctcctggtcatggtgatgtgtttccctctttgaataacagcggaaaacttgacatcttattggctc

SEQ ID NO: 33180 - DNA, 278 bp, Zea mays
cccacgcgtccgggaagggatactggcagttcaacatgggtgatgtcctggttgatggaaagtccactgggttttgtgccggtggctgtgcagccatcgcagattctggaacttccttgcttgctggccccacagccataattactgaaatcaatgaaaagattggtgctgctggtgtagtcagccaggagtgcaagactgttgtttctcaatatggacagcagatcctagatcttttgctagctgagacacaaccaacgaagatctgttcccaggtt

SEQ ID NO: 33181 - DNA, 277 bp, Zea mays
cccacgcgtccgtgaacgctctccgttttcaaccatgaagaagcttcagcagcaacacaggttgttcgtccatctgactgctcttggctgcagcagcacttagggcctatttggaaggaaagtgtttttttatatttttccagttaataccatggaatactagaatattttatgttacgaatgtttggttgcaatcctaaaaactatgttttcaaaagcatggtattttagataacatggtatgtttggaatatttaaaactccgtttcaatccaaa

SEQ ID NO: 33182 - DNA, 279 bp, Zea mays
ccgacatcctactttcgtcctcacgagtgaccgataatccgccggcgctaagatgttggtttatcaagatctcctatctggcgacgagctcctgtcggattcattcacctacaaggagctcgagaacggcgtcctgtgggaggtcgagggaaagtgggtcacccaaggtcctgttgatgtagacattggtgccaatccatccgccgagggtggtgaggacgaaagcgttgatgacacagccgtgaaggtggttgatattgttgacacattccgtctaca

SEQ ID NO: 33183 - DNA, 280 bp, Zea mays
atcaagaaggaagtcgaggatcttgaggctggtggtattcaggttatccaaatcgacgaggctgcactgagagaagggctgccgctccgcaaggctgagcatgcattctacttggactgggctgtccactccttcagaattaccaactgcgagatccaggacaccacccagatccacacccacatgtgctactccaacttcaacgacatcatccactcgatcatcgacatggacgcggacgtgatcaccattgagaactcgcggtccgacgagaagctgc

SEQ ID NO: 33184 - DNA, 274 bp, Zea mays
cggacgcgtggctgtcacaacttttgcttgttctttagcaaagcataggaagtcaagcacattagacgcaaaagatgtactcctacatgcagaaagaagctggaatatcaccttgccaggcttcagtggtgatgaaatcaaactgtacaagaaacagcacataaatgatattcacagggagaggcttgctctgataaagaagtccatggcgactgacacgagaaactctgctgcccaagctgcagctaaccagaaaaatcagactccgaaacca

SEQ ID NO: 33185 - DNA, 275 bp, Zea mays
cccacgcgtccgcccacgcgtccgcatcgccaccagcgagatccatatgcagcataagctcaggaagacgcccgagcaggtcgtcgctattgccagggagatggtggcgtacgcgcgcagctcgggtgccccgatgttgaattcagccctgaggatgccggcaggtcaaatcgagaattcctgtatcatatactggaggaagtcattaaagctggagcaaccactcttaatatcccagacactgtcggatacactcttccttatgaatttgggaa

SEQ ID NO: 33186 - DNA, 273 bp, Zea mays
agaagccgccgtcgcagcaatcacagcagcccggagaacggccaggtccgacaagatgcagatcttcgtgaagacgctgacagggaagaccatcaccctcgaggtcgagagcagcgacaccatcgacaatgtcaaggccaagatccaggacaaggaagggatcccgccggaccagcagcggctgatctttgccgggaagcagctggaggatggccgcacccttgcggactataacatccaaaaggagtctacgctccacctcgtgctcaggct

SEQ ID NO: 33187 - DNA, 273 bp, Zea mays
ctcgtcgagaggaagcccaatcccgaaaccgtcgccgtattccaatggcgcccaaggccgagaagaagcccgccgccaagaagcctgcggaggaggagccggcggcggagaaggccacggcggggaagaagcccaaggccgagaagcggctccccgcgggcaagtccgcaggcaaggagggtggcgagaagaaggggaagaagaaggcaaagaagtcggtggagacgtacaagatctacatctttaaggtgctgaagcaggtgcacccggaca

SEQ ID NO: 33188 - DNA, 274 bp, Zea mays
agcgtgtgagatttgaggggagcttcttcactggagagtggagagctccggtagcgaggcgaaggaaggaagagggaggaggggaatcagagaggtctccccgatggcggactggggccccgtgatcgtagcgacggtgctgttcgtggtcctcacgccggggctgctctgcacgctgccgggccggggccgcgtcgcagagttcggcagcatgcacaccagcggcctggccatcctcgtccacgccgtcctctacttcgcgctcatcaccatc

SEQ ID NO: 33189 - DNA, 270 bp, Zea mays
cggacgcgtgggacgtggtgacggggtaccggatgcacatcaaggggtggcggtcccgctactgctcaatctacccgcacgccttcatcggcaccgcccccatcaacctgacggagcggctgttccaggtgctccgctggtccacgggctccctggagatcttcttctcccggaacaacccgctgttcgggagcacgttcctgcacccgctgcagcgcgtggcgtacatcaacatcacgacgtacccgttcacggccatcttcctcatct

SEQ ID NO: 33190 - DNA, 269 bp, Zea mays
gccacgcgtccgcggacgcgtgggacgacgttgatgctgcattcaatgattcagaggaccgtcttgtagcagagaaaagagaaaagccagaatcaatgaatgcatttgctcttatttcgaggtcacagggcttcaaccttggaaatttgtttgagaaggagatgatgggaatggtaaagagggaaacatctttcacgtctcaatgtacagcacaggagatcatgtcaaaaatagaggatgcatgtgggccacttggtttcaacgtgcgg

SEQ ID NO: 33191 - DNA, 270 bp, Zea mays
cccgcctccaaacccgaactccaagtcgccccgcatcgatggcgcccaaggccgagaagaagcccgcggcgaagaagccggcggaggaggagcccgctgccgagaaggcgccggccgggaagaagcccaaggcggagaagcgtgtcccagcaggcaagtccgccggcaaggagggcggcgagggaaagaggggccggaagaagggcaagaagagcgtggagacctacaagatctacatcttcaaggtgctgaagcaggtgcacccggaca

SEQ ID NO: 33192 - DNA, 268 bp, Zea mays
ggcctccctctcctctgccgccgtcaccgccccttccttcgccgcaccagcgccagccgcgccgtggtcagaaggaggtccttcaccgtgcgcgcctctctccgcaaggccaccggcaccgccgccgtggcaatggctgccagcgccctgcttgccggcggtgccatggcccaggaggtgctgctgggcgcaggcgacggcgggctcgtcttcgagctcagccagttcaccgtcaaggccggcgacaccatcacattcaagaacaacg

SEQ ID NO: 33193 - DNA, 264 bp, Zea mays
cggacgacccgtgcagccccaactacgcgctgatgcagaagctccgcgcggtgctggtcgagcacgcgctggccaacggcgacgccgagcgcgacgtggacacgtccatcttcgccaaggtggccgagttcgagcagcaggtccgcgcggcgctgcccaaggaggtggaggccgcgcgcgcggccgtgagagaacggcagccctctggtccccaacaggatcaaggagtgccggtcctacccgctgtaccggttcgtgcgcgag

SEQ ID NO: 33194 - DNA, 266 bp, Zea mays
cccacgcgtccgcacactgatccggcctggagcgctggacagcagcagcagcagcagcatcgagctcgaggccgctccgccaccccgcactcgcctgtcgcctcttctcgctttcgccaccggggcagcgctccgccatggctggacctgctgttctcaatgagcgtatcctttcttccatgtcccagaaacatgttgctgctcacccatggcatgatttggagataggaccaggggctcctgaattcttcaattgtgtggttgag

SEQ ID NO: 33195 - DNA, 284 bp, Zea mays
gttgcaaagaatttgaatctcaagttctttgaggtgcctactgggtggaaattttttgggaatttgatggatgctggaatgtgctcaatctgtggtgaagaaagctttggcactgggtctgaccacattcgtgagaaagatggcatctgggctgtgcttgcatggctttctattattgctttcaagaataaggacaaccttggaggagataagcttgtcactgttgaagatattgtccgtcagcattgggccacatatggtcgccattattacacacgctatga

SEQ ID NO: 33196 - DNA, 280 bp, Zea mays
gaacgccggagctcgacaaggacgaccgacgacgcacgcggagatccggcgtactgcaaattttgaaaactgaactgtaagatggcatcagcagagctttcccgtgaggaaaatgtgtacatggcgaactcgctgagcaggcggagaggtacgaggagatggttgagttcatggagaaggtagccaagactgttgactcggaggagctcactgtggaggagcgaaacctcttgtctgttgcatacaagaacgtcattggagcccgccgcgcctcatggcg

SEQ ID NO: 33197 - DNA, 281 bp, Zea mays
cagtacccaatctcccctacaccagaaaaattcccagttctttggtccgcgtcagagaggcggcggcgatgtctgggcgcggcaagggcggcaagggtctgggcaagggcggcgcgaagcctaccggaaggtgctccgcgacaacatccagggcatcaccaagccggcgatccggaggctggctaggaggggtggcgtgaacgcatctcggggctcatctacgaggagacccgcggcgtgctcaagatctttctcgagaacgtcatccgcgacgccgtcac

SEQ ID NO: 33198 - DNA, 275 bp, Zea mays
cccacgcgtccgcccacgcgtccgcatcccgacccactcgcccaaaaccgtagcgccctcgcctgctcgccgccgccgtcgttgcgagctccccatcttcctccgttaaccatggcgacccagatcagcaagaagaagaagttcgtcagcgacggcgtgttctacgccgagctcaatgagatgctgacgcgggagctcgcggaggacggctactccggcgtgcaggtgcgtgtcacaccgatgcgcactgagatcatcatccgcgcaacgcgacg

SEQ ID NO: 33199 - DNA, 276 bp, Zea mays
accgtaacctcctccacccatccccgttctcacgcggctcgctcagggctcgagcgtctccccatcggaaccctaatcctctctttccctactcgcggaagccaactccaccggcaggggaagcggaagggaagcacctcggccccggcaagatggtgctcgcacagctgggcgggagcatctcccgcgccctggcgcagatgagcaacgccacggtgatcgatgagaaggtgctcaacgagtgcctcaacgagatctcgcgcgcgctcctacagg

SEQ ID NO: 33200 - DNA, 273 bp, Zea mays
gccacgcgtccgcggacggtggggattgaattccctctcccagatattaaaactagaagacgcatcttccagattcacacatcaaaaatgacattagctgacgatgtgaacttggaagagtttgttatgaccaaagatgagttctcgggcgctgatattaaggccatctgcacggaggctggattgctcgccttaagagaacgtagaatgaaagtgacccatgcagatttcaagaaagcaaaggagaaggtgatgtacaagaagaaggaaggt

SEQ ID NO: 33201 - DNA, 274 bp, Zea mays
cccacgcgtccggcagtcaccactcccaagccagtacccacagtcctacgagcagtcgcacgcaagtgtcaagagacaaaacggtcgacatggctcgcacgcaatctgccgtagcggtcgccgtggtggccgcggtgctgctgctggcagcggcggcgacgacctcggaggccgccatcacctgcgggcaggtgagctccgccatcgcgccctgcctctcctacgcccgcggcacggggtccggcccctccgcgtcctgctgtagcggcgtcag

SEQ ID NO: 33202 - DNA, 276 bp, Zea mays
gctactagtgcacatgtaaaaaatattaaataaacaaagaagcttgcctgaactatttacatacactgtaaatacagtttttagtggtgtattttaattacttacacaaaccagtattcatctcaaaagccatgaatagctattcttatcccttccatttcattgaaaaatgaaggctttcgtagggatgaagaaacgcttcaaccttcaatatacctgaacaacctgccagacaagattccagagggtactcgtgtgctagttgttgacccaatg

SEQ ID NO: 33203 - DNA, 270 bp, Zea mays
cagctagcagcacagcagcagccagagccatcccctctcctcgctacgcttcgcttcctcggcgccgattcctcctcctcctcctccaccctcgtccgtcccgttccggcgcgcgagctcgcccgagatggcgaacgcgagatcgggtgtcgctgtgaacgatgagtgcatgctgaagtttggcgagctgcagtcgaagaggctgcaccgcttcataactttcaagatggacgacaagttcaaggagatagttgtggaccaggtcgggga

SEQ ID NO: 33204 - DNA, 267 bp, Zea mays
cgaccaggagatcaagagtgcgttccgacgcatggcgctcaagtaccatccggacaagaatggcgatgaccctgttgcatcagacaggttccaggaagtcacattctcctataacatcctgtcagatcccgataagaggcggcagtacgatacatcaggatttgatgcgatcgaatctgatagtcaggaactggagctggacttgtcgagtctcaacactgtaaacacggtgtttgcagctctttttagtaagcttggtgtgccaat

SEQ ID NO: 33205 - DNA, 266 bp, Zea mays
cggacgcgtggcggacgcgtgggcggacgcgtgggggacgagctgggcgtgggctacgacgaggccgaggactacgtggtggacaagcacgcggagctgttcacgtccaccgtgatgagccggctcctggcgcggcccaacgtgaagctgttcaacgccgtggcggtggaggacctgatcgtgcggcgggggcgcgtcggcggcgtggtcaccaactgggcgctcgtgtccatgaaccacgacacgcagtcgtgcatggaccccaa

SEQ ID NO: 33206 - DNA, 269 bp, Zea mays
cccacgcgtccgcccacgcgtccgacctcggcaacccgagcctgatccacgcgcagagcatcctggccatctgggcgtgccaggtggtgctcatgggcgccgtcgaggggtaccgcatcgccggtggcccgctcggggaggtggtcgacccgctgtaccccggcggcagcttcgacccgctcgggctcgcagacgacccggaggcgttcgacggactcaaggtcaaggagatcaagaacggccgcctcgccatgttctccatgttcggc

SEQ ID NO: 33207 - DNA, 266 bp, Zea mays
aagacgtgccacatgatccaggagcaccagaactgcctcaagtacggccgccccgacctgggcttcctcaagtggcggtggcggccctccggatgcgagctgccgcgcttcgacccgctgcagttcctgcagttcgcccgcgggaagtcgctggccttcgtcggggactcgctggcgcggaaccacatgcagtcgctgctctgcctcctgtcccaggtggcgtatcccaaggacctgtcggcgaacccgtcggaccagaacaaggt

SEQ ID NO: 33208 - DNA, 266 bp, Zea mays
cagtcttgctccttgcactcctccctcctccatctccagcattgtgttctgattcacctgctccaatggctgttctttctgctgctgatgcttccccggtctcagctatcgggtttgagggctatgagaagcgccttgagatcacattctctgaggcacctgtctttgtggaccctcatgggcgtggtttgcgtgccctctccagggcccagattgactctgttctggatcttgcacggtgcacaattgtgtccgagctctccaac

SEQ ID NO: 33209 - DNA, 265 bp, Zea mays
aaaaaaaaatccacgaaccaatttctcagcaaccagcagcacgacctgtgagggttcgaaggaagtagcagtgttttttgttcctagagggaggaagagatggcaaagggggaggggccggcgatcggtatcgacctgggaacgacgtactcgtgtgtcggcgtgtggcagcacgaccgcgtcgagatcatcgccaacgaccaggggaaccgcaccacgccgtcctacgtcgccttcaccgacaccgagcggctcatcggcgatg

SEQ ID NO: 33210 - DNA, 278 bp, Zea mays
  unsure (1)..(278): unsure at all n locations
tcatcccctttgcaagtatagtctctctgctaagcgaaggancttcaagctagtctcggcggctctagaagacgatgggcaaggacgacgtgatcgagagcggcgctggcggcggcgagttcgctgccaaggactacacggaccctcccccggcgccgctgatcgacgcggcggactggggtcctggtcgctgtaccgcgccgtgatcgccgagttcatcgccacgctgctgttcctgtacatcacggtggccaccgtgatcgggtacaagcaccaga

SEQ ID NO: 33211 - DNA, 279 bp, Zea mays
cccacgcgtccgcccacgcgtccgcccacgcgtccgcacgcatactgcatacacaacgcagagcatcagaagcagctgcgatctgatcgacatggctgccgccaccatggctatcacctcccgcgcgctcgtcggcaagccggcggctggcacgagggacgtcttcggcgagggccgcatcaccatgcgcaagaccgccgccaagcccaagccggcggcgtccggcagcccatggtacggtgccgaccgcgtcctgtacctgggcccgctgtccggctc

SEQ ID NO: 33212 - DNA, 274 bp, Zea mays
ggacctggtggctgtcaagtggagggatacaggtttcaaatggtaaggaatatgcactacgcgatgtcatcgataccatcaaacatgcttttgggggatcgccacaaattgtttgcaagaggggttcaatcgaagaacttaggttatgcttcgacaaagaattgaagcctcgtgattgccttaccacttctttggcgaatggaagtgtatcaaaaagcaagcactgcccgcggtacatcaccttgccaacatatgatccccttgtgcttgccaa

SEQ ID NO: 33213 - DNA, 277 bp, Zea mays
cggacgctggacgagacgcgtgggggcgggagctcgtggtacggccccgaccgcgtgctgtagctgggcccactatccggcgagccgccgagctacctgacgggcgagttcccgggcgactacggctgggacaccgcggggctgtcggcggacccggagacgttcgccaagaaccgggagctggaggtgatccactcccgctgggccatgctgggcgcgctcggctgcgtcttcccggagctgctcgccgcaacggcgtcacattcggcgaggccgt

SEQ ID NO: 33214 - DNA, 270 bp, Zea mays
ggacctggttgctctagatccgttcatcctggtggttttgtgaggtcgaaagcggcgagcgcattagaagatgctggacaagctgtgggacgacgtggtggccgggcctcgcccggagacgggcctcgagaagctccgcaaggccaccaccgcccgtccgctcgtcatcaacaaaggtttcagcgggcgagaccagggcgaccaccgctatatctgggggcaataggggtccacagtgaagacgccatgtttgctggtccttgtggttat

SEQ ID NO: 33215 - DNA, 277 bp, Zea mays
gtcggttcacttctccaggtaaggaaagggttcgtactcatggcgccgccgcagccaaagtcgggccttttcgttggcatcaacaagggtcatgtcgtcaccaagcgcgaggtgcctccccgcccgtacaaccgcaaggggaaatcaacgaagagggtgtctatggtcaggggcctgatcagagaggttgctgggtttgctccttatgagaagcgtatcactgagcttctgaacgttggcaaggacaagcgtgccctgaagcttgctaagagaaagc

SEQ ID NO: 33216 - DNA, 279 bp, Zea mays
ggacctggtgttttttttttgtttttttttttgagtccaaaataaaaaaatctgaatctacaccgcaggcagaatacacacaggacggacagatgtttggaacacagcaccacgactgcggacgcccagaaagaatacacgggaccatgttccatggatataatttcgtgaaatcaagggggtgtttggtttatagggactaaactttagtcccttcacttaattccattttagttcataaattgttaaatagggaaactaaaatagagttttagtttc

SEQ ID NO: 33217 - DNA, 281 bp, Zea mays
cccacgcgtccgcccacgcgtccgctctcacttccctcagtcctcgtccgtctgctccctcctctctctacctagctctagctagccttcctgtagcgcggcagagatggctgcccctgcctccaccacggcggcggcggcggcagcgctgctgctgctgctcctcctgtcgctcgccgcggcggcggacatgtcgatcgtgtcctacggggagcgcacgctgaggaggcgcggcggatgtacgcggagtggatggcggcgcacggccggacctacaacgc

SEQ ID NO: 33218 - DNA, 270 bp, Zea mays
cccacgcgtccgcaactggcttggacctctctggtttatttgaagaatctaacaagaagagagaatccaaattcacatctaccaacacaagctcgacaatcatatcgaagatcgaagatattgcaaagaatttgcggttgaatttgacaaaaaaggatggtggcttgttaaagtgggaacttcaaagcccggacagaaaggggtaatgggtatcgatgccgaagtatttgaggttagccccaacttccatcttgtggagataaagagacg

SEQ ID NO: 33219 - DNA, 271 bp, Zea mays
ggaagtcaagaggcagacgctgcttgagctggtggactacatcacctcggccaccggcaagttcccggagcacgtcgtgccggaggtcatcaggatggtgtctgcgaacctgttcagggtgccgccccctgccccgagagagaacaaggcactcgagttgttcgatatggaggaggaagagcccgtcatggacccggcgtggccgcacctgcagattgtgtatgagctgttcttgaggtttattcagtctcccgagacagacgcgaactag

SEQ ID NO: 33220 - DNA, 241 bp, Zea mays
cggacgcgtggcggacgcgtggggtgttatctccccgctggaccatctcgctgggctgctggaagtgcgcgtggtgacgggagtggacctcgccatccgcgacctccgatccagcgacccctacgtcgtccttcgcatcggcaaggcgcagaaagtgaagacgcgagtggtcaagaagagcatcaatccggaatggaacgaaaaactcaccctctctattgaagaccctgccgttcctatt

SEQ ID NO: 33221 - DNA, 275 bp, Zea mays
tgcctggcaagtggcaaactcgagctgtctagtcctcggttcgcgaatcttccacagagaggcagacggcaggactcgcttcaagctcctcatctcgcgcaggggggtcgcctgagatcacagagacaatggtgaaggcagttgctgtcctcgccggcactgatgtcaagggcaccatcttcttttcacaggagggggatggtccgaccaccggaactggaagtatctctggcctcaagccagggctccatgggttccatgtgcacgcgcttggc

SEQ ID NO: 33222 - DNA, 265 bp, Zea mays
cggacgcgtggcggacgcgtgggtttttattggtataaaaagatctgacaaatataatattttacctacatcgctacaccactttttacatagaaatatcaccaataatactagttgcaacaaatcacgacatcccattattcatcatcaggactcctacaatatatagttactgacgaagaacagagtcactttattccttgcattatttaatcttgttcccggtacagctagcaagacaccagttttacagatgtaggattat

SEQ ID NO: 33223 - DNA, 264 bp, Zea mays
actttcaagatggacgacaagttcaaggagatagttgtggaccaggtcggggatcgcgctaccagctacgatgacttcacaaacagcctccctgagaatgactgccgatacgcgatctatgatttcgactttgttactgcagaggatgtccagaagagcaggatcttctatatcctatggtccccatcctccgccaaggtgaagagcaagatgctttatgcaagctcaaaccagaaattcaagagtggcctcaatggcattcag

SEQ ID NO: 33224 - DNA, 267 bp, Zea mays
agttctgcccattctacaaatccgtttggatgatgcgcaacattattcacttcaacacattggcaaatcaggctgtggagcgggcagctggtactgacggccataagataacatacagtgtcataaagcatcggttgggggatctattttatcgcctagtatcccaaaagttcgaggatcctgcagaaggcgaagaagctttggtcggcaagtttaagacactttatgacgaccttaccactgggttccgcaacctagaagatgagg

SEQ ID NO: 33225 - DNA, 267 bp, Zea mays
cccacgcgtccgcccacgcgtccgggagaagaggagtggccatggcttcgtcggtggccaccgcggcgagcacattcctgggcacccgcctggcggacccggcgccgcagaacgggcgcatcgtggcccggttcgggttcggcggcggaaagcccaaggctgccgtcccgaagaaggtggcgaagacgtcgatctcctctgaccggccgctgtggttccccggcgccgtggcgccgactacctcgacggctcgctggtcggcgacta

SEQ ID NO: 33226 - DNA, 269 bp, Zea mays
agcaaccggtccagcactttcacgctcagctccagcaatggctgcctccaccatggcgatctcctccacggcgatggccggcacccccatcaaggtgggctccttcggcgagggccgcatcaccatgcgcaagaccgtgggcaagccgcaggtggcggcgtccggcagcccctggtacgggcccgaccgcgtcaagtacctcggccccttctccggcgagcccccgagctacctcaccggcgagttccccggcgactacggctgggaca

SEQ ID NO: 33227 - DNA, 264 bp, Zea mays
cggacgcgtggcggacgcgtgggcggacgcgtgggccgaaaaatgttacagacactgagttgactgacttgttttccaactatgggaatggcacggatttgcaaattttgagaggttcacaacaaacaaacaaagctggctgtgccttcattaaatatcagacaaaagatcaagcattggcagctattgaagctctaaacgggaagcacaaaatagagggttctagcgtgccattggttgtcaaatgggctgatacagaaaagg

SEQ ID NO: 33228 - DNA, 272 bp, Zea mays
gacaccttttttgaggtggtttttgttggaggacgcactcagcctggcactgtaaaacctgaagaaggagaccgccacccttattctatgttagattgtgtggcacagcgtgaaacaattttgcctttcgtactctatatccagaaaacattgcgcaggaggcctttcttaataaaaaatcttgaaaatgttatgcgcaaattcctccaatccttggagttctttgaggaaaatgagaggcagaaactcgccatattcacagcccttgcatt

SEQ ID NO: 33229 - DNA, 258 bp, Zea mays
  unsure (1)..(258): unsure at all n locations
aaaaaaaacatgcgcgagcgtgacgggcaagaagactccagcagatcgagctgggcatggcgagcgcgctggagacgctgtgcgggcagtcgtacggggcgaacagtaccacatgctgngcatctacctgcagcggtcgtggatcatcctgtcggcgtgcgccgtggtacagctccccgtgtacctgttcacggagccgctgctggtggcgctggggcagaacccggacatttggccgttgccggggacgtggcgctc

SEQ ID NO: 33230 - DNA, 268 bp, Zea mays
caagacattttggtgagggtgcactctgagtgcctcacaggcgacatttttggatccgcaagatgtgattgtggcgaccagcttgcgatggcaatggagatgattgagaaggctggaaggggtgtattagtctatctccgtggacatgaaggaaggggtattggtctgggccacaagcttcgtgcttataacttacaggatgatgggcgtgatactgtggaagctaatgaggaacttggtcttcctgtggactcacgggaatacggga

SEQ ID NO: 33231 - DNA, 268 bp, Zea mays
agcgcctctccgcgccgcgatccagatccaggttgttcagcatgggtctggtgaaggaaggcgtcgacatggaggagggaaccctagagatcggcatggagtacaggactgtatctggtgtggccgggcctctggttatcttggataaagtaaagggcccaaagtaccaagaaattgtaaacatccgacttggagatggcaccactcgccgtggtcaagtccttgaagttgatggagaaaaagctgttgtgcaggtttttgaaggaac

SEQ ID NO: 33232 - DNA, 268 bp, Zea mays
cacaagcgcactctagcaatggcttctgaggttgtccgccctagcgacgccgagctactaaaggcacaagccgacatatggcggctcagcctctcctacctcacgcccctgtcactgaggtgcgccgtggagcttggcatccccacggcgatctaccgccatggcggggctgcctcagccgctgagctggtcacggcgctgtctctcccctccactaagctgccgttcctccgccgcctgctgcggctcctcgccgcgtcgggcgtgt

SEQ ID NO: 33233 - DNA, 269 bp, Zea mays
gccggagtccgtcgactggcgggccaagggcgccgtcgcggaggtcaaggaccagggcagctgcgggagttgctgggctttctcaacaatagcggctgtggaaggcatcaaccagattgttactggcgacatgatctccttgtctgagcaggagcttgttgactgtgacacttcatacaaccaggggtgcaatggaggtttgatggactatgcgtttgagttcatcatcaacaacggcggaatcgacaccgaggaggattacccttaca

SEQ ID NO: 33234 - DNA, 312 bp, Zea mays
agtacgcctgagtacggtccggaatccgggtcaccacggccgggacctgggcaacacttagcagggaacagctgcaaactgtgcaacttaaagaagacattgcccgcgcagagactagaaatgcagagctgacgttgagatcaaccagaagatcattgccgtcggagagtccgacgaaatccccctagtgaagaacctgaagaggattcctcttgtcgcctctctggtgtccgagatcatcgccgcctacctcatgccccccatcgagtctggctcggttgatttcgccgaatttgagccccggctcgttta

SEQ ID NO: 33235 - DNA, 272 bp, Zea mays
ggacctgggtgacctccctcagccgcgtcgcgtcgcatcctacgatccaaagctctctctgcacgcagccatggcgaagaactacccgaccgtgagcgccgagtacagcgaggctgtggagaaggccaggcgcaactccgagccctcatcgccgagaagagctgcgccccgctcatgctccgcctcgcgtggcactccgcggggacgttcgacgtgtcgtcgaggaccggcggtccattcggcacgatgaagcatcagtcggaattggctca

SEQ ID NO: 33236 - DNA, 266 bp, Zea mays
agctgatcaatataatgtcattagcagtccgcctatcttgtcaagttcaacgccagcatcatctctgaaaaccaagaacaagagtcatgccccaggttccatcatttctgtggcacgggaggctgctagaaagagggttgaagaggcatctgcagctgcaaaacgtgctgaaaacttggatgccatattgaaagctgcagagcttgctgcggaagctgtgttcagggcaggaaccattattggaatgggagaaccactacctttta

SEQ ID NO: 33237 - DNA, 255 bp, Zea mays
caagtggtttgtgacttgtcaagtgttcttccggaaaaaaaaaaagaaacacaaatggacgctcctgcggcggcggcccagggttgcggcggcaagcacatcgtgctcgtccacggcgcgtgcctgggcggctggtcctggttcaaggtggccccggcgctgcgggaggtgcccacgttccgggactacacggggccgctgctggagctcctggcgtcgctgccggacggggatcgcgtggtgctcgtgggccac

SEQ ID NO: 33238 - DNA, 262 bp, Zea mays
cccacgcgtccgggaagctcaggaacatggtcttggaagcaacaaggaagcagcgtttcgagcgcgtgacgcgtgacctgaaggtgacgcgggtgttctcgacgctggtggaggagatgaaggcgatcggcatcatagcggcgggcggcggcggcggcgaggcgtcgcagtgcacggacgtgatggcccccgtggcgcactcggagcgcacccggtgctgctgctgatgggcggcgggatgggcgccggcaagagcacggtg

SEQ ID NO: 33239 - DNA, 266 bp, Zea mays
ccatcttcgaagccatataacatacctgagagcataattaaaagcatcaattttgacacattagagggtgcattgggtatcaagtttcagaataaaggcttacttgttgaagctataacacatgcatcaagaccatcatcaggtgtttcctgttaccagcgcctggaatttgttggtgatgctgtattggaccatctcattacgaagcacttattttttacttatacggacctacctccaggccgcttgactgacttgagagctgc

SEQ ID NO: 33240 - DNA, 297 bp, Zea mays
gtgagcctgagtacgtcggaatccgggtcaccacggccggcacggtacgggagcgtgcgagctggcggacgcgtgggcggcggggaaggcgcagtacgtcaagttccaatggaagccggcgtgcggcgtggggtgcatcctgacggacgaggaggcggcgctggtcgggggacggaaccacagccacgcgacgcaggacctgtacgactccatcgcggcggggagcttcccggagtggacgctgtacgtgcaggtgatggacccggacacggaggagcagtacgacttcgacccgct

SEQ ID NO: 33241 - DNA, 275 bp, Zea mays
cgtgaatacgatatggagagatttcagctcttgaaccactaccgatataactggccagttaatcacacatctgtgagcccggataagaaacttttggctgtggttggagatgatcgggatgctcttcttgtggattcacgaaatggaaaggtaacctctaccctagttggccatctggactactcatttgctacggcatggcacccggatagccggacctttgcgaccgggaaccaggacaaaacctgccgtatctgggacaccgcaacttgtcg

SEQ ID NO: 33242 - DNA, 260 bp, Zea mays
gaccgacgcgtccgcggacgctgggttttttttttttttttttagagcaccatgcatggtccatggatcatatcatcattatcatggcttcatgggatgggaatggatcggagtacgtgcttaaccatgatcagtacacacgtatctctcggaggggcggcggtatcccgggtgatggccgggcgattaattagtagctgtagttcttgacgaacattccctccttggcctcggcggcctcgccgtcggaggtgtacttg

SEQ ID NO: 33243 - DNA, 259 bp, Zea mays
cccacgcgtccgcccacgcgtccggtcgatcgagcacctcatcctgaggcactctcctgacgccaagcaaggcattatgggcgacgacggacagacggatctgctgcactcgtacgggctagggtatcccgagcccaacgtcgtcttcgcgctgtgcagaggcagccgctcctcgccagcactgcgcgtgtacacggcggaggacgtgtcgaacgagctggagcgggccaaggtggagtacctggagtcttcggtgcgc

SEQ ID NO: 33244 - DNA, 260 bp, Zea mays
cggacgcgtgggcggacgcgtgggcgcatactgcatacacaacacagagcatcagaaggagctgcgatcagatcgacatggatgccgccaccatggctatcacctcccgcgcgctcatcggcaagccggcggctggcacgagggacgtcttcggcgagggccgcatcaccatgcgcaagaccgccgccaagcccaagccggcggcgtccggcagcccctggtacggtgccgaccgcgtcctgtacctgggcccgctgtcc

SEQ ID NO: 33245 - DNA, 262 bp, Zea mays
cccacgcgtccgctgcggattcctcctccctcgaccgtccccgtccccgtccccttccggcgcgcaactcgcccgagatggcaaacgcgagatcgggtgtcgctgtgaatgacgagtgcatgctcaagttcggcgagctgcagtcgaagaggctgcaccgcttcctaactttcaagatggacgacaagttcaaggagatcgttgtggaccaggtcggggatcgcgctaccagctacgaggacttcacaaacagcctccccga

SEQ ID NO: 33246 - DNA, 258 bp, Zea mays
cccacgcgtccgcccacgcgtccgcccacgcgtccgaattggtgaaggaagtggttttgatgcaaagggttttgcggtttccaataaaggcaagagtttggaggccattgttgaacaagttcgtgatggcagtactgttcgtgtgtatttactccctaatttccagtttgtgcagatatatgttgctggagtacaggctccatcaatgggaagacgtccatcggtacctactgtaattgctgaaactgatgataatgc

SEQ ID NO: 33247 - DNA, 264 bp, Zea mays
cccacgcgtccgcccacgcgtccgcccacgcgtccgcggacgcgtggggggggctatacttgttggttcagtattccagataatattaggatacactggtcttatgtcactgtttctgaggttaataaatccagtagttgtggcaccaactattgctgcagtgggtttggcattttttagttatggtttccctcaggctggcagctgtgtagaaatcagcatgcccctcattctgttggttcttctgtgcactctgtacatgag

SEQ ID NO: 33248 - DNA, 267 bp, Zea mays
cggacgctgggcaggacgcgtgggcttgtctagcatgcaagctgctgcagagtacctttatgacattctgccaaaggcaacactagtgaagaaaaaggtccctgtgcttatattctgcaacaagacagataaagttaccgcccactcgaaggaattcatcaagaagcagttggagaaagaattgaacaagcttagggaatctaggaacgccgtatcgtcagccgacatctctgatgaagtccagcttggggtccctggagaggcatt

SEQ ID NO: 33249 - DNA, 259 bp, Zea mays
cccacgcgtccgcccacgcgtccgcccacgcgtccgcggacgcgtgggcagctgcgtcgtctcatggcaagagcaccccagcttacgcactttggaactggtgcattccgatctgagggtgcccctggtggggggttggctgtgactgagctcgctacatcttttgctgcatccaggtctctggtttgtctatcaggtttccgggaggttgacccagaatacctcccggcgatctaccctgtctgtgccaacctcacgt

SEQ ID NO: 33250 - DNA, 261 bp, Zea mays
ggaccgtggcggacgcgtggggccagatcctcttgccggggagcagacttggccaacggaagaagacatggaggaggtcgccataaacaacaaacagagaaaattggaaaagaggaagcttccccaaggcacttcagagtaccaggctgcttggattgttgaggacacagatgatgaagataacgactctgatgatgacaaccagactgaatctggaatggtcattgatgagcaaggtcactcagaccaaggaagtgatgg

SEQ ID NO: 33251 - DNA, 264 bp, Zea mays
gcgagatggagcgcctctccgccaaggagtcattgctcctcgcctttaaagatgctgggggtttcgaggccttagtcagcgggaagaccactgagatgcagaggatcgatgtcaatgagcgaatcgttggacttgaacgcctgaatcccacaccgcgccccacaacatcgccgtttctggagggtcgatggaactttgaatggtttggtgatagtagtcctggagcatttgcagcccgtcttttgtttgagaggtcacctacgg

SEQ ID NO: 33252 - DNA, 265 bp, Zea mays
cccggcggcgcgctgacgaggaggtcgctgagaaggccgcgtcggcgaaggcggcggcggccaccgccgctctgcgcggcgtggtgagcgtgccgcagacgtgcgacctgtaccggggcagctgggtgtacgacgaggtgagcgcgcctgtgtacaaggagggcgagtgcgagttcctgacggagcaggtgacctgcatgcgcaacgggcggcgcgacgactcgtaccagaagtggcggtggcagcctgcgggctgcgacctgcc

SEQ ID NO: 33253 - DNA, 270 bp, Zea mays
ctcgcctgcgctccctcgccgccccagttccccaccccctgctcacccacccgtcccctcctgctcgcccatggctcccatcgctgtcggcgacgccctccccgacggccagctcgggtggttcgacgagaacgaccagctgcagcaggtctccgtccacgcgctcgccgccggcaagaaggtcatcctcttcggcgtccccggcgccttcaccccgacctgcagcaaccagcatgtgccaggcttcatcacacaggctgagcagctcaa

SEQ ID NO: 33254 - DNA, 272 bp, Zea mays
cccacgcgtccgacgagttcgggcacatgctggtgaacatcctgaagcagaacaacgtgaacgcggaggggtgcctgttcgacaagcacgcgcggacggcgctggccttcgtgacgctcaagcacgacggggagcgcgagttcatgttctacaggaacccgagcgcggacatgctgctgacggaggcggagctggacctgggcctggtgcggcgcgccagggtgttccactacggctccatctcgctcatctccgagccgtgccgctcggcg

SEQ ID NO: 33255 - DNA, 260 bp, Zea mays
ccacatcttcccgagcgagttcttggttgacctcttcctcttcggaccacctccaaggctcttggtgtagcttgccactctcaccaatcaagttttcatgtctgatctcgacattcagatcccaactgccttcgatcccttcgctgaggccaatgctggggactctggtgcggcacagggtcaaaggactacgtacacgtgcgcatccagcagcgtaatggtcgcaagagcctgactaccgtccagggattgaagaagga

SEQ ID NO: 33256 - DNA, 251 bp, Zea mays
ggacgctggcccgaggccttcgccgagctcaaggtgaaggagctcaagaacggccgcctcgccatgttatccatgttcggcttcttcgtccaggccatcgtcaccggcaagggcccgctcgagaacctcgctgaccacatcgctgacccagtcaacaacaacgcatgggcctacgccaccaacttcgtccccggcaactaagctcaacggctatgctatgcaacttcattgtctttcggatcggagagggt

SEQ ID NO: 33257 - DNA, 256 bp, Zea mays
  unsure (1)..(256): unsure at all n locations
cacacgcgtccgcggacggtggngggagaagaaggatccaactggagccaaggtgaccaaggctgccgcaaagaagaaatgatatgtctggctggctctgtgtttgcttgagggatacctagtggaaacgtaaaatatctcgtcttgttcacgtcattgtctgaactatgctcgcaacgtttgcctggtcgatttagaactgttatttttgttaaaaccagagtgttatttaagacttatccgaacatctggtgag

SEQ ID NO: 33258 - DNA, 264 bp, Zea mays
  unsure (1)..(264): unsure at all n locations
cccacgcgtccgcggacgcgtggngggaaattttcttgggcgttcttcggcttcattgtcacaaggttcgagttcgtcaccgtcaagtacgactgtgcgagggaggaagaggcgaggagaagatgcagatcttcgtgaagaccctgacggggaagaccatcaccctcgaggtggagagcagcgacaccgtcgacaacgtcaaggccaaaatccaggacaaggaagggattcccccagatcaacagcgactgatattcgctggca

SEQ ID NO: 33259 - DNA, 265 bp, Zea mays
cccacgcgtccggaaataataaagcgcgcgcgtgcacgcagagaggctcggagagctgagtgagatggcacaagccatggcgtccatgaccggcctctcgcagggcgttctgcccagcaggcgcgccgccaacagggccaggacggccgccgtcgtcagggcgtccgccgaggcgcaggcgcaggcgggccgccgcgccgtgctcgggctggtgggcactggcatcgtcggcggcgccttgtcgcaggcggtgcacgccgatacc

SEQ ID NO: 33260 - DNA, 264 bp, Zea mays
gcttgatgtcagcaatgaatttacatttcaactgatcaatggaattctttcagatttcagcaagatttttaagttcaagtttgtccatttgggcggagatgaagtaaacacaagttgctggagtaccacaccacacattaagtcgtggttgatgcaacatagcatgaatgaatctgatgcctacagatattttgtactgagagctcaaaagatagcaatatcgcatggttatgacatcattaactgggaagagacatttaacaa

SEQ ID NO: 33261 - DNA, 247 bp, Zea mays
cggacgcgtgggcagacgcgtgggcgccgcgttcaccaacaactccggcgtcgctccggcgctcctccgcatagcattccatgaatgcttcgtcagaggctgcgacggctcggtgctgatcgactccacggccaacaacaaggcggagaaggactcgatccccaacagcccgagcctgaggttcttcgacgtggtggaccgcgccaaggcgtccctggaggcgcggtgccccggcgtggtgtcctgc

SEQ ID NO: 33262 - DNA, 247 bp, Zea mays
gggctccagagctttgatagtgtgagcaaatgagactgcaacagcaagttcccttctctctgtggctttctcttgcccctgtggtcattggtgtttcaatggcatcccttactgagctttcattcaactggactggcttcatcaatgccatgatatcaaacatctcattcacttacaggagcatttattccaagaaagctatgactgacatggatagcaccaacgtgtatgcttacatctccataat

SEQ ID NO: 33263 - DNA, 253 bp, Zea mays
ggtctgcagcccccaactacccccagcctcggaaggaaccttccagaagcgcaagactctaaaggccgtcgccttcccattcttcctcgccgcgggggtcgcctgagatcacataaacaatggtgaaggctgttgctgtgcttggtagcagcgatggtgtcaagggcaccatctttttcacccaagagggagatggccctaccgctgtcaccggaagtgtctctggcctcaagcctggcctccatgggttcca

SEQ ID NO: 33264 - DNA, 123 bp, Zea mays
ctccgcgccagggccatcggcctcatgcctatgatagatcagggagagaaggacgacaagatcatcgccgtctgcgccgacgaccccgagtaccgccactacaacgacatcagcgagctctcc

SEQ ID NO: 33265 - DNA, 257 bp, Zea mays
cggacgcatggcgactacctccacaccatcatcaaggccaacttcccgccatacggcagggacttcgccaacgccgtcgccaccgggaggttctgcactggcaagctggcgaccgacatcaccgccgacacgctggggttcactacctaccctgccgcgtacctcagcccacaggcgtcggggcagaacctcctcatcgacgcaaacttcgcgtccgcggggtctgggtactacgaccacacggcacttatgtatca

SEQ ID NO: 33266 - DNA, 259 bp, Zea mays
gagcggtgaagaggggttacctcaagacggacgaggagttcctcaagagggacgagagcgggggcgcgtgctgcgtcacagccgtcctccaaaagggtggactggtcgtctccaacgctggagactgccgtgcggtgctcagccgagcagggaaggcagaggcgctcacctctgaccaccgggcgtccagggaggacgagaaggaaaggattgagaatttgggtggatttgtggtgaattaccgtggaacatggcgagt

SEQ ID NO: 33267 - DNA, 287 bp, Zea mays
cggacggtgggcccaacagcgccactgtccagtgcgcgcgtcaagcttgcttagctagccgccatggcctcgctcgccgccgtctccgtgaagcccgtggccatcaagggtctcgccggcagctccatctccggaaggaagctcgccgtcgccaggccgtcggcccgctccatccgcaggccccgcgcagcgccgtggtggccaagtacggcgacaagagcgtctactttgacctcgacgacatcggcaacaccaccggacagtgggacctctacggctctgacgcg

SEQ ID NO: 33268 - DNA, 172 bp, Zea mays
cccacgcgtccgcccacgcgtccgggcggctatggcggaggtgccggtgcaggaggcggctatggtggaggagctggtggtggatacggtggaggcgccggaggtggcgctggaggcggctacggcggaggagctggtggtggatacggtggaggcgccggaggtagcgccg

SEQ ID NO: 33269 - DNA, 282 bp, Zea mays
cccacgcgtccgcaacttcggcaaggtgaagtacgcgcgccacatcgccagcggcgccacttcgccatcaagatcctcgaccgcagcaagatcctctccctccgcatcgacgaccagatcaggagggagatcgggacgctcaagctgctcaagcacccgaatgtcgtccgcttgcacgaggttgctgccagtaagacgaagatctacatggtgcttgagtttgtcaacggcggcgagctcttcgacaagatcgctatcaagggggaactgtccgaacacgag

SEQ ID NO: 33270 - DNA, 284 bp, Zea mays
ctctggtgggaccccgcgttcgcgggttggtgacatggagtccggcagcatcgaggacccgccaacgcaccacttcacctacgaggagctcgaggaggcgaccaaccgcttcgacgaaagcagagaactcggcgatggcggcttcggcaccgtctacaaagggtacctcagggacgggcgcgtggtggcggtgaagcggctgtacaacaacgggtaccggcgcgtggagcagttccagaacgaggcggccatcctgtcggggctgcgccacccaacctcgtcat

SEQ ID NO: 33271 - DNA, 285 bp, Zea mays
ggcacggtgacggaggacgtggtgacggggtaccggatgcacatcaaggggtggcggtcccgctactgctccatctacccgcacgccttcatcggcaccgcccccatcaacctgacggagcggctgttccaggtgctccgctggtccacgggttccctggagatcttcttctcccggaacaacccgctgttcgggagcacgttcctgcacccgctgcagcgcgtggcgtacatcaacatcacgacgtacccgttcacggccatcttcctcatcttctacacgacg

SEQ ID NO: 33272 - DNA, 283 bp, Zea mays
  unsure (1)..(283): unsure at all n locations
ccctttgcaagtatagtctctctgctaagcgaacgnagcttcagagctagtctcggcggctctagaagacgatgggcaaggacgacgtgatcgagagcggcgctggcggcggcgagttcgctgccaaggactacacggaccctcccccggcgccgctgatcgacgcggcggagctggggtcctggtcgctgtaccgcgccgtgatcgccgagttcatcgccacgctgctgttcctgtacatcacggtggccaccgtgatcgggtacaagcaccagacggacgc

SEQ ID NO: 33273 - DNA, 286 bp, Zea mays
aatggcaggaggctaacatggcaaacaaacatggggacggctgacatcaaagtaacatttggaaatggaagcaagcatgaactgaacgtatcaacataccagatgtgtgttctcatgctgtttaactcagcagatgtcttgacttaccgtgaaattgagcagtctacagcaataccagccgctgacctgaagcgatgcctccagtcactagctcttgtgaagggtaagcaagtcctgcggaaagagccgatgagcagggacattgccgatgatgacagcttctgcg

SEQ ID NO: 33274 - DNA, 279 bp, Zea mays
actgtcccgattgcggcggaggttttcaagaaggctggtacttatgatgcgaagaagctgtttggtgtgactactcttgatgttgttcgtgctaaaactttttatgctggaaaagcgggtgtgccagttactgaggtgaacgtacctgttgttggaggccatgcgggtattactattctgccactcttctcgcaggccactcctgcaagcaattcgttgtcccaagaagacattgaggccctcaccaagaggacacaagatggtgggacagaggtggtt

SEQ ID NO: 33275 - DNA, 278 bp, Zea mays
gccacgcgtcccggacgcggggctagggttttgctgctctccgaccccgagctccgaacgccgcagcatcaggcgaggcccccctcgcgtgtgagcgagatggcgctgccgaatcaggggaccgttgattaccccagcttcaagctcgtcatcgtcggcgatggtggaactggtaaaactacatttgtgaagaggcatctcactggagagtttgagaagaaatatgaaccaaccattggtgtggaagttcatccgttggatttcaccactaactgtgg

SEQ ID NO: 33276 - DNA, 276 bp, Zea mays
gctttttgctttgctcaccagacaaaccgcagcagatggcgtcgacgatcatggccgccacctcccgcatcgtcgcggccaagacgccgtttcttggccagggtcgcgccgccgccgccgccgccaatgccagccccctccgcgacgtcgccgccgccgctgctggcggccggatcaccatgggcaacgacctgtggtacggcccggaccgcgtcaagtacctgggccccttctccgcccagacgccctcgtacctgaccggcgagttccccggcg

SEQ ID NO: 33277 - DNA, 281 bp, Zea mays
tgttcggcaactacagcgcggaccaggccagcacgtacacgccgcaggtcgtggccgccgtcgccagcggcgtcgagaagctggtggccatgggcgccaccgacatcgtggtgcccggcgtgctccccatcggctgcttccccatctacctcaccttctacggcacctccagcagcgccgactacgacagcctcggctgcctcaggaagttcaacgacctgtccaccaaccacaacaaccagctgcaggcccagatctccggcctccaggccaagtacaag

SEQ ID NO: 33278 - DNA, 275 bp, Zea mays
agttggcaaagattgatcctactgcagctggtgcggtgtatgatagagaattcattgtttgttcgttggacctactgtctggacttgcagaaggtcttggcgctggtattgaaagtcttgttgcacagagcagtttgagagatctgcttttgcaatgctgcatggatgaagcagctgatgttcgacaaagtgcccttgcccttcttggagacctttctagggtttgcccaatacatttgcatccacgtcttcaagaatttcttactgttgcagca

SEQ ID NO: 33279 - DNA, 279 bp, Zea mays
ccggcgaggcccttccctcggcctcgtcatgtcctacgtcgacgaggccaccgcgctgcaggcctccggctacttccagccttggcgtgccctccctttcgttgacctctacggacggcggtatcacatcggcagcattcggggcgtgaacgtgatatacgcactgacagggcaacgcaggctgaacgccgccgtcactgtacagacgctgatcgacgtcttcagcgtgtccggcattgttcactacggcacggcagggagctgcaacgactccatctc

SEQ ID NO: 33280 - DNA, 273 bp, Zea mays
cggacgcgtgggcaaaccctagcttcgctcgttgcggcggcgagccggcgatggcgaagtctctgcgatccaaacgcgagaagcggcttcggacgttgcgccgggagatagcggaccgttctacgacaagaaggaggccgccaagctcgccgcgcaggccgccgccctagctgctgccccgctcccggtccgcgggcccccgccatcccaggatgccggcagctcccgcgcagctagctcggcctcggctatggatgtggagatgtctgatgc

SEQ ID NO: 33281 - DNA, 277 bp, Zea mays
agactcgcagctagctgacacggccgagaagcagcttgcattgcaggcgtagtacgtacccagcagcagctagcactagcagtccatcggagcgacgatggtgagaaggacggtgctggcggcgctgctggtggccgccgccctcgccggcggcgcgcgggcgcagctcaaggaggggttctacgactactcctgcccacaggcggagaagatcgtcaaggactacgtgaaggcgcacatcccccacgcgcccgacgtcgcctccaccctgctccgc

SEQ ID NO: 33282 - DNA, 213 bp, Zea mays
cccacgcgtccgcccacgcgtccgggccccggccgctacgactgggaggcctacgccgagctcgtgcgcatggtggaacgcgccggcctccggctccaggccgtcatgtccttccaccagtgcggtggcaacgtcggcgacacctgcaacatcccgttgccgccatgggtgctggaggagatgagcagcaacccgaccatcgtatacacggac

SEQ ID NO: 33283 - DNA, 278 bp, Zea mays
cggacgcgtgggcacactaacgaacgaactgaggtcgacgacgactgatcgagcagcgacgatggcggctgtgctgaacagcaggaagacgccgcagtggttgccgtgctggtggcggcggcgctgctggcgtcgtccgcttcggcggcgatcacctgcgggcaggtggggtcgtcgctggctccgtgcatcccgtacgcgacggggagggccagcgcgctccccgcgtcgtgctgcagcggcgtcaagagcgtcaacatgggcaccgtcgccaccat

SEQ ID NO: 33284 - DNA, 276 bp, Zea mays
accacgcgtccgcggacgcgtgggaaactgttgagtataagaacattagcttcactgtttgggatgttggtggccaggacaagatcaggcccctgtggaggcactactttcagaacacacagggacttatttttgttgtagacagcaacgacagggaacgtgttgttgaggctagagatgagctccacaggatgctgaatgaggatgagctgcgtgacgctgtgctgcttgtatttgcaaacaaacaagatcttcccaatgctatgaatgctgctg

SEQ ID NO: 33285 - DNA, 257 bp, Zea mays
gttcccaaatcacttattccatcggtttctttattctttcacaccgttcctaatcttatctgtagttacacatacatacatatacaacaaatagtatcgtgcttcgtgcattacagatcagaacatcgccactgtgaagaagcagttcctgagcccacagcatggccagcaagtcatctgtctgaacgatgaacagtacacgccacgcaccaccacagtctcaatctcctcaccagctgctcctcccgctttgctcg

SEQ ID NO: 33286 - DNA, 271 bp, Zea mays
gttgatttttcttcggaagtcacagctgctcttcgcatcaccgatggtgctctggttgtggttgactgtattgaaggtgtctgtgtgcaaactgaaactgtgcttcgccaagcccttggtgagaggattaggccagttctcacggtgaacaagatggacaggtgcttccttgagcttcaggttgagggtgaggaagcgtatcagactttctcccgtgtcattgagaatgccaatgtcatcatggcaacatatgaagataagctccttggtg

SEQ ID NO: 33287 - DNA, 273 bp, Zea mays
atgcgtcagaagctccactgctgttgtcaacctggcaggcatgcccataagcactagatggtcacccgagattaagcaggaaatcaaacagagccgggtcaatgttacatcaaaggtggtgaagtacatcaaccatgctggaaacgctgatactcgaccctcagtgtttgtgagcgcaacagccattggctattatggtaccagcgaaatccatagctttgatgaatcaagtccctcgggcaatgactacctagctgaggtgtgcagagaatg

SEQ ID NO: 33288 - DNA, 264 bp, Zea mays
  unsure (1)..(264): unsure at all n locations
cggacgctgngcgcgcgacccgcgcgtggtggcgctcctcgacgccgcctcgttcccggtgctcttcgacagctcgctcgtcgacaagacggacctcttcacgggaaccttcatgccgtccaccgagctcaccggcggctaccgcgtgctctcgtacctcgaccccgccgagcccaaccacgggccgctcaagacgctcctcttctacctcctgtcgcaccggcggcagcacgtgatccccaagttccgcgaggtgtacggcga

SEQ ID NO: 33289 - DNA, 257 bp, Zea mays
ctcccagatccaattcgcgagttctccctcctctgccgccatggcgctctctgtggagaagacctcgtctggacgggagtacaaggtcaaggatctctcgcaggcggacttcggccgcctcgagattgagctggccgaggtcgaaatgcccggcctcatggcgtgccgcgccgagttcggcccgtccaagcccttcgccggcgctaggatctcggggtctctccacatgaccatccagaccgccgtcctcatcgaga

SEQ ID NO: 33290 - DNA, 259 bp, Zea mays
aaatgaggtttttgtttatcacaaggctatctcgaaaccggcagcaagccatagatttgtatcttctgacccggatgatgccgatgatgatcctggttcttatttcattagtgctgtctgctggaagagtgatagccctacgatgttaactgctaacagtcaggggaccataaaagttcttgtacttgctccttgatgttatggagggcgttcaagaggttcacagtactgtccagttgtttcctttcgtgtcattatc

SEQ ID NO: 33291 - DNA, 266 bp, Zea mays
cccacgcgtccgcccacgcgtccgcccacgcgtccgagctcaccaccaacctcagcacatcgaggagaagaggagtggccaatggcttcgtcggtggccgccgcggcgagcacattcctgggcacccgcctggcggacccggtgccgcagaacgggcgcatcgtggcccggttcgggttcggcggcggaaagcccaaggctgccgtcccgaagaaggtggcgaagacgtcgatctcctctgaccggccgctgtcgttccccggcgc

SEQ ID NO: 33292 - DNA, 266 bp, Zea mays
cccacgcgtccgagtttcttgataggaattcacttttgtgatgacatctctgcctcaaagatgggatcctctacttttactgcttctccaaagcgtttaatcaagagtgaatcatttcaaggtggtggcacaacagagctttgcttctcagatgatgcttttgatatggtacctgattgcagccggaaatctttgattagactgggcgcacacatgccaggccgggcagagcaagcatccagaaggagcgggttcgtattcccaaa

SEQ ID NO: 33293 - DNA, 257 bp, Zea mays
cggacgctgggcggacgcgtgggcgccgccactcaccagcaaattcccaagccgccccttcccccatctcttacgcgccccattagctcgattcctgatggcgcccaaggccgagaagaagcccgcggagaagaagccggcggaggagaaggccgagaagaagccaagggcggagaagcgcgtgccgagcaaggagggcggcgagaagaagggaaagaagaaggcgaagaagagcgtcgagacgtacaagatctaca

SEQ ID NO: 33294 - DNA, 256 bp, Zea mays
ggttgccactggcctgcagagggcctgcattgcggatgatggagcggaaaggccgtggaagctcagtgatgctcgtcttgtcctggaagatggatcagtgtggacggccaagtcatttggtgcttcaggaacacaagttggtgaagttgttttcaacacatcactgacaggctatcaggagattttgaccgatccaagttatgctggtcagtttgtcctaatgaccaatcctcatattgggaacactggcgttaat

SEQ ID NO: 33295 - DNA, 256 bp, Zea mays
cacctaaccattttcgctaatctccctccaccgagccggccgaatcaaatcgaaccgcgggcagcgcgcacgcgcagcgactgccggcgatggcgagcctcaccctgccgccggcgccccccaacccacgccaggacgccatcgacctccacaaggccttcaaagggtttggatgtgacagtacaacagtgataaacatacttactcatcgcgattcggtgcagcgtggactcattcaacacgaatacagggctat

SEQ ID NO: 33296 - DNA, 235 bp, Zea mays
aaaggaatagcaaatccatgtacacgcgcagttgcaccacttgttcaaattaaccaatccttgagcatcagatatatggctcaacacacacggagtagaatacaggcaggctcaagaacatgcccgcagccggccgctcagaagaagttggggtcgtatccgttgcttgaggtggcgaggatgtagtaggcgacgatgtggccgatcgatccccaggcgaggacttcgacgaggt

SEQ ID NO: 33297 - DNA, 245 bp, Zea mays
cggacgcgtgggcagcagatccgtcgttgccggaacccacgctcgccggctgcgaatgcatctgtagcctgctcttcgtccacacggacaattggacgagctagactctgcgtcgccggcgatggggtgctccttctcagggctgaacgcactgtacgacaccgtcggcggtcggggtggtgacgtctgggttaacgactaccacttccgcgtgctccgcaggctcggcgatgccggccctgcgg

SEQ ID NO: 33298 - DNA, 244 bp, Zea mays
cccagatccaattcgcgagttctccctcctctgcggccatggcgctctctgtggagaagacctcgtctggacgggagtacaaggtcaaggatctctcgcaggcggacttcggccgcctcgagattgagctggccgaggtcgaaatgcccggcctcatggcgtgccgcgccgagttcggcccgtccaagcccttcgccggcgctaggatctcggggtctctccacatgaccatccagaccgccgt

SEQ ID NO: 33299 - DNA, 247 bp, Zea mays
cccgccccgacaaggcccgtcgtctcggctacaaggccaagcagggatatgttgtctaccgtgtccgtgtgaagcgtggtggcaggaagaggcctgtgcccaagggtattgtctatggcaagcccaagcaccagggtatcacccagctcaagttccagaggaacaagaggtctgtcgctgaggagagagctggacgtaagcttggtggactgagggttcttaactcctactgggtgaatgaggatag

SEQ ID NO: 33300 - DNA, 249 bp, Zea mays
cccacgcgtccggggcgttactccaagaagcggttccgcaaggcgcagtgcccgatcgtcgagcgcctcacaaactccctcatgatgcacgggcgcaacaacggcaagaaggtcatggctgtccgcatcatcaagcataccctggagatcattcacctgctcaccgatgccaaccccatccaggtcgtcgtcgacgcgatcatcaacagtggaccccgtgaggatgccacccgtattggttccgctggt

SEQ ID NO: 33301 - DNA, 250 bp, Zea mays
cggcgattgaggaagctggtggtccaaaaattccaatgaaatatggacgtgttgatgtcacagcagctgaacagtgtccgcccgacgggaggcttcccgatgctggcccacgtgatcctgctgaacaccttagggaggtattttatagaatgggccttgatgacaaggaaattgttgcactatctggagcacacacactaagaagagcaaggcctgaccggagtggctggggaaagctagaaacaaaata

SEQ ID NO: 33302 - DNA, 282 bp, Zea mays
ggcgaacgtaataaagttcgagcctgagctgccccagtggaagagctccgccatcgccgacctcggcgtgggcaccgagaacaagatcgccatgcacttcgacagggtcttttggcccaacgtcgaggtgctgggaatggtcgggccgacgcccaaagcctgtgggtacttcctgaacctgcacaaagccaccggcaatccggtcctcgtgtacatggccgccggaaggttcgcccaggaggtggagaagctgtcggacaaggaagccgtcggcctggtcgt

SEQ ID NO: 33303 - DNA, 280 bp, Zea mays
ggttgtcaccttcggtccaactggcctgaccactgaggtgaagtctgttgagatgcaccacgaggctctccaggaggcccttcctggtgacaacgttggcttcaatgtgaagaacgttgctgtgaaggatctcaaacgtgggtacgtggcctccaactctaaggatgaccctgccaaggaggctgctagcttcacctcccaagtcatcatcatgaaccaccctgggcagattggcaatggctatgccccagtgctggactgccacacctcccacattgct

SEQ ID NO: 33304 - DNA, 277 bp, Zea mays
cccacgcgtccgattggcgtacgcgaggcgatcggagcatcccgtcccaagaggagaaactccggccggcgacgcgggggaaaatggggaagacgccggtgcggatgaaggaggtggtgtacgcgctgtcgcccttccagcagaaggtgatgccggggctgtggaaggacatcaccaccaagatccaccacaaggtcaccgagaactggatctccgccacgctcctcctcacccccgtcgtcggcacctaccaatacgccatgcggtacaaagagca

SEQ ID NO: 33305 - DNA, 276 bp, Zea mays
ctggccgccactccctgacatcgagaccggctgcccgaccccggtccggcgatccctctgcacccctttctttgcgctgccagccccaatctctcgcatccctgtcaaccatggcggcgtcacaggcggaggcgcggtgccgcgctgtcccagaaggagcaggacatacagatgatgctcgcagccgacgtccacctcggcaccaagaactgcgatttccagatggagcggtatgtctttaagcgtcgcaccgacggcatctacatcatcaacctg

SEQ ID NO: 33306 - DNA, 276 bp, Zea mays
gaactcagggcttgtgaatatgcttgtcgaggacaggtatgaagacctgaccaggatgtacactttgtttaatcatgttcctgatggtctcgcaacaattagatctgtgatggtgtctcatattaaggatactggcaaaagtttggtaacagatccagagagactaaaggacccagttgattttgttcagcggcttcttaacatgaaggacaagtatgacaatatcatcaatgtgtcatttagcaatgacaagagtttcctgaatgctctcaattc

SEQ ID NO: 33307 - DNA, 277 bp, Zea mays
cccacgcgtccgagggaaactcacaagcagcccatggtcagaattggacggtcttcaaccagagacaaagattatcgatgaccagttggtgaatattaaccagaagggtttccttacaattaacagccaacctgctgtaaatggagagaaatccgactcgcctactgttggttggggtggtcctggaggctacgtttatcagaaggcctacctcgaattcttctgcgcaaaggagaagttggaccaactaattgagaagatcaaagcattcccttct

SEQ ID NO: 33308 - DNA, 276 bp, Zea mays
atcaagccccagactgaccgctgggtgttgatggtgatgcgcttgacgccagggtaggtctcaaggccgagcatatcaatttcattgtcaaagtggccaatgttgcagacaatggcattgttcttcatcttcctcatgtggtcaaccatgatgatatccttgttgccagtggtggtcacgaagatgtcagcttccgaggtcaacggctccaagctgtcgcctgaggagctcgtggtgctgcaggggtgcccgtgcccgccgtctaggctccgcccg

SEQ ID NO: 33309 - DNA, 274 bp, Zea mays
tctaggttttttgattttagccgccgccgctgctcatctcacatccctcgagaagacgcctgctcctcgccgatcgatacgatggccgtcttctccgacctccacaccgccgacggcctcaagtccctcgaggctcacctcgccggcaaaacctatgtgtctggtgactccattactaaggatgacattaaggtcttcgccgcggtgccgtcgaagcctggcgctgagtttcctaatgccgcccgctggtacgagaccgtctctgcggctgtag

SEQ ID NO: 33310 - DNA, 271 bp, Zea mays
gccggtgccggtgaccgtggtcgggttccgggagggcggcaacgtggtgacgcaggtgaagacggccgccacggacgggtacgacgccgtccaggtcgggtaccatggcgtgcgcgaggacaagctcacccgcccggagctgggccacctgggcaaggccggcgccccgccgctgcgccacctgcaggagttccggctcaccgccgtcgacgccttcgagcccggccagcccctcgacttcgacgacctcttcaaggagggcgacctcatc

SEQ ID NO: 33311 - DNA, 268 bp, Zea mays
cctgctgccgttccccttcttcctcagttctcccgcccgctgctgccctccgtccgcgtccagatcccgccaccaaccgatccggcgccctccagcatggagggggcgggggcgaaggcggcgggagcctggctctggcgctcgtgctcgcgctcgcgggggccaactcggagggcgacgcgctctcggcgctgcgccggagcctcagggaccccggcggcgttctgcagagctgggaccccacgctcgtcaacccctgcacctggtt

SEQ ID NO: 33312 - DNA, 268 bp, Zea mays
cggacgcgtgggtgagcgagctgatgaacaaccgccacgtcctggccaagctccagaaggaggtgaggacggcgacgcccgacggccgcatggtgatggaggaggacctgagccggatgccatacctgaaggccaccatcaaggagtccatgcgcatccacccgccggcgccgttcctcctgccgcacttctccacccacgactgcgagatcaacggctacaccatccccgccggcacgcgcgtcatcgtcaacgcgtgggcgctcgc

SEQ ID NO: 33313 - DNA, 275 bp, Zea mays
gccgccgcaccagcaatcacagcagcccggagaacgccctggtccaacaagatgcagatcttcgtgaagacgctgacagggaagaccatcaccctcgaggtcgagagcagcgacaccatcgacaatgtcaaggccaagatccaggacaaggaagggatcccgccggaccagcagcggctgatctttgccgggaagcagctggaggatggccgcacccttgcggactataacatccaaaaggagtctacgctccacctcgtgcttaggctccgcgg

SEQ ID NO: 33314 - DNA, 275 bp, Zea mays
cacgtcggcgtggatgatggcgtggggccgcctggagtggaggtacgccagcgcagagcgactcgccgaggatcctgacgcggtccttccacaggaggcccttggagagcctgtccttgagcgtgccattggggaggtgctcgtacaccaggccgcacgactccgggcacacgccaatcagcctcacgatgtgtgggtgctccaatttgctcagcaccaccacctgaggatcagagcacccccagtgcgattatgactgggccataacctcctcc

SEQ ID NO: 33315 - DNA, 266 bp, Zea mays
agcagcccgagtacaacctcttctccagacacaaggttgagtctgagttcttgccactttacagcacctatggcattggtttgactacatggagtcctctggcttcaggagtactatctggaaaatatggcaaaggggacatacctgctgatagcaggtttgccctagacaattacaagaacctggcgaacaggtccctggttgacgacacgcttcgaaaagtgaatgggctaaaacctatcgccgctgaacttggcgtttcgtta

SEQ ID NO: 33316 - DNA, 265 bp, Zea mays
cccacgcgtccgcctgatgcgatggaggaagacgaagtggatgagatcgctgagatcagggcccctcacttcgaggagtcgatgaagtatgctcggcgtagtgtcagtgatgctgatatccgcaagtatcaggcgtttgcccagacattgcagcagtcccgggggttcggcagtgagttccgcttctcggatcagccggcgacagctggtgctgctgctgcagctgatccgtttgcttctgcgggtgctgcggctgatgatgacg

SEQ ID NO: 33317 - DNA, 265 bp, Zea mays
cccacgcgtccgcaactccgccggcaccgtctcgtgcttctacctctcgtcgggcgacggcgacgggcacgacgagatcgacatggagttcatgggcaacgcgagcgggcagccggtggtgctgaacacgaacgtgtgggccagcggcgacggcaagaaggagcaccagttcgacctctggttcgaaccctccgccgactaccacacctacaccatcatctggaacccgaccaacatcctgttcaaggtggacggcgacgtgatc

SEQ ID NO: 33318 - DNA, 262 bp, Zea mays
cggacgctggggagcaaaggatccaaataagagggacatgacaatagatgagaagcgtaacttagtgagaacctccagaatttgccgccggtgaagcttgatgctgttgtgcaagtcattaagaacaagaacttatcagttaagcaacatgatgatgagatagaggttgaaattgatagcatggatgctgagacactttgggagcttgacaggtttgtgtcgaactacaagaagaacctgagcaagcaaaagagaaaggccg

SEQ ID NO: 33319 - DNA, 261 bp, Zea mays
cacaagtttcgtgggtagaggaggcactagatactgtgccagatcggggtctggtagtggcagttgggtgattacgacggagtgggatgggcctcctcgacaagctgtgggacgacaccgtcgcgggcccgcgcccggacaccggcctcggccgcctccgcaagcagcccgcgcgccccgccgccgttaagatcagtgatccggccggggacgctgcagcgctcgtgccgccctcgccggcttcgggtagcgaggagacgc

SEQ ID NO: 33320 - DNA, 288 bp, Zea mays
ttcattcgttcccggcctcaccccgagccagtcgtctcgctagggtttcgccgccgccgccatgcctcgccgcagctcaggaaggtctgccccacgcccagctccccgtgctgcttcactgaggaacccgccacagccagcacgccaggctcctcctccagctcctgttcgagatggtggtggctccatgtttggaggaattgggtccaccattgctcaaggtatggcgtttggcacgggtagtgccatggcacacagggctgttgactctgtattaggtccccggac

SEQ ID NO: 33321 - DNA, 282 bp, Zea mays
cggacgcgtggcgccaagtatcaggccgacaacgccgtcccgggcgccgagaatgagctcgcctcgggcgctgccagccctcattccttgcaggagctgcaggacaccacactcggctcgctgctctcagcactcatgcagcactgcgaccccccacagcggcgctacccgctggagaagggcgttcctccaccgtggtggcctaccggcgacgaggagtggtggccggagcttggcattcccaaggaccagggcccacccccctacaagaagccccatgac

SEQ ID NO: 33322 - DNA, 275 bp, Zea mays
cttcatggtgatatttcacagcatcagcgtgaaaggacactaaatggatttcgtcaagggaaatttactgttctagtagctacagatgttgctgcccgcggtcttgatataccaaatgttgatttgattatccattacgaattgccaaatgatccagaaacttttgtccatcgttctggacgcactggacgtgctgggaaagcaggaactgcaatcttgatgtttaccagcagccaaaaaaggacagttaagtcacttgagcgtgatgttggttg

SEQ ID NO: 33323 - DNA, 277 bp, Zea mays
ctccagcatcctcccgtctccgtcgtctcgtctccgctcctcacctcgccagccatgggcaagatcaagatcggaatcaacggtttcggaaggatcggcaggctcgtggccagggtcgccctgcagagcgaggatgtcgagctcgtcgccgtcaacgaccccttcatcaccacggattacatgacgtacatgttcaagtacgacaccgtgcacggccaatggaagcacagcgacatcgccctcaaggactccaagacgcttctcttcggcgagaagc

SEQ ID NO: 33324 - DNA, 275 bp, Zea mays
cggacgcgtgggagcagatgcagtacctttatgtaagagttgtaaaagcaaaggaacttccaaacatggacatcactgggagctgtgacccgtatgttgaggtgaagcattccctgaagcatggcattctgacgcagcctcggtccctggtgatggccttgcaagcattagatcgaaagtgtatcttactccaaagctttggtatctccgtgtcaatgtcattgaagcccaggatcttataccaaatgacagggccaggttccctgaagtttatg

SEQ ID NO: 33325 - DNA, 290 bp, Zea mays
tatacctgcagtacggtcggaatccgggtcgacctccaccgaacgagcgggacctgcgacctggggctgaggagtgtttaaagcgggagaaggagcgagttggtcactatttgcatattaacagcgaacagaagttattggagaaagtgcaaaatgaattgcttgctcagtatgcaaccccgctgttagagaaggagcattctggatgttctgctttgcttcgcgatgacaaggttgaggatctttctaggatgtacagactcttctccaaaatctcccgtggtctggag

SEQ ID NO: 33326 - DNA, 274 bp, Zea mays
cccacgcgtccggggctttagcgatggtcctgttcatggctggcgccgcgctgctcgccggggctgccggcgccggcgcgcacagggcgtgtggagcatcatcacccggcccatgttccagagcatgctgagccaccgcggcgacagcaggtgccaggccgccttctacacctacgacgccttcatcgaggccgccagcaagttccccggcttcggcaccaccggcgacgagcagacgcgcaggcgggagctcgccgccttcttacgccagacg

SEQ ID NO: 33327 - DNA, 270 bp, Zea mays
gatgagtatgagcgccaatttcatttctgctgttgtgcctccgaatgaaattggagtgaaatttgacgacatcggtgcacttgaggacgtgaagagaacattggatgagcttgttacacttccaatgaggagacctgaacttttttcgcgtggaaatttgttaaggccctgtaaaggtgttttgctttttgggcctcctgggacaggaaaaacactcttggcaaaagcccttgcaacagaagctggagcaaattttatcagtataactgg

SEQ ID NO: 33328 - DNA, 269 bp, Zea mays
ggccaatccgaaatctcgagcgctcgcgccggcgaccacagcaaagaggaggccgcagcacgacagcgccccagggttcctactctcgtcgcagcggcagcactggtagcggcagcagtgaggggaagatgtcgtcggtgttcagcggcgatgagaccgcccccttcttcggcttccttggcgccgccgccgcgctcgtcttctcatgcatgggggcggcgtacgggacggccaagagtggcgtcggcgtggcgtccatgggtgtcatg

SEQ ID NO: 33329 - DNA, 267 bp, Zea mays
cccacgcgtccgctgccattctatggaaatttgtcaccgtgatcttaaacttgagaacaccctccttgatgggagtccaacacctcgtgtgaaaatttgcgactttggttactcaaaggtgttgtatacggatactgcgccggctctgttatgcgtcctaactttaccagcaactgacttctcttgtgtcgttgaatcagttacaaactttgctagtgtgcttttcagtctgctttgctgcattccaaaccaaaatcaacagttgga

SEQ ID NO: 33330 - DNA, 267 bp, Zea mays
cccacgcgtccgcgccgcctcgtctcccgggctttctcccccgaggccatccgcggctccgtgccggacatcgaggccatcgcgctgcgctcgctcgagtcctgggacggccgcctcgtcaacaccttccaagagatgaagctgtacgcgctgaatgtggcattgctgtccatcttcggcgaggaggagatgcggtacatcgaggagctgaagcagtgctacctgaccctggagaaggggtacaactcgatgccggtgaacctgccg

SEQ ID NO: 33331 - DNA, 262 bp, Zea mays
cccacgcgtccggcacagagtgaggtaagcatccgaaaaaagctgtgatctgatcgacatggccgccgccaccatggctctcacctcccgcgcgctcgtcggcaagccggcgaccagcaccagggacgtcttcggcgaggggcacatcaccatgcgcaagactgctggcgaacccaagccagcagcgtccggcagcccctggtacaggagccgaccgcgtcctgtacctgggcccgctgtccgaccagcccccaagctacct

SEQ ID NO: 33332 - DNA, 267 bp, Zea mays
catatctcctcgcatttccttgcaaccgattgccttcccccctcccaacccaagaccgatggcgcccaaggccgagaagaagcccgcggcgaagaagccggcggaggaggagcccgcggcggagaagacgaccgccgggaagaagcccaaggcggagaagcggatccccgctggcaagtccgccggcaaggagggcggcgagggcaagcgtggcaagaagaagggcaagaagagcgtggagacgtacaagatctacatcttcaaggt

SEQ ID NO: 33333 - DNA, 260 bp, Zea mays
gtcgccatcagcttcgccgtcggcatgacatgcgctttcactagcggaaaaatcattttggaggctgccattcttacagcggtggtggtgaacagcttaactgcttacactttctgggctgcgaagaggggccatgacttcaactttctcggccccttcctaattgctgctatcatggtgctcatggtgttttcactaatccagatctttttcccactgggcaagatctctgtgatgatatatggtggattggcatctct

SEQ ID NO: 33334 - DNA, 263 bp, Zea mays
atccaaaaggagtctacgctccacctcgtgcttaggctccgcggtggaatcattgagccctctctgcaggcgctcgctcgcaagtacaaccaggacaagatgatctgccgcaaatgctatgcacgactgcaccctagggctgtcaactgccgcaagaagaagtgtggtcacagcaaccagctgagggccaagaagaagatcaagaactgaggtgctgctcctagtcagtttcatggacaatgttgggctgtattgctgtgtgg

SEQ ID NO: 33335 - DNA, 122 bp, Zea mays
cacgcatactgcatacacagcacggagcatcagagggagctgcgatctgatcgacatggctgccgccaccatggctatcacctcccgcgcgctcatcggcaagccggcggctggcacgaggg

SEQ ID NO: 33336 - DNA, 152 bp, Zea mays
ctccggaaaagttggcccctgagctgaccagatcaccaagcaaagctgcaaggatgttttcaggaacacaagacaagtgtgcgacttgtggtaaaactgcgtatcctcttgagaaggtaacagtcgcagagaagtcctaccataagtcatgc

SEQ ID NO: 33337 - DNA, 285 bp, Zea mays
gtcgcatggctccccacatcatggcagatcaatggaggaaagggtcagagtggtttgagcttaaccgcgagctggctgtccagatagtagcggactacaagtactactccatcttcaggaagcactgcaggccatcctgttatccagacgagcattacataccgacttatcttcatctgttccatgggccactcaacgccaacaggactatcacatgggttgattggtcaagaggaggcccgcacccagcaagttatggtgccacagacatcacagaagacttca

SEQ ID NO: 33338 - DNA, 278 bp, Zea mays
cgatcctcgaagcctccgccgagcatcgatcatgtcggcctactgcggcaagtacgcggatgagctcatcaagaatgctgcctacatcggcacccctggcaagggtatccttgctgctgatgagtcaactggcaccattggcaagcgcctttccagcatcaatgtcgagaacgtggaggagaaccggcgggctctccgtgagctcctgttctgctgccctggtgccctccagtacatcagcggtgtgatcctcttcgaggagacctctaccagaagac

SEQ ID NO: 33339 - DNA, 280 bp, Zea mays
cggacgctgggcggacgcgtgggcggcgatcttcctcatcttctacaccacggtgccggcgctgtcgttgctgacggggcacttcatcgtgcagcggcccaccaccatgttctacgtgcacctggccaccgtgctcggcacgctgctgatcctggccgtcctggacgtgacgtgggcgggcgtgaccgtgttcgagtggttccggaacgggcagttctggatgacggccagctgctccgcgtacctggccgccgtgtgccaggtgctggtgaaggtggtg

SEQ ID NO: 33340 - DNA, 173 bp, Zea mays
gtgccatcatcatcagtttcttcgtcgtcagatttagatccgttgctgaagggtcttacggagaagaagttgagctttaggaggaacgtggtgtcattggcagccgagctcaaggatgtgaggagcaagcttgcttcccaggagcacctgtttgtaagggaatctcaaactag

SEQ ID NO: 33341 - DNA, 186 bp, Zea mays
cggacgcgtgggcggacgcgtgggcggacgcgtgggggaaaaagccaggttacgagcgcctttgctgccttacgtgcatacagacacgtgaccacacctttgcaacgacttgtgtctgccgggtccccaagcatctgagggaggagcaagtgatagaatgtgtccattgcggctgcaggggttgtg

SEQ ID NO: 33342 - DNA, 267 bp, Zea mays
cgacgggcccgggcacgacgagatcgacatggagttcatgggcaacgccagcgggcagcccgtggtgctgaacaccaacgtgtgggccaacggcgacggcaagaaggagcaccagttctacctgtggttcgacccggccgccgacttccacacctacaccatcatctggaacgacaagaacgtcatcttcaaggtggacgacctcttcgtgcggtgcttcaagcggtacccggacctggcgtacccgggcgggaagccatgtcggtg

SEQ ID NO: 33343 - DNA, 248 bp, Zea mays
tccagcgaggcggcgaccctccctcctccccttgcttcgctcgaccagccctgacaacccgcatccccgtcagtcatggcagcggcagcaggcggaggcgcggtgcgtgcgctgtcccagaaggagcaggacatacagatgatgctcgccgccgacgtccaccttggcaccaagaactgcgatttccagatggagcgctatgcctttaagcgccgcaccgacggcatctacatcatcaaccttggcaa

SEQ ID NO: 33344 - DNA, 275 bp, Zea mays
ccagtgtccgccgtcgtgcgctcgctacccctctccctcgaggcctttgccggcgaagagcgcccagtcgcccaccaggatgaagtttgttgctgcctacctgcttgctgtcctcgctgggacctccagcccctctgccgaggacttgacagccattctggagtcagttggctgtgaagttgacaatgaaaagatggaactccttctgtcccaactgagcggtaaggacattaccgagctcattgctgctggcagggagaaagttgcttcagtcc

SEQ ID NO: 33345 - DNA, 280 bp, Zea mays
catctcctcgcatttcttcccatccgatccccccttcgcaaccaaaaccccaactcgccccgcatcgatggcgcccaaggccgagaagaaacccgcggcgaagaagccggcggaggaggagcccgcggccgagaaggcgcccgccgggaagaagccgaaggggtagaagcgggtccccgctggcaagtccgctgccaaggaaggcggcgagggcaagaggggcaagaagaagggcaagaagagcgtggagacctacaagatctacatcttcaaggtgctg

SEQ ID NO: 33346 - DNA, 163 bp, Zea mays
ctcggcaccgccttcgtgtcctccttcctcgacctcggcgagtggttccagcacgagctgccggacccgtccccgttcaagctggcgcacgggcagcacgtgtgggacatggcccgccacgacgcgagcttcgccaagctctgcgacagcggcatggtcgcgg

SEQ ID NO: 33347 - DNA, 270 bp, Zea mays
cggacgctgggcggacgcgtgggcacctacctcggcgtcaggagcaggccgcagagggagaggaggctcggagacaggtacctgaccggcgacaacgaggacctgccggagtccgtcgactggcgggccaagggcgccgtcgcggaggtcaaggaccagggcagctgcgggagttgctgggctttctcaacaatagcggctgtggaaggcatcaaccagattgttactggcgacatgatctccttgtctgagcaggagcttgttgactgt

SEQ ID NO: 33348 - DNA, 272 bp, Zea mays
gcatatattatcaggctgaagttcaaggacaaaagatcacctggctaactccgcatgctcttcagcaagtattaactgatgatgttgatttcaatgtgatgctttcttttctagaattctatgagactcttctaggatttgtgaacttcaaactctatcattcaataaatgtaaattatcctcctattctggatccacgtctggaagctttagctgctgagctctatgcattgtgccgatacatgtctgctggttccagaagaatgattggg

SEQ ID NO: 33349 - DNA, 183 bp, Zea mays
gtacgggacatcaaggaaaagcttgcatacgtggctcttgactatgatcaggagctggagaacgccaagagcagctcatctgtggagaagagctacgagctgcctgatggccaggtgatcaccattggggcggagaggttccgatgccccgaggtcctcttccagccttccttcattggtatg

SEQ ID NO: 33350 - DNA, 268 bp, Zea mays
cggacgcgtgtgagcacgtgatcttcgcggtggacggcaccccggtgcgggacttcaagaaccacgaggcgcgctgggtggcgttcccgaggatgcagcccatgaggctgtacgccagcctgtggaacgccgacgactgggccacgcagggcgggcgcgtcaaggcggactggtccaaggcccccttcgtcgcctccttccgcggtttcagcgccgacgcctgcgtctgggacggcggcaggcagcgctgccctgagggcaccatgga

SEQ ID NO: 33351 - DNA, 165 bp, Zea mays
atcgtggggaacgccgcggacacgccggagcaatcatttttgctctcaagaacaagctggacattaccctcggagtagcgttggggtcggcgacccagatctccatgtttgtggtgccgctgagtgtcattgtagcttggatcgcgggtattcaaatggatcttg

SEQ ID NO: 33352 - DNA, 277 bp, Zea mays
gtccaaggaccccaccgtgagcgtcgccatcgtggagcagtccgtgtccccgggcggcggcgcgtggctgggcgggcagctgttctcggtcatggtggtgcgcaggccggcgcacctgttcctggacgagctgggcgtgggctacgacgaggccgaggactacgtggtggtcaagcacgcggcgctgttcacgtccaccgtgatgagccggctcctggcgcggcccaacgtgaagctgttcaacgccgtggcggtggaggacctgatcgtgcggcgg

SEQ ID NO: 33353 - DNA, 276 bp, Zea mays
ggaccacgccgtggcgacgttcggcgcgctggacatcatgttcaacaacgcgggactcagcgggccggcgtgctacagcgtccgggagagcggcaaggctgacttcgagcgcgtgctggccgtgaatctggtgggcccgttcctcggcaccaagcacgcggcgctggtgatggtgccctcgcaccgcggtggctgcatcatagggacgtcgagcgtggcggcggcagtgactggcgtgtcgtcgtacgcgtatcgtgcgcgaacgcgcatggtgac

SEQ ID NO: 33354 - DNA, 279 bp, Zea mays
ccgacaatgaaggtagacgttaccgcgtgccaccaaacttcccggttcgtttccatccttccgatgtcattgagtttggttccgataagaaggctatgttccgggtgaaggtgctgaacacgctcccatacgaatcagcaagaagtgggaagcagcaggggctgcagcaagagcaagtcctccaggcagcatgaatggagacaccagtcaccatcccatcatcagcgacactgtactgtatagcaatcgggagatacacgatactccaacgcgtaaaaa

SEQ ID NO: 33355 - DNA, 278 bp, Zea mays
cccacgcgtccggagcagcctaaaaaccctagcccccgaatcagatccgaccgcccgccggagcgcggaaccctgcccccggccgccatggagatgagcgatgcggagcggctgttcttcttcgagatggcctgcaacaactccgaggtcgcgtacgagcagaaccccaacgacgccgacaacttgacgcgatggggcggacgctgctggagctatcgcaactgcgtaacggccccgacagcctcaagctcctccaagatgcggaagccaagctggag

SEQ ID NO: 33356 - DNA, 279 bp, Zea mays
ctatagcaaccggtccaacactttcacgctcaggcgctcagctctagcaatggctgcctccaccatggcgatctcctccacggcgatggccggtacccccatcaaggtgggctccttcggcgagggccgcatcaccatgcgcaagaccgtgggcaagcccaaggtggcggcgtccggcagcccctggtacggccccgaccgcgtcaagtacctcggccccttctccggcgagcccccgagctacctcaccggcgagttccccggcgactacggctggga

SEQ ID NO: 33357 - DNA, 270 bp, Zea mays
ccgactcctccaactacatggtgtggtcgtccagtggccggattgcttatcccaagggtagcaagcagatgacaagagaagtggctcctgacaatgtctacaactctgcaagatccgtgaggccaggggtgaatgtgacttggggtttccctgtgcctgctagcagccggtaccttgtgcgtatgcacttctgtgacattgctagcaaggctctgtatgagctctacttcaatatctacgtcaatggtgatcttgcagtcaaggatttcg

SEQ ID NO: 33358 - DNA, 272 bp, Zea mays
ctcctccggatttcgcagtcagcggtggtgaaggtagtgggtgtggaggaagatggggctcgcgttcgggaagctcttcagccggctcttcgccaagaaggagatgcggaatcccatggtcggtctcgacgccgccggtaaaaccaccatcctctacaagctcaagctcggcgagatcgtcacaaccatccccaccatcggtttcaatgttgaaactgttgagtacaagaacattagcttcacggtctgggatgtcgggggtcaggacaaga

SEQ ID NO: 33359 - DNA, 274 bp, Zea mays
gccgagagcacagggaacagacagacatggtcacgggatccatgaagcacctcgtgcaggtggagccggcaagggaggcggcggcggagggcggggcgccatcggcggggcccacgtaccgatgcgcggccggtggcaacgccgcgtcgccgcccgccgtgccggggctcgagtgctgctgggacatattccgcttgtccgtggagaagtgccccgacaacaagatgctgggccgccgcgaaattgtccacggaaaggctggcagctacacatg

SEQ ID NO: 33360 - DNA, 277 bp, Zea mays
gagagagagagatcagcaacttaacaacaataatggccaccgccatagttcccacggacgccgagctgctgcaggcgcaggccgacctgtggcgccacagcctctactacctgacatccatggcgctcaagtgcgcggtggagctccacatcccgaccgccatccacaacctaggcggtgctgccacgctgccggacctcgtggccgcgctgtccctgccagcggccaagctcccgttcctcgggcgcgtgatgcggctgctggtcacgtcgggcgt

SEQ ID NO: 33361 - DNA, 273 bp, Zea mays
cccacgcgtccgcttgcacggtgcacaattgtgtctgagctctccaacaaggatttcgactcatatgtcctttctgagtcaagcttgtttatctatcctctgaagattgtcatcaagacctgtggcactaccaagctcctgctcaccattccaagaatccttgagcttgctgaagagctgtctatgccacttgctgctgtgaagtactcccgtgggacgttcatctttcctggcgcacagccagccccccacaggagcttctctgaggaagtt

SEQ ID NO: 33362 - DNA, 274 bp, Zea mays
gccgccatgatcgaccagctccagatccgcgacacctgagaatgtacaattcgctggtggagaggtgcttcacggactgtgtggacacgttccggtgcaagaacctggacaagcaagaggagtcgtgcgtccgccggtgcgcggagaagttcctgaagcactccatgagggtcggcatgaggttcgccgagcttaaccagggtgtggccacgccggactaagaaacacgctgccgctggctggctgctctcgttgcgcgcctgccgccaggttt

SEQ ID NO: 33363 - DNA, 272 bp, Zea mays
cggacggtgggtcggacgcgtgggtgtacaccacagcgcgtggccccgacgacctggacactcggctcctccacgcgatggtgaacaagggcctggtggagccggtgtccagcacgttcgtgaacctggtgaacgcggactacacggccaagcagcgctgcctccgcctcacggaggagcgcgtggcgcacgacagccccgcggcggaggcgccgctggagtccgtccaggttcgcctctcgcacgtgcagtccaagttcgcgggtgccatc

SEQ ID NO: 33364 - DNA, 272 bp, Zea mays
ctttttgctcaacaaacagcagagaacattgcagcactccttacaccacagtccggggcttattatgacctgtgggtggatggcgagaagataatgtcagctgaagagcctcctgaggtgacaaaagcccgcaatgacaactcgcatggaacgaacttccctgactctccggaaccaatctatggcacccagtatctaccaaggaagttcaaggttgcagttaccgcggctggtgataactctgttgatattctgaccaatgacatcggtgt

SEQ ID NO: 33365 - DNA, 276 bp, Zea mays
cagcaacttccctcagatcccatccacccctcgctattaaagcagcccaggccgccgcacgcagccgctcacccaccaatccacagcgacacccgaccccgccgtcgtgatgaggccggcgctgctcaagtccacggccgagctcctccgccgcagccgcggctacgcctcctcggccaacccggagcggaaggtggccatcctgggcgctgagggcggcatcgggcagccgctctccctcctcatgaagctacacccgctcgtctcctccctctc

SEQ ID NO: 33366 - DNA, 265 bp, Zea mays
cccacgtgtccgggacttagtaaagcttgccatggatcttaccaaccttccgatctgtgtctcatctgtagatccttcagcgttccattctgcagtacaagcaggagctaaaatggttgagattggaaactatgattccttttatgagatgggcattgagttttcctctgagcagatactgaagctaacaagggaaacaaggaagatgcttccagacatcaccttatcagtaacagttcctcacacacttagtttgccagatcag

SEQ ID NO: 33367 - DNA, 265 bp, Zea mays
gagagagagacggaaagggggagatgagccggagcctggggatcccggtgaagttgctccatgaggcagcgggtcatgtggtgacggtggagctcaagaccggcgaagtgtaccgggggtccatggtcgagtgcgaggataactggaattgccagctcgagaacattaccttcaccgccaaggatgggaaggtttcgcagctggagcacgtcttcatcagaggaagcagagtgagatttatgattatacctgatatgctcaagaa

SEQ ID NO: 33368 - DNA, 269 bp, Zea mays
cggaatgaacaaaatggttatcaatcacttggacaagctgtttgtcacaaacgatgctgccaccattgtgaatgagctcgaagttcagcaccctgccgctaagattctggtactggctggtagggctcaacaggaggagattggggatggggccaatctcaccatatcgtttgccggtgaactgcttgagaaggctgaggagctcatcaggatgggcttgcatccaagtgagatcatcattggctacactaaagccatcaacaagacaa

SEQ ID NO: 33369 - DNA, 270 bp, Zea mays
aaaggtttgatgagaatgatggagagccaagggatcagccctgatatctatacttacagtgtgctcatgagtggctacgcgaaaggaggcatgattgatgaagcccatgatctacttcgtgaagctaagaaaattcatccgaagctaaacagggttgcttatcacatacttatccgtggatactgcaagatggaggacttcgagaaggccaatgagtgcctaaaggagatgaagaaagatgggttgcagccaaatgtggatgagtatgac

SEQ ID NO: 33370 - DNA, 268 bp, Zea mays
cggacgcgtgggtccaagcactacaagacgctgctgccggcgctgtgggagcgacaagatcaggaacgtcatggaaatgaacaccgtgtacggaggattcgcaggcagcctcgtcaaggaccccgtctgggtcatgaacgtcgtctcctcctacggcccaaactccctcggcgtcgtctacgacagagggctcatcggcgtcaaccacgactggtgtcaggcgttctcgacatatccacgcacctatgacctgttgcatcttgatggc

SEQ ID NO: 33371 - DNA, 275 bp, Zea mays
acgggacgcgtggtaattgacccaaacaccaggcatcacatgtccagggaaaagactgagactatattgaatacttttagtgaagcaattctttgtagagaaagaagttacttccacattagtgatggactctttgtatacaagtctgaaggcacttgaatatcggatgaagagcaagaaatgcaaaacaagattagcagatttggaagaactacctgtggctatggtccatgttgacatggacatgtttggcttggctgatgatgttatagctt

SEQ ID NO: 33372 - DNA, 271 bp, Zea mays
gcgcagaacagcaggtgatgctggatgccgagctccagctgtggaaccacaccttcggctacgtcaagtccatggcgctcaaggccgcgatcgacctcggcatacccgaggccatccaccagcacggcggcacggtcaccctcccacaaatagtcaccagggtcaagctccacccgtccaagacaccatgcctgtagcgcctcatgcgcgtgctcaccctcaccggcgtcttcggcgcgctagagccgcacgatgacgacggcggctgtga

SEQ ID NO: 33373 - DNA, 275 bp, Zea mays
caagaatgtgcttgctgttgctgtcgagacagactactcgtacccacatgctgacaagatcaaggagtacctcaaggacccaagcaagtttgctgttgccgccccggttgctgctggggactctggcgctgcagctgctcccaaggaagaagagaaggctgcggagcctgaagaggagtcggacgaggaaatgggcttcagcctcttcgacgactagagctgctgttttcgtcaaactgctgcaagttttggcttttttttttatcatctacaag

SEQ ID NO: 33374 - DNA, 278 bp, Zea mays
gaagaacacggacttcatctcctacgtcggcgacggcttcaagctgctgatcccgtccaagtggaaccccagcaaggagcgggagttccccgggcatgtgctccgctacgaggacaacttcgacgccaacagcaacgtgtccgtcatcatccagcccacctccaagaaggccatcaccgagtacggctcccccgaggagttcctctcgcaggtcgactacctgctcggcaagcaggcctacggcggtaagtacgactccgagggcgggttcgagaccg

SEQ ID NO: 33375 - DNA, 256 bp, Zea mays
gtccatgctctccgctaccaccgtgccactccagcaggggggctggctgtccgagttctccgggctcaggagctccgcgtcgctgcccatgcgccggaatgccacctccgacgacttcatgtccgccgtctccttcaggacccacgcggtcggcacgagcggcgggccgcggcgggcgccgacggaggcgaactgtaaggtggccatcaatgggttcggccgcatcgggcgtaacttcctgcggtgctggcactgg

SEQ ID NO: 33376 - DNA, 261 bp, Zea mays
cggacgcgtgggcaagcacaagcgcactctagcaatggcttctgatgttgtccgccctagcgacgccgagcacctaaaggcacaagccgacatatggcggctcagcctctcctacctcacgcccctgtcactgaggtgcgccgtggagcttggcatccccacggcgatctaccgccatggcggggctgcctcagccgctgagctggtcacggcgctgtctctcccctccactaagctgccgttcctccgtcgtctgctgcg

SEQ ID NO: 33377 - DNA, 262 bp, Zea mays
tagatggtgggcgctcgcgtcaccggagctctccagaaccgaaccccaactgcccaagggcgtgcgatctacacccctcggcggcttcgtcaacgacgccgagatacattcaaatacattctgaatatagcattctgctgcagaacactttgaggaatggctgtagaggatgtccagccccttgtgtgtgacaatggcactggaatggtcaaggcgggtttcgctggtgacgacgcaccgagagctgtctttcctagcattg

SEQ ID NO: 33378 - DNA, 268 bp, Zea mays
cccacgcgtccgcaacaaagtcctgattatgcagagcaaacagattttgaagctggtgtacaagatttcaaagagcgattgacctattatgaaaaggtctatgaaccggtggaagaaggttcttacataaaaatgattgacatggttagtgggaaggggggccaactaaagattaatgacataagtggttacttgcctggacggatcgttttcttcttgggtaactgtcatctgacacctcgtcctatcctgctaacaagacatggtg

SEQ ID NO: 33379 - DNA, 268 bp, Zea mays
acaagaccttcaccctaacacccgagcagtacattgtgaagctggagcaaggaggtcaaaccgtctgcatcagtgggttcatggcgtatgacgtgccaccgccgcgtggtcctctctggattcttggggacgtcttcatgggagcttaccacacggtgttcgacttcggcaacgacaggattggcttcgcggaatctgcatgagtgtggagagcactctcatctttataaagacgataccctatgtattagggatgtgtagtttattg

SEQ ID NO: 33380 - DNA, 266 bp, Zea mays
gctctgtccacctctctcgctctgggccgccgccgccgccctaagccacgtgctgaggctttcgttggtctcttcgccggcgacgagcacccagcagttctgtagaaatggctgatggtgaggacatccagcctcttgtctgcgacaatggcactggaatggtcaaggctggttttgctggcgatgatgcaccaagggcggttttccctagcattgttggccgtcctcgccacactggtgtcatggtagggatgggacagaaggac

SEQ ID NO: 33381 - DNA, 259 bp, Zea mays
tgagccatagtcagggtataaaaggtttacgtgatgaaattgctgctggaattgctgctcgtgatgggtttcatgcaagtggagataacatctttctaacagatggagcaagcccagcagtgcacatgatgatgcagttgttgataagttctgagagcgatggcattctctgccctattccacagtacccactgtactctgcatcgattgctcttcacggtggttcccttgttccttatgtccttaatgaagagacagg

SEQ ID NO: 33382 - DNA, 260 bp, Zea mays
gttttgacgcatgccactattgaagaaatcgaagcggtgaaatccctcatcgaagaccaagctaaagaaaagatggagaaggtgatcgaaacagtccaaactaacttcaacactgtgaggacagggtgtgcaagcccggcaatgcttgaccggatcgaggtcgagtactacggaagtccagtgaacttgaagagcattgcacagataagcactccagatgcaacttctcttcgtattcaaccatatgagaagtcaagcct

SEQ ID NO: 33383 - DNA, 260 bp, Zea mays
cccacgcgtccgtccatgtgtccggtgagagcaccttcatcatgatcaagcctgacggcgtccagaggggtctcgtaagcatcatgtgttcctagttcgtttctgttcattcgattcgatttggtgatgtccacgcgctttgtgattcgattttgtactagtttgtgttcactccatcctgcttggtttttttcagattggtgagatcatcagccgttttgagaagaagggcttctacctcaagggtaatctagcgtcca

SEQ ID NO: 33384 - DNA, 263 bp, Zea mays
cccgcctccactcccccctcccaggtgctgcccaggtaagttggcggtggtgatgacaacgcgcttcaagaagaaccgcaagaagcgcggccacgtgtccgccgggcacggccgcatcggcaagcacaggaagcacccgggaggtcgcggtaacgccggtggcatgcaccaccaccgtatcctcttcgacaagtaccatccgggctacttcggcaaggttggcatgcgttacttccataagctccgcaacaagttctactgcc

SEQ ID NO: 33385 - DNA, 71 bp, Zea mays
ggatgctgttactcctgtcaggatttgttctaagttaatcctaaggaaaaaatggtgcttcttggtgctgc

SEQ ID NO: 33386 - DNA, 264 bp, Zea mays
tccagcatctcccgtctccgtcgtctcgtctctgctcctcacctcgccgccagccatgggcaagatcaagatcggaatcaacggtttcggaaggatcggcaggctcgtggccagggtcgccctgcagagcgaggatgtcgagctcgtcgccgtcaacgaccccttcatcaccacggattacatgacctacatgttcaagtacgacaccgtgcacggccaatggaagcacagcgacatcaccctcaaggactccaagacgcttct

SEQ ID NO: 33387 - DNA, 263 bp, Zea mays
atcgaccgagcgaatccctcgcatcgcattcgcagcctttgctgcatcacaccaccgcgaaaccccagcagccgcatcgatggcgcctaaggcggagaagaagccggctgcgaagaagccagcggaggaggagcccgctgccgcgaaggccccggcggggaagaagcccaaggccgagaagcgcctcccggcggccaagtcgtccggcaaagaaggcggcgacaagaagggtaagaagaaggcgaagaagtcggtggagacct

SEQ ID NO: 33388 - DNA, 260 bp, Zea mays
gaggatgcgtgtgctgaggcgccttctccgcaagtatcgtgaggtcaagaagattgacaagcacatgtatcatgacatgtacatgaaggtcaaaggtaacgccttcaagaacaagagggtgcttatggagagtatccacaagtccaaggctgagaaggccagagagaagacactttctgaccagtttgaggccaagcgcgccaagagcaaggcgagccgtgagaggaagatcgctaggagggaggagaggttggcccagg

SEQ ID NO: 33389 - DNA, 260 bp, Zea mays
gccgcgccgcaatagctcgccccctcgttcgccgcctctcctgctcctaccgcagctctccctcaggtttagtgttcgcaatggcggccttcaacaagcttggtggccttctaaggcacagtgctctggtgagcggtatcactggtggctcttctcctgcagtgttcaatgctgcacggctcatgtctaccaagctatttattggtggtcttgactggggtgttgatgacgtgaaactaagagaagcatttagcagcttt

SEQ ID NO: 33390 - DNA, 271 bp, Zea mays
ggacgcgtggcggggtgtgcatcctgaccgagtgggacgagttcaagaccctggactaccagaagatcatcgacaacatgcagaagcccgccttcgtcttcgacggccgcaacatcgtcgacccggagaagctgagggagatcggcttcatcgtctactccatcggcaagccgctcgacgcctggcttaaggacatgcccgcggtcgcttaattcgtctgaggtgctccattggattggatccggggaaggaagaggaactggttgaccat

SEQ ID NO: 33391 - DNA, 271 bp, Zea mays
ggacgcgtggcggacgcgtgggagaggagcaccctgtgttgctcaccgaggctcctttgaacccaaaggaccaacagggagaagatgacccaaattatgtttgagactttcaatgttcctgccatgtatgttgcaatccaagcggtgctctcactctatgctagtgggcgtactactggtattgtactcgactctggtgatggtgtgagccacactgtgcccatttacgaaggatatgcccttcctcatgccattcttcgtttggatcttg

SEQ ID NO: 33392 - DNA, 271 bp, Zea mays
cacagagatagagttgctatcgaggctgcatcaccgtaatctagtctctttgctcggttattgtgatgaagatgatgaacagatgctggtttacgagtatatgcccaatggaaatctgcgtgatcatctttcagctagagctaaggtgcctctagatttccccatgaggctacggatcgcgctgggatcgtcacgtggtatcctgtatttgcacacggaagcagatcctccaatataccatcgtgacatcaaagccagcaatattctactg

SEQ ID NO: 33393 - DNA, 272 bp, Zea mays
cccacgcgtccgggcttttggagcggtctgcacgccagagttctacttgttcaaaaaggatggccggaggctctttgaacttttctaccatggacagttcgatgactcaagacccagtaacaacgtgcctgtaaccggaagggacctaagccgcgcgattgactgtgcgctcagtggccaagaactgccctttgtgcaaaagccaagtgtcggctgcagcatcaaatggcacccatgaggtgctcacagtcacagcgtcatcctgtccaaac

SEQ ID NO: 33394 - DNA, 274 bp, Zea mays
agcaaaataaaagccaggcggcggcatatggcgctcagcaaggagcaaaaactcacaattcctgatcaacaacacacaacaagcagcgaacagcaggtggcgctggatgccgagctccagctgtggaaccacactttcggctacgtcaagtccatggcgctcaaggccgcgctcgacctcggcatacccgatgccatccaccagcacggcggctcggccaccatcccacagatagtcaccaggatcacgctccacccgtccaagacaccatgct

SEQ ID NO: 33395 - DNA, 272 bp, Zea mays
ggcaaataaagcggttctcatggcgggagcttcagattgcaaccagcaatttcagtgaacagaatgttcttggcaagggtggttttggtaaggtgtataaaggagttcttccaggtccaaacagtataaagattgcagtgaaacgactactgaacgtggacagtcgtgatggggaaatggctttcctcagagaagttgaattgataagcattgctgtacacaagaacatattaaggttgataggattctgtacaacaccaacagagaggctt

SEQ ID NO: 33396 - DNA, 269 bp, Zea mays
aaacgaatcatggacctgtatctgttgcagtgtatggtgaccatgacaagcctgcccttgttacttaccccgatattgctttaaactatatgtcctgcttccaaggactattgttctgtcccgaagccgcttcgctgctgcttcataatttttgcatttaccgtctgttgacgatttggcagatcaggttgcggatgtcctcgatttctttggattaggctctgttatgtgcttcggtgtcactgcaggtgcctacattctaactctgt

SEQ ID NO: 33397 - DNA, 271 bp, Zea mays
cgcgccgccgagcacgtccggcgccggtgcggcaggcgaaatccgagagcactcctcccccgctacgccgcaccgcccatggccgcagctagccgcagatagagagaggcgcaggcgagggcgtgcagatccagatccggtgggcgggaaggacttgatcgcccccaccaccatggccggcgcggtgtcggcgctcttcctgctggacatgaagggccgcgttctcgtctggcgcgactaccgcggcgatgtctccgcgctccaggccgag

SEQ ID NO: 33398 - DNA, 264 bp, Zea mays
ggacgctgggtcgacgtgggcaacaacggcacgcaggggccctgcagggcgttcctcgccgacctcacagagaatgacccaaggaggactcggatcgctaatgcatacttttcactcttcatggccctgggaaacatacttggatatgccaccggagcatacagtggatggtattcgatatttcctttcactgttacagagtcctgcggcatcagttgtgccaaccttaagtctgcctttcttcttgacattattgttctggtc

SEQ ID NO: 33399 - DNA, 264 bp, Zea mays
cgctgcagatcaaaaggctctcgcctcggcttggcagtcggcactccctctccaccgcgctgcaggggcgacgcaaggccgagcgctcctcgatccagatccaaggtaggagatggctctcacgagaattggcctcgccggcctcgcggtcatgggacagaaccttgccctcaacatcgcggagaaagggttccccatctcggtctacaacaggacaacctccaaggttgatgagaccgtgcagcgtgccaaggtcgaaggaaa

SEQ ID NO: 33400 - DNA, 265 bp, Zea mays
cggacgcgtgggttgcgatggatgaaaaggtgcttgacctagtcagaatgttctccggtgctaagaagcctaatgcatcagtttgtcatggacagttgattttagcggcagcaagagtagtcgagaaccgtacctgcacagcatttccggctgttaaaccagttttggttgctgctggtgccaagtgggaagagcctgacacaatggcaaaatgcactgttgatggcaatctcatcacagcagcgacttataattctcatcccga

SEQ ID NO: 33401 - DNA, 266 bp, Zea mays
ctcttggtctcggatctccgttgatctcgaggatacaacagggagggaagcatgacctccctccgtgtcgtccgtgtgcccctccctgttgtatcctcttggtcttgggcccttgtttttctttggttaattattgtcgagatcaacggagatccgagaaaaacgggctcagtcaataattccaagaagtgcgtcttcttggagataaaatagcggaaggagagttataataagtctgtaactgtgacccatagctgagatgctgt

SEQ ID NO: 33402 - DNA, 269 bp, Zea mays
ctcaacacagcacaggcagctcgagagagagagagagagaaagatgtcgtggttcgggcaccaccaccacaaccagccggctcccccggcgtcgggccccaaccaggtgttcaagatcttctgccgcgccaacgagaactactgcctggccgtccgcgacggcgccgtcgtgctggccccggtcaaccccaaggacgaccaccagcactggtacaaggacatgcgcttcagcacccgggtcaaggacgaggaaggcatgccggcgttcg

SEQ ID NO: 33403 - DNA, 264 bp, Zea mays
gaattgtcccttatgcagctttgcattatatggcctatgaagaataccgccggtggatcattcttggctttcctaatgttgagcaagggcctgttcttgatctcgtggctggctctatagctggagggacagctgtcatatgcacataccctcttgatctagtccgcacaaagttggcttatcaggtaaaaggtgcagtcaatgtgggtttcagagaatctaagccctctgaacaggtttacaaaggaatcatggattgcgtca

SEQ ID NO: 33404 - DNA, 264 bp, Zea mays
cgcattcctcccatctcccaagacctcctcagacccgagaagcgcactgcggccatggacgccaccggcactggagctggagggaaggcgaagaagggagcggccggtcgcaaggccggcgggccgaggaagaagtcggtgacgaggtccgtgaaggccgggctccagttccccgtcggccgcatcgggcgctacctcaagaagggccgctacgcgcacgcgtcggcagcggtgcccccgtctacctcgcggccgtcctggagt

SEQ ID NO: 33405 - DNA, 262 bp, Zea mays
cggacgcgtgggcgcggcacggcagggtctccggtgtttttgttccagaatctgtagcaaatggctgacggcgaggacatccagccccttgtttgtgacaatggaactggcatggtcaaggctggttttgctggtgacgatgcgccaagggctgttttcccaagcattgttggacgcccacgtcacactggcgtgatggttggcatggggcagaaggatgcgtatgttggcgatgaggctcagtccaagaggggtatcctga

SEQ ID NO: 33406 - DNA, 264 bp, Zea mays
cagacgcgtgggagccgccaccaggtgcagagtctttcgtcatctcttctccggcgaagaacccccagtcgcccaacagatcacttgttaaactttgttgaggggtgatggcggtttctttcgcaaacctcagctccgaggcagggcttaaaaagcttgatgagtaccttctcactcgcagctacatcactggctaccaagcttccaaggatgacttggctgtctacacttcgttttcgtctgctccctcgtccaagtatatca

SEQ ID NO: 33407 - DNA, 256 bp, Zea mays
attccatcatcccctttgcaagtatagtctctctgctaagcgaacaagcttcaagctagtctcggcggctctagaagacgatgggcaaggacgacgtgatcgagagcggcgctggcggcggcgagttcgctgccaaggactacacggaccctcccccggcgccgctgatcgacgcggcggagctggggtcctggtcgctgtaccgcgccgtgatcgccgagttcatcgccacgctgctgttcctgtacatcacggt

SEQ ID NO: 33408 - DNA, 258 bp, Zea mays
ggaaatacaacgtttctttctctgggtcctaaacaagaggctgatatttacagtgatcagtctggaggctgtgttgcattcctggcaaatattgattcagccaatgacaaagttgtcactttccgtaacaggcaatatgatcttcctgcttggtcagttagtattcttcctgactgcaggaatgtggtgttcaacactgcaaaggtgcaatctcaaacttcaatggtgaccatggttccagaaagtttgcaagcatca

SEQ ID NO: 33409 - DNA, 261 bp, Zea mays
gatgctcctatgctgcttgccttgctctggtgtggtggtgtctggtcaagtacgcttccgaattaaaagcgctctggcctgcaacctgctgtctgctccgtcctcccaaggccggccgcctgcccgcgtcttcttcgccacccctcttctccggtcccgcacctgcatttcttgaccccttcctccaccgcagccaaacaatgtctccggtgccgagttcgcatcactcgcagatcaattcgaggaaggagaaacggatga

SEQ ID NO: 33410 - DNA, 262 bp, Zea mays
agatcatgtagacgcttgggtcaacaatagctgttggcgagagggagttatttctcagaattatgagactgatgagacgaaatatgatgtacatttttcagttggaggtggtggtgagtccttagtagttgatgcttggagccttcgtccatcgcgtgtttggaaagatggtcaatgggtagagtggtcccgtgcaagagaaaggaaatccaaatctaataagggcgattcacctcctgagaaacgccaaagaatcgacttg

SEQ ID NO: 33411 - DNA, 283 bp, Zea mays
gaaaacttgacatacattactccattccgaagacaatccttcggagaaggatattaaccaggggatgcttgttgtatttaatgttgacccctctataacaaacaatgatatccatcagatatttagcgaatatggagacataaaagagattcgcgatgcaccgcaaaagggccatcacaaaattatagaattttatgatgtcagagcagccgaaggtgcagctcgtgctttaaacaggagtgatcttgctggcaagaaaataaaactggagactggccgtctg

SEQ ID NO: 33412 - DNA, 281 bp, Zea mays
catcttgagatttgcctgaaggatctgcaagaggacttcatgggaggtgctgaaattattgtttctcctcctgttgtgtccttccgtgaaaccgttcttgagaagtcctgccgcactgtcatgagcaagtcacctaacaagcacaaccgtctgtacatggaagcgcgccccctggaggagggtcttgctgaggcaattgatgatggccgcattggcccacgtgatgatcctaaggtgcgctcccagatcctctctcaagagtttgggtgggacaaggatct

SEQ ID NO: 33413 - DNA, 279 bp, Zea mays
  unsure (1)..(279): unsure at all n locations
cggacgcgtggcacgacgcacgcagagccgcagagatccgtcacactgcaagttttgagaactgaactgaaagatggcatcagcagagctttcccgtgaggaaaatgtgtacatggcgaactcgccgagcangcagagaggtacgaggaaatggttgagttcatggagaaggtagcgaaaactgttgactcggaggagctcactgtcgaggagcgcaacctcctgtctgttgcatacgagcacgtcattggagccagccgtgcctcatggcgcatcatc

SEQ ID NO: 33414 - DNA, 274 bp, Zea mays
gtggattctccacaaacttgtgcttactggagtctatgggctgattgttttcatgcatcattcaagatggagagacaggctgcctgcaaaaccagcatactacaactatgtatgtgtgatgttgctactgaatggcatatcactgtttggatgtttccttattgcaagtggagctggatttggtttatggttatataatctcacaaccgtatgctatcattctctttaccttcccctcctatatgtgactttcttagcagacttcttccaggag

SEQ ID NO: 33415 - DNA, 267 bp, Zea mays
cctcagccacctctctccctcgctagagcaaaaaccttgccacgaatcgccgacactccaacccggaagaggcaacgaggtgactccgcgcctcggtcatgggtgacagccaatactccttctcgcttaccactttcagcccgtcgggaaagcttgtgcagatagagcacgcgctcacggctgtcggatccgggcagacctccctagggatcaaagctgccaacggtgtagtgattgccactgagaagaaactgccttctattttgg

SEQ ID NO: 33416 - DNA, 278 bp, Zea mays
cccacgcgtccgcctgctcagactcgtctgctgcagctcctcctccgccgccgtatcaaacgcactctcctcagccgccgcccgaggcaagatggttctccagaacgacatcgaccttctgaacccgccggcagagctcgagaaactcaagcacaagaagaagcgcctcgtccaatcccccaactccttcttcatggatgtcaagtgccagggatgcttcagcataaccacggttttcagccactcccagactgttgttgtgtgcccaggctgccaaa

SEQ ID NO: 33417 - DNA, 275 bp, Zea mays
gcgcccacgcgtccgggccgggccgtcgaagcaccaggcggtggcgctccgcgtgggggcggacctgtcggcgttctaccggtgcagcttcgtggggtaccaggacactctgtacgtgcgctcgctgcggcagttcttccgcgactgcgacgtctacggcaccatcgacttcgtgttcggcaacgcggccgtggtgctgcagggctgcaacctgtacgcgcgcaggccgctgccgaaccagagcaacatcttcacggcgcaggggcgggaggacc

SEQ ID NO: 33418 - DNA, 264 bp, Zea mays
ccgaccgctggatgagccgccagctcgacgccgccgagtggggcaccgtcgcctgggccaggcagaactacatgcactacaactactgcgacgacggctggcgcttcccgcatgcttccccgccgagtgctcccgcaactgattcattggtttgtttgttatccccgatccgttcgcgcggtcgccgtcgaggcactgagcagacagtacactgacacccgacgatttcttgcttcctgttcctcatctaattaatcatcaatg

SEQ ID NO: 33419 - DNA, 270 bp, Zea mays
gaggtcttggagtccttcaccttgacctcatggtgcttccactgtccgtgcacagtgtcatacttgaacatgtaggtcatgtaatcggtgctgatgaaggggtcgttcacggcgacgagctcgacgtcgtcgctctgcagggccaccctggccaccagccttccgatcctgccaaacccattgatcccgatcttgatcttggccatgagggtgagaggctgctagacccttctctttggtgagaaggaggttgctgtgtttggctgcagg

SEQ ID NO: 33420 - DNA, 273 bp, Zea mays
cctaccaccaccgctcaccgcggtttggctttctcccctcttctgcaccacttctcgctccggattccggattccctctgctctttccctaacgaaggtagccatggcggggagaggtaaggcgatcggctcaggcgccgccaagaaggccacgtccaggagctccaaggctggcctcgagttccccgtgggaaggatcgccaggttcctcaaggccggcaagtatgccgagagagtcggcgccggcgcccctgtctacctcgctgccgtgct

SEQ ID NO: 33421 - DNA, 267 bp, Zea mays
  unsure (1)..(267): unsure at all n locations
cggacggtgggccgcggccgacgcgcccttcgtcgtcgcgcacaagaaaatttcgctctcccgccccaagccgggcgtcgagcgcgtcgctgtctccctcgacctctacaaccagggatccgcgactgcctatgatgtgtccattaatgacgactcttggccaacagaagtgtttgagcttgtcactggagagaaatcgaagacattggaaaggcttgaccctggtgccactgcttcacacacatatgtcctggagaccanaacaca

SEQ ID NO: 33422 - DNA, 268 bp, Zea mays
cccgtcgcatcccatcccactaccacccatctcgtcgtccgccgattcgatccggttcttccaacccaggggcagtgatggcgacgaagaggagcgtgggcaccctcggcgaggcggatctgaaggggaagaaggtgttcgtgcgcgccgacctcaacgtcccgctcgacgatgcccagaagatcaccgacgacacccgcatccgcgcctccgtccccaccatcaagttcctcctcgagaagggcgccaaggtcatcctcgccagcca

SEQ ID NO: 33423 - DNA, 267 bp, Zea mays
cccacgcgtccgattcactcaacttccaccctgtccatcacacatttgcaactgctggatctgacggtgctttcaacttctgggataaggatagcaagcagaggctaaaggcttttagtagatgcccccttcccattccgtgcagtaccttcaacactgatgggtccatatttgcgtatgcggtgtgctatgactgtagcagctgtgccgacgatcacaaccctgcagctgcaaagacatccatctatctccacagtccacaggaaa

SEQ ID NO: 33424 - DNA, 261 bp, Zea mays
cggacggtggggctttacttagacctgggcgctttgacagacaggtgtctgttgatgttcctgatgtacgtggaaggacagagattctaaaagtgcatggtggcaacaagaaatttgattctgatgtttctctcgatgtcatagcaatgagaacacctgggttcagtggagcagacttggcaaaccttctgaatgaagcagccattctggctggacggcgggggaggacagcaatttcttcgaaagagatagatgattcta

SEQ ID NO: 33425 - DNA, 252 bp, Zea mays
ctggtccgtggccatggcgtcgtccatgctctccgctaccaccgtgccactccagcaggggggcggcctgtccgagttctccgggctcaggagctccgcgtcgctgcccatgcgccggaatgccacctccgacgacttcatgtccgccgtctccttcaggacccacgcggtcggcacgagcggcgggccgcggcgggcgccgacggaggcgaactgaaggtggcatcaatgggtcggcgcatcggcgaactt

SEQ ID NO: 33426 - DNA, 260 bp, Zea mays
gcagccatggcttcatcggtggccgccgcggcgagcacattcctgggcacccgcctggcggacccggcgccacagaacgggcgcatcgtggcccggttcgggttcgggttgggcggcaaggcgaacctgctccgaagaaggtggcgaagacatcgacctcctctgaccggccgctgtggttccccggcgccgtggcgcacgactacctggacggctcgctggtcggcgactacgagtttcgaccgttcggtctcgggaag

SEQ ID NO: 33427 - DNA, 263 bp, Zea mays
  unsure (1)..(263): unsure at all n locations
cccacgcgtccgcggacgcgtggnggttgccaccctagcacgcgctcgccgtcgccacgctctatatctcgcgcatctcgccttccgctctttctagccccgcccgctcgcctccctggtacgcttcgtgccgccgccgcaacctcctcctccccgtcacagattgcagatcatttaacataaatggctgactcagaggacattcagcccctagtctgtgacaatggaactggaatggtcaaggctggctttgctggagatga

SEQ ID NO: 33428 - DNA, 288 bp, Zea mays
cggacgcgtgggcggacgcgtgggctccgccgcgcccgtctgcaagtggctcacccccaacgaggacggcgaatccatggccgacactcgcgctcatgaaccaggacaaggtcctcatggagagctggtactatctcaaggacgcggtgctggacggcggcatcccgttcaacaaggcgtacgggatgacggcgttcgagtaccacggcacggactcgcgcttcaaccgcgtgttcaacgagggcatgaagaaccactcggtgatcatcaccaagaagctgctggact

SEQ ID NO: 33429 - DNA, 292 bp, Zea mays
ccggaacagagcgaggcgacgccgaggcacctcatctccggcgaagggaaatggcgaccgttccaggggatctgatctggcagattgtgaggaagaacaactccttcctggtgaagcagtttggcaacggcaatgccaaggtgcagttcaccaaggagcccaacaacctctacaatttacactcctacaagtactctggcttagcaaacaagaaaactgtaacgatccagccagctgctggaaaggactcggctgtggtcctctctactaccaagaccaagaagcagaacac

SEQ ID NO: 33430 - DNA, 288 bp, Zea mays
cccacgcgtccgattggacagtctggaatttgcaagggggagtgcagattcaacatggggctctgttagggatgcaatggggcaccctgaacctttcctggtcaaacatgtcgcaattggaaatgaagattgcgggaaaaagttctaccgtggtaattacctcaaattctacaatgctataagagaggcctatccagacattcagatgatttcaaactgtgatggttcatctagaccacttgaccatcctgcggatttgtatgatttccatgtctatactgattctaa

SEQ ID NO: 33431 - DNA, 287 bp, Zea mays
gagttctcaacgacgtctgccggcagtgctcctgctcctcctcctccttcccggccgccgcgcgagcttgggttagtgtctcttctaagcggagacctgtgagaggagccatcatcatggccgctgttgagactgttgtcctcaaggttgctatgtcatgcgagggttgcgccggggcggtcagaagagtgctctccaagatggaaggagttgaaaccttcgacatagacctcaaggagcagaaggtgacagtcaaaggcaatgtcaagcctgaggacgtcttccag

SEQ ID NO: 33432 - DNA, 292 bp, Zea mays
cttcacgcagccgccctacggcgagacctacttcggcacgccgacgtgccgctgctgcgacggccgcgtgatcccggacttcctctgctccaagttcgggctgccgttcctgccgccgtccaagtcgacgacggccgacttcaaggagggcgccaacatggccatcaccggcgcgacggccatggacgcgcccttcttccgctcgctcgggctctccgacaagatctggaacaacgggcccatcagcttccagctggagtggttccagcaggtcgcgtccgccgtgtgcggg

SEQ ID NO: 33433 - DNA, 290 bp, Zea mays
cggacgcgtggattggaagggtgttagatgtgatagtcatagcaagagagtgattgatctgattcttgcaacccacagattagttgggcccataccacccgaaattggaaagttaaatcagttgcaaaccttgtcactgcaggggaacagtttgtatggttcactccctcctgaactggggaattgtaccaagctgcaacaattgtatctacaaggaaattatttaagtggatacatcccttcagaatttggcgatctggtggaactcgaggcattggacttgtccagta

SEQ ID NO: 33434 - DNA, 290 bp, Zea mays
cttgatatggttggggtaatgcttgagaatctctctcatactgctaccatcgcaagaacaacaatttcatctgtttatcgcacatcacaaatagcagcatctgtctacaagtcatcataccatcagaaggcatttcctgaagctttatttcaccagcttctcttagcaatgttgcactcagacaataagacaaggattggttcacatcgtgttctatctaccattgtagcaccttcaatggcgtgtccatggtcggacatcagctttcctatcccaatgaagggtgatga

SEQ ID NO: 33435 - DNA, 291 bp, Zea mays
gcatcttattctcaaagaagacgatatcattggtattcttgagacagatgatgtgaaggacatgaagcctctcaatgaccgtgttctcatcaaggttgcagaagccgaagacaaaactcctgggggccttatcctcactgaaacaactaaagagaagccgtccataggaacggttgtagctgttggcccgggtcctctggacgaggaaggcaagagacagccactgtcagtgtcggcgggcagcacaatgctgtactccaagtatgcagggagtgagttcaagggcgcgga

SEQ ID NO: 33436 - DNA, 267 bp, Zea mays
tccactcccgctgggccatgctcggcgcgctcggctgcgtcttccccgagctgctctcccgcaacggcgtcaagttcggcgacgccgtctggttcaaggccggctcccagatcttcagcgacggcgggctggactaccttggcaaccccagcctgatccacgcgcagagcatcctcgccatctgggcctgccaggtcgtgctcatgggcgccgtcgagggctaccgtattgccggcgggccgctcggcgaggtcgtcgacccgctgt

SEQ ID NO: 33437 - DNA, 286 bp, Zea mays
cggacgcgtgggcggacgcgtgggcacaagataatttgttgtcaggaatgtcgtctgaactgctggtgaatgacaaggtgcatatactcaagctgtcaagttaggaacacaaatacaaccgtcatatcacatattttctttagaagaactcaaggaagcaacaaagagctttgaaaggtcagcatttttaggcgagggagcaattggaaagctgtacaagggaaggttagagaatgcaaccctgattgccataagatgtttgccattgcaccagcgatattcaatt

SEQ ID NO: 33438 - DNA, 279 bp, Zea mays
cccatccgcacctctctccatctccctgctcctccgccttcttcttgatccagccaagccagggatcgccatgtcggactcggaggagcaccacttcgaatcgaaggccgacgccggagcgtccaagacctacccgcagcaggctggcaccgtccgtaagaacggcttcatcgtcatcaagaaccgcccctgcaaggttgtggaggtttctacctcaaagactggtaagcatggtcatgccaaatgccactttgttgccatagatatattcaacgggaa

SEQ ID NO: 33439 - DNA, 276 bp, Zea mays
  unsure (1)..(276): unsure at all n locations
cggacggtgggcggacgcgtgggcggacgcgtgggcggacgcgtgggctaccccacacagaagcggcggcggacgnacaaacgcaggcgaaggcgagggtgtgagggaaggagcaccagccatggtgcacgtcaacttctaccgcaactatggtaagacgttcaagaaaccaaggcgtccttatgagaaggagcgtcttgatgctgaactgaagctggttggtgagtatgggctgaggtgcaagcgtgagctttggagggtccagtatgcactgag

SEQ ID NO: 33440 - DNA, 277 bp, Zea mays
cacacacacacacacacacagacaagtggtttccaaagccaagtgtgtgtactagcaaccagctagctcgggcggcagcaggcagccatcatgtcggaggagaagcaccaccacttcttcaaccaccacaagaaggacgaggagcagcccgccggcgagtacgggtactccgagaccgaggtggtcaccgccaccggcgagggcgagtacgagaggtacaagaaggaggagaaggagcacaagcacaagcagcacctcggcgaggccggcgccatcg

SEQ ID NO: 33441 - DNA, 270 bp, Zea mays
cccacgcgtccgattggctcatttcctattcgaaatactccaaggcccttgagtctttttacgagaaattcgatccagatttcattgatattaggacaaaagcacgtgaggtgttgcagagggaggacgatctgaatgaaattgtgcagcttgttggtaaagatgcgctggcagaatctgacaagattacgctggagacagcaaagcttttgagagaagattatttggcacaaaatgcattcaccccatatgataagttctgcccattct

SEQ ID NO: 33442 - DNA, 267 bp, Zea mays
ggcaaagcacgcgcaaaagccaccaccgcgtcgtcgtctccaagcaagcgaagagcgcctccctactccccctcgagatcttctctccctccccgcgccgctatggacgctgttgactcggtggtcgacccgctccgcgagttcgccaaggacagcatccgcctcgtcaagcgctgccacaagcccgaccgcaaggagttcaccaaggtcgccgcgcgcactgcgatcggcttcatcgtcatgggattcgtcggcttctttgtcaag

SEQ ID NO: 33443 - DNA, 268 bp, Zea mays
cccacgcgtccgccagacacaaggttgagtctgagttcttgccactttacagcacctatggcattggtttgactacatggagtcctctggcttcaggagtactatctggaaaatatggcaaaggggacatacctgctgatagcaggtttgccctagacaattacaagaacctggcgaacaggtccctggttgacgacacgcttcgaaaagtgaatgggctaaaacctatcgccgctgaacttggcgtttcgttagctcagctctcgat

SEQ ID NO: 33444 - DNA, 265 bp, Zea mays
gccacgcgtccgcggacggtgggcacccacagccacacccacatccccgcgcgggggatacgcggtggaaaacccggcgaccacatcaaaacacgaggcgtctcccgcaggactggtcactcggcacgcaggcagaggcagcatagcagcagccaactccatccatcctctttcccctcctcgcttcgcttcctcggcggattcctcctccctcgaccgtccccgtccccgtccccttccggcgcgcgagctcgcccgagatggc

SEQ ID NO: 33445 - DNA, 266 bp, Zea mays
gcgctgagcaagtccagtgagagagggagagcggcgagaggatggctgggatggcgtcgctgcagggcgccatggcgtcgctctccatctccgcgctaggtgcggcgacggcgagcagcagcagcttctggggcaaccggctcgccacctactccgcgccgcagcctggggtaaggtttatggtcaagatatgcccaattgaaatgagacttaagagatgggagcgaaagaagtgtaaaccaaacagtcttcctgtgctgcacaag

SEQ ID NO: 33446 - DNA, 267 bp, Zea mays
atgagaacagcttccttagttatcagccatgcaggttcaggaagcatatttgagacgctgcggctgggcaaaccgcttatcgtcgttgtaaacgaggatctgatggacaatcaccagagcgaactagcagaagaattggctgaaaggaagcacctcttctgcgcacgcccacaaacactgggagagaccatccgggcaatggacctggagacgctggttccttacgagccaggggatgccaagccagtcgtcgccctgatcaacagg

SEQ ID NO: 33447 - DNA, 262 bp, Zea mays
cggacgcgtgggcgcgccagggtttcaggcttccacgaatctccccgccgccctcaattcccctcggcgacgcggcctcaattcccctcggcgccgccgcctcctcccctcgcttcggtcctcggttagttaaccatccaggttctgtcaagatgtctgatagccatgagactgacaggaacattgagatttggaaaattaagaaactgatcaaggcattggaatcagccagaggcaatggcacaagcatgatctctctaat

SEQ ID NO: 33448 - DNA, 266 bp, Zea mays
atataggaaacagtacttgtagatgataaaaaaaaaagccaaaacttgcagcagtttgacgaaaacagcagctctagtcgtcgaagaggctgaagcccatttcctcgtccgactcctcttcaggctccgcagcattctcttcttccttgggagcagctgcagcgccagagtccccagcagcaaccggggcggcaacagcaaacttgcttgggtccttgaggtactccttgatcttgtcagcatgtgggtacgagtagtctgtctcg

SEQ ID NO: 33449 - DNA, 266 bp, Zea mays
caacaacctgccggtccccttcctcctctcctggcagggaattcagcagcggaggagctcatggcaggacggcgtgtacggcaccaactgcccgatccctccgggcggcaatttcacttacaacatgcagttcaaggaccagatcgggagctactactacttcccttcccttctgtttcacaaggcagctggcggttacggtgccatcagggttctcagccggccgaggatccctgtcccgtttgacccgcctgccggggatttca

SEQ ID NO: 33450 - DNA, 263 bp, Zea mays
catcatgttcaggatatgatcactgctggaatggacacaacagtcatctcagtcgagtgggcgatggcagagctggtcaggaaccccagggttcagaagaagctgcaagaggagctcgaccgtgtggttggccgtgaccgcgtcatgctggagaccgacttccagaacctcccctacctacaggccgttgtcaaggaatcactccggctgcacccgccgacgccgctcatgctcccgcacaaggccagctcgaacgtcaagat

SEQ ID NO: 33451 - DNA, 263 bp, Zea mays
  unsure (1)..(263): unsure at all n locations
atctgcttcctgctgagctcaaaccccttccgcctccccatcaaccattccatnnnnnnnnnnnnnnnnnnnnnnaagatgaatgtggagaagctcaagaagatggctggcgctgtacgcaccggagggaagggcagcatgcgcaggaagaagaaggcagttcacaagaccacgaccacagatgacaagcggcttcagagcaccttgaaaaggatcggggggaacaccattcctggtatcgaggaggtcaacatcttcaagga

SEQ ID NO: 33452 - DNA, 260 bp, Zea mays
cggacgcgtggtcacaccgcaaccgcaagcaagcgaacgcagagcctgcctgaccagagctagctgagcaacagccaacagcagctggtctgactgacatggcgaaggacatcgaggcatcggggcccgaggcgggcgagttctcggccaaggactacaccgaccctccgccggcgccgctggtcgacgcggaggagctcacccagtggtccctgtaccgcgcggtcatcgccgagttcatcgccacgctgctcttcctc

SEQ ID NO: 33453 - DNA, 262 bp, Zea mays
aaccacgcgtccgcggacggtgggcttcaaacctactatctgaatcagcaaggtggcgctcctctgagaacacaaggctagagatgtttgaaaagggtatgcgcaagatcccggccaggagctggacgtttcatggcaacatggtccactcatttttcgcacgggataaatcacacccacagtccagggacatatacgctggcctggatgtgctaatcctcgagtgcatcaaggccgggtacgagccagacaccacatttgt

SEQ ID NO: 33454 - DNA, 258 bp, Zea mays
cccacgcgtccgggtgctggtgtgggcaatggcaggagcaactgtgttcggtggtttttatgctttcttcatccaccaggaaaaaaccgcccagctggaacccccaaaaccataacgagggtgcccgtcctgctagccggtgtgcttgctgtgcgatcgtttggcatgtgcttgttgaggggttgctaggggattggagaggattgaaggggatttaatccccttcaatccccctcaaaccactagtaaccgaacgtg

SEQ ID NO: 33455 - DNA, 260 bp, Zea mays
cccacgcgtccgcttaacccatgggagagaaatgaaaatcacacgctctgcctcaattccgccaaggacattggatgcactgttgtcaacattggcacacaggatttggtggagggaaggcctcatttagttcttggattgatatcacaaatcataaagattcaacttttagctgatcttaacctcaagaagacaccacagctggtggagctatttgatgacagcaaggatatagacgaggttttgactttgtcgccaga

SEQ ID NO: 33456 - DNA, 259 bp, Zea mays
cccacgcgtccgcggacgcgtgggggacgttgctcacaacatgatcgtgagaacaatcatgtacagtatgcataaatgaagacataatatatttacagcatatttcattgatcagctccactccacagcgtgcatacaaaaatacactagcggtacaatctcttctggctcccacagctcccttcacaaatactggtgcaacctgcagcgtctacggtacacgcatgcaagcatcatgccctcgctcacttgccgggga

SEQ ID NO: 33457 - DNA, 253 bp, Zea mays
tgcaccacgaggcacttcaggaggctcttccgggtgacaatgttggcttcaacgtgaagaatgttgctgtcaaggatctgaagcgtgggtttgtggcctccaactccaaggatgaccctgccaaggaggctgccagcttcacctcccaggtcatcatcatgaaccaccctgggcagattggcaacggctatgcccctgtgctggactgccacacctcccacatcgctgtcaagtttgctgagctcattaccaa

SEQ ID NO: 33458 - DNA, 250 bp, Zea mays
tcagtccctcacacactcactatacgctgctctgctgcagcaagaaggaagaagctagcgcctccctagctctcgttgtcagcaatggccaccaccgccgcgtccagcctcctcaagtcgtccttcgcgggctcgcggctcccttcgggcacgcgcaccaccaccccgtcgtccgtggccgtgggcaccccgcgcgccggcgtcgggcccatccgggcgtcgatctgctgctctcccaccccgccctacg

SEQ ID NO: 33459 - DNA, 251 bp, Zea mays
ggacgcgtggcgataatccgccggcgctgagatgttggtttatcaagacctcctatctggcgacgagctactgtcggattcattcacctacaaggagctcgagaacggcgtcctgtgggaggtcgagggaaagtgggtcacccaaggtcctgttgatgtagacattggtgccaatccatccgccgagggtggtgaggatgaaagcgttgatgacacagccgtgaaggtggttgatattgttgacacattcc

SEQ ID NO: 33460 - DNA, 252 bp, Zea mays
cagaccgtctcggagcaagttatggtactccagaacattggaacatcagttctcgtctccccgaaccagcttccagatctccaccaactgctggttgaggctgcgaactcttgaacaccgaagctcctgacttgtacataaggcagaatcctgttccaaatgcctacaccttagcaatcaacggcaaaaaaccattcattgtcgttcacacaagccttgtggagctgcttactccaagggaattgcaggctg

SEQ ID NO: 33461 - DNA, 254 bp, Zea mays
gttcaagctctgcaacgggaggtctgttcagtttgacgtcggcaacatggtcatggtgatcggcgggaggaacaccgggcgtgtaggagtgatcaagaactgggagaagcacaagggcatcttcgaggtcatcgacgtgctgcttggagctttttgcatgctatgtctagttttctcctatttgttgtacaggaaaacatagaatgaaattcaaatttggtggtcgcaaaagtgtggagacttgaattcatata

SEQ ID NO: 33462 - DNA, 277 bp, Zea mays
ctgagtgcagcaagactacccagttgggtattagctttgctggtggttacgttgccggtgtcttctgtgctattgtttctcacccggctgacaaccttgtgtctttcctgaacaatgccaagggagctacagtgggagatgctgttaagaagcttggtctctggggtctcttcactagaggacttcctcttcgtatcgtcatgattggtacccttactggtgctcagtggggaatttacgatgcattcaaagtgatggttggactcccaacaacggg

SEQ ID NO: 33463 - DNA, 277 bp, Zea mays
caaatatgaaaatgatgctggcaagaaggaaattcagctgcagcttgagaagatgaagaaatatgcttctgttatccgtgtcattgctcatacccagattaggaagatgaagggtttgaaacagaagaaggctcacctgatggagattcaggtcaatggtggtaccattgctgacaaggtggactacggctacaaattttttgagaaagaggtccctgttgatgctgtcttccagaaggatgagatgattgacatcattggtgtgaccaaaggtaaa

SEQ ID NO: 33464 - DNA, 275 bp, Zea mays
gggttgtgttgattttaacaaaacagtagatcattggcaacaggacaagtggactggttgtttccctgtcaagtggcacattgtgaaggatgttccgaacagtttgctgaagcacatcattcttgagaacaatgaaaacaagccagtgacaaacagcagagatacacatgaggtgaagcttgagcaaggccttcaagtgcttaaggttttcaaggatcatgtgtgcaagacatccatactggatgactttggcttttacgataatcgtgagaaga

SEQ ID NO: 33465 - DNA, 276 bp, Zea mays
cgcgtgcgagagacttgaccaagcagcagcagcagggatggcgcctctgaagctgtacgggatgccgctgtcccccaacgtggtgcgcgtggccaccgtgctcaacgagaagggcctcgacttcgagatcgtccccgtcgacctcaccaccggcgcccacaagcagcccgacttcctcgccctcaaccctttcggccagatcccggctctcgtcgacggagacgaagtcctcttcgagtcccgtgcgatcaaccggtacatcgccagcaagtacgc

SEQ ID NO: 33466 - DNA, 269 bp, Zea mays
gcggcggtggctacggtggtggtggtggcggctacggcggtggcggcgtggcggcggctacggcaactccgacgggaactggaggaactgagcggtggggcccgcgcggccaagttatcctgttcgctaccgtgatgtttaccctagtccagagggtttatcttcgttcgtctcgtttgttgttgcccatctgtgtttttgattgcaaggtcgctctgtgtcagttgttagtgctgtgttcatcctcggctccagcagacccatgcatc

SEQ ID NO: 33467 - DNA, 273 bp, Zea mays
aaaccctctccccgccgcatcgccgccgccggaagcgcctccctcgatccagatccaggagatatgcctcgcaatgatgatcgctatgggaatacacgcttgtatgttggaagattgtctccccgcacccgttctcgtgacctagaataccttttcagcaaatatgggagaattcgagaagtggagttgaagcgtgactatgcattcattgaattcagtgacccccgtgatgctgatgatgcacagtacaacctagatggcagggacgtcgat

SEQ ID NO: 33468 - DNA, 274 bp, Zea mays
cccacgcgtccgaagaaactgaggcatggttcatagattctttcgaggagtggcgcaaggccaagaacctcagtaattttatattgcttggtcactcttttggaggatatgttgctgcaaaatatgcgctaaagcaccctgaacacgttcaacagttgattttggttggtcctgctggcttctcatcagaaacagagcatagctctgagtggttaaccaagtttcgagcaacatggaaaggcatgctaatgaatcatctttgggagtccaattt

SEQ ID NO: 33469 - DNA, 273 bp, Zea mays
cgcgtcttcttcgacatgaccgtcggcggcgccccggcgggccggatcgtgatggagctgtacgccaacgaggtgcccaagaccgcggagaacttccgcgcgctgtgcacgggcgagaagggcgtgggcaagtccgggaagccgctccactacaagggctccaccttccaccgcgtcatccccgagttcatgtgccagggcggcgacttcacccgcggcaacggcaccggcggcgagtccatctacggcgagaagttccccgacgagaagttc

SEQ ID NO: 33470 - DNA, 267 bp, Zea mays
cggacgcgtggcggacgcgtgggcggacgcgtgggagctgctcctcattggagacagcggtgttggcaagagttgcctcctgttgcggttctctgatggttccttcactacaagctttattaccacaattggtattgactttaagatacgaacgatagaattggatggcaagcgtataaagctacagatttgggatacggcgggccaagaacgcttccggactattaccaccgcgtactaccgaggagctatgggcatcttgctggt

SEQ ID NO: 33471 - DNA, 263 bp, Zea mays
agacactggtgaccacgcgtccgacccagaccaatggccctgcgcctaccaatctcatcgtcccacgagctggcctccacgccggcgccaatctccacgacgacgtgccggccggccgtcttggcgacggccgcggcccagaagaggagcctgctgctggcgacggcctccgagacgaggggagtcgcgccggtgaggtccagcgggatcgagacgagcacggtgggtctgggatgtgaggccgtcaccgggcaggtcacgga

SEQ ID NO: 33472 - DNA, 268 bp, Zea mays
cgcttatcatccgcgcctctacatttcttctctctctgctcctccgcctccgcctccgcctgatccatccaagacagggatcgccatgtcggactcggaggagcaccacttcgaatcgaaggccgacgctggggcgtccaagacctacccgcagcaggctggcaccgtccgtaagaacggcttcatcgtcatcaagaaccgtccctgcaaggttgtggaggtttctacctccaagactggtaagcatggccacgccaaatgccacttt

SEQ ID NO: 33473 - DNA, 270 bp, Zea mays
agcacaaaggaagctgcgtactccacccctctgctcatcttcctgcctctgctgacgatctggttccacaaatactgcaagagccggttcgaaccagctttcagaaagtatcctcttgaggaagcaatggcgaaggacaccatggagcacgcatcggagcctaacctgaacctggaatccttcctggctaacgcttacctgcaccccatcttccgccttttcgaggaagccgggaaagaggaggagacggtggaggtgaggatcgacaaa

SEQ ID NO: 33474 - DNA, 265 bp, Zea mays
cacgaaaatgttgtacacttttacaatgcattcgaagatgacaactatgtttatatagtcatggaattatgtgagggtggcgagctacttgatcggatattagccaagaaagatagtcgttacagcgagaaagatgctgcagtagttgtccgacagatgctcaaggttgcagctgagtgccacctgcatggtttggttcatcgggacatgaaacctgagaacttcctattcaaatcaaaaaaggaggactcgccccttaaggcta

SEQ ID NO: 33475 - DNA, 264 bp, Zea mays
cggacggtggggtcgttggaagagagacgacggcggccatggcgacctccttccaggggacgaccaccaagtgacaccgcctgcgacaagacggtgtaccttgtggacaagctcaccgccgacaaccgcatctaccacaaggcctgcttccgctgccaccactgcaagggcaccctcaagctcgccaactacaactccttcgagggagtgctctactgcaggcctcacttcgaccagctgttcaagaggacagggagcttggac

SEQ ID NO: 33476 - DNA, 263 bp, Zea mays
gaaggagatgcggatcctgatggtgggactcgacgccgccggaaagaccaccatcctctacaagctgaagctaggcgagatcgtcaccaccatccccaccatcggattcaatgttgaaactgtggagtacaagaacatcagcttcactgtctgggatgtcgggggccaggacaagatcaggccactgtggaggcattacttccagaacacccagggtctcatctttgttgtggacagcaatgatagggaccgtgttgttgaag

SEQ ID NO: 33477 - DNA, 260 bp, Zea mays
ggaagatgaagaacaatgccattgtctgcaacattggccactttgacaatgaaattgatatgctcggccttgagacctaccctggcgtcaagcgcatcaccatcaagccccagactgaccgctgggtgttccccgagaccaacactggcatcattgtccttgctgagggtcgcctgatgaaccttgggtgtgctactggccatcctagctttgtcatgtcctgctcattcactaaccaggtcattgcccaacttgaactg

SEQ ID NO: 33478 - DNA, 260 bp, Zea mays
aactggagcacactttgctactgctcgtctagcgggtgctacaccacctccagcttatgtccttagtcggagcgttggcttgcagggtattggaatgttcttggaggggatctttagtgttccagcaggttcatctgtatcagttgaaaacattggcctccttgggctgacaaaagttggaagtaggagggtgatccagatatcaactgggtttatgatattcttctccatatttgggaaatttggggccttctttgcat

SEQ ID NO: 33479 - DNA, 259 bp, Zea mays
cggacgcgtgggcttcagcaaacggaagattcacaaggttcctgccaccgatatggaggctctaaaatctccttagatgggtctatttgagaaacgtagagcaaggaacttttttgtttacgtccaaaattacaatgaagctgatccagtgacacatcaggggttggacctcacaaggattacaactagagaattgattttgaaacatggattgagtgatgacactgtggattttattggccatgcactcgctctgcac

SEQ ID NO: 33480 - DNA, 263 bp, Zea mays
cggacgcgtgggggattaggagcctgaaagatcgagaagccaaacccacaggcagagaatagcacggtttcgtccatccgatccgcgacgatccacagccatggcgatggcttacaagatggcgacggaggggatggacgtgaaggaggagtgccagcgctggttcatggagatgaagtggaagaaggtgcaccgcttcgtggtgtacaggatcgacgagcggtcgcgcgccgtgctggtggacagggtgggcggccccgggg

SEQ ID NO: 33481 - DNA, 294 bp, Zea mays
cctcatcacagaggcgcgtcgatacctcacaacggcgtcaagtatgggtgcaaaggaggttacaagtcgagggacacaaagaaggcaaaccctaacatccttgtcggagcaatggtggctggccccgacaggcgcgatggctacaaagatgtccgcacgaactacaactacacggagcctactctcgcagcgaatgctggtctggttgcagcgctgatctctatatcggatatcaaaaccggacggttcggcatcgataagaacaccatcttctctgcgattcctccgatgttc

SEQ ID NO: 33482 - DNA, 288 bp, Zea mays
ctcgccactctcacgtctcgcccatcccgccactgctgctctccagagtccaggcgacccaggctgcgcggtcgctcggtgttgttagtcccgatcgccgccagccatggcatccaacggcatcgctcccagagatgtatgtgttgttggtgttgcacgcacccctttgggtggtttccttggtgccttgtcttccttgcccgcaacaaagcttggctctatagcaattgaagctgctctgaaaagagcaaatgtggatccagccctcgtgcaggaggtctttttcgg

SEQ ID NO: 33483 - DNA, 286 bp, Zea mays
cggaccggggcggacgcgtgggcggacgcgtgggtgaaggagctgcgcgagatcaccgccaagcacccacggaacctgatcaccacctccgccgacgagggccagttcctcaacatgctcatcaagctcatcggcgccaagaagaccatggagatcggcgtctacaccggctactcgctcctcgccaccgcgctcgcactcccggaggacggcacgatcttggccatggacatcaaccgcgagaactacgagctaggccttccctgcatcaacaaggccggcgtgg

SEQ ID NO: 33484 - DNA, 158 bp, Zea mays
aaaggcagccctgtcagacgaatattttatcaagaggaagctgtatccaaatgtggatttctactctgggctaatttatagggcaatgggattccctacagaattttttcctgtgctgtttgctattcctcgcatgggtggctggctagcgcattgga

SEQ ID NO: 33485 - DNA, 136 bp, Zea mays
cccacgcgtccgcccacgcgtccggctcgacaaggacgaccgacgacgcacgcggagatccggcgtactgcaaattttgaaaactgaactgtaagatggcatcagcagagctttcccgtgaggaaaatgtgtacat

SEQ ID NO: 33486 - DNA, 250 bp, Zea mays
cggacgcgtgggggcgatattgtgattgattacccgtatgttgaatgtacatcagcagcaattcaggccctgacatcattcaaaaaactataccctgggcaccgcaggaaagaggtggataactgtatcagcaaagcttccaatttcatcgagagtattcagaaaagcgatggttcatggtatggctcttgggcgtttgtttcacatacggcacttggtttggtgtgaagggactaattgctgctggtag

SEQ ID NO: 33487 - DNA, 288 bp, Zea mays
tgacaatcatgccctcacaagagaagaccaggatgcatttgctatccaaagcaacgagcgtggaattgctgctcgtgacagtggtgcttttgcatgggagattattccggttcaagttcctgttggtagaggaaaacccccaacattaattgaaagagatgaaagcctggataagtttgacccagtaaaactaaagaaacttcgcccaagtttcaaggagaatggtggtacagttacagctggaaatgcttctagtataagtgatggagctgctgcattagttttggg

SEQ ID NO: 33488 - DNA, 236 bp, Zea mays
agaatattcagttagcagattgaatgcagatgtcctggagcaatttataactgagaactacactgcttcccgaattgttctagctgcatcaggtgttgatcatgatgaattggtatctattgccgaaccccttctgtctgacattcccagtgtatctggaacaacaaggccaaaatcaacctacattggtggagaatacagaagaatgcagattcatcgaacacagacgttgcatt

SEQ ID NO: 33489 - DNA, 173 bp, Zea mays
cccacgcgtccgcgcgatcgtggaccggatgtggcacatctggtccactaggctgtgcggtaatggcttcgacgaccctgagtggctggacaccagcttcgtggtctacgacgactatcggagcccgcggctggtactgatgaagttccgcgacgttcttgacgcggctaggc

SEQ ID NO: 33490 - DNA, 119 bp, Zea mays
cccacgcgtccgcccacgcgtccgattgactgacagcaagggaaggacggtggacttcaagaacacactcctgatcatgacctcaaatgtagggagcagtgtcatcgagaagggtggaa

SEQ ID NO: 33491 - DNA, 167 bp, Zea mays
aaaccacaggagggttctcagtaactttcctgggcgacattgtggcaactggactgaagattgaggaccagctctcccttgggaagaggttgtcactagttgctagcactggcgcgatgcgagcccaaggggacactgcatatggagctaacctggaggcacgcttg

SEQ ID NO: 33492 - DNA, 281 bp, Zea mays
cccacgcgtccgatttttcttgaaggctgacatatgccagttggggatggaccaaaggaaggtcaatgtgctagctagggagtactgtgatgacatcaaaagaaagaacaaaccaattattctttcacatcatatgctccctggttttaaagaaggccaggagaaaatgtcaaagagtgacccatcctcggctatctttatggaagatgacgaagcccaagttaacgtgaagataaagcaagcattttgccctcccaaaattgttgaggggaatccttgtt

SEQ ID NO: 33493 - DNA, 278 bp, Zea mays
cccacgcgtccgctcaaactacaacaggaggaatacttggaagacggaattgattggacccccatggaatttgtggataacactaattgcttatctctctttgagaagaaacatctagggctattgtcattattggatgaagagtctactttcccaaaggcatccgatttttcctttgctaacaagcttaagcggcaattaagtggtaactcttgcttcaaaagtgaaaaagaaggcacatttaagatttgccattatgcaggggaggtgacatatga

SEQ ID NO: 33494 - DNA, 192 bp, Zea mays
aagactcctcgtggcctccgcacactcaactctgtttgggcccaacatcttagcgaagaagtgaggagaaggttctacaagaactggtgcaagagcaagaagaaggctttcacaaagtatgctctcaaatatgaaaatgatgctggcaagaaggaaattcagctgcagcttgagaagatgaagaaatatgct

SEQ ID NO: 33495 - DNA, 276 bp, Zea mays
gctcttcgtcttcaacatggcgctcatgggcttcgccgagcaccgccgcctccaggactggtacaacccgggctccatgggcaagcagtacttcctcggcctcgagaagttcctcgccggctccggcgacccgtcctaccccggcgggcccctcttcaacccgctcggcttcggcaagaccgagaaggagttgatggactccacctcaagagatcaagaacggcaggctcgccatgctcgccatcctcggttacttcatccaggggctcgtcacgg

SEQ ID NO: 33496 - DNA, 278 bp, Zea mays
cccacgcgtccgggaagcggtcgacggaggacttctccggcgtgccctacaacatgacgctgctcaactgcctcctatcggcttggtacggcctgccgttcgtgtccccgaacaacatcctggtgtcgacgatcaacgggacggggtcggtgatcgaggccatctacgtggtgatcttcctcatcttcgcggtggaccggcgggccaggctcagcatgctgggcctcctgggcatcgtcgcctccatcttcaccaccgtggtgctcgtctcgctgctg

SEQ ID NO: 33497 - DNA, 290 bp, Zea mays
gaaccgtgtcattcaagagcccggataatattgacaatggttatcgccatcgtgacactcttggacgatattttcgattctttcgcgaccccacaagaatgtgaaatactcactaattgcatcgaaagctgggatcccaaaggggctcaagaccttccaggttgcatgaaatttgctctagagaagatattggatagctaccagaccattacaaatatgctccaccgagaggacaagtatcgaatgacgtatctaagacactttacagaagatctagtgagaatcttcaa

SEQ ID NO: 33498 - DNA, 142 bp, Zea mays
gaacgtgatatgcaagttcagagggagcaggcagagagagatagaattggagacactctagacttcgaaatcaagaggtggtctgctggtaaagagggcaacttgcgtgctttgttatcaactttacaatatatactttggc

SEQ ID NO: 33499 - DNA, 289 bp, Zea mays
cagaagagggcgagagtgaaacttgagttctctgctccggcagaggctgggagaaaggactacatgatttacttgatgtcagactcttacttgggctgcgatcaggagtatgaattcaccgttgatgtcaaggatgctggaggggattgatgatgaagactgtgacactatgtcgcatagaagtagaattgagtgtgtactgtaacgcgatattggaacattctgtgttgtaacctcgaacatgtggaagctgtaacaccaacgtatgtgttattgtactttgggcgtt

SEQ ID NO: 33500 - DNA, 293 bp, Zea mays
gcacgagatgccggacccgtcccccttcaaggtgacgcacgggcgggacatatgggagctggccgcccacgacgccggcttcagaaggctcttcgacgctggcatggtcgcggacagcggcttcatcatgaacgtcgtggtcagggagtgcggcgccgtcttccaggggatcagctccctcgtcgacgtcggcggcgggttcggtggcgccacacaggccatcgcgaaagcgttcccgcacctggagtgcagcgtgctagatctcccgaacgtcgtcgccggcgctcctgctg

SEQ ID NO: 33501 - DNA, 297 bp, Zea mays
gtgaccaaaccgtcgcttccatttttcgcccgccgcccccagtcccgatccgaagctgtgcctcgtaccatttcgatccaatggcgccgacgtcgaagctgtcgacgggcatcaagcgcgcttcgcggtcgcacgcgtaccatcgccgtgggctgttggccatcaaggccaagaacggcggcgccttccccaaggccgacaaggccgccgccgccgtggaacccaagttctaccctgccgacgacgtcaagccccgcgttcccagcacccgcaagcctaagcctaccaagctcaggt

SEQ ID NO: 33502 - DNA, 283 bp, Zea mays
cggacgcgtgggcggacgcgtgggcggacgcgtgggtacagtcctgtacaggatgttgctgactcctgcagagctggagctgcaccgaatgtcatatttggccttgctctgggatataaatccgtcattatccctatttttgctattgcttttagtattttcctcagcttcagtcttgctgccatgtacggtgttgctgtggctgctcttggaatgctcagcacaatcgctactggccttgccattgatgcctatggtcctatcagtgacaatgctggaggaa

SEQ ID NO: 33503 - DNA, 279 bp, Zea mays
cggacgcgtgggcgcacgcatacacagcacagagtgaggtaagcatccgaaaaaagctgtgatctgatcgacatggccgccgccaccatggctctcacctcccgcgcgctcgtcggcaagccggcgaccagcaccagggacgtcttcggcgaggggcgcatcaccatgcgcaagactgctggcaagcccaagccagcggcgtccggcagcccctggtacggggccgaccgcgtcctgtacctgggcccgctgtccggccagcccccaagctacctgacc

SEQ ID NO: 33504 - DNA, 283 bp, Zea mays
gttccaccccaaaacgaagcaacacgccttgcccggtgtgcaccgacgaaaccagcgacagcagcacagagacgaacggcgtggtatcctcctgcctcagctgcttcctagctgggggtgctctctaccgtttcgagtacgcagtcaacccggcgctcttcctcgccaaagcgcgaggagggacgtgcacgctcgctccctctgaccctgacgacacggtggctcgccgcgccagatacctgctgagcaacggtttcaggtgctacaacctgttcaagagcaa

SEQ ID NO: 33505 - DNA, 276 bp, Zea mays
cccacgcgtccgcttctcctcccccaccggttcgtgttcaggttctggttcgtgggcgagagggaagagatggcggcgtcggacgttgagtaccgttgcttcgttggcggccccgcctgggccaccgacgaccactccctcaacaacgccttcagcacctacggcgaggtcctcgagtcgaagatcatcctggatcgggagacgcagaggtcccgcggcttcggcttcgtcaccttctccacggaggacgcgatgcgcagcgccatcgagggcatg

SEQ ID NO: 33506 - DNA, 285 bp, Zea mays
cggacgcgtgggtgaaaagcttcttgagtttcgtcaaaagcaagatggatttatcgagacaagcttcgacacactaagtggttatggtgcaaatggtgctataatacactacagaccaaccccagagagctgcagctctgtaggaagtgacaatctgtttttgttagatagtggtgctcaatacattgatggaactactgacataaccagaacagtgcattttggtgaggcttccccaaggcaaaaggaatgcttcaccagagttttgcagggccatatagctct

SEQ ID NO: 33507 - DNA, 275 bp, Zea mays
cggacgcgtgggcggacgcgtgggttcactgagatgccaaccaacaatttcgtcgaaagcagcttctggaattacgatgcactgtttcagcctcaacagcatcctgctcgggattcacatgatacatttttcctgaaagctccagcaactacaaaacagttgcctgacgactatcttgagaaagtaaagcaagttcatcagtctggcggttatggctccaaaggatatggttatgattggaaacgggatgaagcggagaagaatcttctccgtac

SEQ ID NO: 33508 - DNA, 277 bp, Zea mays
atcaaaacacgaggcgtctcccgctagactggtcactcggcacgcaggcagaggcagcatagcagcagccaactccatccatcctctttcccctcctcgcttcgcttcctcggcggattcctcctccctcgaccgtccccgtccccgtccccttccggcgcgcgagctcgcccgagatggcaaacgcgagatcgggtgtcgctgtgaatgacgagtgcatgctcaagttcggcgagctgcagtcgaagaggctgcaccgcttcctaactttcaagat

SEQ ID NO: 33509 - DNA, 278 bp, Zea mays
cggacgcgtgggagaacgcagcgcgggacaacaagaagaaccggatcatcccgcgacacgtactgctggcgatccgcaacgatgaggagctcgggaagctactggccggcgtcaccatcgcacacggcggggttctgcccaacatcaaccctgtgctgctccccaagaaaaccgctgtcgctgctgccaaggaaggcaaagagaagaagtcacccaagaaggccgccgccgccaagtcgcccaaaaaggtggccgcctcgtaggtccctggcaatgct

SEQ ID NO: 33510 - DNA, 280 bp, Zea mays
gccacctacgcaacaccagacgctccagcagtccagcactcggagctcgcgcgcccgacggcccaccatgatcatccccaagaagaaccgcaatgagatctgcaagtacctcttcaaggagggcgtgctgtatgccaagaaggactacaacctggcgaacacccacagattgatgtgcccaacctccaggtgatcaagctcatgcagagcttcaagtccaaggagtatgtcagagagaccttctcctggcagtactactactggtacctcaccaacgatg

SEQ ID NO: 33511 - DNA, 275 bp, Zea mays
cggacgcgtggggtctacggcaatggcagcactagccgcggccgggaggagcgctacctcctccccttcaaccacaccgtcgaggcccacagctactccatcctctgggctcccacccacatcatcttctacgtcgacgacacgccgatccgggaggtgatccggcacccggacatgggcggcgacttcccggcgaacgagtggcggtgtacgccaacatctgggacggctccgcgtgggccacggacgggggcaagtacaaggtcaactacaag

SEQ ID NO: 33512 - DNA, 204 bp, Zea mays
gcgccggcaaccgccgccatcgatcgatcgcccggaaactgacctctaccgatgtctggagccggcgaggaggataagaagcccgcggagggcggcgcccacatcaaccttaaggtcaagggacaggatggcaatgaggtgttctttcgcataaagaggtccacccagctgaagaagctgatgaacgcctattgcgaccgccag

SEQ ID NO: 33513 - DNA, 263 bp, Zea mays
gcgaggcgacgttcgacgccgccttcagcgtcaacacacggggcaccttcctgtgctgccgcgagcggccaggcggctggtgcgtgacggccgcggccgaatcgtgacgttctcttcgtcgggagttgggtctctgcgccctggctactcggcatacgcagcaagcaaggccgcggtggaggtgatgactaagatcctggcgcgcgagctgcgcggcacgggggatcacggccaacgttgtggcgccagggtccactgggaca

SEQ ID NO: 33514 - DNA, 271 bp, Zea mays
cgctgtcgcccaatgttaggaagcgggttgagtttttgagagagatccagagtcaacacgatgaaattgaggccaagttttttgaagaacgagctgcccttgaggcaaagtaccagaagctttatgaacctttatacacaagaggtatggaattgtaaatggagaagtggaggtagatggtgtttgtgatgaaccggccagtgagaatactgttgagggaaaagaaccagacgctaaaggggttccagacttttggcttactgccatgaaa

SEQ ID NO: 33515 - DNA, 270 bp, Zea mays
agattgcggactgctgaggtaccactccaccaagagcggagatgagctgacaagcctcaaggactatgtgacgaggatgaaggagggccagaatgacatctactacatcactggcgagagcaagaaggccgtggagaactcccccttcctcgagaagctgaagaagaagggctatgaagtcctgtacatggtggacgccatcgatgagtatgctattggccagctcaaggagttcgagggcaagaagctcgtctcggccaccaaggaggg

SEQ ID NO: 33516 - DNA, 274 bp, Zea mays
attgaaaggatactcaagacaaaccgtttctctgaactctctgctgatggtgctgggttatcgatggaaagggtgctcaatatgagcgtgcaggctaatgtgaacctgataccgaagcatacaaatgacacagaatccctggagcagttttgcaaggacactgtgatcaccatctggcattatcatggtgggtgccatgtagggaaggtggttgaccagcattaccgggtgcttggagtttcaggtctccgggtggttgacggctcaatatttt

SEQ ID NO: 33517 - DNA, 252 bp, Zea mays
ggaagacgcagctaacaactttgcccgtggccactacactggtaattcaccatgtgtatgtgaatatgtaataggagtgggtattatgcttctgtgactgtggatatgttcaattctaattatgtggaatgcagttgggaaggagattgtcgatctatgcctggaccgtgtgcgcaagcttgcagacaactgcactgggctgcagggattcttggtgttcaatgctgttggtggtgggactggcctctggac

SEQ ID NO: 33518 - DNA, 268 bp, Zea mays
cccacgcgtccgctcacttctgcgccgccacccactacaggtaaggaagaggaggagggcaggatgtcgcaccgtaagttcgagcacccgaggcacggctccctcggcttccttcccaggaagcgctcctcccgccaccgcggcaaggtgaagtcatttcccagggatgaccccaagaagccttgccatctcactgccttccttggctacaaggctggcatgactcacattgtccgtgaggttgagaagccaggatccaaactcgata

SEQ ID NO: 33519 - DNA, 221 bp, Zea mays
cggacgcgtggctaggaatagagtaaagatcagatactgtgatggttcatcatttactggtgacgttgaggctgtggacactgtgaaagatctccgttacagagggttcagagtctggcgtgccgtcatcgatgatctacttactgtgaggggaatgagcaaggcgcaaaatgctcttctttctggatgctcagccggaggtctagcagcaatactacact

SEQ ID NO: 33520 - DNA, 243 bp, Zea mays
ccagcatctcccgtctccgtcgtctcgtctctgctcctcacctcgccgccagccatgggcaagatcaagatcggaatcaacggtttcggaaggatcggcaggctcgtggccagggtcgccctgcagagcgaggatgtcgagctcgtcgccgtcaacgaccccttcatcaccacggattacatgacctacatgttcaagtacgacaccgtgcacggccaatggaagcccagcggcatcaccctc

SEQ ID NO: 33521 - DNA, 260 bp, Zea mays
catcttcaaggtgctcaagcaggtgcacccggacattggtatctcgtccaaggccatgtccatcatgaactccttcatcaacgacatcttcgagaagctggctgccgaggccgccaagctcgcccgctacaacaagaagcccaccataacctcccgggagatccagacttcggtgcgcctcgtccttcctggcgagctcgccaagcacgccgtctccgagggcaccaaggccgttaccaagtttacttcctcttagatcg

SEQ ID NO: 33522 - DNA, 250 bp, Zea mays
cccacgcgtccgcaactctttcccaaatccaccgccggctcggctcgcccatcttcgcgccaagcaccgaatctccgatggcccgcacgaagcagacggcgcgcaagtcgacgggcggcaaggcgccccgcaagcagctggccaccaaggcggcgcgcaagtcggcgccggcaaccggtggcgtgaagaagcctcaccgcttccgccccggcaccgtcgcgctccgggagattcgcaagtaccagaagag

SEQ ID NO: 33523 - DNA, 265 bp, Zea mays
atgaaatcacaaggatcaaagaaagctacaaggatattcgttgctcgaattccgcaatcggtggatgagtcgatgtttcgtagacattttgaagcttttggggaaattcttgatctttacatgccaaaggaacatggttcaaaagggcatcgtggaattgggtttatcacgtttcagagtgcagagtctgtggacaacatcatgcaagagtcacatgagcttgatggtacaacagtagttgttgatcgtgcgactcctaaggatg

SEQ ID NO: 33524 - DNA, 244 bp, Zea mays
gggatctgtattccagtgcctggatccagtattgacaattgctgctgctctcgcatatcgaaatccatttgtgctcccaatagatagaaaagaagaagctgatgctgtcaaaagatcatttgctggtgactcgtgcagtgatcacattgctcttgttaaggcgtttgtagcatggaaggatgctaaaaggagtggtagagaacgcactttctgtggggaaagttttctgtcccctatgaccctg

SEQ ID NO: 33525 - DNA, 211 bp, Zea mays
cagcatagcagcagccaactccatccatcctctttcccctcctcgcttcgcttcctcggcggattcctcctccctcgaccgtccccgtccccgtccccttccggcgcgcgagctcgcccgagatggcaaacgcgagatcgggtgtcgctgtgaatgacgagtgcatgctcaagttcggcgagctgcagtcgaagaggctgcaccgcttcct

SEQ ID NO: 33526 - DNA, 260 bp, Zea mays
cggagttcccgcatctccctctggtctggtcacaggagctccgagacctctccaatggcggttaagatctacgttgtgtactattccatgtatgggcatgttggcaaactagctgaagagatcaagaaaggtgccttatctgttgaaggcgttgaggctaaaatatggcaggtccctgaaattctctctgaagaagtgcttggaaagatgggcgcgccccctaagcccgacgtgccagtcatcacaccgcaggaacttgc

SEQ ID NO: 33527 - DNA, 264 bp, Zea mays
gtcaaattgtccggagttgaggaggaggatgtaatgtctggttttgtactttcaagtgtcgctaatcctgttggtgccgttaatgaattcatcgctcagttacagattttagagttgcttgacaatgctattttcacggctggctacaaagctgtgttgcatatccactctgttgtcgaagagtgtgagattgttgaactcatagaggaaattgacatgaagaaaaagaaaggagatccgaagaagaaaaaaccaaagaggaag

SEQ ID NO: 33528 - DNA, 270 bp, Zea mays
cctgctgagtcctacaagaccctcacgtcattgagtggtgtgactgcttacggttttgatcttatccgtggagccaagacccttgatcttatcaggagcagcttcccctctgggaagtacctcttcgctggtgttgtggatggacgcaacatttgggctgatgatcttgctgcatctcttagcactcttcagtctcttgaggccgttgctggcaaggacaaacttgtggtgtcaactcctgctcactgatgcacaccgctgttgatcttg

SEQ ID NO: 33529 - DNA, 271 bp, Zea mays
caaagttgatgtagatggtgggaacagccgtgtggtgtcggagaaaaaggcaaaggcatggtgcgcctctaaagggaacatcccgtactttgagacgtctgctaaggatggaacgaacgtggaagatgccttccagtgtattgtaaagaatgctctgaagaatgaaccggaggaagaattgtatgtgccagataccgtggatgtggtaggtggcaaccgggctcagagatcatctggctgctgttaagacatgaggcatccacgaggcgtg

SEQ ID NO: 33530 - DNA, 272 bp, Zea mays
ctctaaaatttcccccactcgccagtcgcagcagcacctgtagcagccatggacgccagcggagccggtagcaaggggaagaagggggcggccgggcgcaaggcaggcggccccaggaagaagtcggtgacgcggtccgtcaaggccgggctgcagttccccgtcggccggatcgggcgctacctcaagaagggccggtacgcgcagacgtgaggcactggcgcccccgtctacctcgccgccgtcctggagtacctcgccgccgaggttct

SEQ ID NO: 33531 - DNA, 267 bp, Zea mays
cggacgcgtgggcggacgcgtgggcggacgcgtgggttggaactataccaatgatgttcaacgttgttatcctgtctcctcatggctacttcgaccagtccaatgtgcttggataccctgacactggcggtcaggttgtgtacattctggatcaggtccgtgctttggagaatgagatgcttctgaggattaagcagcaaggccttgatatcactccgaagatcctcattgttaccaggctgttgcctgatgctgctgggactacgt

SEQ ID NO: 33532 - DNA, 273 bp, Zea mays
gaaaaagatttgtgacattagcaggagtgaatttgacttggtctacaaacgcctaaatgtggtgcttgaagaaaagggggagagtttctataatccttatattcctcaagtgttggaggaattgagtagcaaaggcttgatcaaggagagtgagggtgccagagttatatttattcaaggtcatcagatccccttgatagtggttaagagtgatggtggcttcaactatgcctcgactgacttggctgccctttggtatcggctcaatgttga

SEQ ID NO: 33533 - DNA, 273 bp, Zea mays
ctctcgagttcgatctgtttgctcccccagacatgtcgggccgcggcaagggaggcaagggcctgggtaagggcggcgcgaaacgccaccgcaaggtgctccgcgacaacatccagggcatcacgaagccggccatccggaggctggctcgcaggggcggcgtgaagcgcatctccgggctcatctacgaggagacccgcggcgtgctcaagatctttctcgagaacgtcatccgcgacgccgtcacctacacggagcacgcccggcgcaaga

SEQ ID NO: 33534 - DNA, 276 bp, Zea mays
aggtgatctcatcgctgactgcttctctgaggttcgatggtgccctcaatgtggatgtgaacgagttccagaccaacctggttccttacccgaggatccacttcatgctctcctcctacgcaccggtgatctcttctgcgaaggccttccacgagcagctgtctgtggcggagatcaccagcagcgcgttcgagccggcttccatgatggtcaagtgcgacccacggcacggcaagtacatggcttgctgcctgatgtaccgcggcgacgtggtgc

SEQ ID NO: 33535 - DNA, 266 bp, Zea mays
ggaaaaccttgcccgtgaaacaccagttttcaccgttatggaggggaatgagcctccctttttcactagattcttcacctgcgactccgcaaaatcactgatgcatggcaattcataccagaggaagctcgccattgtaaaaggtggaggtgctccagcattggataaaccgaaaagacgaacaaccgtctattcaggaaggagtactacacaagataaatcccaacgctccagaagcatgtccttcagccctgaacgtgtgcgtg

SEQ ID NO: 33536 - DNA, 266 bp, Zea mays
cggacgcgtgggcggacgcgtgggcggacgcgtgggttggaactataccaatgatgttcaacgttgttatactgtctcctcatggctacttcgcacagtccaatgtgcttggataccctgacactggcggtcaggttgtgtacattctggatcaggtccgtgctttggagaatgagatgcttctgaggattaagcagcaaggccttgatatcactccgaagatcctcattgttaccaggctgttgcctgatgctgctgggactacg

SEQ ID NO: 33537 - DNA, 267 bp, Zea mays
cgtctcccccatctgcaagaacaagatcaggagagcatcctagggggaagaaacaggagggggaaaaagaagcccagaaagaccaactgaccaaacaaaaaggtggcatctttgtgtcaccgaggcaccgccgatcacagaccaaagcccgctcctctggtccatcccaagcgtacagcagccgagatttcttcgatctgcgcttgcgtttttttttcttgtaaagattttagttttccccccttcaactgttgctagccttgagtc

SEQ ID NO: 33538 - DNA, 273 bp, Zea mays
gcaaccggtccaacactttcacgctcaggcgctcagctctagcaatggctgcctccaccatggcgatctcctccacggcgatggccggtacccccatcaaggtgggctccttcggcgagggccgcatcaccatgcgcaagaccgtgggcaagcccaaggtggcggcgtccggcagcccctggtacggccccgaccgcgtcaagtacctcggccccttctcgggcgagcccccgagctacttcaccggcgagttcccgggcgactacggctggg

SEQ ID NO: 33539 - DNA, 257 bp, Zea mays
agcgctcgtcacctccaatcaacaaattcccaatccgccgcttcccatcccgcgttcgccgctccatttgatcgaattcccgatggcgcccaaggccgagaagaagcccgcggagaagaagccgacggaggagaaggccgagaagaagcccagggcggagaagcgcgtgccgggcaaggagggcggcgagaagaaggggaagaagaaggccaagaagagcgtcgagacgtacaagatctacatcttcaaggtgctca

SEQ ID NO: 33540 - DNA, 255 bp, Zea mays
cccacgcgtccgcccacgcgtccgcggacgcgtgggtcctgttctctctccccacttcgagacttcctccattcgcggtttgcctctctgcctccctccctcagatcatccctaagattgccatggcggaccagctcaccgacgaccagatcgccgagttcaaggaagcattcagcctcttcgacaaggacggcgacggctgcatcaccaccaaggaacttggaactgtgatgcgctcgttggggcagaacccta

SEQ ID NO: 33541 - DNA, 250 bp, Zea mays
cgcaccccggtcgctccaccgaccccaaacctcaaatcagcgggagggaactcgcacgcgaaggcaaatacgctttagatcccccattgcttctggctactaggccagcgcgcctcgattttcttctccgttttggtctaattcgctgaactcatggctcgcgtctacgttgggaaactggatccgcgtgtcacggcgcgggagatcgaggacgagttccggatgtttggggttctgaggagtgtatggg

SEQ ID NO: 33542 - DNA, 236 bp, Zea mays
cccacgcgtccggcgcgacccgcgggtggtggcggtcctggacgccaagagcttccccgtgctcttcgacatggacaaggtggagaagaaggacctgttcacgggcacctacatgccgtccacctccctcaccggcggctaccgcgtctgctcgtacctggacccctccgagcccacccacaccaaggtgaagcagctgctcttctccctcctgctctcccgcatagacgacgtga

SEQ ID NO: 33543 - DNA, 257 bp, Zea mays
cgatggggaacggaaacggcgtggcgccgtctcaaccgtcgcggccagccggtcggccaacggctgctgcggcggcaacgccatacgcggacaggcggctgcggctgaacccaaatgcggatcacaagccggaagactacagcgacgtgcgcggcgagtacgcgccggccgtgtacagcgcactcgagcggcatctcccacccagcctcatcgatgccgaccgcgatgtcaagctacacttcatgcgggacattctc

SEQ ID NO: 33544 - DNA, 255 bp, Zea mays
gccgagcgtggcatcacaatcaaatctactggtatctctctttattatgagatgactgatgagtcactgaagaactacaagggtgagagggatggtaaccaatacttgatcaaccttattgactcacccgggcacgtcgatttttcttcggaagtcacagctgctcttcgcatcaccgatggtgctctggttgtggttgattgtattgaaggtctctgtgtgcaaactgaaactgtgcttcgccaagcccttggt

SEQ ID NO: 33545 - DNA, 255 bp, Zea mays
agatgccgggtgcgcaccaggcgcccgcctgctacgacgcgctgagcgcacgcctcgtcgagcgcgccgagttcagggcctgcttcacgagcggtttctcaatctctgccgcacggcttggattaccagatgttggtctcatctcgtacggggaaatgattgatcaggggcgtctgatcactgaagcagtttcaatccctgtgatcggtgatgcggataatggttacggaaactgtatgaatgttaagaggacag

SEQ ID NO: 33546 - DNA, 258 bp, Zea mays
gagctcgtcgccgtcaacgaccccttcatcaccacggattacatgacgtacatgttcaagtacgacaccgtgcacggccaatggaagcacagcgacatcgccctcaaggactccaagacgcttctcttcggcgagaagccggtcaccgtctttggcatcaggaaccccgaggagatcccgtggggtgaggctggtgctgagtatgtcgtggagtccaccggtgtcttcactgacaaggacaaggctgctgcacatctg

SEQ ID NO: 33547 - DNA, 257 bp, Zea mays
cgcagagaatccccaagcaaacaaacagggtagaggtagagggagaggagaggagaggagaggagaggagaggttgggtctgggacaccatggctccgatgaagctgtacggggcggtgatgtcgtggaacgtgacgaggtgctcaacggcgctggaggaggctggctccgactacgagatcgtgcccatcaacttcgccaccgccgagcacaagagccccgagcacctcgtccgcaacccgtttggtcaggttcca

SEQ ID NO: 33548 - DNA, 261 bp, Zea mays
atccatcgaatttgtgttgggctgtgatgtttggtgacaatgaggtacccgttgaaatagttcagccaggtgttctccgctgccacacaccactgcacagcaatgggaatctcagaatctgcattacttcgggaaacagagaagtttgtagtgaattcaaagactttgagttccgctcaaaaccaacctcttctagtttcacagacattgcaccatcttctagacatctgaaatccagtgaagagttattacttcttgcaa

SEQ ID NO: 33549 - DNA, 264 bp, Zea mays
gtccctcctgctacaagattcggtgcaggaaggacccgtcctgctccgggcggacggagacggtgatcatcaccgacatgaactactacccggtgtccaagtaccacttcgacctcagcggcactgcgttcggcaggctagccaagcccggcctcaacgacaagctccgccactccggcatcatcgacatcgagttcaccagggtgccgtgcgagttcccgggcctgaagatcgggttccacgtggaggagtactcgaaccccg

SEQ ID NO: 33550 - DNA, 269 bp, Zea mays
ggccgcacccttgcggattacaacatccagaaggagagcaccctccacctgatgctccgtctcaggggtggtatgcagatctttgtgaagacactcactggcaagacaatcacccttgaggtggagtcttcggataccattgacaatgtcaaggccaagatccaggacaaggagggcatcccacccgaccagcagcgcctcatcttcgccggcaagcagctggaggatggccgcaccctggcggattacaacatccagaaggagagcac

SEQ ID NO: 33551 - DNA, 269 bp, Zea mays
gggtgagagagatggtaaccaatacttgatcaaccttattgactcgcctggacacgttgatttttcttcggaagtcacagctgctcttcgcatcaccgatggtgctctggttgtggttgactgtattgaaggtgtctgtgtgcaaactgaaactgtgcttcgccaagcccttggtgagaggattaggccagttctcacggtgaacaagatggacaggtgcttccttgagcttcaggttgagggtgaggaagcttatcagactttctccc

SEQ ID NO: 33552 - DNA, 271 bp, Zea mays
caagaacagaggactttattgttgacactcttaagcttcgtaaatatcttggtgattatctaagagagtttttcagagatccaaccaagaaaaaggtaatgcatggtgcaggtcgtgatataatatggcttcaacgagacttcagcatatatgtgtgcaacctttttgacacaggccaggcttcaaaggtcttacagatggaccgcaacagcttggaacatcttttgcaccatttctgtggagtgtctgcaaataaagaataccaagctgc

SEQ ID NO: 33553 - DNA, 265 bp, Zea mays
gtctacggcagcgacaaccggaagctctggaagcacggtgactgaccttggggttgtaggcagaggcgtcaaacgagctagcatcaagccgatctctgctgaacctgctgctaagaaacctgcacttgattcaccatctctccaaggtgacagcagcatcaactctgaggttgtccctgcaacgcagactggagacgagtccgtatctaagtaaattacaatttcattagccctactgtaatgttaacttgctggaacatattag

SEQ ID NO: 33554 - DNA, 253 bp, Zea mays
ggcgaggatcgtagagtacttcgaggtcaagtgcatcctcgtcaccggctcaacagggtttcttggaaagatccttgtggagaagatactgcgggtgcagcctgacgtgcgcaagatttacctgcttgtacgcgcggtcgacgagccatcagctaagagcgcgtccaacaagaggtgatagacacggagctgttcggcctgctgagagagagacacggcaatggcttccagcagttcgtagaggccaaggtcg

SEQ ID NO: 33555 - DNA, 266 bp, Zea mays
gccagaacccaagtgggtcaaactgtgtgaatgaggattcacctaatctacaagctgcaattgatggccctggcaaatggactggtcagccccttgtacaatgcacttcccacatgtgcccgataagaatccactggcatgtgaagctcaactacaaggattactggagagtgaaaatcactatcacaaacttcaacttccgcatgaattacacgcagtggaacttagtagcccagcatccaaactttgataatatcactcagttg

SEQ ID NO: 33556 - DNA, 266 bp, Zea mays
ttcttgggtaggaacgcatcccttcgggcggctgttactacaaggatcgtgcccaaggcaaaatctggatctcagatatcgccacaggcatcttacaaggtggcgctgctcggtgctgctggtggcataggtcaacccttgggcctattgattaagatgtctcccctggtgtccgagctgcatctgtatgatattgctaatgtcaagggagtcgctgcagatctcagccactgcaacacgcccgctcaggtacttgacttcactgg

SEQ ID NO: 33557 - DNA, 267 bp, Zea mays
gcgatgagcaccccaagatctaccgcatgaagctctgggccaccaacgaggtccgcgccaagagcaagttctggtacttcttgaggaagttgaagaaggttaagaagagcaacggccaggtcctggccatcaacgagatctttgagcgtaacccgacgacaatcaagaactacggcatctggctgcgctaccagagcagaaccggctaccacaacatgtacaaggagtaccgcgacacaaccctgaatggcgctgtggagcagatgt

SEQ ID NO: 33558 - DNA, 264 bp, Zea mays
cggacgctgggcggacgtgggtggcagataaatttgggcggacaagaacattcatcctggatgcagtccacacttgctctaggtgcattcttgagtgcaacagctcaagatatccgcacaatgattattggccgattgcttgctggaattggtatcggggtctcatctgctcttgtacccctttacatatctgagatctcaccaactgaaattcgtggaacacttggtaccgttaatcaactttttatttgcattggaattctt

SEQ ID NO: 33559 - DNA, 260 bp, Zea mays
cggacgcgtgggcggacgcgtgggggattgtcatcggcttgtatggggatgatgttccacaaacagcagagaactttcgtgatctttgcactggagagaaagggtttggatacaagggatccagtttccaccgtgtcatcagcgactttaagattcaaggccgagattttgacaaaggcaatggtaccggtgggaaaaacatatatggacgcactttccaagatgagaacttcaaattggttcacactggtacttggagt

SEQ ID NO: 33560 - DNA, 260 bp, Zea mays
gtccgcctggagggcgtacgcggcggcgggcgaggagagcgatgtggtggtggtgggtggcgggcccggaggtacgtggcggagatcaaggccgcgcactggggctcaagaccacctgcatcgagaagaggggcaccctcggcgggacctgtctcaacgtcggatgcattccatccaaggctcttctgcattcatcacatatgtaccatgaagcaaagagttcttttgcacatcatggagtaaagttttcaaatctggaa

SEQ ID NO: 33561 - DNA, 264 bp, Zea mays
ctcgcattgttaccgaggacttcttgccacttccaagcaaagggaaatctgggaaggatggctggtatcctccaggccatggtgatgtgttcccctctttgaataacagtggaaaactcgacatcttattggctcagggcaaggagtatgtcttcgttgctaactcagacaacttgggtgctatagtcgacatcaagatcctgaaccatctgatcaataaccagaatgaatactgcatggaggttactccaaaaacattggctg

SEQ ID NO: 33562 - DNA, 263 bp, Zea mays
gtttccgctccgccgccgtcgatggagttctggggtctcgaggtcaaacctggatccactgtcaagtgtgagcctggacatggctttatcctgcacgtttcccaggctgcccttggggaatcaaagaaaagtgacagtgccttaatgtatgtcaaagttgatgacaagaagcttgccattggaacggctctctatcgacaaatacccacagatacaattcgatttggttttcaataaagagtttgagctgtcacacacatcga

SEQ ID NO: 33563 - DNA, 262 bp, Zea mays
gatggacgttttatacgaagatgcaaacaaggttgcttgcagtttgtgattctcaagcctattttggttgtcatcaccttcatactttacgcaaaaggaaaatacaaagatggaaacttcagtgtcaaccaatcctatctctacataactatcatatatacaatctcatactcaatggctttatatgcccttgcgttgttctacgcggcttgcagagatctacttcggccatataatcctgtcccaaaattcatcatgatca

SEQ ID NO: 33564 - DNA, 262 bp, Zea mays
cggacggtgggtcggacgcgtgggcggacgcgtgggcggacgcgtgggtgacagcgagattaagtcttggagtgcttttgctgacccagaaggttattgaggttgatgctcttgctaaggcattggctggtcaaaaggatgaggcttacttcgcagcaaatgctgctgctcaggcctcgaggaaatcctcaccccgtgtgaccaatgaagaagtccagaaggctgctgctgctctcaagggctctgaccaccgccgtgggac

SEQ ID NO: 33565 - DNA, 260 bp, Zea mays
tgctggtatcaatgctagctttgctgttcaccaggatgttgatggaagggcaacagatgtagctctagggtggtcagtagctttaggttctcctttcacatttgctactactctagagcaggagtaccggagtgacatttttggcgagcgaggtattttgcttggtgctgtccatggcatggtggaggctcttttcaggagatacacagaacaaggaatggacgaggactcagcatataagaatactgtagagagcatca

SEQ ID NO: 33566 - DNA, 261 bp, Zea mays
ctgaaaacctcacaaaaccctcgtttgctccccaccaccccgccgcgccgccgcctgtaccagctgcgtcaagatgagtcggcaccctgaggtgaagtgggctcagaggatcgacaaggtttacatcactgtacagttacctgacgcaaaggatgctaaggtcaatttggatccagatggtgtcttcacattctctggcagcgctggtacaaacttgtatgaattgaaactagatctgaatgacaaagtaaacgttgaggc

SEQ ID NO: 33567 - DNA, 257 bp, Zea mays
cggaccgtggtgacgtagaacgatatacaagagccaagttcatggattacacaacagacaatatgtccatatacccatcgccaactggtgtgatgattggaatcgatctagcatataatttgcactctgcttttggtaactggtttcctggatcaaagccactacttcagcaggcaatgaacaagatcatgaagtcaaatcctgccctgtatgtcctgagggagagaataaggaagggtctgcagttgtactcttct

SEQ ID NO: 33568 - DNA, 260 bp, Zea mays
attggtggtattggaactgttcctgttgggcgtgttgagactggtatcatcaagcctggtatggttgttacctttggtcctagtggccttactactgaggtgaagtctgttgaaatgcaccatgaggctctccaggaggcccttcctggtgacaatgttggcttcaatgttaagaatgttgctgtgaaggatctgaagcgtgggtatgtggcctccaactccaaggatgaccctgccaaggatgctgctagcttcacgtc

SEQ ID NO: 33569 - DNA, 193 bp, Zea mays
agcggctctcggttctgggcgacgaggggtgcgaggtcgtcgggatcgacgacaagtacgtcctggacagggagctcggccgcggggagttcggggtgacgtacctgtgtatggatcggggcaccaaggagctgctcgcctgcaagtccatctccaagcgcaactgcggacggccgtcgacgtggaggacgtg

SEQ ID NO: 33570 - DNA, 214 bp, Zea mays
caagaacacaggttctcctacctgcaagagaggatttgttcagttctgctatgagccaatcaagcaaatcatcaagacctgcatgaatgaccagaaggagaaattgtggcccatgctgcaaaagctcaatgttaccatgaaggctgatgagaaggagttgattggcaaagctttgatgaagcgtgttatgcaaacgtggcttccagctagcact

SEQ ID NO: 33571 - DNA, 256 bp, Zea mays
gtcttccagtgtttggagactggagagaccttcgccattaagaaggtgctgcaggatcggcgttacaagaaccgggagctgcaacttatgcgtgccatggagcaccccaacgtcatctgcctgaagcactgcttcttctcaacaacgagcagggacgagttgtttctaaaccttgtcatggaatttgtccccgagaccctgtaccgtgtcctgaagcactacagcaacgcgaaccagaggatgcctcttatctacg

SEQ ID NO: 33572 - DNA, 243 bp, Zea mays
aggagaagagcgaggcccttggcgaggtcctcaatggggatcggctagttgatgcgccttacaagcttgatttccgttcggaagtcgagtccaaggcggtttgctcaaagaagcttaccaaagaggatgtagtgaagttccggaatgcagtagcgaaggactactacttccagatgtactatgatgatctcccactgtggggcttcattggtaaagttgagaagggaggcaaggccgatccga

SEQ ID NO: 33573 - DNA, 263 bp, Zea mays
gccgttgctgctgccgcgtccacagaatggggggtttcgtgaagacccataagaccaatgcgtatttcaaacgtttccaagtgaaattcaagagaaggcgggctggcaagacagactacagggccaggataaggctgattaaccaagacaaaaacaagtacaacacacccaaatacagatttgttgtgcgatttaccaacaaggacatcactgcacaaatcatatctgctagtatagcgggtgatatggttcttgcttctgcc

SEQ ID NO: 33574 - DNA, 256 bp, Zea mays
ctttgatcgaggacggacggattgaggaagcagaagagttatttagaatggtattctcacgatatatggagggtttgcctcgtacatttttcatgagaattatttctttctattacagtgctggagagcatgataagatgttcgagatttttgctgatatggaggaactaggcgtaagaccagatggttctattatcaggatgctaggtgatgtatttcaaaagatagagatgatggacaaatacgaaaagttaaa

SEQ ID NO: 33575 - DNA, 209 bp, Zea mays
gttattgctcacaagcaggcaattcccttccggagatactgtgggggtgttggtcgcaccgcgcaagctaagtcgcgccactccaatgggcagggccgctggcccgttaaatcagccaggttcatcctggatttgctgaagaatgctgagagtaacgctgatgtgaaaggcttggatgtggacaacctctatgtttcacacatccaggt

SEQ ID NO: 33576 - DNA, 210 bp, Zea mays
agcaggcgtgctacctgccgtgcaccgccgacgggctgccggtcatcggggagataccaggcgtgaaggggtgctatgtggccacgggccacagctgctggggtatcctcaatggtccggccaccggcgcaccctcgccgagctcatccttgacggcaaggccaagatcgttgatctcgaacctttcagcccggcaaggtttctcaagag

SEQ ID NO: 33577 - DNA, 260 bp, Zea mays
ccggtcagaccaatcaacaaagtgacgcgagcacgagcatccatcgtttccccttcttccccatcgcgtgccctcgccgcagccatcttccatggcggaccagctcacggacgagcagatcgcggagttcaaggaggccttcagcctcttcgataaggatggcgacggctgcatcactaccaaggagcttggaactgtgatgcgctcccttggccagaaccccactgaagcagagctgcaggacatgatcaacgaggttg

SEQ ID NO: 33578 - DNA, 257 bp, Zea mays
cccacgcgtccgatcctgcgatcctcgaagcctccgccgagcatcgatcatgtcggcctactgcggcaagtacgcggatgagctcatcaagaatgctgcctacatcggcacccctggcaagggtatccttgctgctgatgagtcaactggcaccattggcaagcgcctttccagcatcaatgtcgagaacgtggaggagaaccggcgggctctccgtgagctcctgttctgctgccctggtgccctccagtacatca

SEQ ID NO: 33579 - DNA, 255 bp, Zea mays
atctacattgctggatttttccttacagtgtcgcctgattctatccagctagttgctgagcatgctgcagcaaataacaaggtgttcctgatgaacctctctgctcccttcatctgtgagttcttccgtgatgcccaagagaaggtcctcccgtatgctgactacatcttcggcaacgaaactgaggcaaagatctttgccaaagtcagaggatgggagactgagaatattgaggagattgctttgaagatctct

SEQ ID NO: 33580 - DNA, 256 bp, Zea mays
cacccttagcgagctcatctatccattggctagttgggattgtgtatatgctccaaataagcatatttgtcagccttcttcgaggggttctgcgcaatggagttctttattttctgcgggaccctgctgatccaaattacaatccatttaaggatttgattgacgaccctgtgcataagcatgcccgacgagttcttttgtcagttgcagtgtatggaagtttgattgtgatgttggtcttcttacctgtaaaact

SEQ ID NO: 33581 - DNA, 250 bp, Zea mays
cgtccaacatgttggtattccttcgatgaatataatttttggagaaggaccaggatatccggtttaccactccttatatgatgactacgtatggatggcgaaattcggagatcctgcgttccgtaggcatgtggcagctgctagcatatggggaatgatggctttgaggttggcaaatgaagacatcctacccttcaattacatgtcctatgcaattgagcttgaggcatacacaaaaacggtagagaat

SEQ ID NO: 33582 - DNA, 240 bp, Zea mays
cagactggtagatttgggaaactaaataagagagttacattccctatggagttagatctgacaccatacatgagttgcactgatggaagtgacctgtatgatctctatgctgtagtcgttcatctggatatgctgaacgcatcattctttggacattatatatgctatatcaaaggttatcaaggaaggtggtataaaattgatgactgcaaggttatggttgttgatgaggaggaagta

SEQ ID NO: 33583 - DNA, 248 bp, Zea mays
ctctcgtcgccgtcctctcccgttcgcaacgccacgctccccaccgccgaaatggccccgaagcgaggtggcagggcaccggtgccggccaagaagaagacggataaagtgacgaaccctctgttcgagaaaaggccgaagcagttcggcatcggcggcgcgttgcctcccaagaaggacctgcaccgattcgtcaagtggcccaaggtcgtgcgcatccagcgccagcgtcgcatcctcaagcagcg

SEQ ID NO: 33584 - DNA, 247 bp, Zea mays
gatgcttgaagctctattgcccatgtttttctggaggtggttattgctctgataagtgtggctgccaaccatgtttcaacaaagaagcttttgcagaaacagttcatactactcgcaaggtgttactttcgagacagaagtgtatgtcaatgaaaatcaataggagacctgaggcgaataccgaaccaatggaagatgctcaccattcttcttcttcaactccaccaaagagaggttgcaactgcaa

SEQ ID NO: 33585 - DNA, 250 bp, Zea mays
ggctcacgctggtcgacggcgacgtctacgtgccgcgcgacgagcgcttcggccacatcaagaagtcggacttctacggctacgccatcaaggcgctggtgaacgccgtcatcccggcaatccgcacctacgtcgacctgtcgcccggcgagttcgactccttcaaggacatcatgaagctgtacgagggcgggatccagctgcccaaaataccagccctcgaggacctgcggaacagttcccactcgag

SEQ ID NO: 33586 - DNA, 272 bp, Zea mays
gaaattgtttcatatttcactgatccaaatgctactggaccccctcctgacatgcaacttctgctcccatttgtggagtcggctttgccagtggcttacggtgtcttgtctatccaactatttcatgaaattgggcactttttggcagcatttccaaaaaatgttaaactgggaattcctttctttattccgaacttcacccttggaacttttggtgcaattactcagttcaagtccattcttccggatcgaaagacaatgtttgacatatc

SEQ ID NO: 33587 - DNA, 268 bp, Zea mays
gttgcatctacgttggtgtacctcctctttacaaggttgagcgtggaaaactagcacattactgctatgatgatgccgacctcaaagagatagttaacaccttccctgcaaatgcatcatatcatatccagaggtttaaaggtttgggtgagatgatgcctgcacaattatgggaaacaacgatggatcctgagaggcggctgttgaagcagcttagggttgaagatgctgccgaggccaatgttgtgttctcgtcacttatgggcac

SEQ ID NO: 33588 - DNA, 270 bp, Zea mays
cctctatctctctctctctctctctccctctctacctgccccgttcctcaccagtctcttccgccggcgtcgacgagagctgcgctaggtgatctcgactgcttcctcgccccccatggcgacggcgctcaaatcgttcctgaacagccccgtcggccccaagaccacccacttctggggccctgtcgccaactggggcttcgtcatcgcgggtttggttgacatgaacaagcctcctgaaatgatatctggcaatatgacagcagccat

SEQ ID NO: 33589 - DNA, 268 bp, Zea mays
ccgggctgtcgatggagctccgccacaagtacaacgtgcgctccatcccgatccgcaaggacgacgaggtgcaggtcgtgcgcggcacctacaagggccgcgaggggaaggtggtgcaggtctaccgccgccgctgggtcatccacgtcgagcggatcacccgcgagaaggtgaacggctccaccgtgaacgtgggcatccacccctccaaggtgatcgtcactaagctgaagctcgacaaggaccgctaggcgctcctggaccgcaa

SEQ ID NO: 33590 - DNA, 265 bp, Zea mays
ctcaaccaagtgttacgctgggctcttggttcagttgaaattctacttagcagacactgtcctatctggtatggttacaatggaaggctaaagcttctggagagactggcatacatcaacaccattgtttatccaattacatctatcccactagtagcatactgcgtccttcctgctatctgtttactcaccaacaaatttattattcctgcgattagcaattatgctggggcgttcttcatcctgctttttgcttccatcttcg

SEQ ID NO: 33591 - DNA, 266 bp, Zea mays
aggtaaccggctcacgcctgtctcggtggccgtgggcaatcatggccactgtgggacagtctggggccctgaggagggtcaccgtgcactacgccaactcgcccacaggcagcacggtggcagaggtgagctttgacgaccttgacgacgagctgctcctgtttgtgctcgccgatcttcttcctggccaggaaggtttacaccagtcgatcttggaaggaacatacaacaaccaggagaaccacatgagaggtgcagcacccagt

SEQ ID NO: 33592 - DNA, 269 bp, Zea mays
cgcacaccagcacggcagcacctgccctcctcgccgtcgctgcctccctccgcgcgaccgatctaccctccgccgccaccatgtcgctgatcgccggggaggacttccagcatatcctgcgtttgctgaacaccaacgtggatgggaagcagaagatcatgttcgccatgacctcaatcaagggtgtcgggcgccgcttctccaacatcgtctgcaagaaggccgacatcgacatgaacaagagggccggcgagctgacgcctgatgag

SEQ ID NO: 33593 - DNA, 268 bp, Zea mays
ggaccgtggcggacgcgtggggattacttgctgcgttcccgaaactggttggaactgggaaacagcacacttatgttgaaactgaaaatgtgcgttatgtttatcaacctattgaaggattatatcttctacttatcacaaacaagcagagcaatattcttgaagatctggacacattgaggctcctctccaagcttgtgcctgaatactccccttccttggatgaggacggtatttgtaaaacagcatttgagattatatttgcttt

SEQ ID NO: 33594 - DNA, 272 bp, Zea mays
tcgccatgtcatttgcgccgagagacacgcacgaagctcaggtgcaattcgcgctggaaagaggtgtccctgccatcattggtgtgatggcgaacaggcggttgccttacccatctagggcgtttgatatggcacattgctcacgctgtctgattccttgggatgaacacgatggactgtaccttgctgaagtcgataggattctaaggccatgaggatactggatcctctcgggacctccgatcaattggaagacacaccacagggggtgg

SEQ ID NO: 33595 - DNA, 265 bp, Zea mays
tcctcgcattgttaccgaggacttcttgccacttcccagcaaagggaaatctgggaaggatggctggtatcctcctggtcatggtgatgtgtttccctctttgaataacagcggaaaacttgacatcttattggctcagggcaaagagtatgtctttgttgcaaactcagacaacttgggtgctatagtcgacatcaagatcctaaaccatctgatcaataaccagaacgagtactgcatggaggttactccaaagacgctggct

SEQ ID NO: 33596 - DNA, 262 bp, Zea mays
cgatgttactcttggggagttgctcaagaggaaggccagcgaaggtgtccgtgtccttatgctagtgtgggatgataggacttcggtcggcttgcttaagaaggatggcttgatggctacccatgatgaggagactgcaaattacttccatggcacggacgtcaactgtgtcctgtgccctcgcaaccctgatgattctggcagctttgtccaggacctgcagatatcaactatgttcacgcaccatcagaagatagtagtg

SEQ ID NO: 33597 - DNA, 263 bp, Zea mays
ctcatcaagggggtcaccaagggctaccgctacaagatgaggttcgtctacgcccacttccccatcaacgcctccatcaccaacagcaacaccgccatcgagatcagaaacttcctcggcgagaagaaggtcaggaaggtggacatgcttgatggcgtgaccatcctccggtccgagaaggtcaaggatgagctcatccttgacggaaacgacgtcgagctcgtatctcgctccgccgccctcatcaaccagaaatgccatgt

SEQ ID NO: 33598 - DNA, 169 bp, Zea mays
tccgcttcaagtctcgctacgtagcattgcaatataaaaagcagtcgcaatggctagcagcaccatggctctctcctccacggccttcgccggcaaggccgtgaacgtgccgtcgtcgttcgtcttcggcgaggttcgcgtgacgatgcgcaagacgtctgggaatggt

SEQ ID NO: 33599 - DNA, 264 bp, Zea mays
cggacggtgggggttggaccttttgttcgtaagcaggacagggaaaatgtctcgaacaatatcaaattcagtaatgtgtatgtgaagaatctgtccgatactgttactgatgatgagttgaaggagatgtttggaaaatatggaaccataacaagtgctgttgttatgcgggatagtgatggaaattctaggtgttttggatttgtcaattttgaaaatgcagatgctgctgctcaggctgttcaagagttgaatggcaagata

SEQ ID NO: 33600 - DNA, 252 bp, Zea mays
cggacggtgggcgtacgcgtggggacgacaccaacatcagcgccgggttcgcggcgaacggcaggcagatctgccaggcgcaggccggggccagcgacggcaacctggcgccgctggacgccatgagctccgtcaggttcgacaacggctacttccgcaacctcgtggcccagttcggcctgctccactccgactaggagcgcttcggggccggtagaggcgcgtcgactccatcacggcgcagtacgcgcg

SEQ ID NO: 33601 - DNA, 261 bp, Zea mays
cccacgcgtccgcacatgaccatccagaccgccgtcctcatcgagaccctcaccgcgctcggcgccgaggtccgctggtgctcctgcaacatcttctccacgcaggaccacgccgccgccgccatcgcgcgcgactcggccgccgtgttcgcctggaagggggagaccctcgaggagtactggtggtgcaccgagcgctgcctcgactggggcgaggcgggcggccccgacctcatcgtcgacgacggcggcgacgccacg

SEQ ID NO: 33602 - DNA, 254 bp, Zea mays
ctattgatgatctttctccatatgcaccactatataaagttatggaagggaatgagccatgcttcttcaagacatatttctcttgggataacacaaaatctttggttcatggaaattccttccagaagaaactctcactgctttttggattgcgttctgagggtgcatctaggagctctggtaatggtggaccaactcaaagggcatctgcattagcagctctatcatctgcattcaatccatcgtctcaacaa

SEQ ID NO: 33603 - DNA, 261 bp, Zea mays
cccacgcgtccggggctgtcaagattacccctgcccatgatccaaatgactttgaagttggaaagcggcataaccttgaattcatcaatatcttcacagacgatggaaaaataaatagcaatggaggtgcaaaatttgatggaatgccaaggttcaccgctcgagttgctgttattgaggcgctgaaggaaaaggggttgtataaggacacaaagaagaatgaaatgagcttgggtgtttgttcaagaactaatgatgtag

SEQ ID NO: 33604 - DNA, 262 bp, Zea mays
ccgtcttcataggtaacttggatgacaaggttcctgagagggttctgtatgaaattcttattcaggtaggtcgtgttgtagacctacacatacctcgtgacaaggaaactagccgaccaaaaggctatgcttttgctgagtatgaaacagaggagattgcccaatatgctgttaagctattttctggtcttgttcgacttcataataaaacgcttagatttgcgatctctgggcaagacaaaccctcattaaatggcaatat

SEQ ID NO: 33605 - DNA, 280 bp, Zea mays
atggagccgtcgaggatgacgctctaccgcttcggcaacacctccagcagctcgctctggtacgagctcgcctactgcgaggccaagggccggatcaagagaggggaccgcgtctggcagatcgcctttgggtcgggcttcaagtgcaacagcgccgtctggaaggcgctacggacggtggacgacgccggccgccgggacaccaacccctgggccgacgacatccacgacctgcccgtgcacgtgcccaaggtgtcgcccttcgcttcttccgaccagg

SEQ ID NO: 33606 - DNA, 270 bp, Zea mays
gctatctcgagctagctagctgctgtaaccgttgccatggccaaaatggtgttgctctgcgtgctcgtctccttcctcctgatgcccttggcctccctagccctgacgcaggacttctgcgtcgccgacctgacctgcagcgacacgccggcggggtacccgtgcaagtccagcgtcaccgccaacgacttctacttccacggcctggccggccagggcaaaataaacccactcatcaaggccgccgtgaccccggccttcgtgggccag

SEQ ID NO: 33607 - DNA, 275 bp, Zea mays
ggtgacaccccaccgcgcccatgggtgacagccagtactccttctccctcaccaccttcagtccgtcggggaagctcgtgcagattgagcacgcgctcacggctgtcggatccgggcagacctcgctcgggatcaaagctgccaatggtgtagtcattgccactgagaagaagctgccttctattttagtggatgaaacatctgtgcaaaagattcaggcactaacacctaatattggagttgtctatagtgggatgggtccagatttccgtgtt

SEQ ID NO: 33608 - DNA, 271 bp, Zea mays
tgaagctccccttggctacagcattgaggacgttcgacctgccggagcgtgaagaagttccagtctgctgcttactccaactgcgcgaagaagccatcctgatatcccttttggcttcctcattctagtagtttaggatttcttttctgacactttgattctgaccaatctctctggcctgctgcttcctgataatcgaccagttccccagtcttgctccttgcactcctccctccatctccagcattgtgttctgattcacctgctccaa

SEQ ID NO: 33609 - DNA, 273 bp, Zea mays
cagagatccagaggactccacaaaattctatccccgtttcaacctggaagacacatcaagttttagggaccttgatgaacacagcaaaaatgtcctcagaagattgtattatgactattattttgttcgccaagaaaatctctggcgccaaaattcactgaagactttgcctgtcctgctgaactcgtcagatatgttagcatgtggagaggaccttggccttatccctgcttgtgttcaccctgttatgcaagaactggggttgattggatt

SEQ ID NO: 33610 - DNA, 271 bp, Zea mays
ggggggattggccttggtgaggagaacacaggattcatgcaggctagtttgaagcgccataggtggcacaggaaagttctgaagacaaaggatccaatcatagtttcaattggttggaggcgatttcaaacaacccctgtgtatgcaatagaggatcggaatggtcgacaccgcatgctgaagtatacacctgagcatatgcattgctttgctatgttttggggacacttgctccaccgaagagtggtgtattagcagtccagaatctttc

SEQ ID NO: 33611 - DNA, 167 bp, Zea mays
ctgagaataatagtagcacaatctttgatggtatacaagtaatagaacccaattttggtttgatagataaaccagatgcagatacaaatgacatgatttctgaaaagttgatggtacaaattaatcttaacgaaagcattgaagaggatatcccaccgagccaatat

SEQ ID NO: 33612 - DNA, 268 bp, Zea mays
gcagcctgcgctcaaagctctcaaagataggctgatggcaaagaacgtggcagaggaaattgcagagaagctttgtgaatctgtcgcagctagccttgagggcaagaagctaggatctttcactagaatatcatcaacagtccagacagctatggaggatgcgcttcttcgtatcttgaccccaaggcgctctattgacatactgagggatgtgcacgctgccaaggagcgtgggaggccatatgtcattgtttttgttggggtgaat

SEQ ID NO: 33613 - DNA, 268 bp, Zea mays
gtacccggaccggatgatgttgacattctctgtcttcccgtcgcccaaggtgtctgatactgttgtggagccctacaacgccacgctctccgttcaccagctcgttgagaacgcagacgagtgcatggtgctcgacaacgaggctctctatgacatctgcttccgcacgctcaagcttgccacaccaacctttggtgatctcaaccaccttatctctgcaaccatgagtggtgttacgtgctgccttcgcttccctggtcagctgaat

SEQ ID NO: 33614 - DNA, 268 bp, Zea mays
cacaattccaaggatcctagagcttgctgaagagctgtctatgcctcttgctgctgtgaagtactcccgcgggacgttcatctttcctggcgcacagccagccccccaccggagcttctccgaggaagttgctgtacttaaccgatactttgggggcctgaagtctggtggcaatgcttatgtgattggagatgcagcaagaccaggacagaagtggcacatctactacgccactgagtacccagagcaaccaatggtcaaccttgag

SEQ ID NO: 33615 - DNA, 261 bp, Zea mays
atcgcggtcaaattattactagcaggggaaagaaaaatctgtgatcagatttttgatggtgtgaattttaacaagggccattgttttgctgaactcacagcaaatagtattataactcttttcagctttggagacgctgttgctaaaagcaaaaggtctcctgaaaagctgtttgtgttgcttgacatgtatgaagtaatgcgtgaacttcaaccagagatcgatgaaatatttgaaggcaaaccttgcactgagatgcgg

SEQ ID NO: 33616 - DNA, 262 bp, Zea mays
ggcctctgtcccttgcaagttcaatctcacctccaaccatgggtaaagagaagtcccacatcaacattgtggttattggccacgttgactctggcaagtcgaccaccacaggacacctgatctacaagcttggaggcattgacaagcgtgtgatcgagaggtttgagaaggaggctgctgaaatgaacaagcggtccttcaagtacgcatgggtgctcgacaagctcaaggctgagcgtgagagaggtatcaccattgatat

SEQ ID NO: 33617 - DNA, 261 bp, Zea mays
caacattttacctgagatgtatcaagttggctacacaaaattgttcttccgaactggtcagattggcaaccttgaagatactcggaatcgtactctgcatggtattttaagggttcaaagctgtttcagggggcatcaagcccgtcatcatgcaagagaacgaacaagaggagttttggctcttcaatcattcattcgtggtgagaatgcacgacaaatttactcctctttgttgaagaaacatagagcagcagttgtttt

SEQ ID NO: 33618 - DNA, 259 bp, Zea mays
agcgagagcaagaagaagccgcacatatggcctgagcaagactgcaaatgaggtgactatcctcatagaggcctacaggaccctgagggacaggggccctgtcccagccagccaggttgtgagagaccttagtgggaagttcgcattcatcctgtatgacaccctgtcgaagtccacctttgttgctgctgacgctgatggtagcatccctttcttctggggcgttgactacgaaaaccaccttgtgttctctgacgat

SEQ ID NO: 33619 - DNA, 261 bp, Zea mays
caaacaggagcatgccagcggctccacttcctacccctggcgcacttctgatgggggatgccttcaatatgagacaccctttaactggtggaggaatgaccgttgcattatccgacatcgttgtcctacgtaatcttctcaagcctctccgcaatctccacgacgcatcttccctgtgcaagtacctcgaatcgttctacacgctgcggaagccggttgcctccaccataaacacgttggccggtgctctgtacaaggtct

SEQ ID NO: 33620 - DNA, 261 bp, Zea mays
cagtagagtctccttcctctccggcggcgatgtctgggcgcggcaagggcggcaaggggctgggcaagggcggcgccaagcggcaccgcaaggtgtccgcgacaacatccaagggatcacgaagccggcgatccggaggcttgcgaggaggggcggcgtgaagcgcatctccgggctcatctacgaggagacccgcggcgtgctcaagatcttcctcgagaacgtcatccgcgacgccgtcacctacactgagcacgcccg

SEQ ID NO: 33621 - DNA, 263 bp, Zea mays
gtcaaaagtcctgtgcagcatgttgcgtttagcccaaaggactccaatatgttcgccagtgcccaggacaaaacagtaaagatatgggattggcattctggtaactgcaagtctacattgtctgggcattcagatttggtgttatgtctggattacttcagtcagggtgatcagctatacttgatcactggttcacgagacaaaactgccaagatatgggattgcaagacgaggagttgtgttcggacattggaagggcatac

SEQ ID NO: 33622 - DNA, 261 bp, Zea mays
aacagccaaggctggggggaaaaaagcaggcatttgtgataagcttcaggcagccttgttcttgcagtatttctccagccactccatggtaacgctcttgggcctctcgagtggcaggccaagggcacggtcccatatgaggtggtatcctacccccattggccgttgagtaacgcaatagcaacgtgcttcttctcggacgctaggattctgtatcttcggtcacttgggtgtcggctcgatagacagttcatctgcgtg

SEQ ID NO: 33623 - DNA, 263 bp, Zea mays
acgcaattgtaccaattgcttctgagctgctaccacagtatctgtcttctgctgagtggcagaagcaccatgctgcgctcattacacttgcacagattgcggaaggatgtgcaaaggttatgcttaaaaatttggaacaagtcgtttcgatgatattgaatggatttcaacatccccacccacgtgtgagatgggctgctatcaatgccatcggtcagctttctacggatttgggcccagatcttcaagttcattaccaccag

SEQ ID NO: 33624 - DNA, 264 bp, Zea mays
ctcatcggcctccccatcatcatcgccaagtccatcccgcacaagaagccaggcccgccgccgccagatcagtacacagaggcgctgcacaaggcgctcctcttcttcaacgcccagaaatccggccaccttcccaagaacaatggcatcaagtggcgcgggaactctggcctgtcagacggctccgacgccaaggacgtcaagggtggcctcgtcggcggctactacgacgctggcgacaacatcaagttccacttcccgatg

SEQ ID NO: 33625 - DNA, 261 bp, Zea mays
ctcttgctcgcactcgcggagatcgaagagaagcgcaggagggggcagcactagcgccgccccgccgccgcatcagacatggcgctggccgctcgcctcgtctcgcgctcccgtcagctatattcggttcaagccactttggggaatggaggtgtcactcaagttcgctcctttgccaaggatgcagctccagctgaccgtcctcctgtcagtggggatgatctcctgaagggcatattctttgaggtaaagaagaagttt

SEQ ID NO: 33626 - DNA, 259 bp, Zea mays
cggacgcgtggcggacgcgtgggcggacgcgtgggggtaccattgtttcggcgaattgctcattgatattaccagttcacacttccaggttgctgaaagagcgctcttcgtatggaacaatgataacattatcagcttgattgcacaaaaccgccaagtgatcatgcctcttgtcgttccagcgctagagcagaacattcagaatcactggaaccaggcggtcctgaatctgaccgtgaatgtcaagaaaatgttatct

SEQ ID NO: 33627 - DNA, 258 bp, Zea mays
ggaaatttcgcgctggcctcgctttgcagcctattgcaactgcaatatttgccaattctccgttcaaagaaggaaaaccaaatggatttctcagcttaaggagccatatctggacagatactgataataatcgtgcagggatgctcccttttgtctttgacgactcatttgggtttgagcaatatgtggactatgcattagaagtccccatgtattttgtgtaccgaaatcaaaagtatattgactgcaccggaatgt

SEQ ID NO: 33628 - DNA, 258 bp, Zea mays
gtctccctccgtccctcgaagcttctctggtttcagacgcaaccccgcgggtcgcgggatcaaggagccagagagcgggacgcagcgagcgttccgccggagatcgagaccgtagctagggtttgaggcgccgggctgcggtggacgagatgtcgacgccggcgaggaagcggctgatgcgggacttcaggcgcctgcagcaggacccgcccgccgggatcagcggcgcgccgcacgacaacaacatcatgctctgga

SEQ ID NO: 33629 - DNA, 257 bp, Zea mays
cactgccacccagaagactgttgatggaccctcagccaaggactggagaggtggcagggctgccagctttaacatcattcccagcagcaccggtgctgccaaggctgtcggtaaggttcttcctgaattgaatggcaagctcactggcatgtccttccgggttcccaccgtggatgtgtcagttgttgacctcactgtcagaatcgagaagggggcctcttacgaggaaatcaagaaagctattaaggctgcttctg

SEQ ID NO: 33630 - DNA, 255 bp, Zea mays
cgcgcgagaagcatctacccaagcccaagccaccgaccaagtgggagctgtttgcaaaggcgaaaggaattaccaagcgcaagaagaacaagcgtgagtgggacgagcaaactcaatcctggaagcggacttatggctatgaccgtgtaaatgatgataaagacgttccgattcttgaagccaaactgactgacgagcctggtgttgatccctttgcacagagaagggatgagaagaagaagagggttgaaaagc

SEQ ID NO: 33631 - DNA, 258 bp, Zea mays
gcaagaaaactagaaaaggctcctcccgaccgcaacgcccctcatctccctcgaccccgacatccccgacccgatggcgcccaaggcggagaagaagccagcggagaagaagccggcggccgaggagaaggcggagaagacgaccgcagggaagaagcccaaggccgagaagcggctgcccgcgtccaagtcctccggcaaggagggcggcgagaagaaggggaagaagaaggccaggaagagcgtggagacctacaa

SEQ ID NO: 33632 - DNA, 255 bp, Zea mays
cgcagctctctccgatggcccgcacgaagcagacggcgaggaagtcaactggcggcaaggcgccgcggaagcagctggccaccaaggcggcgcgcaagtcggctccggccaccggcggcgtgaagaagccgcacaggttccgccccggcaccgtcgctctccgcgagatccgcaagtaccagaagagcacggagctgctcacgcaccagccgcccttccagcggctggtcgtgagatcgcgcaagacttcaagac

SEQ ID NO: 33633 - DNA, 253 bp, Zea mays
aaagagtctgttgaaggggtctccgaacatgaatggagtggttggtttaggtgctttgtcatcctttgcagtcagctcaattgcagccttcattccgaagctggggtggaagacattttttgaggaaccagttatgttgatagcttttgttcttctagggaagaatctggagcagagggcaaaacttaaagctaccagtgatatgactggactgcttagtattcttccatctaaagcacgcctaatggtggat

SEQ ID NO: 33634 - DNA, 257 bp, Zea mays
ggcacaagaagaatcgcatccaggtctccaacactaagaagcccctcttcttctatgtcaacctcgccaagaggtacatgcagctgcacaacgaagtagagctgtcggccctcggcatggccattgcgacggtggtgacagtagcagaaattctgaaaaataacgggcttgctgtcgcgaagagtatcatgacatctactgttgatatcaaggacgagactaggacccggcctatccagaaggccaagattgaaata

SEQ ID NO: 33635 - DNA, 254 bp, Zea mays
cccggttctccctcgctccagatctcccttcgcagccggccagggaccccttcacagcgcgggagatggctgatcaggaggccccagttgcagttgaggcaccaaccccagttcttggagagccaatggacttgatgactgcgctgcagctggtgatgaagaagtcaagtgctcatgatggacttgtgaagggtcttcgcgaggctgccaaggccattgagaagcatgctgctcagctttgcgttcttgctgag

SEQ ID NO: 33636 - DNA, 250 bp, Zea mays
gtcaaagggccggtggagtacgtccctgaactgtttgatgagcagaaggaccaggtcgcggttgagcaaatattgcgggtagtattcttggatgctgagcgcccaagcccacaaatggacaaactcaagcgccactagctgaagcagaagcagcccttgaggcacgcaagaaacctccagaggacaatggtccccgtattgttggtgaaggccttgtgattgacgaatggaaggaacgaagagagaggta

SEQ ID NO: 33637 - DNA, 251 bp, Zea mays
ctccggtgtttttgttccagaatctgtagcaaatggctgacggcgaggacatccagccccttgtttgtgacaatggaactggcatggtcaaggctggttttgctggtgacgatgcgccaagggctgttttcccaagcattgttggacgcccacgtcacactggcgtgatggttggcatggggcagaaggatgcgtatgttggcgatgaggctcagtccaagaggggtatcctgactttgaagtacccgatc

SEQ ID NO: 33638 - DNA, 251 bp, Zea mays
cttcgttccaatctctggttttgaaggtgacaacatgattgagaggtccaccaaccttgactggtacaagggcccaaccctacttgaggctctggacttgatcaatgagccaaagaggccttcagacaagcccctgcgtctcccccttcaggatgtgtacaagattggtggtattggaactgtccctgttggacgtgttgagactggtgtcattaagcctggtatggttgttacttttgggcctactggtc

SEQ ID NO: 33639 - DNA, 250 bp, Zea mays
tccagcatctcccgtctccgtcgtctcgtctctgctcctcacctcgccgccagccatgggcaagatcaagatcggaatcaacggtttcggaaggatcggcaggctcgtggccagggtcgccctgcagagcgaggatgtcgagctcgtcgccgtcaacgaccccttcatcaccacggattacatgacctacatgttcaagtacgacaccgtgcacggccaatggaagcacagcgacatcaccctcaaggac

SEQ ID NO: 33640 - DNA, 245 bp, Zea mays
cctgctgagtcctacaagaccctcacgtcatgcagtggtgtgactgcttacggttttgatcttatccgtggagccaagacccttgatcttatcaggagcagcttcccctctgggaagtacctcttcgctggtgttgtggatggacgcaacatttgggctgatgatcttgctgcatctcttagcactcttcagtctcttgaggccgttgctggcaaggacaaacttgtggtgtcaactcctgctca

SEQ ID NO: 33641 - DNA, 251 bp, Zea mays
gctgcctccgcctctcgagtctcgtccacccgtcatcctcctagctcctctactcgccagtcgccatgggcaagattaagatcggaatcaacggcttcggaaggatcggcaggctcgtggccagggtcgccctccagagcgaggatgtcgagctcgtcgccgtcaacgaccccttcatcaccacggactacatgacctacatgttcaagtacgacaccgtccacggccactggaagcacagcgacatcaca

SEQ ID NO: 33642 - DNA, 256 bp, Zea mays
tgcccaagagaaggtcctcccgtatgctgactacatcttcggcaacgaaactgaggcaaagatctttgccaaagtcagaggatgggagactgagaatattgaggagattgctttgaagatctctcaacttcctttggcttcaggcaagcaaaagaggattgctgtgattactcaaggtgctgatccagtggttgttgctgaggatgggaaggtgaaaacgttccctgtgatcctattgcccaaggagaagcttgtt

SEQ ID NO: 33643 - DNA, 280 bp, Zea mays
tgaagcttaacgtcaagaccctcaagggcaccaacttcgagatcgaggcgagccccgatgcatcggttgctgatgtgaagaggatcattgagaccactcaaggtcagagtacctaccgggcggaccagcaaatgctcatataccaagggaaaattctcaaggatgaaaccactttggaaagcaacggagttgctgagaacagcttccttgttataatgttgtccaaggctaaggcatcatcgagtggagcttctaccgctactactgcaaaagctcctgc

SEQ ID NO: 33644 - DNA, 278 bp, Zea mays
cggacgctgggcaagcacaagcgcactctagcaatggcttctgaggttgtccgccctagcgacgccgagctactaaaggcacaagccgacatatggcggctcagcctctcctacctcacgcccctgtcactgaggtgcgccgtggagcttggcatccccacggcgatctaccgccatggcggggctgcctcagccgctgagctggtcacggcgctgtctctcccctccactaagctgccgttcctccgccgcctgctgcggctcctcgccgcgtcggg

SEQ ID NO: 33645 - DNA, 279 bp, Zea mays
cccacgcgtccgcccacgcgtccgagccctagcgacaccaaccagctcgccagcgaccatggggaacccggagaagctgatgaatcagatcttcgacctcaagttcacctccaagtcgctgcagcggcaggcgcgcaagtgcgagaaggaggagaaggagcagaagctcaaggtcaagaaggcgatcgagaagggcaacatggacggcgcccgcatctacgccgagaacgccatccgcaagcgcaccgagcacatgaactacctccgcctcgcctctcg

SEQ ID NO: 33646 - DNA, 278 bp, Zea mays
ctagtctcctcttcgcacgagcgcaacaccatccacccaccagttcgaagcggaggcgaccggcaacctgcggcggagatgtcaggcaggggcaagggcggcaaggggctcgggaagggcggcgcgaagtcaccggaaggtgctgcgcgacaacatccaggggatcacgaagccggcgatccggaggctggcgaggaggggtggcgtgaagcgcatctccgggctgatctacgaggagacccgcggcgtgctcaagatctttctcgagaatgtcatcc

SEQ ID NO: 33647 - DNA, 277 bp, Zea mays
aattgatctgtttatggtggaaataatgcacatgcgccacaaatttgatgttgacacccgtctggttgagggtctggtcctggaccacggttctcgtcaccctgacatgaagcgcagggcagagaattgttacatcttgacctgcaatgtctcattagaatatgagaaaagtgaaatcaatgcaggatttttttactcaaacgcagaacaaagagagaagatggttgctgcagagagacgccaagttgatgaacgtgtcaaacagattattgaattg

SEQ ID NO: 33648 - DNA, 280 bp, Zea mays
gaaggccaccgcgccgaagaagcgcgccacccgacccacccgccgtacgccgagatggtctcggaggcgatcacgtcgctcaaggagaggacggggtccagcagctatgcgattgccaagttcgtggaggacaagcacaaggacaagctcccgcccaacttccgcaagcttctgaacgttcagctcaagaagctcgtcgccggcggcaagctgaccaaggtgaagaactcgtacaagctgtcgtccgccgccaacaagccgaatcccaagcccgaggcgg

SEQ ID NO: 33649 - DNA, 274 bp, Zea mays
cggacggtgggctaggtggccacaccttgggaaggtgccacaaagagcggtctggtttcgagggggcctggactacaaaccctttggtctttgacaactcttacttcaaggaacttctgagtggtgataaggagggccttcttcagctcccaagtgacaaagccctgctgagcgaccctgttttccgccctcttgtcgagaaatatgctgtggatgagaaggctttctttgatgactacaaagaggcccacctcaagctctccgaactggggtt

SEQ ID NO: 33650 - DNA, 271 bp, Zea mays
ccgagtacggctcccccgaggagttcctctcgcaggtcgactacctgctcggcaagcaggcctacggcggcaagaccgactccgagggcgggttcgagaccgacgccgtggccaccgccaacgtgctggagagctccacccccgtggtggacggcaagcagtactacagcatcaccgtgctgaccaggacggcggacggcgacgagggcggcaagcaccagctcatcaccgccaccgtctccgacggcaagctctacatctgcaaggcgca

SEQ ID NO: 33651 - DNA, 262 bp, Zea mays
catcacggacacgcacgtcgcgcaccacctcttctccaccatgccgcactaccacgccatggaggccaccaaggcgatcaggcccatcctcggggactactaccacttcgacccgacccctgttgccaaggcgacctggcgcgaggccagggagtgcatctacgtcgagcccgaggaccgcaagggcgtcttctggtacaacaagaagttctagccgccgccgctcgcagactagagaggacgctaccataggaatgggagc

SEQ ID NO: 33652 - DNA, 266 bp, Zea mays
cggacgcgtgggcggacgcgtgggcgagcaggaggcggacaaggtaagcagcaatcgcaggaaccctagcgccgccgcacccgcagaatgggtatcgacctcgtcgccggtgggaggaataagaagaccaagcgcactgcgcccaagtctgacgatgtctacctcaagctcctcgtcaagctctaccgtttcttggtcaggaggaccaagagcaatttcaacgctgtcattctcaagaggcttttcatgagtaaaaccaaccgacc

SEQ ID NO: 33653 - DNA, 264 bp, Zea mays
aggaacttcagcgacaccggctgcttcgggttcggcatccaggagcacatcgaccttggtatcaagtatgatccatcaacaggcatctatgggatggacttctacgtcgtgcttgagcgtgctggctaccgcgtcgcgcgccgcaggaggtgcaagtcccgtgttgggattcagcatagggtgaccaaggaggactccatgaagtggttccaggtcaagtatgaaggtgtcatcctcaacaaggctcaggccagcacgatttaa

SEQ ID NO: 33654 - DNA, 263 bp, Zea mays
ggaaatgcaatggaaccgcagatcaggttgagaagattgtcaaaaccctgaatgaaggaaatgttccctcttcagatgttgttgaggttgttgtcagtcctccttatgtgttcctcccggtggtcaagagccagctgcgccaagagttccaagttgctgctcagaactgctgggtgaagaagggaggtgcattcactggtgaaattagtgctgagatgctcgtcaaccttggcgttccctgggtcattcttggacactctgaa

SEQ ID NO: 33655 - DNA, 265 bp, Zea mays
gctctacctgggccagcgcgccaccgcggcgtggaccgacgatggggaggtgctgcagctgctcgacaggttccgggaggagctccgccgggtggagaagcggattacggagaggaacagggacccgcgactcaagaaccggaagggacccgccaaggtgccgtacacgctgctgttcccggacgtcggcggcaaggagaaggggatcaccggcaaagggatacccaacagcgtctccatatgacaattgacaagctcgctcctt

SEQ ID NO: 33656 - DNA, 263 bp, Zea mays
atcagcgataaggatagatgcccacaatgcaaaggtgatggtctctccagaacccttgcactcattgcaaggatgctgcatttgctgaatcattccaggtcccaactgcagcatccttgcaatgagtgcaagggttctggagagaccatcagcgataaggctagatgcccacaatgcaaaggtgataaagttgtaccggagaagaaagttcttgaagtggtagttgagaaaggtatgcagaacgggcagaagatcacattccc

SEQ ID NO: 33657 - DNA, 267 bp, Zea mays
gaaagaagaaacatggaagtctgtacagaacttatgggaccagagtgatcccagtttttgtattatcactggccggtgtcgatgctgaacttctcatggaagaggagagtcttgtttggacaagtaaagatgttgttattgtgcttgagcataacaatgaaaagattcctctaagctatgtgtcagaaacgactaggcagtttgctcttccatctatcgcacagcgccacatcttggctggtctggcatcagcagttggcggtctga

SEQ ID NO: 33658 - DNA, 269 bp, Zea mays
cccacgcgtccgcgcctcgggtcaaaccctaagcagggagttgatttatccgctgcagccatgagtaagttgcagtctgagtctgtcaaggatgccatctcccagattgttggggatgccaaggagaagaataggaagttcactgagactgtggaacttcagattggtctgaagaattatgatccacagaaggacaagcgtttcagtggctctgttaagttgccccatatccctcgtcccaagatgaaggtgtgcatgcttggtgatgc

SEQ ID NO: 33659 - DNA, 274 bp, Zea mays
ctccattggacgcggccagcttccatctctcggtcacctccctctacatcccacggccgctaccaccttccctactacctcacacggccgccggcctctccaaggtctgcacacggaaaaaccttgccacgagtcgccgacactccatcccggaagagctaacgaggtgactccccaccgcgcccatgggtgacagccagtactccttctccctcaccaccttcagtccgtcggggaagctcgtgcagattgagcacgcgctcacggctgtcgg

SEQ ID NO: 33660 - DNA, 269 bp, Zea mays
ggaagaagtcagagccccagattaccaagtgcaagcagggcgagaactggaccagggtcaccttcaagcctgatcttgccaagttcaacatgatccatctcgaagatgatgttgtagccctcatgaggaagagagtggttgatatggcaggcactcttggcaaaacagtgaaggttgagttggatgggcacagggtgcccataaagagcttctgtgattatgtcgacctgtatatgaagagtgctaactgtgacagacctgataatttc

SEQ ID NO: 33661 - DNA, 267 bp, Zea mays
gcgcctcctcctttctcgtactgcaattcgggactagccgccgccagtctcgatggggaagaggagcggcagacgtaggaaggacaagaacaaggtcattctcccaccggagctgccgccggaaatacacgacgatgaggtggatgtcagcgaggaagacatcgagttctatgccaccgacagcagtaacgttacacccttccgccacttcgacaagaagtccatcgacaggtatgtcgggagggttgccgggcgcgacgagggcga

SEQ ID NO: 33662 - DNA, 266 bp, Zea mays
cccgccgtgctaccgcaccctcaccttcggcgacttcaagcgcatctacagcgttgtcaagctgggctcgtcgctcaacctcaccacaaatctcaagaccgttcagaaggagctctgattatccatcaaactttgtagcctccctcgaattggcggcgaggaactagctagctagctggcaagatgtagtctgtgtcatcactgtcatgttactgcccggacgtcatgctgatgatagaaatgacggaataaaaatgaaatgccaa

SEQ ID NO: 33663 - DNA, 268 bp, Zea mays
gcgggggcggcaagcaaccacgggcggactcggagcgtcctcctcctcccgtctataaattcccctccttttcttcctccatatataggggccatcagatccaagaagagggaagagcaccaaggaccttcggcgcccgttcaggatccacatcttcccgagcgagttcttggttgacctcttcccccttcggaccacctccaaggctcttggtgtagcttgccactctcaccaatcaagttttcatgtctgatctcgacattcagat

SEQ ID NO: 33664 - DNA, 266 bp, Zea mays
ctgattgttaaagtactgacggataaaatgcagttgtatgtctcatggttcatgccctgtccgcaaactcctgaagagaagaaatggtcccttgtggggttgccattggtttgtggaactttcgttgcagatgaacaccgaatctcgttaacatgtccaactatgttctgtcaccaaatttccaacaacaacatgaatcaagatcttgaagtgtatccacaggaaggtgaaatatgggccatttatagaaattgggatatcggatg

SEQ ID NO: 33665 - DNA, 269 bp, Zea mays
gcagagggagagattggagggaggcccctgcccaaggcaagagaaaccgcggcgcgcggagagggaggaagggcagacgcagacgcagacgggcgaacaagatgagggagatcatcagcatccacatcggccaggccgggatccaggtcggcaacgcctgctgggagctctactgcctcgagcacggcatcgagcacgatggcaccatgcccagtgattcctcggttggcgtcgcacatgatgccttcaacacgttcttcagcgagact

SEQ ID NO: 33666 - DNA, 276 bp, Zea mays
ctgcgacgcggcgcgctctccctccgtcccgcccgcgctatccccacgttgaggctcggcggccaccgcgacgcccgtggcgctgtcgtcgtccgcgccactgcggcagagggagccgtggagctgcaggccaaggtgacgagcaagtgcttcttcgacgtggaggtcggcggggagcctgcgggccgcatcgtcatcgggctcttcggagaggtcgtacctaagaccgtcgacaacttccgtgcgctctgcactggtgagaaaggctacggctac

SEQ ID NO: 33667 - DNA, 266 bp, Zea mays
ctcccaggctgactgtgctgtccttatcattgactccaccactggtggttttgaggctggtatctccaaggatggccagacccgtgaacatgctctccttgcgttcacccttggagtgaagcagatgatttgctgctgcaacaagatggatgcaaccactcccaaatactccaaggcacgttatgaagagattgtgaaggaagtctcatcctacctcaagaaagttgggtacaaccctgataagattgcctttgttcccatttctg

SEQ ID NO: 33668 - DNA, 265 bp, Zea mays
caacatcgtgctctggaagtggtgcgagggcgacaaccagcgctggaagatcgtcccctggtaaatgtgctgttctgtggctgcactggtcatcaccatgatctggagctttgaaggcatagccacctgtggtcagcagctgctgccgtgttgctagaataaagttggtggcgatcgatcgatcgatctttggtgatgggtgtccctccctgtgtgtttgtgtttagttccagtcgtttgtgaggaagtcagttatgtttgagtg

SEQ ID NO: 33669 - DNA, 262 bp, Zea mays
ggtttagtcgcgccgccgccgccgccgaaacagcacatcgctctctcgatctcagccatggcggaggtggagcagccccaggacgcggtgaagctcttcaaccgctggaccttcgacgatgtccaggtgaacgatatctcgctgaacgactacctggctgtgactgcggcgaacacgcgacattcctgccgcactccgcggggcgctactccaagaagcggttccgcaaggcgcagtgcgccatcgtcgagcgcctcaccaa

SEQ ID NO: 33670 - DNA, 263 bp, Zea mays
ctccctcactcccgttccatttccccatctcccagatccaattcgcgagttctccctcctctgccgccatggcgctctctgtggagaagacctcgtctggacgggagtacaaggtcaaggatctctcgcaggcggacttcggccgcctcgagattgagctggccgaggtcgaaatgcccggcctcatggcgtgccgcgccgagttcggcccgtccaagcccttcgccggcgctaggatctcggggtctctccacatgaccatc

SEQ ID NO: 33671 - DNA, 237 bp, Zea mays
acctagcgtccgcggacgctggtgcgctccaagggaaggaagttcgagaaggctcgtggcaggaggaacagccgtgggatcaaggtttacgaaagttgtgggccatcagcatagtaatcacttcctaccgagtagtagcacattttgttgccttggcttggattttgaaagatatttaaggattttcgtgccttgtctactggttactggttgagcaagaagacaatgttcttttgc

SEQ ID NO: 33672 - DNA, 265 bp, Zea mays
cccacgcgtccgcccacgcgtccggaggaaagcactacttgcgttgaaggctgaggagaggaaagttgaagttgacaaggatctgcgttctctgcagccactttcaaacaagaaagaaaatgatgaagttttcattaagctgggttctgacaaggataagaagaaggaaaatgctgagcgtgatgagcgtgccaagaagtcggtgagcatcaacgagttcctgaaacctgctgaaggagaaaggtactacggcggccgtggccgt

SEQ ID NO: 33673 - DNA, 261 bp, Zea mays
ggacattcagccccttgtttgtgacaatggaactggcatggtcaaggctggttttgctggtgacgatgcgccaagggctgttttcccaagcattgtcggacgcccccgtcacactggtgtgatggttggcatggggcagaaggatgcgtatgttggtgacgaggcccagtccaagaggggtatcctgacttttaagtaccccatcgaacatggtattgttagcaattgggatgacatggagaagatctggcaccacacctt

SEQ ID NO: 33674 - DNA, 262 bp, Zea mays
cggacgcgtggagcaaatggaggcatgagctccgccgcctccccgtctctcgccgatctcccccaaaacctagcctcgacctgaccgccagcgggcccgcacgccggagaaggagtcggagtcgcccccacccacccaccctctgccgcgggcggggagcgggcggcggacgagatgccgtcgcacggggatctggaccggcagatcgcgcactgcgcgactgcaagtacctgcccgaggcggaggtcaaggtgctctgcga

SEQ ID NO: 33675 - DNA, 265 bp, Zea mays
ggggacgaatgcagttacccttaaaagaacatatcagggtgagcagattgaggttgtggttcacatgcccagccttgtcactggagatgagcctgatcatgaccgtgatggtgaggatgaggacacggcgggagatgacaatgacgaagatgaaggccagaagcctgaacagtcaagcattcctctcacagtcactatatccaagggtgacggtcctgttcttgaattcacctgcactgcctatcctgacgaggtcatcatcgac

SEQ ID NO: 33676 - DNA, 263 bp, Zea mays
gagctcggcatgctcgccaaggcggcggtcattgacgccggcatgcaccagctcaccggcccgatcccgtcgtccttctcctgcctcatcagcgtcgagcagctgaacctggccggaaaccgcctctacggccacgtacccgacgcgctctgcaggctcgccgggcctgccggccgactcgccaacctcacgctgtccggcaactacttcacctccgtcgggccggcgtgcgcggcgctgataaaagatggcgtgctgaacgt

SEQ ID NO: 33677 - DNA, 258 bp, Zea mays
gggaagcacgttccccgtgcaatcttcgttgatctagaacccactgtgatcgatgaggtgcgcactggcacgtaccgccagctcttccaccctgagcagctcatcagtggcaaggaggatgcagctaacaatttcgcccgtggccattacacaattggcaaggagattgttgatctgtgccttgaccgtatccgcaagcttgctgacaactgcaccggcctccagggcttcctggtcttcaatgccgttggtggtggc

SEQ ID NO: 33678 - DNA, 261 bp, Zea mays
ctgcatatgaggttgcccttgttgctctaactaccaatccttctttccatgaacttctcttgactactataaaaaattggccaccgacattatactcagcctcaccggtcatatctgccattgagccacagctaaactcctcatcgatggctgattcattgaaagagtcattagctgaattgtatgtgatcaatggtcaatacgaaaaggcactttctctttatgctgaactcctgaagccagaagtattcgagtttattg

SEQ ID NO: 33679 - DNA, 258 bp, Zea mays
atgcagggtgttggtcataatgatgataaagttcttgttcttgctgccacgaatacgccatatgctctggaccaggctgtgcggcgaagatttgacaagcgtatctacattccgctacctgacacgaaagcaaggcagcatatgtttaaggtccatctcggggatacaccacacagcttaactgaaagcgatttcgagagcttggcccgtcgaacagatggattttctggttctgatgttgctgtttgtgttaaggat

SEQ ID NO: 33680 - DNA, 255 bp, Zea mays
cttttgctcggaacgcacacacagcccggtccccgatctccgatcccctcgtcgatccaagatgcagatcttcgtcaagaccctcactggaaagactatcaccctcgaggtggagtcttctgacaccattgacaacgtcaaggccaagatccaggacaaggagggcattcccccggaccagcagcggctcatcttcgctggcaagcagctcgaggacgggcgcacacttgccgactacaacatccagaaggagag

SEQ ID NO: 33681 - DNA, 268 bp, Zea mays
atttgtgagagcacaggtggggcatcaacttgggaggacaaaacctgtgcaggctagaaattttaaccctttctggaatgaagacattatgtttgtggctgctgaaccatttgaggatcaccttgttctgactcttgaggatcgtgtaggtcctaataaagatgaaatgcttggtcgtgtaatcatacctttggcaatgattgatagacgtgccgatgaccgcattgtccatggaagtgggtccatctcgagaagcctgttcttggtg

SEQ ID NO: 33682 - DNA, 272 bp, Zea mays
cgccgtctgccttctgcgcctccatttcggcctctgtccctcgcaagttcaatctcacctccaaccatgggtaaagagaagtcccacatcaacattgtggttattggtcatgtcgactctggcaagtcgaccaccacaggacaccttatctacaagcttggaggcattgacaagcgtgtgatcgagaggttcgagaaggaggctgctgaaatgaacaagcggtccttcaagtacgcgtgggtgctcgacaagctcaaggctgagcgtgagag

SEQ ID NO: 33683 - DNA, 274 bp, Zea mays
cccacgcgtccgcccacgcgtccgcccacgcgtccgcccacgcgtccgaagactacgtacattggcgctcttatgaagaataccggaatcatctatgcaaatgagttcaatgagaaaaggttgcatggacttttgggaaatatccatcgcatgggtgtgacaaataccatagtttgtaactatgatggtaaagagctacccaaagttcttgggatgaattcggttgacagagtattgctggatgctccctgcacaggaactgggaccatttgga

SEQ ID NO: 33684 - DNA, 272 bp, Zea mays
gcgtattataaatgagcccaccgcagcatcactagcatatggttttgagaaaaagaacaatgaaacaattctggtttttgacctcggaggtggcacatttgacgtttcagttcttgaagtcggtgatggtgtttttgaggtgctgtctacatcaggtgacactcaccttggtggtgatgactttgacaagagaattgttgattggctcgctggaaacttcaagaatgatgagggtattgacttgctaaaagataagcaagctctccagcgat

SEQ ID NO: 33685 - DNA, 138 bp, Zea mays
cccaaacccctactcccccaggaagcaatggcttcccccacccagggccaggtcatcacctgcaaagcggcggtggcgtacgagccgaacaagccactcgtgatcgaggacgtgcaggtggcgccgccgcaggcggcg

SEQ ID NO: 33686 - DNA, 272 bp, Zea mays
cggacggtgggaggagccaacttccgcgacctaaagggcgtgagggttggagcaaacaatattgttgagtggactccagaaatcgagcgtgtgaaactttcatctgggaaaccactggttcctgactatgcaatgtcattcatcaagggcaaatcactcaagccgtttgggcgcctgtggtgggacgagacagttcctacagttgtaaccagagcagagcctcacaaccaggttataattcatccgactcaagcaagggtcctcactatccg

SEQ ID NO: 33687 - DNA, 273 bp, Zea mays
attcgtccaaactcgtgagcactttctcctcgtccccgacaagccactcgaagccgagatacggccatggactccaccggcaccggagcagcggggaagggaaagaagggagcggccgggcgcaaggtcggcgggccaaggaagaagtcggtgtcgaggtccgtgaaggctgggctccagttccccgtcggccgcatcgggcgctacttgaagaagggccgctacgcgcagcttgtcggcaccggcgcccccgtctacctcgccgctgtcctc

SEQ ID NO: 33688 - DNA, 265 bp, Zea mays
ccaacatatctcctcgcattttccttgcaaccgattgcctatccccctcccaaccaaagaccgatggcgcccaaggccgagaagaagcccgcggcgaagaagccggcggaggaggagcccgcggccgagaagacgaccgccgggaagaagcccaaggcggagaagcgggtccccgcgggcaagtctgccggcaaggagggctgcgaggtcaagcgtcgcaagatgaatggcaagactaccgtggacacgtacaagatctacatct

SEQ ID NO: 33689 - DNA, 265 bp, Zea mays
gtcaccttcggtccaactggcctgaccactgaggtgaagtctgttgagatgcaccacgaggctctccaggaggcccttcctggtgacaacgttggcttcaatgtgaagaacgttgctgtgaaggatctcaaacgtgggtacgtggcctccaactctaaggatgaccctgccaaggaggctgctagcttcacctcccaagtcatcatcatgaaccaccctgggcagattggcaatggctatgccccagtgctggactgccacacct

SEQ ID NO: 33690 - DNA, 266 bp, Zea mays
gactggtcctgagaggaaggaatctgctgagagcacgatgatggcctacaaggctgctcaggacattgcgctggctgagctggcacctacccatccgataaggcttgggcttgctcttaacttctcagtgttctattatgagattctgaactccccagacaaagcttgcaaccttgcaaagcaggcgtttgatgaagctatctcccagttagacacccttggggaggagtcatacaaagatagcactctgatcatgcagctcctta

SEQ ID NO: 33691 - DNA, 265 bp, Zea mays
aatctccctagcagcagatcctcgtgcaacgcaaagcgctagccttcctactgtcccgatggcccgcacgaagcagacggcgaggaagtccactggcggcaaggcgccaaggaagcagctggccaccaaggcggcgcgcaagtctgccccggcgaccggcggagtgaagaagccccaccgtttccgccccggcaccgtcgcgctccgggagatccgcaagtaccagaagagcacggagctgctgatccgcaagctgccgttccag

SEQ ID NO: 33692 - DNA, 267 bp, Zea mays
cgagacgcgtgggtgctgcaaacattgtgttcacagttccaagattggacaaatcaatttccatatccattccttacattttctaactcctcaaaaccagcagtatcatactgccttcttttctcaggatctgacaagatgctataagaatatgcaacttctttgaagagttccgatgcttctgggttgctagcattcttgtcagggtggtacttgagtgcgagcttccggtaggcggacttgatctcctggtcggaggaatctctg

SEQ ID NO: 33693 - DNA, 121 bp, Zea mays
tactgcaaatgacgaggaagacaaggaagaggacaaggagatgactctggaggaatttgagaaaataagagaggagaagaggaaagcactacttgcattgaaggctgaggagaggaaagtt

SEQ ID NO: 33694 - DNA, 261 bp, Zea mays
cgcccatcagtcccgggttcccgccacacccctcccatccccctctcaatcctgtccccaaatctctctcttctctctagcggcgaggcgaggcggtgaagacgagcgagcggcgaggatgttgtgggtagacaagtaccggccgaaaaccctagacaaggtcaccgtccacgaccaggttgcgcggaacctcagaaagttcgtgtcggagcaggattgcccgcacctgctgttctatgggccgtcggggtccgggaagaa

SEQ ID NO: 33695 - DNA, 242 bp, Zea mays
gtgtacacaagtgaatgcattgattcatcactggttggatcatatattacaaaccaccaagtcccagcggtagctctcctaattaacgagatctccattaacaaaggatcgatcttgccatcctctctctcccactcatcacaaaacgagaccacgcacgacgggttgatccatccccaggctcatagagatcgtagttaattaatccaagaacacgttccggccggtcgatggacggggcg

SEQ ID NO: 33696 - DNA, 260 bp, Zea mays
gggagattctcgccggcgtgaaccccatgctcgtcaagcgtctcacggagttccctccgaggagcagtcttgacccgagcaagtacggcgaccacaccagcaccatcagggaggcggacctcgagaacaagctcgagggcctgacggtgcagcaggcgctgcacggcaaccggctctacatcctggaccaccacgacaacttcatgccgttcctggtcagggtgaacagcctggagggcaacttcatctacgccaccagg

SEQ ID NO: 33697 - DNA, 258 bp, Zea mays
gcgaagagctgatccctgagtggctgagcttcgttaagggtattgttgactctgaggaccttcccctcaatatctctcgtgagactcttcagcagaacaagatcctgaaggtgatcaggaagaaccttgtgaagaagtgtgttgagctcttctttgagattgctgagaacaaggaggactacaacaagttttacgaggctttctccaagaacctcaagcttggcatccatgaggactcgcagaacaggaccaagatcg

SEQ ID NO: 33698 - DNA, 259 bp, Zea mays
cggacgcgtgggcgcagccatggcgaagaactacccgaccgtgagcgccgagtacagcgaggctgtggagaaggcacggcgcaagctccgagccctcatcgccgagaagagctgcgccccgctcatgctccgcctcgcgtggcactccgcggggacgttcgacgtgtcgtcgaggaccggcggtccattcggcacgatgaagcatcagtcggaattggctcacggcgctaacgcggggctggacatcgcggtgcggctg

SEQ ID NO: 33699 - DNA, 124 bp, Zea mays
caagcaaccaccgcctccccgatctcgtcgagaggaagcccaatcccgaaaccgtcgccgtattccaatggcgcccaaggccgagaagaagcccgccgccaagaagcctgcggaggaggagccg

SEQ ID NO: 33700 - DNA, 256 bp, Zea mays
gttggaatgtgtgacgtgttctctgtgacataccatgtccccaagctgaaaaaggaggatgcgaaaaaggtattgcatcatcttgatgtgttcgatgacggggaccttgatgcagcagcagaagcactggatgatatgccaatcaagaagctgtacacgcttgttgagatggctgcacaggggccaaccggaggaagtgcagaagcaatttatgccggagaagacaagatagatatcaaccatttcttcagcatct

SEQ ID NO: 33701 - DNA, 255 bp, Zea mays
atcttactcttattgatcttcctgggcttactaaagtagccgttgagggccaaccggagaatattgttcaggacattgaaaacatggttcgctcatatattgaaaagccaaattgtataattctggctgtttccccagccaatcaggaccttgctacttctgatgcaatcaagatatcacgggaagttgatcccaaaggtgaaaggacctttggtgttctcacaaaaattgatctgatggacaagggtaccgatg

SEQ ID NO: 33702 - DNA, 282 bp, Zea mays
ctcgcctcgccttggtgttcacgccgtcgctagcgcctgcagcctgccgcggcgaacttctgccctccccggcgccgggctcgggtcgtcgtcggccaggaagatggctggcggcttcagggtactgcatctggtcaggccttttctggctttcttgccagaggtgcagagcgcggataggaagataccgttcagagaaaaagttatatacactgttatttccctcttcattttcctggtctgcagccagctcccactctatggcattcattcaacaactgg

SEQ ID NO: 33703 - DNA, 280 bp, Zea mays
cggacgcgtgggccgccgcatctccgccgcgatcctcccgactagccgcgactgcctcccctccagcggccaaccagaggatggagggggcaggcaaggatggcaacccgttgaggaattatcggattggcaagactctcggaattggctcattcgggaaggtgaaaattgcggacatatcagcactggacacaaggtggcaatcaagattctcaaccgccgtaaaatcagaggcatggagatggaagagaaagttaaaagagagattaagatattgagg

SEQ ID NO: 33704 - DNA, 279 bp, Zea mays
cttcccccacaacgtcggcctcggagccaccagggatccaaacctggtgaagaggatcggcgccgcgaccgcgcttgaagtgagagccaccggcatccagtacgcgttcgcgccatgcattgcggtgtgccgtgatccgaggtggggccggtgctacgagagctacagcgaggaccaccgtatcgtgcaggccatgactgagctcatcccgggcctgcagggcgacgtcccgcagaacttcaccagcggcatgcccttcgccgccggaaaggacaaggt

SEQ ID NO: 33705 - DNA, 275 bp, Zea mays
cccattcaggaggggcaacaacatccttgtcatgtgcgattgctacaccccagctggcgagccaattcccaccaacaagaggtacagcgccgccaagatcttcagcagccttgaggtcgctgccgaggagccctggtatggtatcgagcaggagtacaccctccttcagaaggacaccaactggcccctcgggtggcctattggcggcttccctggccctcagggtccttactactgtggaatcggcgcggagaaatcgttcgggcgtgacatag

SEQ ID NO: 33706 - DNA, 275 bp, Zea mays
gacaaggctgccaagaaggagaggcttctgaagagggcccaagctgagaatgaaggaaaaactgttgagtcgaagaaaccaattgttgtgaagtatggccttaaccatgtgacttacctcattgagcagaacaaggctcagcttgttgtcatcgctcatgacgtggatccgattgaactggttgtgtggcttccagccctgtgcaggaagatggaggtcccttactgcattgttaaaggaaaggctcgccttggatcgattgttcacaagaagaa

SEQ ID NO: 33707 - DNA, 275 bp, Zea mays
cgtgccgccgccgcaacctcctcctccccgtcacagattgcagatcatttaacataaatggctgactacagaggacattcagcccctagtctgtgacaatggaactggaatggtcaaggctggctttgctggagatgatgctccccgtgctgttttcccaagtatagttggtcgtccacgccacactggtgtcatggttgggatgggacagaaggatgcttatgttggtgatgaggcccaatccaagaggggtatcctgactttgaagtatccca

SEQ ID NO: 33708 - DNA, 276 bp, Zea mays
ctattgtggtcgtccctcagccgcgtcgcaccgcatcgcattctacgattcgaagctctctctgctcgcagccatggcgaagaattacccaaccgtgagcgccgagtacagcgaggccgtcgagaaggccaggcgcaagctccgcgccctcatcgccgagaagagctgcgcgcccctcatgctccgcctcgcgtggcactccgcggggacgttcgacgtgtcgtcgaggaccggcggtccttcggtactatgaagtgccggcggaactggctcacg

SEQ ID NO: 33709 - DNA, 273 bp, Zea mays
gggacgacattgtggagctgaagccgactctactggttggggtgccccgagtgtacgaaaggatttatgaaggtatcttgaaggccattgcggaactcagacctctaagaagggtcatctttaatgctttgtacaaccgcaaactggcaagcatgaaagcaggctactcgcacaaaaccgcttcacctttcgcggacatgctggcttttcgcaaggtcaaggcaaggcttggaggtcgtcttcgcttactgatttcaggaggggctccgttga

SEQ ID NO: 33710 - DNA, 272 bp, Zea mays
caaggttagtgacaagatggacccagcagaacttgtgcggttgattgatatattgaatcccgaaaacagggctgggagaataaccatcatcacaagaatgggacctgaaaacatgagggtgaaacttccacacctgatacgcgctgtccgtggggccggtcagatagtaacatgggttactgacccaatgcatgggaacactatgaaggccccttgcggactcaaaacccgctcgttcgacaggattttgggtgaggtgcgtgcgttctttg

SEQ ID NO: 33711 - DNA, 273 bp, Zea mays
gatctctgcccacattgcagccagcgttgcagcaaaggcatatgaacttggtttggcaagtaggcgccctcggccaaaggacctggtgaaatatgcagagagctgcatgtacagccccatctaccgcaactaccgttgaattcggatcaactccagttatgtgcaaatcagcagcagccttgcgtcaactgcaagatttcctaagaatataactcgtttcagtctttcatactgtaataccctaagccctctagcaatagctgtttcacgtcc

SEQ ID NO: 33712 - DNA, 272 bp, Zea mays
cccacgcgtccggtggatagaggaagttcgcactgagatgtatttaagaaggactgcctgcttgcaacatctaagtggatagaggaagttcgcactgagaggggcagtgatgttatcattgtgcttgttgggaacaaaactgaccttgttgacaagaggcaagtctcaatagacgaaggggagggcaaggcgaaggaccttggagtcatgtttattgaaaccagtgctaaggctgggtttaacattaaggcgctgttccgtaaaattgctgc

SEQ ID NO: 33713 - DNA, 266 bp, Zea mays
ggaaaacggggatgaagatgaatctacaaagctgaaggtggaagatgtgcagttatcaatggatgatcttgagatgattcaagtcattggcaaaggaagcggtggtgttgtccagctagtgaggcacaaatgggtgggcacattatttgccttaaagggtattcaaatgaacattcaggagtcagttcgtaaacaaatagtacaggagctcaaaataaaccaagcaacacagagccctcatatagttatgtgccatcaatcttttt

SEQ ID NO: 33714 - DNA, 268 bp, Zea mays
tgttggtgttcattgccatctgggatctactattacaaaggttgatatattcagagatgctgcagttcttatggtgaattatgtcgatgaaattcgagcacaaggttttaagttggagtacctgaatatcggaggtggtttgggaatagattaccatcataccaatgcagtcttacctacacctatggatctcatcaacactgtgcgagaattagttctctctcaagatctcactcttattattgaacccggaagatccttgattgct

SEQ ID NO: 33715 - DNA, 269 bp, Zea mays
caaattgagtccctgaacaagaagtatggatgcaatgtccccttacttctgatgaactctttcaacacccatgatgacacacagaagattgttgagaagtattccaactccaacatcgaaattcatactttcaatcagagccagtatcctcgcattgttaccgaggacttcttgccacttcccagcaaagggaaatctgggaaggatggctggtatcctcctggtcatggtgatgtgtttccttctttgaataacagcggaaaacttga

SEQ ID NO: 33716 - DNA, 271 bp, Zea mays
cccgtgctccgcaaccgctgagtgagaagaagagatggccggcaagggcgatggcccggctatcggcatcgatctcggcacgacgtactcttgcgtcggcgtgtggcagcacgaccgcgtcgagatcattgccaacgaccagggtaaccgcaccacgccctcgtacgtcgccttcaccgactccgagcgcctcatcggagatgcggccaagaaccaggtcgccatgaaccccatcaacaccgtctttgatgccaagcgtctcatcggcagg

SEQ ID NO: 33717 - DNA, 269 bp, Zea mays
cggacgcgtgggcttcgatgatgtccaggtgaacgacatctcgctgaacgactacctcgctgtgaacgcgacgacgcacgcgatgtacctgccgcacaccgcggggcgttactccaagaagcggttccgcaaggcgcagtgcccgatcgtcgagcgcctcacaaactccctcatgatgcacgggcgcaacaacggcaagaaggtcatggctgtccgcatcatcaagcataccctggagatcattcacctgctcaccgatgccaacccca

SEQ ID NO: 33718 - DNA, 265 bp, Zea mays
cccacgcgtccgggctcatggaaaaggtttttgcaaatatgcatcaggagcatgttacattggtacatgggacagaggacttaaggatggacatggtatgttttatcaaccaggaagtaaaatgccttgtaaccttgaagtgtctgagtgtgtaacagaccacgatgtttcaagttcttcaagctctggtaatgaaaatatcaatagtagcttattgtttttattccaaaaactttgcaacacatggagactacacagcattttc

SEQ ID NO: 33719 - DNA, 266 bp, Zea mays
gtctgctccgggctgctgttctgcgcctccacaaggctttggcctctgttgtaagatttaagcttatcctccaaccatgggcaaggagaagtcccacatcaacattgtggttattggccatgtcgactctggcaagtcaaccaccaccggccacctgatctacaagcttggaggcattgacaagcgtgtgattgagaggttcgagaaggaagccgctgaaatgaacaaacggtccttcaagtacgcttgggtgcttgacaagctca

SEQ ID NO: 33720 - DNA, 238 bp, Zea mays
cccacgcgtccgcccacgcgtccgcccacgcgtccgcggacgcgtgggcacgggccgcttcaccatcatctccaaggagcagggcgtgccgctggtggccttcacgttcaaggccaaggacgaaaccccgctggccttcaagctgtcggcggagctgcggcggttcggctggatcgtgccggcgtacacgatgccggccaatctggagcacattgccgtgctccgggtcgtggtccgg

SEQ ID NO: 33721 - DNA, 262 bp, Zea mays
  unsure (1)..(262): unsure at all n locations
cgcaactgagcaacttgcttgctacactggcccaacagttggggggctactgaatgctacatttggaaatgcaacggaaatgattatatcaatatacgcactgaaaaatgggatgattcgggtcgtccagcagtcactactaggctcaatattgtcaaatatgctgctggttcttgggtgtgctttctttgctggtggtcttgtccattctgacagggaccaggtcttcaacaaggcatcagctgttgtanactcaggacta

SEQ ID NO: 33722 - DNA, 261 bp, Zea mays
cacacgcgtccgcggacggtggggcgtgcgaaccaagcagaccccagcagaagaagcgaagtcgtcgccggagcaggaggaagagcgagcagcaagctgtcgtggcaggcgtacgtcgatgaccacctgctgtgcgacatcgaaggccagcacctcagcgccgccgccatcgtcggccacgacggcagcgtctgggcacagtccgagaacttccccgagttaaagcctgaggaggttgctgggatgataaaggactttgat

SEQ ID NO: 33723 - DNA, 260 bp, Zea mays
ggagatattatacctgcagatgcacgcctccttgagggggatcctttgaagatcgatcagtctgctctgaccggagagtcactgccggtcactaaaggtcccggtgatggtgtctattctggttcgacggtcaagcaaggtgaaatcgaagctgttgtgattgccacaggtgtccacactttcttcggaaaggctgctcaccttgttgactccacaaaccaagttggccatttccagaaggtcctgacggctatcgggaa

SEQ ID NO: 33724 - DNA, 264 bp, Zea mays
gaagcaccaccacttcttcaaccaccacaagaaggacgaggagcagcccgccggcgagtacgggtactccgagaccgaggtggtcaccgccaccggcgagggcgagtacgagaggtacaagaaggaggagaaggagcacaagcacaagcagcacctcggcgaggccggcgccatcgccgccggcgccttcgcactctacgagaagcacgaggcgaagaaggaccccgagcacgcgcacaggcacaagatcacggaggaggtcgc

SEQ ID NO: 33725 - DNA, 266 bp, Zea mays
agaaaatgctatttttaccattcctccagagctggcttatggagcatctggttcacctccaactatcccacccaatgcaaccctgcagtttgatgttgagctgctttcatggaccagtgtcaaagacatttgcaaagatggcggcatattcaagaagatccttaaagagggagagaaatgggagaacccaaaggatcctgatgaagtacttgtgaaatatgaggcccgtctggaagatggtactgttgtatccaagtctgaggggg

SEQ ID NO: 33726 - DNA, 275 bp, Zea mays
cccacgcgtccgcccacgcgtccggatctcctcgccgcctcacccgtctcctcctccgcagcttccccgcgatcccgaccatggagggcgacggtaccaaccttgatgcggcgatagagtcgctcctgaatgtcgagaagcagatgaggctggccggagatgtcgccggcactcggaaggccgtcatcgacatcgtcgagctctgctacaaggccggcgcgtggaagacgctaaacgaccagatcgttctcctatctaagaggagaggccagctt

SEQ ID NO: 33727 - DNA, 275 bp, Zea mays
ctcctctctctctgggtctggagactgccggaggagtgatgaccgtccttatcccgaggaacaccaccatccccaccaagaaggagcaggtgttctccacctactcggacaaccagcctggtgtgttgatccaggtgtacgagggtgagaggacccggacccgcgacaacaacctgcttgggaagttcgagctctccggcatcccaccggctcctcgtggtgtcccccagatcacggtctgcttcgacatcgacgccaacggcatcctgaacgtg

SEQ ID NO: 33728 - DNA, 274 bp, Zea mays
agctggcttgacccgacaacttcttgattttcaacatgatacaatagatgaggtaggcgcaggacatgacccattcattgatttgaaagcgagattcatggactttaaacagagaaactatgtggaaaaattttcaaattaccaaacccttgctgagcagcaaacaccaaagttcatggtggttgcttgtgctgactccagggtctgccctaccgctgttttggggtttcagcctggggaagcatttacagttcgtaatgtggcaaatttggta

SEQ ID NO: 33729 - DNA, 274 bp, Zea mays
cccacgcgtccggtcacggagagccttttgattgaagttttccagagtgctggccttgtggaaagatgcaagctcatacggaaagagaagtcttcctttgggtttgtggactactatgatcgaagatctgctgctctagcaatcatgacccttcatggccgtcacgtatatggacaagcaatcaaggtgaactgggcatatgcaagtacgcagagggaggatacgtcagggcatttccatatttttgttggtgatttaagttctgaagtgaatg

SEQ ID NO: 33730 - DNA, 273 bp, Zea mays
ggttgaagcaaaggcgggaaaaggctctgcaacgttgtccatggcatatgctggtgctgtttttgcagatgcatgtttgaagggtctgaatggagttccagacattgtagagtgctcttttgtgcaatcaactgtgacagagttgccattctttgcctccaaggttcggctcggcaagaatggagtggaggaagtgcttggtctgggtgagctcaacgagttcgagaagaaggggctggaaaacctcaagggcgagctcaagtcttccatcga

SEQ ID NO: 33731 - DNA, 134 bp, Zea mays
cgctgcttcgtcggcggcctcgcctgggccacggacgaccactccctccacaacgccttcagcacctacggcgaggtcctcgagtccaagatcatcctcgatcggtagacgcagaggtcccgcggcttcggctt

SEQ ID NO: 33732 - DNA, 281 bp, Zea mays
cggacgcgtgggcggacgcgtgggctgttcgtgacggggataaacacgctgctgcagtccctcttcgggacaccggctgccgacggtcatcggcggctcctacgcgttcgtcatcccgataatggccatcatccaggacccgtcgctttctgggatacccgacggtcatgagaggttcctcgagaccatgaaggccatacagggggcactgatagtgtcctccagcattcagatcattctgggctacagccagctgtggggtattttctccagattcttca

SEQ ID NO: 33733 - DNA, 285 bp, Zea mays
atggaatattctcgaaggatcagcaccgtggatggacagagtgttgctccaacagcaaacattgctgatacaagagtattagattatggttcagtttttctgggttcaccatcacagactgatggagatgacatatcttctgctccgagctctgccagccagcctggagttaatgttgctgaacttttactctcacgaggctttgctaaaacatctaaacacagggattatgaggaaaggtcgcactattatgatgctctattagcagctgaatcacgggctgag

SEQ ID NO: 33734 - DNA, 269 bp, Zea mays
cggacggtggggtgtcatttgctgctgtagctgtgtcatttgcccacactattaaagctctcgagccattattcaatgcggctgcttcccagtttatccttggacaaccagttccattgacactctggctgtctcttgttccagtggtgattggtgtctcggtagcatccctcactgaactctcatttaattggactggcttcattaatgccatgatctcaaatatttctttcacctaccgaagcatctattctaagaaggctatgact

SEQ ID NO: 33735 - DNA, 269 bp, Zea mays
cgctatgttgctcgcttgaaggatgacaaccctctttttgggtcttcccgtattgaacaagcccacgttgagcaatggatggattttgccgcaacagaagttgatcctggtgttgcatggtacttgtatccaaggcttgggtacctcccttatgttagcacaactgaggaaacagctatttcttcattgaagaggtcgcttggtgctctgaacacacaccttgcttcaaacacataccttgttgggcatgctgttactctagctgacat

SEQ ID NO: 33736 - DNA, 268 bp, Zea mays
ggaaagcgctacccccaaggtcttccgaaactacatccaatcaatgacatgggtatatcaagaacctgaactagttgacttggtacataaacttgaagaccttgagcagaaacaatgctctcaccgacttcataagtccggtcaaagtgaacaggaactatcatggtaccaaaaaaaagcagatctgaatactgaaattcagcaactcaagtcaaagatgcgggattcacagctacaaaaatttagagatgaacttaggagccggtcc

SEQ ID NO: 33737 - DNA, 267 bp, Zea mays
cgaactgtgcctcgtaccatttcgatccaatggcgccgacgtcgaagctgtcgacgggcatcaagcgcgcttcgcggtcgcacgcgtaccatcgccgtgggctgtgggccatcaaggccaagaacggcggcgccttccccaaggccgacaatgccgccgccgccgtggaacccaagttctaccctgccgacgacgtcaagccccgcgttcccagcacccgcaagcctaagcctaccaagctcaggtcgagcatcacgcctgggacgg

SEQ ID NO: 33738 - DNA, 273 bp, Zea mays
ctggtctcgttcaaggatgtccccaactcggagaagcagaacctgttcgtcagcaagctgagcctgtgctgcgtcgtcttcgatttctcggacccgaacaagagctcagtggagaaggatatcaagaggcaggcattgctggatcttatagagtttgtcgagtcgaccaacgctcgcttctcggaggcagccatcgcggcctgctctaggatgtgtgccatcaacctgttccgggcgttccctccgagttgcagatctggctcatcaggtggt

SEQ ID NO: 33739 - DNA, 273 bp, Zea mays
gagagttctatcaaggagaagtgccctttcaagattgatattggacctgtctacagcgtagatccttcaaagcgtcacgcttacgcccaatctggcaataatgtctttgtaccagtcgagagggaactaatttttgacattgatatatctgattatgatgatgttcgctactgctgctctggagctgatgtctgcagagactgctggcccttgatgacaattgctatcaaaattttggatacttctcttagagatgattttggtttcagtcac

SEQ ID NO: 33740 - DNA, 263 bp, Zea mays
cggacgcgtggcggacgcgtgggcggacgcgtgggagaggccccacaacaagctcctcaacccccggtggcaccaattacaacatctcagcctgaaacgacttcctgcacaggcacctaacacacatgacaatgcggcatcaaatcttctgtctggaaggaatgttgacacaataattaaccagctaatggagatgggtgggggcagttgggacaaagataaagtccaaagggctctccgtgccgcttacaacaaccccgaac

SEQ ID NO: 33741 - DNA, 263 bp, Zea mays
tgatgacacacagaagattgttgagaagtattccaactccaacatcgaaattcatactttcaatcagagccagtatcctcgcattgttaccgaggacttcttgccacttcccagcaaagggaaatctgggaaggatggctggtatcctcctggtcatggtgatgtgtttccttctttgaataacagcggaaaacttgacatcttattggctcagggcaaggagtatgtctttgttgcaaactcagacaacttgggtgctatag

SEQ ID NO: 33742 - DNA, 262 bp, Zea mays
cccacgcgtccggttccatttccccatctcccagatccaattcgcgagttctccctcctctgcggccatggcgctctctgtggagaagacctcgtctggacgggagtacaaggtcaaggatctctcgcaggcggacttcggccgcctcgagattgagctggccgaggtcgaaatgcccggcctcatggcgtgccgcgccgagttcggcccgtccaagcccttcgccggcgctaggatctcggggtctctccacatgaccatc

SEQ ID NO: 33743 - DNA, 261 bp, Zea mays
ctcgccttcgccgccgaatccgagactccgatctcgggttcaccgcagcgcacagagcagccccgactcccggcccgatccgcgctctcctctccgtcgcttcagtcatggcaggaatggcacctgaaggttctcagttcgatgctaagcactatgattctaagatgcaggagctgctgagcaccggtgagactgaggagttcttcacttcatatgatgaagtttttgagagttttgatgatatgggcctccaagagaatc

SEQ ID NO: 33744 - DNA, 260 bp, Zea mays
cagagctttcccgtgaggaaaatgtgtacatggcgaactcgctgagcaggcggagaggtacgaggagatggttgagttcatggagaaggtagccaagactgttgactcggaggagctcactgtggaggagcgaaacctcttgtctgttgcatacaagaacgtcattggagcccgccgcgcctcatggcgcatcatctcctccatcgagcagaaggaggagggccgaggcaatgaggaccgagtaacactcatcaaggatt

SEQ ID NO: 33745 - DNA, 262 bp, Zea mays
cccacgcgtccgcgaattacttcgcgtcctttatccagttttcatccatagcttcatggatctagtggcagaaggacatatgcaggaagctcggtcatttttccatacatttcgggaagatcatgaggtgatgcattcaagggatcttcagaagctggaaggcgtcctgtctccttcacacttggaggaaatggaattggcccggtcttttaggaaaaataaatttaaaattaaattatgtgagtattcgtatgaattgctt

SEQ ID NO: 33746 - DNA, 262 bp, Zea mays
ctctccggctgcctcccccacgagctcggcatgctcaccaaggcggccgtgattgacgccggcatgaaccagctcaccggcccaatcccgtcatctttctcgtgcctaatcagcgtcgagcagctcaacctggccggaaaccgcctctacggtcaggtacccgacgcgctctgcaagcttgctgggcccgctggccgcctcgccaacctcacgctgtccggcaactacttcacatccgccgggccggcatgcgcggcgctga

SEQ ID NO: 33747 - DNA, 264 bp, Zea mays
cttgagaaggttgttgaatccaaaaagatggagtatcagcaaaacaaacctaccgatattgtctgcaagtactttcttgatgctgtggagaagaaatagtatggatggttctgggtttgcccaaatggcggcaaagagtgccattacaggcatgcccttccgcctggatacgtactgaaatcacaaatgaaggccttactagaggaagagagtgagaagatagctattgaagatgagattgaagatcagcgtaaaaagacaaag

SEQ ID NO: 33748 - DNA, 270 bp, Zea mays
cccacgcgtccggaagaagcgaagtcgtcgccggagcaggaggaagagcgagcagcaagatgtcgtggcaggcgtacgtcgatgaccacctgctgtgcgacatcgaaggccagcacctcagcgccgccgccatcgtcggccacgacggcagcgtctgggcacagtccgagaacttccccgagttaaagcctgaggaggttgctgggatgataaaggactttgatgaacctggaactcttgcaccaactggtctttttgttggaagtacga

SEQ ID NO: 33749 - DNA, 277 bp, Zea mays
ctccgctcggccaccagctttgaccgcctcccctccccaccactcctgtacctccataccccacccccccgcaggagcggcgcggcggcggcggcggcaaagccaaaggcaagatgttcgggcgcgcgccgaagaagagcgacaacaccaagtactacgagatcctcggggtgcccaagtcggcgtcccaggacgacctcaagaaggcctaccgcaaggcagctatcaagaaccaccccgacaagggcggtgaccccgagaagttcaaggagctcgc

SEQ ID NO: 33750 - DNA, 268 bp, Zea mays
gatcccccctgccgcttccagctccgatcgatctgatccctccccaccaccacgcccatggcggaccaactcaccgacgaccagatcgccgagttcaaggaggccttcagcctcttcgacaaggacggggatggttgcatcacgaccaaggagctgggaactgtcatgcgttcactggggcaaaaccctacagaggctgagctccaggacatgatcaatgaggtcgatgccgatggcaacggcaccatcgattttccagagtttctga

SEQ ID NO: 33751 - DNA, 274 bp, Zea mays
acccacgcgtccgcggacggtgggctctctcaaactgcccctcaacattctcatcaacaacgccggagtgatgacaaggcactgcacacgttccagcgacggtctggagctgcattttgcaacaaatcacatcggtcattttcttctaacaaacctcgtactggagaacatgaagagcacgtgcagggacacaggcaccgagggacggatcgtcaatgtgacatctgcagggcatgtgatgacctatcctgaagggatacgcttcgaaacaatc

SEQ ID NO: 33752 - DNA, 274 bp, Zea mays
cccacgcgtccgcccacgcgtccggaagaagaggaagatgaagttgttaggatgaggaacactcctgatttctttaataagatagttgatagcatatgtcctaccgtatttggtcatcaagaaattaagagggccgtgcttcttatgcttttgggtggtgttcataagataacacatgaagggatcaaccttagaggtgacatcaatgtctgtattgttggtgacccaagctgtgcaaagtctcagttcctagaatatactgctggtattgttc

SEQ ID NO: 33753 - DNA, 275 bp, Zea mays
gcgtcggtcatcatcgcgtcccgcgacaacgacgccgagaaggacgcgcccgacaacgtgtccctcgctggcgacggcttcgacaccgtggtgcgcgccaaggccgaggtcgagaagaagtgccccggcgtggtctcctgcgccgatatcctcgccatcgccgccagggacgtcgtcaccatgtcgtccggcccccactggaccgtccagcttggccggcttgacgggctcgtctccaaggccggcaacgtcgcgggcaagttgccgggacccaa

SEQ ID NO: 33754 - DNA, 272 bp, Zea mays
cgtacgcacgcaccgggacaccagcgatccccaacagcgccactgtccagtgcgcgcgtcaagcttgcttatctagccgccatggcctccctcgccgccgtctccgtgaagcccgtggccatcaagggtctcgccggcagctccatctccggaaggaagctcgccgtcgccaggccgtcgtgcctgtgcattctcagccccgcgcagcgtcgtggtggccaagtacggcgacgagagcgtctactttgacctcgacgacatcggcaacacca

SEQ ID NO: 33755 - DNA, 266 bp, Zea mays
caatagcctccaccgtccaccctcacgcaactgcctcttcgcggcggcgcaaaacaccaacacgtcttctctccggttgcgaggagggtataggatttcgccgcggcgagatgtcggcgtacgacgaggtggagatcgaggacatggagtggaacgcggagctgaaggcgtacacgtacccgttcccctgcggcgacctcttccagatcacgctcgacgacctccgcatcggggaggagattgcgcgctgcccgtcgtgttctctc

SEQ ID NO: 33756 - DNA, 267 bp, Zea mays
tgctgaatggtatgtatgaccagggtgttgtgcgtcacacgtgtagtgcacaggtgaccaccgggagtgccagcagcgtcgccctgcctgctcctggacagaagactcagatgcttgctctgcccgcaccggatggttcaatgcagactgttggtggtgacccctttgcagcgtcccttgccgtcccaccaccatcctatgtgcagatggcagatttggagaagaagcaacagctcttgtcgcaggagcagattatgtggcaacagt

SEQ ID NO: 33757 - DNA, 264 bp, Zea mays
gactccaccactggtggttttgaggctggtatctccaaggatggccagacccgtgaacatgctctccttgcgttcacccttggagtgaagcagatgatttgctgctgcaacaagatggatgcaaccactccgaaatactccaaggcacgttatgatgagattgtgaaggaagtctcatcctacctcaagaaagttgggtacaaccctgataagattgccttcgttcccatttctggttttgagggcgacaacatgattgagagg

SEQ ID NO: 33758 - DNA, 265 bp, Zea mays
cccacgcgtccgggccgtggcgccgacgcccgcctcgtggctcgcatacagggagtcacggtcctggtcggtaacgcagacgccttgttcaccatggtgttcgaaaccgacaggctaaagggctccacgctcgtcatcaacggaatggtcacggatgggtcagacgaatgggcgatctacggcggaaccggggtgttcgccatggccaccggtgtcatgaagagaagaaaccttgccggcggtagcaacgacgggaactctgacg

SEQ ID NO: 33759 - DNA, 266 bp, Zea mays
gcgcccgagacgcaaccccgcgccaggagtaagtttgttcttttatcgatattatcgatatggcgagggaggagaatgtctacatggccaagctggctgagcaggccgaaaggtatgaagagatggttgagtatatggagaaggtggctaagactgtagatgtggaagagctcactgttgaggagcgtaacctcttgtcggtcgcatacaagaatgtgattggcgctcgccgtgcttcatggcgcattgtctcttctattgaacag

SEQ ID NO: 33760 - DNA, 267 bp, Zea mays
gcttctactacctccgcggccacctccaccagacctggtccgtgccccgctacggcttccagtacttcctgccggcggcgaagaagggcatcaaccagcagatcgagctggccatcctgcgggccgacaggatgggcgtcaaggtgctcagcctcgccgcgctcaacaagaacgaggctctgaacggaggcggcaccctgttcgtgaacaagcacccagacctgcgtgtgagggtggtgcacggcaacacgctgacggcggccgtga

SEQ ID NO: 33761 - DNA, 261 bp, Zea mays
cagaagatcaccttccctggtgaagctgatgaagcgcctgatactgtcactggagacattgtattcgtcctccagcagaaggatcactccaaattcaaaagaaagggtgaagatctcttctatgagcacaccttgtctctgaccgaagcactatgtgggttccaatttgttcttacacatctggacaacaggcagcttctcatcaaatcagaccctggtgaagttgttaaacctgaccaattcaaggcgattaacgatgag

SEQ ID NO: 33762 - DNA, 263 bp, Zea mays
cacaggctgcactgggggaatcaaagaaagcgagtgaaaggtggataaccaagccatcaccaactttcacaggctgcactgggggaatcaaagaaagcgagtgagaatgccattttgtctgttaatattgatgataagaaactagtgcttggaaccttatcagttgagaagcatcctcagatctcttgtgatcttgtatttgataaggattttgagctaccacacaattcaaaaacacgtagcgttttcttccgtggctacaa

SEQ ID NO: 33763 - DNA, 264 bp, Zea mays
gctgcagaagatgttcatgaagggcttctcgggggacctggaggccgcgcacgccagggcgacgcagatcgcgggcgaggccgtggccaacctgcgcaccgtggccgcgttcaacgcggaggcaagatcacggggctgttcgaggccaacctgcgcggcccgctccggcgctgcttctggaaggggcagatcgccggcagcggctacggcgtggcgcagttcctgctgtacgcgtcctacgcgctggggctgtggtacgcggcg

SEQ ID NO: 33764 - DNA, 264 bp, Zea mays; identical to SEQ ID NO: 4063

SEQ ID NO: 33765 - DNA, 263 bp, Zea mays
ggggccaacatgccttcgagagcagaactcactgcccgtaagagcgactgcgaaccgcggatgatcggagagcccaccggagagtgctacgacgtcatactgtattttgggatcatagacatacttcaggattacgatatcagcaagaggcttgagcacgcgtacaagtctttccagcacgacccaacctctatgtccgcggtggacccgaggcagtattccaggcggtttaaagaattcgtgtacagagtgtttcaagaaga

SEQ ID NO: 33766 - DNA, 263 bp, Zea mays
gccgtcgtctgctccgggctgctgttctgcgcctccacaaggctttggcctctgttgtaagatttaagcttaacctccaaccatgggcaaggagaagtcccacatcaacattgtggttattggccatgtcgactctggcaagtcaaccaccaccggccacctgatctacaagcttggaggcattgacaagcgtgtgattgagaggttcgagaaggaagccgctgaaatgaacaaacggtccttcaagtacgcttgggtgcttg

SEQ ID NO: 33767 - DNA, 284 bp, Zea mays
gctagggttagcgttcctctgcagcgatggcgatcaagcggaccaaggcggagaagaagatcgcgtacgacaagaagctgtgcagcctgctcgatgagtacaccaaggtgctcatcgccctcgccgacaacgtcggttccaagcagctccaggacatccgccggggcctcaggggcgactcggtggtgctcatggggaagaacacgctcatcaggcgctgcatcaaggtgtacgccgagaagaccggtaaccacacctttgacccgctcatggacctcctggtc

SEQ ID NO: 33768 - DNA, 220 bp, Zea mays
ggacgcgtggcgcggatgaagctgctgcggaaccggagggaggcgcaggtgcgccagatgcgccgcgaacttgccgcgctcctccgcgacaaacaggaggataccgcacgcatcagggttgaacatgtaattagggaacagaactttatggcagccaacgagatcattgagctcttctgcgagctgattgttacacgccttcctatcatcgcaaaacaga

SEQ ID NO: 33769 - DNA, 287 bp, Zea mays
acgactttctccccagatggtcgtgtcttccaggtcgagtatgccaccaaggccgtcgacaacagcgggactgttgttgggatcaagtgcaaagatggcattgtcctgggtgtcgagaagctggtaacctcaaagatgatgctggaaggatcaaaccgaaggatccattcggtgcaccgtcactctggcttggttgttgctggtttagcagcagatggcaggcaaattgtttcaaggaccaaatcagaagctgccagttatgaaaaggtttatggagaacccatttc

SEQ ID NO: 33770 - DNA, 290 bp, Zea mays
cccacgcgtccgggcgattgatgtcaacatgaacaagatgcctgatgtcgccatgactcttgctgtggttgccctctttgccgatggcccgacagccatcagagacgtggcttcctggagagtaaaggagaccgagaggatggttgcgatccggacggagctaaccaagctgggagcatctgttgaggaagggccggactactgcatcatcacgccgccggagaagctgaacgtgacggcgatcgacacgtacgacgaccacaggatggccatggccttctcccttgccg

SEQ ID NO: 33771 - DNA, 280 bp, Zea mays
ggcggccccagcgcggcctccccgagcgctccgtcaacatcctccgctcatggctcttcgagcacttcctccacccgtacccgagcgacgccgataagcacctgttggcgaggcagaccgggctgtccaggaaccaggtctccaactggttcatcaacgcccgtgtccggctatggaagcccatgatcgaagagatgtatcagcaggagtgcagagagctcgacggctcctcggccggcggagggggccccgagtccgtcaacgacccctccggcgccga

SEQ ID NO: 33772 - DNA, 275 bp, Zea mays
atatctcctcgcattttccttgcaaccgattgcctatccccctcccaaccaaagaccgatggcgcccaaggccgagaagaagcccgcggcgaagaagccggcggaggaggagcccgcggccgagaagacgaccgccgggaagaagcccaaggcggagaagcgggtccccgcgggcaagtccgccggcaaggagggcggcgagggcaagcgtggcaagaagaagggcaagaagagcgtggagacgtacaagatctacatcttcaaggtgctgaagc

SEQ ID NO: 33773 - DNA, 275 bp, Zea mays
atcgtgaacccgccgccgacgcagcagcaggagacgcgccaaggagagcccgcaaggaggcgactatgagggccaagtggaagaagaagcgcatgaggaggctgaagaggaagcgccgaaagatgaggcagagatccaagtaggctgatggggattgtggatggtggtgtcggcatagttgtgttacgtttcttcgatgcgtgagttcatggagagatgtcacatcctagttcgtcgtcaccgtttgccatgggtccaatggctcgtcttggaaa

SEQ ID NO: 33774 - DNA, 282 bp, Zea mays
cccaaatacagatttgttgtgcgatttaccaacaaggacatcactgcccaaatcatatctgctagtatagcgggtgatatggttcttgcttctgcctactcgcatgagttgccacgatatggtcttgaagttggtctgaccaactatgcagctgcctactgcactggccttctgttggctcgccgtgtgctcaagatccgtggtttggatcaggagtacgagggcaatgttgaggccactggtgaggacttctctgttgagccagctgatgagaggaggcct

SEQ ID NO: 33775 - DNA, 275 bp, Zea mays
aaagccactcccaaacccccgcttccagaaccttctcgaagctccccgccgcctcctccactcgcaccgatggcgaaggaaccaatgcgcgtgctcgtcactggcgccgcaggacaaattggatatgccctggttcccatgattgctaggggtgttatgcttggtgcagaccagcctgttattctgcacatgcttgacattccgccagcagctgaagcccttaatggtgttaagatggagttggttgatgctgcgtttcctcttctgaagggagt

SEQ ID NO: 33776 - DNA, 271 bp, Zea mays
gctatttgatgagatgcactctgcagctgccaataagcaacgggttgcagttgttgtagctcatgaattagctcatcaatggtttggaaatcttgtcacaatggaatggtggacacatctgtggcttaatgagggctttgcgacttgggtgtcttacttagctgcagatcagttctttcctgaatggaatgtttggactcagtttctagaggaatctacaataggtttcaagttggatgctcttgcaggttcacatccaattgaggtggac

SEQ ID NO: 33777 - DNA, 270 bp, Zea mays
catcaaaggagagaacttctgagctacgagcaactttgttgcctcgatgatgtcaattttgccaatgctgtcatctttggcaacaaaagctttaggcccctgcagtacgaagcttgcagggctgcaatggataaccaagactgtttcgtacttatgccaactggtggtgggaagagtttgtgttatcagctccctgcaacattgcacccaggtgtcactgttgtcgtaagtccgctgctgtcgctgatccaggatcagattgtggcatta

SEQ ID NO: 33778 - DNA, 271 bp, Zea mays
gtcaatgtgcagggacagtaggataattcctggtgctgctgcaacagaaatagagctggcaaagagattgaaggagttctctttgaaggaaacagggttggaccagtatgctgttgcgaaatttgctgaaagcattgaaatggttccaagaaccctggcagaaaatgccggacttagcgcaatggatgtaatatcctctctttatgctgagcatgctagtggcaatgtgaaagttggcattgacctggaggaaggtgcctgcatagacatc

SEQ ID NO: 33779 - DNA, 271 bp, Zea mays
agctagataggttgagggcagaaagagaggaagagaagaacattctggtcaggggcagagctgctgttgagtctgaaatggaagttctgttgaagttgaggagtgaggtagaggaacagctgcagaacgtactgagcaagaaggtggaggtgtcgttcgagaagagtaggattgagaaactccaaaaggaaattgagagtgataactcggctgttgtgcacttcagtatgagcttgaagtggagaggaaggcgttatctatggcaagggct

SEQ ID NO: 33780 - DNA, 283 bp, Zea mays
gcctctcgagtctcgtccacccgtcatcctcctagctcctctactcgccagtcgccatgggcaagattaagatcggaatcaacggcttcggaaggatcggcaggctcgtggccagggtcgccctccagagcgaggatgtcgagctcgtcgccgtcaacgaccccttcatcaccacggactacatgacctacatgttcaagtacgacaccgtccacggccactggaagcacagcgacatcacactcaaggactccaagacccttctcttcggtgacaagccggt

SEQ ID NO: 33781 - DNA, 283 bp, Zea mays
ctcgcccttctcgatgtcggccgccaccaccggcccagccccttcagtagccactccgatggcgccccctccgtcctacccggcctcctccacggcctcttcctccatctccgcgtccgccgaggaggaggaggacctctatggccgcctcaaatcgctccaacgccacatggagttcgtcgaaatccaggaggagtacgttaaagacgagcagaagaacctgaagcgcgaactccttcgtgcgcaggaggaggttaagcggatccagtctgtaccgctcgtc

SEQ ID NO: 33782 - DNA, 280 bp, Zea mays
gataatgacaaaactcttgcaatgactgaaatgaatggtgtatactgttctacaaggccaattcgtgtaggactagcgactcctagaagatctcaaggtgattctggctcttctccgccaaggcaatctgatgttgactctactaacaggacggtatatgttggtgggcttgaccccaatgttagtgaagatgaactgaggaaagcatttgcaaaatatggtgatcttgcctctgtcaaaattccttttgggaagcaatgtgggtttgttcaatttgtaa

SEQ ID NO: 33783 - DNA, 280 bp, Zea mays
cccacgcgtccggtgagaacatcatcagtagacagagatgagccaagtaggccttctggtccctgtgcacaaagctgcattgatcccctgtgtatccagccatcgcggagcaattcgtcttgcttcacgcccagtctggtttcatctacaccgtcaaggacacggaggactagagctgaacccctgaagaaaccatcacttccacagctcgttgttgagcctacggaagcaaggtcaaattcgtttgttgggacccatgaatatcttgccccagagatca

SEQ ID NO: 33784 - DNA, 280 bp, Zea mays
cccacgcgtccgcggagggctacccggccttcgcgctcgtcaacaaggtcaccggcgaggcgctcaagcactccacggggcagggccaccccgtcaagctcgtgccctacaacccggactaccaggacgagtccgtgctctggaccgagagccgcgacgtcggcaacggcttccgctgcgtccgcatggtcaacaacatctacctcaacttcgacgccttccacggcgacaaggcccacggcggcgtccatgacggtaccgagatcgtgctctggaagtg

SEQ ID NO: 33785 - DNA, 278 bp, Zea mays
tgatgctaaaagtaatcgcgaggaccattgggctgcatcacttggttttgttgaacttctacccgtatcttcaaagatacgttcaacctcatcaacgagatgtgacgactctactcgctgcagcagttcaggcttgccatgatatggtacctccagatgctgttgaaccactgttcaagcagatagtaaatcagtttgtgcatgaccgttctcgtccagaggctattgctgttggcttaaatgttgtgagagagatctgcatgagaatacctttgatg

SEQ ID NO: 33786 - DNA, 277 bp, Zea mays
aacaaatagtcggtttactatcttctataatccaagagcaagcccttgtgaatttgtcatacccatggctaagtatgtgaaagctgtgtaccatacccgtatatctgtgggcatgcgtttccggatgctttttgagacggaggaatctagtgtaaggcgttatatggggacaattacaggaataagtgatcttgatcctgttcgctggccaaactcgcactggcgctcagtaaaggttggatgggacgagtcaactgctggagagaagcagccaagg

SEQ ID NO: 33787 - DNA, 261 bp, Zea mays
ttccttcagtgctcccctcacttctcgccgccgcccactgccgctcccccaccaatccacagcgagacacgcccgagcgagtgatccccgacccagccgccgccatgaggccgtcgctgctgaagtccacggccgagctcctccgccgcagccgcggctacgcgtccacggccaatccggagcggaaggtggccatcctgggcgcggcgggcggcatcgggcaggcgctctcgctcctcatgaagctcaacccgctcgttt

SEQ ID NO: 33788 - DNA, 268 bp, Zea mays
gctgctggtgctggagcgatggagaacggcgatgtaaatgaggatgagagaaatggaaagaagatcagggtgcaaggaggcggctcaagtgggccggcatgccaggttgagggctgcggacagatctgactgcagcaaaggattatcaccgtcggcacaaggtctgcgagatgcatgctaaggccaccaccgccgtggtcggaaacactgtccagaggttctgccagcaatgcagtagatttcaccttcttcaagaatttgatgaagg

SEQ ID NO: 33789 - DNA, 273 bp, Zea mays
gtccgagaccccaagcaccagcgcggcggcgggggcggcggcgaccatggctgtcggaaagaacaagaggatctccaagggaaagaagggtggcaagaaaaagaccgtcgaccctttctctaagaaggattggtatgacatcaaggcaccgtcggtgttcagtgtgcgcaacatcgggaagactctcgtatccaggacacagggtaccaggattgcttctgagggtctgaagcacagagtctttgaggtttgcctagctgatcttcagggcga

SEQ ID NO: 33790 - DNA, 272 bp, Zea mays
ccttgaactattgaaggcagccatagaaaaggctggctacactggaaaggtggtcattggaatggatgttgctgcttctgaattcttcggtgagaaagacaagacttatgatcttaatttcaaggaggagaacaacgatggctcaaacaaaatttcaggcgacagctgaaagacctgtacaagtcctttgtttctgagtaccctatcgagtcgatcgaagacccatttgatcaggatgactggagcacttatgccaaactcactgatgagat

SEQ ID NO: 33791 - DNA, 268 bp, Zea mays
ccacgcgtcaccacgcgtccgggaccgtgggttcgccgccgttccgctcaacctctgcgcggggccctccgacccggccgacttcgtcgtgtccggatcctggagcgacaaggccttcaaggaggccaagaagttctccgccgcctccgtcgcctggtcgggtaaagacggcaagtacacggccctcccaccgttcgacgccatcgcccagaaccccgaggccaggttcctccacatctgctccaatgagaccatccacggcgtggag

SEQ ID NO: 33792 - DNA, 274 bp, Zea mays
ctagggttttgctgctctccgaccccgagctccgaacgccgcagcatcaggcgcgccccccctcgcgtgtgaccgagatggcgctgccgaatcaggggaccgttgattaccccagcttcaagctcgtcatcgtcggcgatggtggaactggtaaaactacatttgtgaagaggcatctcactggagagtttgagaagaaatatgaaccaaccattggtgtggaagttcatccgttggatttcaccactaactgtggtaagatcaggttctactg

SEQ ID NO: 33793 - DNA, 272 bp, Zea mays
gtggttacccagcttacttggctgcgcgtttggcatccttttatgaacgtgctggtaaggtgaaatgcctgggaagtccagacaggactggcagtgtcacaattgttggagccgtctctcctccaggtggtgatttttcagaccctgttacctctgcaaccctcagtattgttcaggtcttctggggtttagataaaaagctcgctcaaaggaagcatttcccatctgtgaattggctcatttcctattcgaaatactccaaggcccttgag

SEQ ID NO: 33794 - DNA, 269 bp, Zea mays
aagaaattttctgaattccgaggccagcttagtggcattctttttcatgaaaaacttgggacaatgctcgataaaatgacacgtgtcgagaataccgttgctgaattggcccttattcttggaataaatgagagaacggtcccaattatcaaagatgcggctgcattggctatgtcagatcttgccacttctattgtcacagaatttacttcacttgctggaattatggcacgccattatgctttgagagacagcatccctgaagagat

SEQ ID NO: 33795 - DNA, 262 bp, Zea mays
cttttacaggaagggagtcaaagaaataaataaacaaggaaaagaggttatgtatgattttgaggacaaaatcaatgctgctgtctttcctggtctgcaaggtgggcctcataaccataccattactggcttggctgttgcgctcaaacaggcaactactccagaatacagagcttaccaagagcaagttatcagtaattgtgctaaatttgcgcagagcctgatttcaaaaggatatgaactcgtctctggtgggactgac

SEQ ID NO: 33796 - DNA, 268 bp, Zea mays
cggtgaccgaggtgccagcggaggtcccggcggcccaggtggccgaggcgcccaaggcgaagaaggcgcccaaggagaagaaggcgcctaaggagaagaagctttccgcggcgaagaagccggcggcgcaccctccctacgctgagatgattgtagaggcgatcgctgccctcaaggagaggaaggggtcgagctcggtggccatcagcaagtacgtcgaggggaagcatggcggcaagctccccaccaacttccgcaagcagctcac

SEQ ID NO: 33797 - DNA, 266 bp, Zea mays
attagagaagctcagagaacaaaagaacagctcgccgcggctccgaatggcaacttccccgaaccccgcgacgattcaccgagccggcgcccagtgacccttccagaagcttccagaaggtcaccgccatggccgcgcccttcttttccactcctttccagccctacgtctaccagagccagcaaggatctgtgacggcgtttcagatatccggtggagatgtgcaggtcctgcaggtgatgctgaagtctcaggagaagctgact

SEQ ID NO: 33798 - DNA, 260 bp, Zea mays
tggtcacccaataaagcatactgaaatcaagatttttgacattgagactggtgaggtccttccagatggttcaaaggggattgtgaaaattaaaggaccacaagtaatgaagggatactataagaacccatcggctacaaatgaagcttttgatcaagagggttggttcagcactggagatgtaggttggatagtacctcatcatgccatggggccaagtcgccagtgtggagggatgattgttcttgaagggcgtgcaa

SEQ ID NO: 33799 - DNA, 261 bp, Zea mays
cgaaaagtgctgccaacagcagttgagggtggtgaacctttgcctgagggtctcctctggcttcttttgacagggaaggtcccaaccaaagatcaagttgatgctctatcaaaagaattgcttgcgcgctcaactgtcccagctcatgtctataaggtaatagatgctctcccagtaactgcacatcctatgacacaatttaccgcaggaataatggctcttcaggttgagagcgaatttcaaaaagcttacggcaatgga

SEQ ID NO: 33800 - DNA, 259 bp, Zea mays
cccacgcgtccgcccacgcgtccgcctcagacagcggagacaagttcgaggctgttgtgcccttcatgggtgaatctgtaactgatggaactcttgctaacttcttaaagaagcctggagacagagtcgaggccgatgaacccatagcgcagattgaaactgataaggtcactatagatgtcgcaagtcctgaagctggtgttattgaaaagctcattgctagtgaaggcgacacagttactccaggcactaaagttgc

SEQ ID NO: 33801 - DNA, 263 bp, Zea mays
cagccagccaacaccaagttgtcaagcaataagacagttaggagggtccgtgttcgtggaggtaatgtgaaatggagggctcttcgccttgatactggtaactactcatggggaagtgaagctgttacccgcaagacccgtatcctcgacgtggtctacaatgcgtcaaacaatgagcttgtgaggacacaaacccttgtgaagagtgccattgtgcaagttgatgctgccccattcaagcagtggtacctcactcactatgg

SEQ ID NO: 33802 - DNA, 141 bp, Zea mays
aagaagctctctctttcgcgcaatgtcatctgctccaagtgcaagggcaagggctcgaagtctggtgcctcaatgaggtgccctggttgccagggctcaggcatgaaagtcactattcgtcagctgggcccttccatgata

SEQ ID NO: 33803 - DNA, 285 bp, Zea mays
ctggttttctacaaaggccgggcgcccaatggacagaagtcagactggatcatgcacgagtatcgcctggagaccaacaacaatggaattccacatgaggaaggatgggttgtatgcagggtgttcaggaagcgactcgcgactgtccaaagaatggtcggggactcgccttactggttcaatgaccacgcggggttcatggcgccggagctcggctcaccgaggcaggcggcgcaccaccagcagaacgtcatgatgtaccacaggcaacagagcagctacagc

SEQ ID NO: 33804 - DNA, 184 bp, Zea mays
cccacgcgtccgcttgatgagggaaataatgaatatgccactcatgcagaatttaatgaacagtcctgaactgatacgcagtataataatgaacaaccctcaaatgcgcgagctcattgatcgcaatccggatcttgctcatgtcctcaatgatccaagcatcatgcgccagacttttgaagca

SEQ ID NO: 33805 - DNA, 284 bp, Zea mays
gggaaaccatgtcaccacgcactttgtttaacaacaacacaacaatttaaagatgttcggatagaggattttgtggatgactactactcagtggagaagttcgtgaaggtgtactcaagggtagtagagccaattggtgacaaatctttttggccaagagtgtcatttgcaaaggaggtgggtgcaccaattggaatgtggggcgatggtcgtcaaagaaaaaacaagattaaagggtgcgtagaaggaggaagtggtaagaaaccaatgaaaatgaagatgtc

SEQ ID NO: 33806 - DNA, 287 bp, Zea mays
gtgctgcggacggtgggaacgttcccgcccatcgtcttcgccggcgaggcgcgcaccctcgaggagcgcctcgcggaggccgccgtcggccgggccttcctcctccagggcggcgactgcgccgagagcttcaaggagttcaacgccaacaacatcagggacaccttccgcgtcctcatgcaaatgtccgttgtgctcatgttcggaggccagatgcctgtcgtcaaggtgggaagaatggcaggtcagtttgcgaagcaaggtcagatggttttgaggagcgggat

SEQ ID NO: 33807 - DNA, 286 bp, Zea mays
ggaacaatgttgacccatttgatgaacctgagtgtgaagctcgtgacatatttgtcaatgaacttctatgcattggcactggatgtccatattcttgtgttaaaagggcacctcatgtattttcattttcagatgatactggtacagctcgtgcaatatctcaaggtaatggagaagatgatcttgttcagctcgctgttgggcagtgtccaagaaagtgcatatactatgtgacgccttgccaacacactattttggaggatgtcctgctagtgtgttgatggtg

SEQ ID NO: 33808 - DNA, 184 bp, Zea mays
gcggcggcgtaggtagcggcggtgtgcttgtgatctcaatctcaaccccaggcgagctcggctccggtcacccgtcgatccacgcaaccatgtcgaggaggaagaccagggagcccaaggaggagaacgttacccttggacccactgtccgtgaaggagagtttgtctttggtgttgctcacat

SEQ ID NO: 33809 - DNA, 272 bp, Zea mays
acccgccccgcgctgccctcgtcccgatctccgacccaaatacccgatccaccatggcaggaataaggcttacgcccgaggaaccctagatgcccgttggcacgccaccccgcccccagctcccacccttcgtcgccgcggcaggcggtggcggcggaggtctggaaatggcgtcggacgacgagcggtccattgcggcggattcatggtcagtgcggacgagtacgggagcacgctcgacgatgaccgcgctacgcgacgctgctgaggtg

SEQ ID NO: 33810 - DNA, 281 bp, Zea mays
cggacgcgtgggcggacgcgtgggcggacgcgtgggggcaagctgcctggcgcagggttgtctgccttgccactcaacaatggcagttacaccccaggcatgtctgcacagtctggcctacttcgactcgtaccgcaggacaggcttcccgccaacctggtgcaggctcagagagactacttcggcgctcacacgtacgagagggttgacatgcctggttctttccacaccgagtggttcaagattgcgcgcaactccaagatctgaacatggcctcgtgt

SEQ ID NO: 33811 - DNA, 281 bp, Zea mays
gtactgatcccttaccagatcattttattagagggctatcaagtgcttctttgcaaggccgagcacagattgttccagattcacaagtgaattcagaagagaaggacaaagattgttctcttgttttttatttggatggagcgcacagtcctgaaagcatggaagtatgtggcaagtggttttcccatgtcacaaaggatgatacaaggctaccatcttctgtggagcagtcccatacatctaggtctcaaaagatccttctgttcaactgcatgtctgtg

SEQ ID NO: 33812 - DNA, 278 bp, Zea mays
cttgaagagatgcagatgatatccaaggaggattatctcgtgtctcttaggagaaagagcagtgccttctacagggggttaccaaaatatcgtgggcttcttaggcaacttcataattccagatgggatacatctttgggactcggtaatgactacatgagccttagttgtggcaaggatatcatgttggatgggaaatttgcaggaagctttggtctagagaggaaaattgatcttacaaattacatccggtggtggctaccaaagaagacaaggca

SEQ ID NO: 33813 - DNA, 282 bp, Zea mays
cgaaccagactctctctccgacgccacctcccgcctgcgtcgcaacctcgcttacttccgcgtcaactacgccgccgtggtcgccttcgcgctgggggcctcgctcctggcgcaccccttctcgctcctcatcctcctgggcctcctcgccgcctggtgcttcctctacctcttccgcccctccgaccagcctgttgtcctcttcggccgaaccttttccgaccgcgagacgctgctggggctcgtcggcgcgtccttcatcctgcttttcttcacctccgt

SEQ ID NO: 33814 - DNA, 253 bp, Zea mays
accagacacgctgcccatcatctacgagcgcggtttgtttggcatgtaccatgactggtgcgagtctttcagcacttacccaagaacgtatgaccttctgcacgcggaccatctgttctcaaagctcagaaagagatgcaaactggctgcagttttcgccgaggtcgaccgtgtactgaggccacagggcaagctgatcgtgagggacaccgcggacacgataaatgagctggagagcatggccaagtcctgc

SEQ ID NO: 33815 - DNA, 273 bp, Zea mays
cccacgcgtccgcccacgcgtccgcccacgcgtccgattctagggttttgctgctctccgaccccgagctccgaatgccgcagcatcaggcgcggcccccctcgcgtgtgaccgagatggcgctgccgaatcaggggaccgttgattaccccagcttcaagctcgtcatcgtcggcgatggtggaactggtaaaactacatttgtgaagaggcatctcactggagagtttgagacgaaatatgaaccaacgattgtgtggaagtcatccgttg

SEQ ID NO: 33816 - DNA, 220 bp, Zea mays
gtcatctttctcgtgcctaatcagcgtcgagcagctcaacctggccggaaaccgcctctacggtcaggtacccgacgcgctctgcaagcttgctgggcccgctggccgcctcgccaacctcacgctgtccggcaactacttcacatccgccgggccggcatgcgcggcgctgatcaaagacggagtgctggacgtgaagaacaactgcattccggggctc

SEQ ID NO: 33817 - DNA, 271 bp, Zea mays
ctcagaaaccaccatcttggctccaattgctggagctccaaatactgatgggatagatccagattcttgtgaaaatgtggtgataaaaaattgctacatttctgttggtgatgatgggatagccataaagagtggttgggaccaatatggaattgcttatggccgtccatcagctaatattactatccagaatgtcgtaatccgctctatggtcagtgctggagtatcgattggaagtgagatgtctggtggtgtctcggatgttttggta

SEQ ID NO: 33818 - DNA, 272 bp, Zea mays
cggacgcgtgggcggacgcgtgggttgaagaggtcgcttggtgctctgaacacacaccttgcttcaaacacaacccttgttgggacatgctgttactctagctgacattgtaatgacatgcaacctctaccatggaattgcacggatcttgaccaagaccttcacgtctgatttccctcatgtcgagaggtatttctggaccatggttaaccagcctaacttcaagaaggtcattggtgaggtcaagcaggcagagtctgcacctcctattc

SEQ ID NO: 33819 - DNA, 117 bp, Zea mays
gataaacagctcgctcaaaggaagcatttcccatctgtgaattggctcatatcctattcgaagatactccaaggcccttgagtcttttaacgagaaatttgatccagatttcattga

SEQ ID NO: 33820 - DNA, 276 bp, Zea mays
ccccagcagaaggtccgtcgtctcgtcgccgacgactcggcttctgctcatcaccaccagccactagctgtcgtcgccgacatcgacgcacgcggaggagatcgatcggcccggccggccgcaggagaagatgagcttctttggccgcggcagcagaaaccagagaaccttcaggccgaagaagagcgcgccgtccgggaacaaggggatgcagctgaaaaggcacatcgacgccaccctcggcagcggtaacctgcgagaggcggtgcgtctgcc

SEQ ID NO: 33821 - DNA, 246 bp, Zea mays
ctctgtcatccatgaccaagaaactggagagcagtactgcccgctggatcatcttgttatgaaccaagatgcggactttttactgtgagcaacagttccctgtcagaatttgctgttttgggctttgaattgggttactccatggagaacccaaactcattggtcttatgggaagctcagtttggtgatttttcaaatggagctcaagtgatatttgatcagttcctgagtagtggggagtcaaaa

SEQ ID NO: 33822 - DNA, 289 bp, Zea mays
cggacgctggccgcggctccccgccgagctctccgcgtcgtggcctccgccgctaccgaggcgccgcacaagcccacgcagccgccgacatcgccctccggcatcgtgctcgtcgacccatccgaagcccagaaggtgcaccggctcaaggccgtctacgaccagaaggtcgtcccgctcatcaccgaggagttcggctacaccaatgtccaccaggttcccaagctcgagaagattgtggtgaactgcggtctgtgcgcggaggcagtgaactctaaggtgctggatg

SEQ ID NO: 33823 - DNA, 286 bp, Zea mays
ggacgcaacatttgggctgatgatcttgctgcatctcttagcactcttcattctcttgaggctgttgctggcaaggacaaacttgtggtgtcaacctcctgctcactgatgcacaccgctgttgaccttgtaaatgagactaagctggatgatgagattaagtcatggcttgcatttgctgcccaaaaggttgttgaggttaatgcccttgccaaggctttggcaggccaaaaggatgaggtctactttgcagccaatgctgctgctcaggcctcaaggagatcat

SEQ ID NO: 33824 - DNA, 282 bp, Zea mays
gcgcgagaagcatctacccaagcccaagccaccgaccaagtgggagctgtttgcaaaggcgaaaggaattaccaagcgcaagaagaacaagcgtgagtgggacgagcaaactcaatcctggaagcggacttatggctatgaccgtgtaaatgatgataaagacgttccgattcttgaagccaaactgactgacgagcctggtgttgatccctttgcacagagaagggatgagaagaagaagagggttgaaaagcaagaaaaaagcagattagagaattaaag

SEQ ID NO: 33825 - DNA, 286 bp, Zea mays
gacatccgccggggcctcaggggcgactcggtggtgctcatgggcaagaacacgcgcatcaggcgctgcatcaaggtctacgccgagaagaccggcaaccacacctttgacccgctcatggacctgctcgtcggcaacgttggcctcatcttcaccaagggagacctcaaggaggtgcgcgaggaggtcgccaagtacaaggttggggctcctgctcgtgttggtctggttgctcctgttgatgttgtcgtgccccctggcaacactgggctggatgccctccaga

SEQ ID NO: 33826 - DNA, 290 bp, Zea mays
ggagaagcgaacatagcaggcttcgagaacaagactgcaggcggagggggaggaccaagcgaaaggggaactacagcaagatgggcggcgcactgctgcttgcgctcctcctcgtctctgctgctgccgccgctcaggtacttggagttggcaatggagacaatcacatgagaatcatccaggaggacatcatcgagacagtcgacaaccatcccagtgctgggtggacagcctcacgtaatccttacttttcagactataccattgcgcaatttaagcacatacttgga

SEQ ID NO: 33827 - DNA, 264 bp, Zea mays
atctgcagaacctgctcatcttgactgctatcaaggcagatccatccagagtcatggattatgtcaacagacttgataactttgatgggcctgctgttggagaagttgctgttgaagcacaactgtatgaggaggcctttgctatattcaagaagttcaacttaaatgtgcaggctgtcgatgttctcttggacaacatccggagcatagaaagagctgaggaatttgctttccgtgttgaagaagatgctgtttggagtcagg

SEQ ID NO: 33828 - DNA, 280 bp, Zea mays
ggatgagctcatccttgacggaaacgacgtcgagctcgtatctcgctccgccgacctcatcaaccagaaatgccatgtgaagaagaaggatatccgaaagtttttggacggtatctatgtgagcgacaagggcgtcatcgaagaggagcagtgagcgacagtgtagccgaaatgccaggagatgaatatgaatgtcgtttgagttgcaattttgcgagactgatatgaaccttttccaatcgcaaaaaagttggcctcaagtgttcgtgggttcaaacga

SEQ ID NO: 33829 - DNA, 282 bp, Zea mays
ccgcagaataatggctcttcaggttgagagcgaatttcaaaaagcttacggcaatggattgccaaaatcaaagctttgggagcctacttatgaagactgcttaaatttgattgctcggcttccaccagtggcttcttatgtttaccggagaattttcaaggatgggaaatcaatagaagctgataattctctggattatgcggcgaatttatcacatatgcttggttttgacgaccccaggatgctggagctgatgcggctccatgtaacaattcacgctga

SEQ ID NO: 33830 - DNA, 285 bp, Zea mays
agcgagcggcacggcggcggcgatcggagaagatggtgcgcaaggcgaaggttgagttcgacgagcagccgccggataacttcgacccgaagaacccgtatgccgacccggtggcgatgctcgagtaccgggaacacctggtgcgagagaagtggatccagatcgagaccgccaagatcatccgggagcgcctccgctggtgctaccgcatcgagggcatcaaccaccaccagaagtgccgccacctcgtcgaccaatacctagaggctacccgcggcgtgggtt

SEQ ID NO: 33831 - DNA, 286 bp, Zea mays
ggacgctgggctctttattcgttccccgcctcaccccgagccagccgtctcgctagggtttctccgccgccgccgccgccgccatgcctcgccgcagctcaggaaggtctgccccacgcccagctccccgtgctgctccagtgaggaacccgccacagccagcacgccaggctcctcctccagctcctgttcgagatggtggtggctccatgtttggaggaattgggtccaccattgctcaaggtatggcgtttggcacgggtagtgccatggcacacagggctgt

SEQ ID NO: 33832 - DNA, 267 bp, Zea mays
catgggtcaacacaaccacctgatggaatcgagtataatgatttctttacaagaaggtcagaggcacatttgcgatacatccactcgggagcaggaatcaagaaacgagaatatggggatttccctttgccaatagcattggtagagaacagtggaaggtgcaagactaacgagcatggggagaagatacttccggatggaactccgtgggttccaaaactgatgaaagaaattactgttgttatctcaaacgggagcaacccattc

SEQ ID NO: 33833 - DNA, 220 bp, Zea mays
gatctggcaggttgtgaggaagaacaactccttccttgtgaagcagttcggcaacggcaatgccaaggtgcagttcaccaaggagccgaacaacctctacaacatccactccttcaaacactcgggtttggcgaacaagaagactgtgacgatccagccagctgcaaaggactcggctgtggtcctctctactaccaagaccaagaagcagaacgcacct

SEQ ID NO: 33834 - DNA, 273 bp, Zea mays
gctacaaccacgagatgagccccgaccagacctactgcgacaagacctacacccagtacccctgcgtcgagggcgccgagtactacggccgaggcgcgattcctgtctactggaactacaactacggcgctgccggtgacgggatcaaggcggatctgctccaccacccagagtacctggagcagaacgcgacgctggcattcatggcggcgatgtggcggtggatgacgccgatcaagaagaccagccgtcggcgcacgacgctttcgtggg

SEQ ID NO: 33835 - DNA, 272 bp, Zea mays
gccgacgcggcgtgcggcggcgtgggcgtgctgggcatcgcgtgggccttcggcggcatgatcttcgtgctggtctactgcaccgccggcatctcggggggccacatcaacccggccgtcaccttcggcctcttcctggcgcgcaaggtgtcgctggtgcgcgcgctgctgtacatggtggcgcagtgcctcggcgccgtctgcggcgtcggcctcgtcaaggcgttccagagcgcctacttcgaccggtacggcggcggcgcaactcgctc

SEQ ID NO: 33836 - DNA, 278 bp, Zea mays
gttcctggtccaccttgccaccatccccatcaccggcaccggcatcaacccggctaggagccttggcgccgccatcatctacaaccgggatcatgcgtggagcgaccattggatcttctgggtcggccccttcatcggcgccgccctggctgccatctaccaccaggtgatcatcagggccatcccgttcaagagcaggtcttaagctgccgcgggtgtgctgagacatgtggggaatgtattgtctgcccacgcctagtttctctgctgaatcttcc

SEQ ID NO: 33837 - DNA, 269 bp, Zea mays
catacataaaggagcaaagaactgaggagcttggcgactgctaaagatgttgcggaccgaagaagagcatgagggtcttgcagatctccgacggctccgccatcgcgccattgaccggcgggacgacggacatgccgaggtcgcgcaggacggcgaggtggcgcgcggtgaaggggttgtcccacatgaaggtgttcatggccggcgcgacgtaaacgggcttgctgtagtcccaggcgcgcacgacgcaggtaaggaggttgtcgcac

SEQ ID NO: 33838 - DNA, 279 bp, Zea mays
  unsure (1)..(279): unsure at all n locations
gtggaccttaccaagttcaacggctacacggagctggtggcggagctggacgagatgttcgacttcaacggcgagctgaaaggctgtagcaaggagtggatggtcgtgtacaccgactacgaaggcgacatgatgctggtcggggacgacccctggaatgagttctgcagcatggtgcacaagatcttcgtgtacacgagggaggaggtccagcgcatgaacccgggcgccctgaactcgaggccggnagacagcggcctcgccaattcgacggagagg

SEQ ID NO: 33839 - DNA, 276 bp, Zea mays
ctcatcggagacagcggcgtcggcaagtccaatatcctctctcgcttcacgcgcaaccacttctccctcgactccaagtccaccatcggcgtcgagttcgccaccaagcccctgcagatggacggcaaaacaataaaggctcagatctgggacacagctgggcaggaaaggtaccgtgcaattacaagtgcctactaccgtggagccgtgggagccctccttgtgtacgacatcacaaagaggcagagcttcgacaatgttcacaggtggcttcgt

SEQ ID NO: 33840 - DNA, 281 bp, Zea mays
gccaccgacgagacccccgagctgatgccgctgagccacgtgctggccaccaagctcggcgcgcgcctgacggaggtccgcaaggacggcacctgcgcctggctcaggcccgacggcaagacccaggtgacggtggagtacgtgaacgagggcggcgccatggtgcccgtccgcgtgcacaccgtgctcatctccacccagcacgacgagaccgtcaccaacgacgagatcgccgccgatctcaaggagcacgtcatcaagcccgtcatcccggagaggta

SEQ ID NO: 33841 - DNA, 289 bp, Zea mays
cggacgcgtgggtgtagctggtggcttcattctcgctgccattcataatccgatcttgcttatagttgtggtggtgatatttggctttgttgctacactggtgatctggaacatctgctggggaagaagaggtgtgattggttttatcagtcgctatcctgatgcagaccttagaaccacaaaagatggggagtatgtgaaggttactggggttgttacttgtggaaatttgccccttgagtcctcgttccaacgggtgccgcgatgtgtgtacacttcaacttgcttg

SEQ ID NO: 33842 - DNA, 284 bp, Zea mays
acaagaccgaatttcagagtcatgaacctgagtttgactacctaaaaagtttggaaatagaagagaagattaacaagatcaagtggtgccaaacaaccaacaatgcactctttctcttgtctacaaatgacaaaacaatcaagtattggaaggttcaagagaaaaaggtgaaacgggtttcagtgatgaatttggacacctcccaaagttcagacaatggttcaacttcaagtccgggtaccagtagttgcagagctcttcttccaaatggtggatgcacagga

SEQ ID NO: 33843 - DNA, 285 bp, Zea mays
ctcttccagtaccagctgctcttggtttatctgaaagtgacaaacagtgcatacgtgatcgtagctgcataatggcacggcatattttttctgaccaaccggaagaatatatacaggctcaggtcaatactttgctgcattcgcttgatatagacaaccgtatgagaggacctatgcatggacaatacccagaactacaggagtactggaaccagtcccaaagttctatgggtcctgccctgatgcataataccgctgataaatggattactgagtttggcaaac

SEQ ID NO: 33844 - DNA, 275 bp, Zea mays
cggacgctgggccgcggctccccgccgagctctccgcgtcgtggcctccgccgctaccgaggcgccgcccaagcccacgcagccgccgacatcgccctccggcatcgtgctcgtcgacccatccgaagcccagaaggtgcaccggctcaaggccgtctacgaccagaaggtcgtcccgctcatcaccgaggagttcggctacaccaatgtccaccaggttcccaagctcgagaagattgtggtgaactgcggtctgggcgcggaggcagggaact

SEQ ID NO: 33845 - DNA, 286 bp, Zea mays
gaaagaaaaggggcaggaagaaatcgagcctcactcgatccatcgcctcgccgcagcacacacgaggccggcggcgccatggccatgaagctggacatgtccgcgctcgagaccaacttcgccaacctgaccgcctccgccggcgacgacacgtacttctccgccgaggcccccgacgtgccgtccatggtgctccccatctgcgacgacttcgacggcttccaggcggccaccaaggatatggtgaagaataagaaggggacgaccacgcttgccttcatcttcg

SEQ ID NO: 33846 - DNA, 163 bp, Zea mays
ggacatcctctcgggtgcagtggtgctcgcattttggttacccttattggtgttctcagggcgaagagtggcaagatcggagttgctggtgtctgcaacggtggaggcggacatcagctcttgttctggagctcgcataagaaatctagaccttgtagttcgc

SEQ ID NO: 33847 - DNA, 210 bp, Zea mays
gggtcggggcaatcgaggaaatccgtgttcaacaggataaggggtttggatttgtgagatatagcacccatggggaagcagcattagctattcagatggccaatggattggtagtccgtgggaaatcaattaagtgctcatggggaaacaagccaactccacctggcaccacctccaagcccctaccccctccagttgcttcataccagc

SEQ ID NO: 33848 - DNA, 277 bp, Zea mays
cggacggtgggctcggagctgagatggcacaagccatggcgtcgatgacaggcctctcgcagggcgtcctgaccagcaggcgcgccgacagcagaaccaggacggccgtcgtcgtcgtcagggcgtccgcggagggcgacgccgttgcgcaggcgggccgccgcgccgtgatcgggcttgtggccactggcatcgtcggcggcgccttgtcgcaggcggcgcgcgccgagaccgtcaagaccatcaagattggagcaccgcgccgccctccggtgga

SEQ ID NO: 33849 - DNA, 277 bp, Zea mays
cagaaaaccctagccgccgccaccgaagcggcctcccaggtaagcaagagcgtccaccccgccgccgccatgaagcgcaatccccgcgtcacgagctctcgccggaagtgccgcaagcgcacttcacggccccgtcctccgtccgccgcgttctcatgtccgccgggctgtcgacggagctccgccacaagtacaacgtgcgctccatcccgatccgcaaggacgacgaggtgcaggtcgtgcgcggcacctacaagggccgtgaggggaaggtggt

SEQ ID NO: 33850 - DNA, 272 bp, Zea mays
  unsure (1)..(272): unsure at all n locations
cggacggtggngggctacaacattaagaccgggccaggctgcagcatcgagctgatgaaatttgacatgggaggctctgcagctgtatttggtgcagctaaagctttgggacaaatcaagcctcctggagtagaggttcactttatagtcgctgcctgtgaaaatatgatcagtggcacaggcatgaggcctggtgacattgtaactgcttccaatgggaagacaattgaggtaaataacactgacgcagaaggaaggctaacacttgctga

SEQ ID NO: 33851 - DNA, 272 bp, Zea mays
cccacgcgtccgcggacgcgtggggggttttagtgcttctctcccggcggcgcctccacatctcgtctctcagatcgggaggcgacaccaaggcatacatatacatatttgtagtggtaccatcataacaagtaaagatggtgaagttcacggctgaagagctccgtgccatcatggacaaaaagaacaacattcgtaatatgtctgttattgctcatgtggaccatggcaagtctacacttacagattcccttgtggcagctgctgggatt

SEQ ID NO: 33852 - DNA, 275 bp, Zea mays
atcgggttcatgggcggtttctgtgtttctgccgcgcgacttggcttgcctgatgttggcctcatttcctatggagaaatggtagatcaagggcgtctcatcaatgaagctgtttcaatcccagtgattggtgatggagacaatggttacggaaactctatgaatatcaagagaaccataaaaggatatatcaatgctggttttgctggaattatgcttgaggatcaggtggcacctaaagcatgtggacatactgaaggaaggaaagtcatatc

SEQ ID NO: 33853 - DNA, 277 bp, Zea mays
cccacgcgtccgcccacgcgtccgcccacgcgtccggatttatactaaagcaggtccagttttggtggctgtcaatcctttcaagaaagtttcactgtatggtaacgagtacatcgatgcatatagaaataaatcaatggatagtccacatgtttatgcaatagcagatgcagcactttgtgaaatgaaaagagatgaagtcaaccaatctataattataagtggtgagagtggagcaggaaaaacagaaaccgcaaaaattgctatgcagtacctg

SEQ ID NO: 33854 - DNA, 268 bp, Zea mays
atacccgagtacccgacgcgctactagttctattgccgcaccccagatctccaggagggactcgttcgttcagctaactacactgcacgcaatggccaccacggcgaccgaggcggcgccggcgcaggagcagcaggccaacggcaacggcgagcagaagacgcggcactccgaggtcggccacaagagcctgctcaagagcgacgacctctaccagtacatcctggacacgagcgtgtacccgcgggagccggagagcatgaaggag

SEQ ID NO: 33855 - DNA, 277 bp, Zea mays
cgctgatgagatccacctcccagctcctccgccgccggagctactcctccgcatccgggcagcccgagcggaaggtggccatcctcggggcggcggggggcatcgggcagccgctgtcgctgctcatgaagctcaacccactcgtctcctccctctcgctctacgatatcgccggcaccccaggtgtcgcggccgacgtctcccacatcaactcccccgccctggtgaagggtttcatgggtgatgagcagcttggggaagcgctagagggctcgga

SEQ ID NO: 33856 - DNA, 277 bp, Zea mays
gtggcactgttgatttgaagtatgagttggagcacctcatcatactgacagctagccggtgcttgctgggaagggaggtgcgagaaaagctgttcgacgatgtttctgctctcttccacgaccttgacaacgggatgcagccaatcagtgtactcttcccatacctcccaatccctgcacataagcgccgcgacagggcacgtgcacgtctggcagaaatctttgccaccatcatcaagtcccgcatagcctctggacagtctgaagaagacatgct

SEQ ID NO: 33857 - DNA, 277 bp, Zea mays
gaggaaaataaccaagttgacccagatgcacctaggcggccaccccgtccacatgtatttttgcaatcatacaatagcacaccaaggatgactcccccagactcacctccaaggcgttttgcatcggtatcaccgccaaggcgacattcaatctctgttacatcgatgaatatgtttaatgacaggtcctcaggcttttctggtcagcatagctctccatttgacgctccaagtcaaacaggacgaacaagagttgatggaaaggagttctttcgtc

SEQ ID NO: 33858 - DNA, 272 bp, Zea mays
cccacgcgtccgcggacgcgtgggtggcgcctaattttgctggtcgtgtgtgccggatatcgcgatgtcagcagattggcatggtgcagagtcaaaaacaaaatgttgtcgagaagggagaaggccacaaacttcaaaccagactatgatattgatatccatatgaaggtcttagctatgagtgggcaagaatccagtattcttacaggctacaaattgaagtgctgatacggtggtaggaaatgagatgatgatgggtatttttggtgctt

SEQ ID NO: 33859 - DNA, 269 bp, Zea mays
cattttcttcctccacccgatcaccgtcctcacaacatggtttggattcatcggcgcactcgtggtgatggccttcccttggtatctaaatggcgtcgtcagggccttggcagtgtttgcgtacgcgttctgctgcgcgcccttgatctgggcatctctggtcaagacaatgagctccttgcaggtcctgatcgagagggatgcattcaggctcggagaacctaaccagaatgccgagttcacaaagctatactgaggtggacacgaca

SEQ ID NO: 33860 - DNA, 270 bp, Zea mays
agcggaaacctcgggtgtcgtcgaccaacctcgtcgatccggttgcgacgcggtgtgctagaataactaccgaccatggtggaggaggagatcaccgaacgcttgaagaacctcaccgtcaccggagacgcggcggcttcgggcggagaagggcagacgaggggcggcggcatcagcagcaaccgcatccaggtgtccaacaccaagaagcccctcttcttctacgtaaacctcgccaagaggtatatgcagcagcacggcgatgtggag

SEQ ID NO: 33861 - DNA, 269 bp, Zea mays
gagatcaaagaaaccagagggagcgaggcatggcagcaggcttgcaggtgtttggccagccggcgtctactgatgtctccagggttctgacatgcctgtttgagaagaaactggagttcgatcttgtccgcatcgatacattcaagacgcatcacaagcttcccgagttcatcaggcttcgggatcctaatgggcaagtgcacttgaagcacggcgacaaaactctcgttgattcgagggacatctgccggtacgtctgcacccagttt

SEQ ID NO: 33862 - DNA, 269 bp, Zea mays
cattttctctcctctctccgtcgccgcctcgggccaaaccctacgcagggagttgattgatcgattgcagccatgagtaagttgcattccgagcttctcaaggattgcatctcccagatagttcaggatgccaagaagaataggaagttcactgagactgttgagcttcagattagtctgaagaattatgatccacaaaaggacaagcgtttcagtggctctgttaagttgcctcacatccctcgtccaaagatgaaggtgtgcatgct

SEQ ID NO: 33863 - DNA, 244 bp, Zea mays
caagcaacccatctgctctgcgtgaaactgttgttgaagtgccaaatgtctcttgggaagatattggtggcctggaaaatgttaagagggagctacaggagactgttcaatatccagtggagcatccagagaaatttgaaaagtttggcatgtctccttcaaagggtgttttgttttatggccctcctggctgtggcaagactttgttggccaaggcaattgccaatgaatgccaagctaactt

SEQ ID NO: 33864 - DNA, 243 bp, Zea mays
cgagagcaacgaagagtattcaaaccgaaaacaatggatccggtgcggaagagcgtgtgcgtgaccggcgctggcggcttcgtcgcgtcggagctggtgaagctcctcctctcccggggccaatacgcggtccgcggcaccgtgcgcgaccctggtgctagcaagaatgcccatctcaaggtgctggaaggagctgaggaaaggttgcagcttctcaaggctgatctgatggactacgacagc

SEQ ID NO: 33865 - DNA, 242 bp, Zea mays
cccacgcgtccgggaatctttgaggtcaaggccacagctggtgacacccatcttggtggtgaggactttgacaacaggatggtcaaccacttcgtccaggagttcaagaggaagaacaagaaggatatcactggcaaccccagggctctccggaggctgaggaccgcttgtgagagggcgaagaggactctgtcttccactgcccagaccacgattgagattgactcgctgtatgagggcat

SEQ ID NO: 33866 - DNA, 249 bp, Zea mays
gttcctccagctagggttagcgttcctctgcagcgatggcgatcaagcggactaaggcggagaagaagatcgcgtacgacaagaagctgtgcagcctgctcgatgagtacaccaaggtgctcatcgccctggccgacaacgtcgggttccaagcagctccaggacatccgccggggcctcaggggcgactcggtggtgctcatggggaagaacacgctcatcaggcgttgcatcaaggtgtacgccgag

SEQ ID NO: 33867 - DNA, 239 bp, Zea mays
gggaaggacaagcttgtcgtatcaacttcctgctcgctcatgcacaccgctgtggatcttgtgaacgagactaagcttgacagcgagattaagtcttggcttgcttttgctgcccagaaggttgttgaggttgatgctcttgctaaggcattggctggtcaaaaggatgaggcttacttcgcagcaaatgctgctgctcaggcctcgaggaaatcctcaccccgtgtgaccaatgaaga

SEQ ID NO: 33868 - DNA, 237 bp, Zea mays
ggttgatgacatcccgccggagcagcacgcgctcgtgccgtcctacatgagcgacggcggcggcgggggcaagaggatccacccgctccctttcgcagatcccaaccttccagtgcaaccgagatccatggacccgtccaaggatctggccgcctacggatatggcagcgtggcctggaaggagagaatggagggctggaagcagaagcaggagcgcctgcagcatgtcaggagcga

SEQ ID NO: 33869 - DNA, 213 bp, Zea mays
caggttcgtgaggttctccggggttcggtttcgtgggtgggcggatcgagatgtcggcgtcggatgttgagtaccgctgcttcgtcggcggcctcgccttggccacggacgaccactccctccacaacgccttcagcagctacggcgaggtcctcgagtccaagatcatcctcgatcgggagacgcagaggtctcgcggcttcggcttcgtca

SEQ ID NO: 33870 - DNA, 238 bp, Zea mays
gcagcctccaaagccactcccaaacccccgcttccagaaccttctcgaagctccccgccgcctcctccactcgcaccgatggcgaaggaaccaatgcgcgtgctcgtcactggcgccgcagacaaattggatatgccctggttcccatgattgctaggggtgttatgcttggtgcagaccagcctgttattctgcacatgcttgacattccgccagcagctgaagcccttaatggtgt

SEQ ID NO: 33871 - DNA, 238 bp, Zea mays
cggacgctgggcggacgcgtgggcggacgcgtgggcggacgcgtgggagctgaagaaggtgctagaggtatacgaggcacgactgaccaagtggaagtaccttgctagagacttcctcagcctcgccgacctgaaccatgtgtctgtcactctctgcctgttcgctacgccctacgcatctgtgctcgacgcctacccgcatgtgaaggcctggtggtctggtctgatggagaggccg

SEQ ID NO: 33872 - DNA, 237 bp, Zea mays
cacacaagaagagagccgagagctagctacgtagcgcgcgatggcgatgtccgcttccaagatgatggcggtcgccgccgctgccctgctagccctggtcctggccgcgtcgaccgcggaggcgaggaacatcaagacgacgacgacgacgacggagaagaaggacgatgcggtggtgcagccgcagaccttcccgcccttcgaccgcctcggcggcggcgcgtccccggcgtccgg

SEQ ID NO: 33873 - DNA, 233 bp, Zea mays
ctttgagaatacaactggaccgagtttgctacaacaccttactggccatatatgtgaagacagggaaatatgatgaaattgctactgtatgtgaagaaatggagaaattgggcattgagaaggacactgttacttacaattccttgattaatggatacggaaagcaaggacgcttggacatggtcgctttccttgttcaagatatgcgggcgcaaggcgtactcgctagtgtg

SEQ ID NO: 33874 - DNA, 233 bp, Zea mays
gtgcgccttcagaggagggtgaacttcagagtaagagcagctaaggagctgtacttcaacaaggatggctcagctatcaagaagctccagactggagtcaataagcttgcagacctagtcggagttacactcggaccaaagggaaggaatgttgttttggagagcaagtatggttctcctaaaattgttaacgatggtgttacagttgccagagaggttgagctggaggaccc

SEQ ID NO: 33875 - DNA, 231 bp, Zea mays
tggaatagtagtagcaataaagcgagcacagcaagggtctcttcaaggttctaaggaattcttcacagagatagagttgctatcgaggctgcatcaccgtaatctagtctctttgctcggttattgtgatgaagatgatgaacagatgctggtttacgagtatatgcccaatggaaatctgcgtgatcatctttcagctagagctaaggtgcctctagatttccccatgag

SEQ ID NO: 33876 - DNA, 229 bp, Zea mays
accagcgtccgggaccgtggcgaccaagaccatcaaggtccccgagggcttcgactacgagctctacaaccgcaacgacatcaaccgcatccacgggcccaaggcctcctgcatatccttcaaggactccgcctgccgctgcttcggctacatggtctccaagaagaagtacatctacaccatcgacgacgactgcttcgttgccaaggacccatcaggcaaggatatc

SEQ ID NO: 33877 - DNA, 231 bp, Zea mays
ggcctccttcctctcagtggcgctggccctggcggccctcgtccccgtctcgctgctccttgtgaaccggctcctctacggcaaactgcccccggggccgcggcggcgtcccgtggtgggtaacctgttcgacgtgcagcccgtgcggtgccggtgctaccaggagtgggcgcgccggtacgggcccatcatgacggtgtggctgggcacgtcgcccacggtggtggtgtc

SEQ ID NO: 33878 - DNA, 232 bp, Zea mays
cggacgcgtggcggacgcgtgggggagtttgcgccactttagttacaggtcaattgcttggtttggatgatggtagtgttcacgaagtgaccaactgttttccgttccctatcagggaagaggatgatgaagcagatgcagatggtgccaattatcagcttgagatgatgaggtgtttgagggaagttaatgttgacaacaatactattggatggtatcagtcttgcttgct

SEQ ID NO: 33879 - DNA, 234 bp, Zea mays
ggacgctgggcggacgcgtggggcttgggttattgaactatagagctaagcatgtcttctacccatcgaataagaggagataccgctgccatgatgactactactgggcttcagttttacaggttgaatatacagaatatttttctggccaattatcttatgcagtggccgaggccccgaaagaggctcttcctcataattgtcgacctgattttggtgctgcttggtcaacaa

SEQ ID NO: 33880 - DNA, 285 bp, Zea mays
ggacgcgtggcaagattgtttgagtctatttgagaaaaaaccactggggttattgtctctgctggatgaggaatctactttccccaatgccacagatcttacttttgcaaacaagcttaagcaacatcttaactcgaattcttgcttcagaggagaaagagacaagggatttgctgtccgtcactatgcaggagaggtggcttatgatacttcgggttttctggagaagaatagagatttattgcacatggactcgattcagctccttgccaaatgcaaaacttt

SEQ ID NO: 33881 - DNA, 287 bp, Zea mays
ggttgatgacatcccgccggagcagcacgcgctcgtgccgtcctacatgagcggcggcggcggcgggggcaagacgatccacccgctccctttcgcagatcccaaccttccagtgcaaccgagatccatggacccgtccaaggatctggccgcctacggatatggcagcgtggcctggaaggagagaatggagggctggaaacagaagcaggagcgcctgcagcatgtcaggagcgagggtggcggtgattgggatggcgacgatgcagatctgccactaatggatg

SEQ ID NO: 33882 - DNA, 285 bp, Zea mays
aggatcttgctgaagattctcccttgccttggtacttgcccttggatccaagccgattctccctgagtagcttccgtttgacttctgtgggacgcatgattacccgcacaatggtcaaggccctggagtacgttggtcttgctccgcaggcagtgagagggtctctaatttcctggagaaggctgcagaagggctggtagagggcggaaagaaggagatcttcacgccaatgtacttctttcttgttcggaagcctcttctggaatgagctcttggatcaccttt

SEQ ID NO: 33883 - DNA, 288 bp, Zea mays
gtgggctgtggtgaacgaggaaatgagatggctgaggttctcatggacttcccccagttgacgatgacattgcctgatggccgtgaggagtcagtcatgaagagaacaaccttggtggctaacacatcaaatatgcctgttgctgctcgtgaagcctccatttatacaggaattacaattgccgagtattttcgtgatatgggctacaacgttagtatgatggctgactccacctcacgatgggctgaggctttgcgtgagatctcagggcgtttggctgaaatgcct

SEQ ID NO: 33884 - DNA, 291 bp, Zea mays
catccttgttggaatctgttagtagtattctactattgattagataactttctgtcctagaggtgtttcaatgtccctcctttttcaggttgagagtggtgatctaatagcttatggacttatcccagaatttattggacgcttccctatccttgtgagcctggccgctctaaatgaggaccagcttgttcaggttctgattgagccaaagaatgccctgggcaaacaattcaagaaattgtttagcatgaataatgttaagcttcactttacagatggtgcacttagaat

SEQ ID NO: 33885 - DNA, 283 bp, Zea mays
ggctgatgcattgggctctgttcatcttctttaaccatgaaaatggtagaaatgggatcattgatctgttcttccaggacaggtacttgaatgctatacagacaaatgcacaccatcttattaggtatctagctactgcagttgttgtcaacaaaaggagaaggaatatgcttaaagagttgattaaggtcattcaacaggagcaccatagctacaaggatcccgtaactgaatttctggaatgcttatatgttaactatgattttgatggtgctcaacagaa

SEQ ID NO: 33886 - DNA, 284 bp, Zea mays
gatctcgatcccgcgacgcggtgtctccggtcagcgccgccgccttctccctcgccggccgccactgcatcgccgcagtcgccatgaattatatcattggagcattcaagccaccttgtgacatctcgatcacattctctgatgcgaggactaggaagcaggtttcggttaagaaggacaatgggaagacaacgatggtccctgttttccagagcctcgaaactatatctggagaagtatcaatagcaccagttccaggtaaaaggattgaacacacgggtgtc

SEQ ID NO: 33887 - DNA, 283 bp, Zea mays
gtgttttcggtgctaagatgtttgcacttggtgtcgttgttaaggttccagttccgaagcagacagctaagactagtttccaaacaacatcaggcaaagcaaaatacaatgcttcgattgattcactggtgtggaagatcaggaaattccctgggcagactgaggcaactatgagcgcagaagtggagttgatttctactatgggtgaaaagaagtcatggaacagaccacctatccagatggaattccaggttccaatgttcactgcttctggtttacgtgt

SEQ ID NO: 33888 - DNA, 280 bp, Zea mays
aggagcagaagaatgcttattttgatgagtatgactacagggttaagcttctccagaagaaacaatggaaggatgagatccgcagttaaaggagatgaagaagagggggaaaactgatctggatgattatgggtatgctaatatcactggtgaggacgatcaggatcctcctccagagaatgtgtcagttcccttacctgacatggtactgcctccttcatttgattgtgacaatcccacataccggtaccgctttctagagccaacttcgactgtccta

SEQ ID NO: 33889 - DNA, 283 bp, Zea mays
cccacgcgtccgtgcaggagttcatgatcctcccaactggtgcctcctcgttcaaggaggccatgaagatgggagttgaggtgtaccacaacctgaagagcataatcaagaagaagtacggtcaggatgcgacaaacgttggggatgaaggtggttttgcacctaacattcaggaaaacaaagaaggccttgaactattgaaggcagccatagaaaaggctggctacactggaaaggtggtcattggaatggatgttgctgcttctgaattcttcggtgagaa

SEQ ID NO: 33890 - DNA, 280 bp, Zea mays
atggggagtttaaagcatcagccattgctggttttgtgtctgctaacaagcttcctttggtgaccacactaactcaagaaacttccccttctatttttggcaatccaatcaagaagcagattttactatttgctgttgcaagcgagtccaccaaatttctgcccatctttaaggaagcagcaaaaccatttaagggaaagttattatttgtctttgtggaacgagacagtgaggaagttggtgaaccagttgccgactactttggtattactggacaaga

SEQ ID NO: 33891 - DNA, 279 bp, Zea mays
ccgcgacgtccctcgccttcgccgccgaatccgagactccgatctcgggttcaccgcagcgcacagagcagccccgactcccggcccgatccgcgctctcctctccgtcgcttcagtcatggcaggaatggcacctgagggttctcagttcgatgctaagcactatgattctaagatgcaggagctgctgagcaccggtgagactgaggagttcttcacttcatatgatgaagtttttgagagttttgatgatatgggcctccaagagaatcttctgag

SEQ ID NO: 33892 - DNA, 277 bp, Zea mays
ggcagcagcgatggcggccgagacgagaagtgtcgatggaggccggggcctagcggaggccgttgggaatgttgatgccggatgcgaggatgagagggatgcagattctagcggcggtgacgcttcggggaaggttttcgtagggggtgtagcctgggagacaactgaagaaacattcacaaagcattttcagaagtatggagctataactgattctgtgatcatgaaggacaagcatactaggatgcctcgtggatttggatttgttacattttcc

SEQ ID NO: 33893 - DNA, 276 bp, Zea mays
ctttgcattggaccttctcatggacaatgatggaaagtgtcaaggagtcattgccttaaacatggaagatggaactcttcaccgtttccgtgcttctaatacaattctagccacaggaggttatggcagggcatatttctcagcaacctcagcacacacttgtactggagatggcaatgctatggtcgcacgtgctggtttacctcttcaggatcttgagtttgtacaattccatcctacaggcatttatggtgctggatgcctgattactgaagg

SEQ ID NO: 33894 - DNA, 299 bp, Zea mays
cccacgcgtccgctgagagagatgcaatggtctggaaagtaaaatataagaacttcaatgggttctgcagcatatgctcctgagagagatgcaatggtctggaaagtaaaatcattccctggtggcaaggaatacatgtgcagagcagaatttagtcttcctagcataacagcggaagaaggggccccagaaaagaaggcaccaatacgagtgaaatttgagataccatatttcaccgtatcaggtattcaggtccgttatctgaagataattgaaaagagtggttaccaggcactccc

SEQ ID NO: 33895 - DNA, 295 bp, Zea mays
ggccaccgctgctataaaaccctccgcctccaccggcggctcgccaaactcagtttcgaattctagggttttgctgctctccgaccccgagctccgaatgccgcagcatcaggcgcgccccccctcgcgtgtgaccgagatggcgctgccgaatcaggggaccgttgattaccccagcttcaagctcgtcatcgtcggcgatggtggaactggtaaaactacatttgtgaagaggcatctcactggagagtttgagaagaaatatgaaccaaccattggtgtggaagttcatccg

SEQ ID NO: 33896 - DNA, 293 bp, Zea mays
cgctgagcagaacatgagggctgcaacagagatgtgggagaaggtggaagaacagagaatggcagagttaaaagaaccaggcgcatgtgataaggatggggtactgaggaaaaggcatcacggtgcaggtggtcaaccggagttgacaccagaagaagcagctgagcaggcagcagtaatgaggcaacagattcacctcttctggggtaatatgcttttcgagcgttcccaagtggagtttaagctcagtgttggtgactggaagacaaatcttgatgcatctgttgaaaggt

SEQ ID NO: 33897 - DNA, 297 bp, Zea mays
cgcccagtgcgcgctcctacaacccatcgctcaccaccacctgctcctccagcggcggcgtccagggtgaacccgaatccccaacaccatggcggggggcaagatccagaagaagcgccacggcgcggcgggaggcgcccggctgcagggcggtatcgcgttcgagaagtccaaggggcagcacatcctgcggaacccggcgctggtggactccatcgtcgccaaggccggtctcaagcccaccgacaccgtcctggagatcgggccgggcacaggaaacctcaccaagcggctcct

SEQ ID NO: 33898 - DNA, 295 bp, Zea mays
cggacgcgtggccgctccaccttcggcacaaaatgcaaaacatgtttaaatcttgtcatttcaagaatcaagctgctgcgcaacaggagggagttacaactaataaatatgcgcaaagaaatggttcaatatcttcagactggccaggaatcaatcgcgaggattcgagtggagcacattattcgggagcaaaatatattggctgcctatgagatcgttgagcttttctgtgaatttgttctggcaagagtccctattgttgaggtccaaaaggaatgccccttagaactgcgtg

SEQ ID NO: 33899 - DNA, 295 bp, Zea mays
ggcggcgctgtcgggcaccgagaaggcgccgtcgagcaagcacgagcgcgtagtcagggtgcacagcaccaggagttcgacgacgcgctcaaggccgccaagaaccggctggtggtggtggagttcgcggcgagcgacagcgaggacagcagccagatctacccgaccatggtgcagctcagccgcacctgctgcgacgtggacttcctgctggtcctgcgcgacgacgagtcggaggccaccgaggagctgttccgccgggagggcgtcacgaaggtgccccacttcaacttct

SEQ ID NO: 33900 - DNA, 294 bp, Zea mays
gggcgatctacggcggaaccggggtgttcgccatggccaccggtgtcatgaagagaagaaaccttgccggcggtagcaacgacgggaactctgacgagcttgccctggaagttttctgcccggtgtttggcgcatcacagcaaccaattagcaagcagcaggactccatctcctccgtcaccaagatcggactatggggcggacagggagggtcggcacaggacatcacggcagagcagccaccgcggcgtctgcacagcatcaccgtccgcgctggcgttgccgtcgactcca

SEQ ID NO: 33901 - DNA, 294 bp, Zea mays
cccagccgaagcgcgactgagcaaggcggaggcggcgggaccggcgatggagcggctgcagcggatctttggcgcctccggcatggggcagccgccgacggactcgccgctgctcgactcctccgagcaggtctacatctcctccctcgcgcttctcaagatgctcaagcacgggagggccggcgtgcccatggaggtcatgggtctcatgctcggcgagttcgtcgatgactacaccgtacaggtcgtcgacgtcttcgccatgccgcagagcgtgactggggtcagcgtcga

SEQ ID NO: 33902 - DNA, 297 bp, Zea mays
acatcagagaaaatatattaatcatcattcgtatgagtggaaaatatattttctctgatttgtgccgcaaatccatccgctctctcaaattctagtatacagtacaccgacatacataacatgacaacatgacccgtcacccgtcgctgcgaataccggagcgtctccaagatggtgctgcaaaacgacattgacttactcaatccaccggcagagcttgagaagctaaagcacaagaagaagcggctagtccagtcccccaactccttcttcatggatgtcaagtgccagggctgt

SEQ ID NO: 33903 - DNA, 285 bp, Zea mays
gaaaaagagaacgaaggtgaccccgatatgttagagatgatagcttctgagttggagactctatctaaccagctcgcagactctgaagaaaaaatgaagtttctactgcttcccagcgatcctctagattcacgcaacatcttacttgaagtaagagcaggtgctggtggtgatgaagctgggatttgggctggtgaccttgttcgcatgtaccagagatactgtgagcgcaacaattggaagtttaagccagtttcttgctcagaagcagaaatgggtgggtac

SEQ ID NO: 33904 - DNA, 290 bp, Zea mays
ggtagacaccaatccaccgccatggggcgtatgcacagccgcgggaagggtatctcttcatcggcgctgccgtacaagaggactcctccgatctggctcaagacagctaccaccgaggtggaggagatgattaccaaggctgcgaagaagggccagatgccgtcgcagattggtgttctgctccgtgaccagcacggcatcccgcttgtcaagagcgtgactggtagcaagatcctccgcatcctcaaggcccatgggttggcgccggagatcccggaggatctctactt

SEQ ID NO: 33905 - DNA, 290 bp, Zea mays
agacccgagaagcgcactgcggccatggacgccaccggcactggagctggagggaaggcgaagaagggagcggccggtcgcaaggccggcgggccgaggaagaagtcggtgacgaggtccgtgaaggccgggctccagttccccgtcggccgcatcgggcgctacctcaagaagggccgctacgcgcacgcgtgcggcagcggtgcccccgtctacctcgcggccgtcctggagtacctcgccgctgaggtcctggagctcgccggcaacgctgccaaagacaacaagaa

SEQ ID NO: 33906 - DNA, 287 bp, Zea mays
gcggccgagagcttccttttcacctcggagtccgtgaacgaggggcaccccgacaagctgtgcgaccaggtgtcggacgccgtgcttgacgcatgcctcgcgcaggaccccgacagcaaggtggcctgcgagacctgcaccaagaccaacatggtgatggtgttcggcgagatcacgaccaaggcgaccgtggactacgagaagatcgtgcgcgacacctgccgcgagatcgggttcacctccgacgacgtgggcctcgacgccgaccgctgcaaggtgcttgtgaa

SEQ ID NO: 33907 - DNA, 285 bp, Zea mays
ctatgagatatgccgcctggaagaggcgaggtaagctgcagcatgtaaaaaagagaaaaaagatgtgacatcctagaggaggaggcctttgccatgatgggtgcgctcgcatggcaggccaggcaataataaaaagatgattattgcgtgccgggggaggagatcgcacgggggttgatgtttttggccccgggttctcctccctcatcttgttccgtgttcctgtatgcgttgcttccgctcctgttggtccgctacgcacgccggatttttgcatcgagcacg

SEQ ID NO: 33908 - DNA, 286 bp, Zea mays
cgccaccgtcgccgccgccgccgctgcagcgagccaccgccccgccgtcgctttaggtagacaccaatccaccgccatggggcgtatgcacagccgcgggaagggtatctcttcatcggcgctgccgtacaagaggactcctccgatctggctcaagacagctaccaccgaggtggaggagatgattaccaaggctgcgaagaagggccagatgccgtcgcagattggtgttctgctccgtgaccagcacggcatcccgcttgtcaagagcgtgactggtagcaag

SEQ ID NO: 33909 - DNA, 280 bp, Zea mays
gagatgtcaagttcttcacagagacagaggaaaacaaccagatgcgaggcccaaggactgcagtcccatatttcctctgacttcaattgtacattttagaagtcaacatttaaatctgtaagggctaaagatcagtcagatgtgtttattattgtaggttcagatcatagtgcaatcttatgcatttgatttctctttttcttttaaccactgaacgaatacaggctaatgaccctccggatggtctattgtacatgtggttaaaagagagagagaaatc

SEQ ID NO: 33910 - DNA, 281 bp, Zea mays
atggatttgtgttcctccaagaccacatggttcttaactactggaacctgatgcaagctgacaaggaaaaactttggattacaaataagattgcacattcttgggttactgttccattggagacgaataaagaggaatggtttgtaaagcaaggtgatatggtcaagcaggtcattggcagttccccagttcatttccaaacaaactacaaggagagcatgggcgaagataaaattatattctgtggtagtgaactattctacgtgccccggcggtttgtt

SEQ ID NO: 33911 - DNA, 279 bp, Zea mays
cagagctggaagatcctgccctggggcgacgaggcctacgccgggggcggcagcagcgccgccaacgcgccccgcttcggcggcggcgagcccaccgtccgcatctactgcaaggccgacgaagggttcagcgccacggtccgcaacggcgccgtgtgcctcgcgcccaccaacccgcgcgacgagtaccagcactggatcaaggacatgcgccacagcaacagcgtcaaggacgaggaagggtacccggccttcgcgctcgtcaacacggtcaccggc

SEQ ID NO: 33912 - DNA, 276 bp, Zea mays
gcgaaaaccctagcagctccgtagtccctctcctctggaggtattcgcagtcgaccgtgtcctcggagcacgatgaaggttgttgctgcctacctgcttgctgtcctcgctgggaatgccagcccctccgctgaggatttgactggcattctggagtcagttggctgtgaagttgacaatgaaaggatggaactgctgctgtcccaactgagcggtaaggacatcaccgagctcattgccgcgggcagagagaagtttgcttcagtcgcatgtggc

SEQ ID NO: 33913 - DNA, 268 bp, Zea mays
acctgaaccaaaaccagagcctaagccagagcataaacctgagccaaagccagagcctaaacccaaaccgaaaccagagccaaagccagagccacaaccaaaaccagagcctaagccagagcctaaacccgaaccgaaaccggagccaaagccagagccccaacctaagccagagcctaagcctgagccgaaaccagaaccaaagccagagccacaaccaaagcctgagcctagaccagaaccgaaaccagagccagagccagagcct

SEQ ID NO: 33914 - DNA, 280 bp, Zea mays
gagaaggcgtcgtcgccgctggttccgccgccgtcggagatcgacctcgaggcgggcggcggcggggagcagctccagtgccggatctgcctcgagaccgacgggagggacttcatcgcgccctgcaagtgcaaggggacgtccaagtacgtgcaccgcgactgcctcgaccactggagggcggtgaaggagggttttgcattttcccattgtaccacctgcatagctccatattatttgagggttcattcccacactgacaggaaatggcgaacactga

SEQ ID NO: 33915 - DNA, 275 bp, Zea mays
ggaatggcaaaatttatatgcaaggaggttgaaactgttgatgactatgacgagtattgtcactatgtagccgggctagttggttatggactttccaggctcttttatgctgctgggacagaagatctggctccagattcactatcaaattcaatgggtctctttttacagaaaactaatataattagggattatttggaggacataaatgagataccaaagtcccgcatgttctggcctcgagagatatggagtaaatatgcagataaactcga

SEQ ID NO: 33916 - DNA, 283 bp, Zea mays
gtcaagtgctcccgttgcttggctgtacaaggaacattatgctcttaatgggatcggaaatggtcggattgtatttaccatccacaatcttgagtttggagcgcatcacattggcaaggcaatggcacattgtgacaaagctacaactgtatccgatacatactcgaaggaagtggccggacatggagctattgcacctcactactataaattccatggaattcgaaatggaattgatcctgatatttgggatccatatactgacgaatttattccggtccat

SEQ ID NO: 33917 - DNA, 275 bp, Zea mays
cccacgcgtccggcgatgcggacggctgttcttcttcgagatggcctgcaacaactccgaggtcgcgtacgagcagaaccccaacgacgccgacaacttgacgcgatggggcggacgctgctggagctatcacagatgcgtaacggccccgacagcctcaagctcctccaagatgcggaagccaagctggaggaggcactgcaaattgatcccaacaagtctgatgcactctggtgcttgggaaatgctcagacttctcatggattcttcactcc

SEQ ID NO: 33918 - DNA, 277 bp, Zea mays
cgccgtcctctcccgttcgcaacgccacgctccccaccgccgaaatggccccgaagcgaggtggcagggcaccggtgccggccaagaagaagacggataaagtgacgaaccctctgttcgagaaaaggccgaagcagttcggcatcggcggcgcgttgcctcccaagaaggacctgcaccgattcgtcaagtggcccaaggtcgtgcgcatccagcgccagcgtcgcatcctcaagcagcgcctcaaggtgcctccggcgctcaaccagttcacccg

SEQ ID NO: 33919 - DNA, 270 bp, Zea mays
ccctgttgatgctgtcttccagaaggatgagatgattgacatcattggtgtgaccaaggggaaaggttacgagggtgtggtcactcgttggggtgtcacccggcttccccgcaagacccacaggggtctccgcaaagttgcttgtatcggtgcatggcatccggctagggtctcctatacggttgcccgtgctggtcagaatgggtaccaccaccgcactgagatgaacaagaaggtgtacaagatcggcaaggctggacaagagaccca

SEQ ID NO: 33920 - DNA, 271 bp, Zea mays
cccctggcgaggttctctgtgaggtggaaactgataaagcaactgtggagatggagtgcatggaagagggctatcttgctaagattattcatggagatggtgcaaaggagattaaagttggtgaggtcattgctataactgtggaagaagagggtgacattgagaagtttaaggattataagccgtcatcttcagctgaacctgtagctcctgctgaatcaaaggctcaaccagaaccttcacaaccaaaggtggaggaaaaaaagcttac

SEQ ID NO: 33921 - DNA, 272 bp, Zea mays
gtcagcggcgtcctgtcctccccggaggccgaggcacccgtcgccccgccggcgcccgtcaacctcaccgacatcctctccaagaagtactgcaagagcttcgcgggcctcctcgccgccgaccccaaggtcttcgacaccctcaacggcaccaaggacaccgcgctcaccgtcttctgccccgtcgacgcggcggtggccgccttcatgcccaagttcaagaacctcacggccaaggccaagacggccatcctgctctaccacgccgtgcc

SEQ ID NO: 33922 - DNA, 267 bp, Zea mays
agagaaagtccaaaagatcatagcacacgggatcaactgttttgtcaacaggcagttaatctataacttccctgaggaactctttgctgacgctggcatacttgcaattgagcatgctgactttgagggcattgaacggttagctcttgttactggtggtgagatcgcatcaacttttgataatccagagtctgttaagcttgggcaatgcaaggtcattgaagagattatgattggggaggacaggctaatccatttctctggggt

SEQ ID NO: 33923 - DNA, 266 bp, Zea mays
ctttgatctggagaacgggaaccaggagctcaagagcgacctcaaggacctgtacatcaacaatgctatccagatggatgttaccgggagtaggaaggctgttgtcattcacgtcccataccgcctgcgcaaggccttcaggaagatccatgtcagactcgtcagggagctggagaagaaattcagcggcaaggatgtggtaattgttgctacacggaggattgtgaggccacccaagaagggttcagctgttctgcgccctcgca

SEQ ID NO: 33924 - DNA, 268 bp, Zea mays
gaagcagccgccgttgctgctgccgcgtccacagaatggggggtttcgtgaagacccataagaccaatgcgtatttcaaacgtttccaagtgaaattcaagagaaggcgggctggcaagacagactacagggccaggataaggctgattaaccaagacaaaaacaagtacaacacacccaaatacagatttgttgtgcgatttaccaacaaggacatcactgcacaaatcatatctgctagtatagcgggtgatatggttcttgcttc

SEQ ID NO: 33925 - DNA, 263 bp, Zea mays
gtggggaatttgttgtggtcaacaagcatcttcttcatgatctgactgaaatgggcatttggactcctactttgaaaaaccagataatatacgacgacggttctgtccagaagatagcagaaatcccggacgatcttaaagcaatctacaaaactgtttgggagatcaagcagaaaactttagttgacatggcggtcgaccgcggatgctacatcgaccaaagccagagcctcaatgtccacatggagcaagcaaactttggg

SEQ ID NO: 33926 - DNA, 261 bp, Zea mays
cggacgcgtgggcggacgcgtgggcgcaaccgtgtgaccgcccgtgccgccggcgatcccgatccgccgacacgtcccagcccagctcgcagccatgtcgccgtcggagccgacgcgggaggagagcgtgtacatggccaagcttgcggacaggcggagcggtacgaggagatggtcgagttcatggagcgcgtcgcgcgctacgccgggggctccggcggcggggaggagctctcggtggaggagcgcaacctgctgtcc

SEQ ID NO: 33927 - DNA, 262 bp, Zea mays
gggaaaactgttgtcaaagttgcatgcggaactaaccatacagttgcagttgattccaatggctttgtttacacctggggtttcggtggatatggaaggttggggcatagagaacagaaggatgaatggcaacctcgccttgttgaagtcttccagaagcacaatgttctgcctcctaatgccattgtctcagctggttctgtgagttctgcatgcactgctggtggtggacagttgtacatgtggggtaagatgaagaata

SEQ ID NO: 33928 - DNA, 248 bp, Zea mays
gactctgttccacttctactcggcgtcgattcttctgggctatgatgctgctgcagtcgcagcaggcggaggtgggggtggggtaacagtgaagctggtggactttgcccatgtggccgagggtgatggggtgattgaccacaacttcctgggcgagctctgctagctgatcaagttcgtatctgacattgttccagagactccttagacgcagcctttgggtccttcttaagagaggatcctgacat

SEQ ID NO: 33929 - DNA, 263 bp, Zea mays
gcagcaggcaaggatgagcttttcctggtttatgagtactctcaaaatggttcactcaaaaatcatctacatgatcctgaaagaaaggggtgttcatcactttcatggatctttcgggtccaaattgcacttgatgctgccagaggactagaatacattcatgagcacaccaaagatcattatgttcatagagacattaaatcaagtaatatcttgcttgatggttccttcagagcgaagatttcagattttggccttgcaaa

SEQ ID NO: 33930 - DNA, 256 bp, Zea mays
cccacgcgtccggatcagtgcattgaggatgatttcactgcatggaaagaactagtgtggccagaattagatcaattgctccgcgacgaggatgacacaactggtgcatcgactccatatactgctgctattcctgaatacagagttgttttcattgacaaatctgacctgtcattccaagatagatcatggacactagccaacggtactggtgtgattgatattcaacacccttgcaggtctaatgttgctgttc

SEQ ID NO: 33931 - DNA, 256 bp, Zea mays
gggtaaagagaagtcccacatcaacattgtggttattggccacgttgactctggcaagtcgaccaccacaggacacctgatctacaagcttggaggcattgacaagcgtgtgatcgagaggtttgagaaggaggctgctgaaatgaacaagcggtccttcaagtacgcatgggtgctcgacaagctcaaggctgagcgtgagagaggtatcaccattgatatcgctctgtggaagtttgagaccaccaagtactat

SEQ ID NO: 33932 - DNA, 254 bp, Zea mays
gcctgttgctgctggtgctggagacaccaacatatgtggtggtattatccaattgtattggagttctattcttgaaaggtgcttggatacaaatgatcaagttcgccagagtgcacttaagattgttgaagttgtacttcgtcatggtttagtccaccctattacctgtgtacctcaccttatagcacttgaaatggacccgctggaggggaattcgaagttggctcatcatctcttgatgaatatgaatgaaa

SEQ ID NO: 33933 - DNA, 257 bp, Zea mays
cccactcttcgcctcctttctggagcagctagggttccgtcctcgatccgatccgccgagtgcacaccacctttccccactccgatcgaatcgatggccgccgagggcgagaagaagatgataaccctcaaaagctccgatggcgaggagttcgaggtggaagaggcggtggcgatggagtcgcagaccatccgccacatgatcgaggatgactgcgccgacaacggtatccctcttcctaacgtcaactccaagat

SEQ ID NO: 33934 - DNA, 275 bp, Zea mays
cccacgcgtccgcaaaataccaagagtttcatatacagaaggctaaagtgccttgtcattgatgaagccgatcgcatacttgagcaaaactttgaggaagacatgaaacaaatatttaaacgccttccccagaataggcagactgttcttttttctgctacacaaactccagaggttgaaaaatttgctaaactgtcatttgagaaaaatgaagaaagtaaaaaaaaacctgtttatgttggagttgatgatgataagtcaaaggctactgttga

SEQ ID NO: 33935 - DNA, 292 bp, Zea mays
gccgagtctagagttggtttagctgataggtctgtccgtgccctggacttgatgtccgactccgtcagaaaccttgccttgtggtcccaagagataaaagcgacgacatttgaagaaggcgagaaagggccggaggcgataagggagatgtggctcaggctgctgcaagcactgaagaaactgagcctggatcagagggaggaggtgcgaaaccatgcgctggcttctctccagcgatgcctaacatccacgggagaactctgcctccagtccgcgacgtggtcccatgcct

SEQ ID NO: 33936 - DNA, 292 bp, Zea mays
atcttccccatctcgaactacgcgggctcccaatatgatattagcatcctgatctggaaggaccccaaggaaggaaactggtggatgcagtttggcaaggaatacgtcctgggctactggccgtccttcctcttctcctacctcgcggacagcgcgtcgatgatcgaatggggcggggaggtggtgaactcggagcccgacggcacgcacacatcgacccagatgggcagcgggcacttcccggaggaagggttcagcaaggcgagctacttcaagaacgttcaggtggtgg

SEQ ID NO: 33937 - DNA, 292 bp, Zea mays
cccacgcgtccgcccacgcgtccgcggagctgctcatccggaagctgcccttccagcggctggtgcgtgagatcgcgcaagacttcaagaccgaccttcggttccagtcctccgctgtcgccgcgctgcaggaggccgccgaggcgtatctggtgggtctctttgaggacaccaacctctgcgccatccacgccaagagggtcaccatcatgcccaaggacatccagctcgcgcgccgcatcaggggcgagagggcctgattgctgctctgtcttcctgtttctgtaatgtc

SEQ ID NO: 33938 - DNA, 292 bp, Zea mays
tcctcaacggcctgctcttctacgttggctacctggcgatccccagcgcgaggcgcatgccggcgtggaggtcggacggcgccgtggcgatggcgctgctccacgccgggcccgtggagttcctctactactggttccaccgggcgctgcaccaccacttcctctactcgcgctaccactcgcaccaccactcctccatcgtcaccgagcccatcacatccgtgatccatcccttcgctgagcacatggtctactacgtcctgttcgccatccccatgctgtcgactctcta

SEQ ID NO: 33939 - DNA, 297 bp, Zea mays
ccacgcgccgggacctggcgaaacttctcctttctccatcctcaaccctactcccccttcatccgcacgaacgaagcagcgcagcgaggagcagacgatccttcccgacctcgaagcctaccccccttccagctgcggccatggcgaccgtcatgcagaagatcaaggacatcgaggacgagatggcaaggacacagaagaataaagccactgctcaccatcttggtcttcttaaggctaaacttgcaaaattgcggcgggagttgctcactccaacatccaaaggtggtggtggtg

SEQ ID NO: 33940 - DNA, 295 bp, Zea mays
cagagctggaagatcctgccctggggcgacgaggcctacgccgggggcggcagcagcgccgccaacgcgccccgcttcggcggcggcgagcccaccgtccgcatctactgcaaggccgacgaagggttcagcgccacggtccgcaacggcgccgtgtgcctcgcgcccaccaacccgcgcgacgagtaccagcactggatcaaggacatgcgccacagcaacagcgtcaaggacgaggaagggtacccggccttcgcgctcgtcaacagggtcaccggcgaggccatcaagcact

SEQ ID NO: 33941 - DNA, 294 bp, Zea mays
gtctcgcatcccgtccccgtccgcgccggccgacgccgccttttcgtccccgcgtcagcgtcgcggctccactgagcgtgcgcgtcaccggcggcaggcgagggcaggcggtggtggcgatggcgtccgctgatgcgcgcttggcggggatcgcctcctccatccgcgtcatccccgacttccccaagccagggatcatgtttcaggacatcacgacgttgctgctcgatcccaaggcgttccgtgacaccatcgacctctttgtcgagcggtacaaggactaagggatcaccg

SEQ ID NO: 33942 - DNA, 284 bp, Zea mays
aaagtaatggcaatgtttgagaaggcggaggatgagtacaatgatttgatgtcaaagaaaaacatcatcgagaatgacaaggcaaaaatcaagaaagtgatagaggagttggatgagaagaagaaggaaacattgaaggtcacttggctcaaagtaaacaaggatttcgggtctatattcagtactcttttacctggtacaatggcaaaacttgatcctccagaaggtggtacttttttggatggtcttgaagttcgtgtggcatttgggacagtttggaagta

SEQ ID NO: 33943 - DNA, 285 bp, Zea mays
atttgtttgatgcttaaaggtctgatccgactgagaacgatagtgtagagggtctcaggccaaatgcacggggccctggtcttgttaccttcgggcccgacagagttatggagttctgcaacaacaatgacctgcagttgattgtgcgagcacacgagtgcgtgatggatggcttcgagcgtttcgctcaaggtcacctgatcactcttttctcagcgacaaattactgcggaacggcaaacaacgcaggagcgatcttagttctcggaagggatctggtcgttg

SEQ ID NO: 33944 - DNA, 286 bp, Zea mays
caacaacattgctgaagtatctgcgcaccggctttcatccgatgaggaagcatcaggatccagaagcaccccaactaaagatgaccaaattgctgcagcaaggcgcttgtccttatcttcaaaggaactggacttgagtggccttggagtgaccagtgtaccagctgccgcgtgggagacaagtgatgtggtgaaactggatctttctaaaaattcaatagaagatctaccaaatgagttgtcattatgctcatcacttcaatccttagttttgtctaataacaag

SEQ ID NO: 33945 - DNA, 285 bp, Zea mays
ttttgaacggagaagttggacccaagaccattcatgttcctactggggagaagctttctgtttttgatgcggccatgagatacaaatctgagggccatgctactataatcctcgctggcgctgagtatggaagcggcagttctcgtgattgggctgctaagggtccgatgctcctgggagttaaagctgtaattgccaagagctttgagcgtatccacagaagcaacttggtggggatgggaatcattcctctgtgcttcaaagctggtgaggatgctgattcac

SEQ ID NO: 33946 - DNA, 286 bp, Zea mays
  unsure (1)..(286): unsure at all n locations
gggttttgctgctctccgaccccgagctccgatagccgcagcatcaggcgcggaccccctcgcgtgtgaccgagatggcgctgccgaatcaggggaccgttgattaccccagcttcaagctcgtcatcgtcggcgatggtggaactggtaaaactacatttgtgaagaggcatctcactggagagtttgagaagaaatatgaaccaaccattggtgtggaagttcatccgttggatttcaccactaactgtggtaagatcaggttctactgctgngataccgcagg

SEQ ID NO: 33947 - DNA, 278 bp, Zea mays
cgcttcacgtccgctacagaccggcgaggagacgaaaggagggagttttgagaagctcaaatggctcctaaagccgctcctgccaagaagggtgatgccaaggcccaggccttgaaggtggccaaggctgtgaagtctggggcaggcaagaagaagaccaagaagattcgcacatctgtaacatttcaccagcccaagaccctgaagaaggccagggacccgaagtacccaagaatcagcactactggaagaaacaagcttgatcagtaccaaattct

SEQ ID NO: 33948 - DNA, 289 bp, Zea mays
ggaaagtgttcgtcctcatggcgccgccgcagccgaagtcgggcctcttcgtgggcatcaacaagggccatgtcgtcaccaagcgcgagctgcctctgcgcccgtcccaccgcaaggggaaagcaacgaagagggtgtccatggtcaggggcctgatcagagaggttgctggctttgctccttatgagaagcgtatcaccgagcttctgaaggttggcaaggacaagcgcgctctgaagcttgccaagagaaagcttggaactcacaagagggcaaagaagaagagaga

SEQ ID NO: 33949 - DNA, 277 bp, Zea mays
gctataaacaccgattcccaagcccttattaattcacaagcgcaatatcctctgcaaattggagagcagttgacccgcggcttaggtgccggtggaaatccgaatttgggagagcaggctgctgaggaatcaagagaaaccatagccactgccctgagggattcagatcttgtcttcataacagctgggatgggagggggtactggatctggtgctgctccagttgttgcccagatatcaaaggaagctggttatcttactgttggtgttgtcacct

SEQ ID NO: 33950 - DNA, 279 bp, Zea mays
gtccggtctttccgttacccggcggcttaaaccctagttcccattccatcttcgtttccgctccgccgccgtcgatggagttctggggtctcgaggtcaaacctggatccactgtcaagtgtgagcctggacatggctttatcctgcacgtttcccaggctgcccttggggaatcaaagaaaagtgacagtgccttaatgtatgtcaaagttgatgacaagaagcttgccattggaacgctctctatcgacaaatacccacagatacaattcgatttgg

SEQ ID NO: 33951 - DNA, 276 bp, Zea mays
gcaaccggtccaacactttcacgctcaggcgctcagctctagcaatggctgcctccaccatggcgatctcctccacggcgatggccggtacccccatcaaggtgggctccttcggcgagggccgcatcaccatgcgcaagaccgtgggcaagcccaaggtggcggcgtccggcagcccctggtacggccccgaccgcgtcaagtacctcggccccttctccggcgagcccccgagctacctcaccggcgagttccccggcgactacggctgggaca

SEQ ID NO: 33952 - DNA, 276 bp, Zea mays
atctagccagtgactcgatcttagcgtgctactatggcggctctgctagtgccctgctcctcctgctctgctcagccttctgctcccttgcccaccgggcggccggcgtcgactacggctcgtggcagagcgcccacgccacgttctacggcggcggcgacgcgtctggcacgatgggcggcgcgttctgctactggaacatgcacatcacgtggtacggctgtaacacagcggcgctgatcacggccctgtacaactacggcgcctcgtgcggtt

SEQ ID NO: 33953 - DNA, 283 bp, Zea mays
cccacgcgtccgcggacggtgggctggaccttctacccggtaatgtgcatcgccaggataaatcttctcgcgcagtccgccctgttcgttctcacggagaagagggtgccgcagcggttgcttgagatcgcgggggtcgccacattctgggcttggtacccgttgctggtggcttccctgccgaattggtgggagagggtcgcgtttgtgcttttcagcttcaccatctgcgggattcagcacgtccaattctgcctgaaacacttctcgtccgacgtgtatg

SEQ ID NO: 33954 - DNA, 277 bp, Zea mays
ctctttcccaaatccaccgccggctcggctcgcccatcttcgcgccaagcaccgaatctccgatggcccgcacgaagcagacggcgcgcaagtcgacgggcggcaaggcgccccgcaagcagctggccaccaaggcggcgcgcaagtcggcgccggcaaccggtggcgtgaagaagcctcaccgcttccgccccggcaccgtcgcgctccgggagattcgcaagtaccagaagagcacggagctgctcatccgcaagctgctcttccagcgcctcgt

SEQ ID NO: 33955 - DNA, 273 bp, Zea mays
tgctcgtgttggtctggttgctccagttgatgttgttgtgccccctggcaacactgggctggatccgtcccagacctctttcttccaggtgcttaacatccccaccaagattaacaagggtaccgtggaaattatcacccctgtggagctgatcaagaagggtgaaaaggtgggctcgtccgagtctgccctgctcgccaagctgggtatccgccccttctcgtacggcctccaggtcaccagtgtctacgaggatgggtccgtgttcagccc

SEQ ID NO: 33956 - DNA, 271 bp, Zea mays
cagagcaagcatcccccaaggcgaaccaacatcctctatcatacaacaacctacgaccagaagattttccaaacgatcggctctaccgcgcttaccacgccattcaaagcttcaagagcacgatcacttcggatcccaagaacatcaccggcacgtgggccggcaacgacatctgcggcgagaagagctacgtcggcttctactgtgcaacaccgaccagccgagctaaggagctcacagtgacggcagtagttctcaatggcttcggtct

SEQ ID NO: 33957 - DNA, 259 bp, Zea mays
ggagggcggacgcgggttgagtttcaggtgccttccccactggagccgactagggatagctatttcgtgaggtactgcaagcagaacgcggatggaacatgggccgtcgtcgacgtctcgctggacaccagctcagtcctcaagtgccggcgccggccgtcgggatgcctgatccaggaaatgcccaatggctactcaaaggtgacctgggtggaacacgtcgaggtggatgacaggtcggtaaacggcatctacaaac

SEQ ID NO: 33958 - DNA, 266 bp, Zea mays
ccactttccacattccagttccactccgcctccgctgccggtcgccgactccgaaactccgacagtccgaccacaaggatccacagaaggatgagtgaagaggataaggctgctgcttctgctgagcagccgaagagggcccctaagctcaatgaaaggatcctctcttctctgtccaggaggtccgtagctgctcatccgtggcatgatcttgagatcggtcctgatgctcctgctgttttcaatgttgttgttgagatcacaaa

SEQ ID NO: 33959 - DNA, 260 bp, Zea mays
cattcctcccatctcccaagacctcctcagacccgagaagcgcactgcggccatggacgccaccggcactggagctggagggaaggcgaagaagggagctgccggtcgcaaggccggcgggccgaggaagaagtcggtgacgaggtccgtgaaggccgggctccagttccccgtcggccgcatcgggcgctacctcaagaagggccgctacgcgcagccgtcggcagcggtgcccccgtctacctcgcggccgtcctgga

SEQ ID NO: 33960 - DNA, 268 bp, Zea mays
cccacgcgtccgaacgtggtcctcaacggcggcgaccccgactacgtggcgctcctgccctctggcttcgccatcctgcccgacggcccgtcaggcagcagcaacatgcaaggcggtggcggtggcggcgtcggctcaggcgggtcgctcctgacggtggcgttccagatcttggtcgactccgtccccaccgccaagctctcgctggggtcggtggcgaccgtgaacagcctcatcgcccgcaccgtggagcgcatcaaggcggcgg

SEQ ID NO: 33961 - DNA, 261 bp, Zea mays
tgttttgatgaatggcaaggggccatataggtataatgactcgctagtgccagatggcattgagcacgagactatcaaagttgagccaggaaaaacataccgtttccgtgtccacaatgttggtgtctccacaagcttgaacttacggattcagaatcacaacatggcccttgttgaaacagaaggttcatacacgatgaagcagaattttactaatctcgacatccacgtgggccagtcttactcatttctggtcactat

SEQ ID NO: 33962 - DNA, 263 bp, Zea mays
ccgcaagctggccgtcaacctgatcccgttcccgcgcctgcacttcttcatggtggggttcgcgccgctcacctccaggggctcccagcagtaccgcgccctgacggtgccggagcttacccagcagatgtgggacgccaagaacatgatgtgcgccgcggacccgcgccacggccggtacctgacggcgtccgccatgttccgcggcaagatgagcaccaaggaggtggacgagcagatgctgaacgtgcagaacaataact

SEQ ID NO: 33963 - DNA, 262 bp, Zea mays
gtcacagctcacagcaaacaccgcgaaccgcccccgctcccaaacccgaccgagcaaagcgcaaagccccccaaccgcggatcaatccgcagcatcgatggcgcccaaggcggagaaaaagccggcggcgaagaagcccgcggaggaggagcccgcgaccgagaaggcggagaaggctccggcagggaagaagccgaagggtagaaacgcctccccgcgggcaagtccggcgccggcgagggcaagaagggcaagaagaaag

SEQ ID NO: 33964 - DNA, 259 bp, Zea mays
gtgtaccacaacacgcaccacatcgcctgcaacagcctggaccatgacccggacctccagcacatgccgctctttgccgtctcccccaagctgttcggcaacatatggtcctacttctaccaacggaccctggcgttcgatgccgcctcgaaattcttcatcagctaccagcactggaccttctacccggtaatgtgcatcgccaggataaatcttctcgcgcagtccgccctgttcgttctcacggagaagagggtgc

SEQ ID NO: 33965 - DNA, 262 bp, Zea mays
ggggcatcgtgctgagttgtatgctgcccgagttgcaaaatgtctagctgctatggaaggacgtgaaaaagtatttgtggatgacctcaagaaagctgtagagctggtcattctacctcgctccatcctatctgataatccacaggatcagcagcaagagcatccacccccacccccgccgccaccacctccagaaaatcaagattcttcagaagaccaagatgaggaagacgaagaccaagaggatgatgaagaagaaaat

SEQ ID NO: 33966 - DNA, 258 bp, Zea mays
cctacctcaagaaagttgggtacaaccctgataagattgcctttgttcccatttctggttttgagggcgacaacatgattgagaggtccaccaaccttgactggtacaaaggcccaaccctgcttgaggctcttgaccagatcaccgagcccaagaggccttcggacaagcccctgcgtctgcccctccaggatgtgtacaagattggtggtattggaactgtaccggttggtcgtgtggagactggtgtcatcaagc

SEQ ID NO: 33967 - DNA, 256 bp, Zea mays
gcctcgtgtggccgtcgtctcccgttcggaacgccaagccccccctccggcgaaatggcccccaagcgaggtggcagggcgccggtgccggccaagaagaagacggataaagtgacgaaccctctattcgagaagaggccgaagcagttcggcatcggcggcgcgttgccgccaagaaggacctgcaccggttcgtcaagtggcccaaggtcgtgcgtatccagcggcacgccgcatcctcaagcagcgcctcaag

SEQ ID NO: 33968 - DNA, 256 bp, Zea mays
caaaggccaaaaccgaccccgctccacgcctccactcccagccccagcggatcttctcgagcggcggccggcgatggcagcgagcaacatcgggatgatggacggagcctacttcgtcgggcgcaacgagatcctcgcgtggatcaacactacgctgcagctcggcctctccaaggtggaggaggcggcgtcaggcgcggttgcgtgccaactgatggacgcggcgcatcccggcgccgtgccgatgcacaaggtc

SEQ ID NO: 33969 - DNA, 253 bp, Zea mays
atttcttccctctctagttctccgcctccggctccgcctgaatcatccaagacagggatcgccatgtcggactcggaggagcaccacttcgaatcgaaggccgacgctggggcgtccaagacctacccgcagcaggctggcaccgtccgtaagaacggcttcatcgtcatcaagaaccgtccctgcatagatgtggaggtttctacctccaagactggtaagcatggccacgccaaatgccactttgtcgcca

SEQ ID NO: 33970 - DNA, 249 bp, Zea mays
ggacgctggtgatgatgcactcgacatcgtacagtatgctgaaaaaagaggcgtgaatgtcttggctgagattgatgtacctggccatgctctttcatggggtgtcggatatccatcattgtggccatcagctacatgcaaagaaccgcttgatgtcagcaatgaatttacatttcaactgatcaatggaattctttcagatttcagcaagatttttaagttcaagtttgtccatttgggcggagatga

SEQ ID NO: 33971 - DNA, 271 bp, Zea mays
gcgatcgatcgaggcagtcgtagtaataagccaacaaacaaaccggccggaacgccatgctggaggagtacaaaccgtgtgcggccatggtggtgacgcagtgcatctacgccgctctagcgctcttgtccaaggcggcgttcaccggcggcatgagccccctggtgttcgtcgtctacaggcaggccgtcgccaccattgtactcgtccccgtcgtcatcgcggccaacaggaagaagatgaaggagatgacgacgggccttggactgac

SEQ ID NO: 33972 - DNA, 265 bp, Zea mays
gccctgtcctgctatgattcccccgaaaccctcccccaaaaccccagagcggagaacagcgcaacatgttcggcttcgggcaccacggccaccacggccagaacccgccggcgcacggcggcgtgcaccagcccaccttcaagatcttctgcaaggccgacgaggggtactgcctcaccgtccgcgacggcaacgtggtgctggcccgcgccaacccgcgcgacgagcaccagcactggtacaaggacatgcgcttcagcaccca

SEQ ID NO: 33973 - DNA, 268 bp, Zea mays
ccctctccgaaatcaaggtagcgtacaccgctgcagtttctacagcccactctgccactcgtgatcccactagtcacaacgcctgccctcgccaagcccgcctcccgcaccgccaagcccgccgcggctccgaagccgaagcctgccgccgccaagccgaagggtccaccgctggtgcctcccacccgccttacttcgagatgatcaaggaggctatcacggcgctcaaggagaggaccggctccagctcgcaagcgatcgccaagta

SEQ ID NO: 33974 - DNA, 270 bp, Zea mays
tttcagccgccacaccgcagctcccgtaaccgctgctgcccaggcccattttaccaccgatccatggcggaggattcggcggcggcggcggccacatggggcggcggcgacaagctcatcctgcccggccttcagttccacggcttccacggcgtcctgcgggaggagaagacgctggggcagaagttcgtcgtcgacatcgacgcctggatggacctcgccgccggcggcgagtccgactgcatcgctgacaccgtcagctacaccgat

SEQ ID NO: 33975 - DNA, 270 bp, Zea mays
aggccatggaggcctcctacgtggagctggccgagaagctggcggggtccggggtgaaggtggccaagttccgcgcggacggcgagcagaagccgttcgcgcaggccgagctgcagctgcagagctttcccaccgtgctcctgttcccgggccgcaccgccaggcccatcaagtacccgtcggagaagagggacgtcgactcgctcctcgccttcgtcaacagcctccggtgacagacgaagacgacctccagtgagcgagaaccatcgt

SEQ ID NO: 33976 - DNA, 273 bp, Zea mays
acttctttcatatgagatcatccacaaaaaggatcctgctgcagttcaacgaataaaacagaaggaagtatatgaacaacaaaaggaacttattttactcggggaacgtgttgtgcttgtgacacttggttttgatttgaatgtgaaccatccttacaagcccttggttgaagcaataaaaatattcaaggttgctcaaaatgcacttgctcaagttgcctggaattttgtcaatgatgggctccgcacttcactttgcctgcaatttaaacc

SEQ ID NO: 33977 - DNA, 269 bp, Zea mays
cacacgcgtccgcacacacgtacgcacacgcgtccgcggacggtgggcgacgcgtgggaaaatcatccagctcaaagatatagtagatgcatctctggatcaaagtgcaaagaatggagttgatgtaggcatttgcttgacatatgaaaatcagtccgctctgaataaagtagacactcgatggaaaacaggaagagatgtctggtggcaggatgttgtgcctgatttcccaactagatgcgatgtggaatgggttgatgcagaggatc

SEQ ID NO: 33978 - DNA, 278 bp, Zea mays
cttcgacaaccccaccgtcccgcgcgaggagaaggccgagctcatcgacgagatcgccaggtcgtccgagctgcagccgcacgtcgtcaacttcctcaacgtcgtcgtcgacaacttccgcgcggccatcgtgccgcagatcgtcgccgagttcgagaacgtctacaactcgctcacgggcaccgaggtcgccaccgtcacctccgtcgtgcagctcgagtcgcaggacctggcgcagatcgcgcacagcgtccagaagatgaccggcgcccagaacg

SEQ ID NO: 33979 - DNA, 264 bp, Zea mays
agcagtcgccgacactcaccagcaagttctcacgcagaaaattccagcatctctttcgcgccccaattgatcgattcgtgatggcgcccaaggccgagaagaagcccgtggagaagaatccggcggaggacaaggccgagaagaagccaagggcggagaagcgcgtgacgagcaaggagggcggcgacaagaacggaaagaagaaggcgaagaagagcgtcgagacgtacaagatctacatcttcaaggtgctcaagcaggtgc

SEQ ID NO: 33980 - DNA, 266 bp, Zea mays
tcgagaccgtcgagggcgacggcaagtcggccggcaccgtccgcctcctcaagtacaccgaggcggtgccggtgctgacgttcgccaaggagaagcttgagacggcggacgacgagaacaaggtggtgtcgtacagcgtggtggacggcgagctggcggacttctacaagaacttcaagatcacgctgaaggtgactccggccaaggcggagggcgacggcggcgccgtcgtcagctgggccatggagttcgacaaggccaacgac

SEQ ID NO: 33981 - DNA, 264 bp, Zea mays
tgtccatggcatatgctggtgctgtttttgcagatgcatgtttgaagggtctgaatggagttccagacattgtagagtgctcttttgtgcaatcaactgtgacagagttgccattctttgcctccaaggttcggctcggcaagaatggagtggaggaagtgcttggtctgggtgagctcaacgagttcgagaagaaggggctggaaaacctcaagggcgagctcaagtcttccatcgacaagggtatcaagtttgcccacggga

SEQ ID NO: 33982 - DNA, 271 bp, Zea mays
gcaggacgtgagggctaaggaagcaaatctttacactgaaatcgctgagggtatccatgcttatgggataacaagccatcggcatgtgcctgagattgagcaaggacttacagatgctgctgaatcaaaagttactatcagctttactccacatttgatgtgtatgaaacgtgggatgcaatctactgtgtatgttgaattggcatctggagtgactcccagggatttgtatgaacacctaaagtctacttacgagaatgaagaatttgtc

SEQ ID NO: 33983 - DNA, 270 bp, Zea mays
gtggttagttctcgtcaatggcctcttatctctagatatagagcatcagtgcacacccaatctgccagactagaaatgatgtcctcgttgtttaagccgcggggtactgatgatgatggcctcatccgggaatcactgatcgacttctacactagctctggaaagcgaaaaccagaacacataattattttcagggatggagtcagtgaaagtcagtttacccaggtcatcaacattgagctggatcagatcattgaggcatgtaagttt

SEQ ID NO: 33984 - DNA, 259 bp, Zea mays
acacactcgagaactccatttcgatcccatttgaaatcaacccatcctcgtttcctccgtctagcagcctctcaccctcatggccaagatcaagatcgggatcaatgggtttggcaggatcggaaggctggtggccagggtggccctgcagagcgacgacgtcgagctcgtcgccgtgaacgaccccttcatcagcaccgattacatgacctacatgttcaagtatgacactgtgcacggacagtggaagcaccatgag

SEQ ID NO: 33985 - DNA, 259 bp, Zea mays
caagtgcctcctctcctccccgcacctcatccgcaaggtccatatggactacctagaagccggggcgaacattataatcacagcatcgtatcaggctactatccaagggtttgaatcaaagggcttttcaaaagaacaaagtgaaaacttgttaacaaagagtgttcagattgcactggaagcccgtgagatgttcttgaaggaacatttggagaaatccactcctatacagcatcctattctggttgcagcagctcta

SEQ ID NO: 33986 - DNA, 258 bp, Zea mays
gcggtgcgcgcgctgtcccagaaggagcaggacatacagatgatgctcgcagccgacgtccacctcggcaccaagaactgcgatttccagatggagcggtatgtctttaagcgtcgcaccgacggcatctacatcatcaacctgggcaagacatgggataagctccagctcgcggcgagggttattgttgccattgagaacccgcaagacatcatcgtccagtcggcccgcccctacggccagcgtgctgtcctcaag

SEQ ID NO: 33987 - DNA, 258 bp, Zea mays
aaaaatgaagaaaccagctgctgccattcgtgatgccaatgctgctctagagatcaacccagactctgcaaaaggctataaaactcgtggaatggcatatgccatgcttggcaaatgggaggaagctgctcatgatctgcacacagcatctaacatggattacgacgaggagatcaatgctgtgctcaagaaggtggagcctaatgctcacaagatagtggaacatcgcaggaagtatgagaggttgagaaaagagag

SEQ ID NO: 33988 - DNA, 257 bp, Zea mays
gcaccccctcctcgctcgcactccgctcgtctgacatctcctcccgtcctttcctttctgaggctcgcgaaccccgacgatggccgccaccgcggtgtcggtcgacgagaagctcgacaagcttcgcgccgaggtcgccaaactcaaccagatcagcgagaacgagaagtccgggttcatcagcctcgtgtcacgttacctcagtggggaggcggacagatcgagtggagcaagatccagaccccgaccgatgaggt

SEQ ID NO: 33989 - DNA, 263 bp, Zea mays
gagcctcattcatctccattcgaaacaccctcgcacccacactctcccttcgtccccagcctaaatccccgcaaagatggctcgcacgaagcagacggcgcgcaagtccacgggcggcaaggccccgaggaagcagctggcgaccaaggcggcgcgcaagtcggcccctgcgaccggcggcgtgaagaagccgcaccgcttccgcccgggcaccgtggcgctgcgcgagatccgcaagtaccagaagagcacggagctgctca

SEQ ID NO: 33990 - DNA, 261 bp, Zea mays
gtggcaaggaggatgccgctgatgaactgctcagggtggaatagctggcggtacgtgccagtgcgcacctccagctcttccaccctgagcagctcatcagtggcaaggaggatgccgctagcaatttcgcccgtggccactacacaattggcaaggagattgttgatctgtgccttgaccgtatccgaaagattgctgacaactgcaccggcctccagggcttcctggtcttcaatgcagttggtggtggcactggctctg

SEQ ID NO: 33991 - DNA, 266 bp, Zea mays
  unsure (1)..(266): unsure at all n locations
cgcgcactngggcaaccggtggtccaagatcgcgtcgcacctgccgggacgcacggacaacgagatcaagaaccactggaacacgcacatcaagaagaagctgaggaagatgggcatcgaccctgccacccacaagcccctccacccacagccagcagctcctcctccgactcagcaggagcaggacacgggcgggtcgcccgaggaggagggggagaaggccgacgcggtcatgatggcagcagctacgccgattatcgggcacg

SEQ ID NO: 33992 - DNA, 264 bp, Zea mays
cggacgcgtgggttgacaatggagacttttgagcaccttggattttttttgcagctctctgaaggaactccatataagccaagcagctaccttttttgcgaattcggatccagacatgcccgctgctcctgtacctgctgctttggtacatgattgggtcttgcagcatatagcttcagcattagaatttatggcagagaagactgtggcaaaagaaaacagccaacataatgcatttgatcctgatgtcacaatgtctgatgc

SEQ ID NO: 33993 - DNA, 267 bp, Zea mays
cccacgcgtccgctccaaacgagccctaccgggtgatactaggccatgtaagggacaagctgtacaacacacgcgagcgtgctcgccatctgctggcttctggagtttctgaaatttcagcggaatcgtcatttaccagtatcgaagagttccttgagccacttgagctgtgctacaaatcactgtgtgactgcggcgacaaggccatcgcggacgggagcctcctggacctcctgcgccaggtgttcacgttcgggctctccctgg

SEQ ID NO: 33994 - DNA, 282 bp, Zea mays
atgacgcggacggtgccgaagcggacgcggaggcggcgctgagctacggcctcacggtcgttgggaaggggcaggaggaagtattggcggagcaaggacagggtcctcgaggagtacaccaccttctcggtgaagcaggtggagacggcggcgaaggagaagtcagaggtcatggacgcgagggcagtggccgagatcacgccggaagaagctgtcggggataagaaggaggttgttgaggagaagtccacggcgttctggacgacaatagcgccgaacgtg

SEQ ID NO: 33995 - DNA, 273 bp, Zea mays
cggacgctgaggctgtacaactccatgttcccgagacacaaggagcggctggacaagaaggtggtggatgtggccagggaggtggccaaggtggaggtgccttcctaccgccgccatctggacgttgtggtggcctgtgaggatgacgatgacaatgacgtcgacatcccgcttgtgtctatttacttccggtaaagaggagggtgtcgctacctgtttacatgaaacctgtctgtgcgacgtttgtcagaaggatcgagtctataagttgcg

SEQ ID NO: 33996 - DNA, 277 bp, Zea mays
gtggtggccgtggcaccggaggtggtgcctcctctcaaggccgtggtgaaggactcgtgcgtcgatgctgacagcgacgagattggggctgtgaagccgcccaaggagcacgcagcagtcgccgcgcaccagttccggtggctggtgtctcaggtaagctaccctaagctcggggatttgtgttcgttagtcattccatgtgccctgacaaccttagatcattggtcaccagaagttaaggtacagggaatggtaagctttgtacacatagcgaaga

SEQ ID NO: 33997 - DNA, 274 bp, Zea mays
catttgagcgtgcaagctccttcgcctcgaaccctctcgcgcttggcttgctttcactctccagggccccactcccacctcgccgccgcagccatggcgatcacagcgccaactcccgacatcctcggcgagcgccagtccggccaggacgtccgcacgcagaacgtgatggcttgcggggcggtggccaacatcgtcaaatcctcgctcggccccgttggtctcgacaagatgctagtggacgatattggtgatgttacaatcactaatgatg

SEQ ID NO: 33998 - DNA, 272 bp, Zea mays
tgcgattgcagtaaggcgtgtgcgcaaggaagatttgcgacatgttgccaaagccactggtgcaactatggtgtctacttttgcggacatggaaggtgaagaaacattcgattcatcattccttggccatgctgatgaagttgtggaggaaagaattgctgacgatgatgttattctggtgaaaggcacaaagaacaccagcgcggtctctataatacttaggggcgcaaatgactacatgcttgatgagattgaacggtccttgcatgatg

SEQ ID NO: 33999 - DNA, 272 bp, Zea mays
ctttgcaagtatagtctctctgctaagcgaacggagcttcgaagctagtctcggcggctctagaagacgatgggcaaggacgacgtgatcgagagcggcgctggcggcggcgagttcgctgccaaggactacacggaccctcccccggcgccgctgatcgacgcggcggagctggggtcctggtcgctgtaccgcgccgtgatcgccgagttcatcgccacgctgctgttcctgtacatcacggtggccaccgtgatcgggtacaagcacca

SEQ ID NO: 34000 - DNA, 270 bp, Zea mays
cccacgcgtccgcggatctgagacgagacgagttaccatctcatcccaactccggaacgaacaagttaccatctcatcacaactccgtctcaccgaggtccgcaagaacggaacctgcccctggctcaggcctgatgggaagacccaggtgacagtcgagtaccgcaatgagggtggtgccatggtccccatccgtgtccacaccgtcctcatctccacccagcacgacgagacagtgaccaatgatgagatcgctgctgacctgaagga

SEQ ID NO: 34001 - DNA, 270 bp, Zea mays
cggacggtgggcaagattgtttgagtctatttgagaaaaaaccactggggttattgtctctgctggatgaacaatctactttccccaatgccacagatcttacttttgcaaacaagcttaagcaacatcttaactcgaattcttgcttcagaggagaaagagacaagggatttgctgtccgtcactatgcaggagaggtggcttatgatacttcgggttttctggagaagaatagagatttattgcacatggactcgattcagctccttg

SEQ ID NO: 34002 - DNA, 265 bp, Zea mays
cagacatctaggcaggtatttgtccagtcagaggccagggatgctgttcttcatttttaatccaggtgcaattggtgtactagttgcacatgacctagagaatggggaatttgtattgcaggttccattttatcctcctcagcagatgtttgaagattttagtgctaaggtatgcgagcaaattattttcaaattagtcggatgggagccagcagatgttcatgttttagacataaaaccatgggcaatgcatgctgaagttgca

SEQ ID NO: 34003 - DNA, 262 bp, Zea mays
  unsure (1)..(262): unsure at all n locations
cggacgcgtggngaaaaatgctagcggatgtaaccttgcagttgatatatggagtttaggatgcacagtcctaatgatggctacttcaaaaccaccatggagccaatatgaagggattgccgcaatgtttaagataggaaacagtaaggagcttccaccaataccggatcacctctcagaagaagggaaagacttcataaggcagtgcttgcaacgtgatccatccagccgtccaacagcagtggatcttctgcagcatcca

SEQ ID NO: 34004 - DNA, 264 bp, Zea mays
cccacgcgtccgggcggcgcgggcggacaaggagcaggcggaggaggagctgtgccaagccacaatgggtatcacacgcgactcgaatcacaagcaccgtgccaccggtggaaagcagaaggcctggaggaagaagcgaaagtatgagcttggtcgccagccggccaacaccaagttgtcaagcaataagacagtgaggagggtccgtgttcgtggaggtaacgtgaagtggagggctcttcgccttgatactggtaactactc

SEQ ID NO: 34005 - DNA, 262 bp, Zea mays
cggacggtgggcggagctcgacaaggacgaccgacgacgcacgcggagatccggcgtactgcaaattttgaaaactgaactgtaagatggcatcagcagagctttcccgtgaggaaaatgtgtacatggcgaactcgctgagcaggcggagaggtacgaggagatggttgagttcatggagaaggtagccaagactgttgactcggaggagctcactgtggaggagcgaaacctcttgtctgttgcatacaagaacgtcatt

SEQ ID NO: 34006 - DNA, 260 bp, Zea mays
ctgtgcttcagatggcacgtttaccaaatatcaaggttgcatcggcacttcttagtgctgcatttgtgtatgacatcttttgggtgttcatttcacctcttatattccatgaaagcgtcatgattgcagttgctcgtggtgataacactggggaatcaattcctatgctcctaaggataccccgcttctttgatccatggggtggttatgatatgataggctttggtgacattatcttccctggattgcttgttggattc

SEQ ID NO: 34007 - DNA, 261 bp, Zea mays
  unsure (1)..(261): unsure at all n locations
nccacgcgtccgcggacgcgtgggcgacgcgtggcggcgaagagcgcccagtcgcccaccaggatgaagtttgttgcagcctatctgcttgctgccctcgctgggaactccagcccctctgccgaggacttgacatccattctggagtcagttggctgtgaagttgacaatgaaaagatggaactccttctgtcccagctgagcggtaaggacattaccgagctcattgccgccggcagggagaagtttgcttcagtccca

SEQ ID NO: 34008 - DNA, 271 bp, Zea mays
ggacgctggcgccgtcgtctgctccgggctgctgttctgcgcctccacaaggctttggcctctgatgtaagatttaagcttaacctccaaccatgggcaaggagaagtcccacatcaacattgtggttattggccatgtcgactctggcaagtcaaccaccaccggccacctgatctacaagcttggaggcattgacaagcgtgtgattgagaggttcgagaaggaagccgctgaaatgaacaaacggtccttcaagtacgcttgggtgct

SEQ ID NO: 34009 - DNA, 278 bp, Zea mays
atttttctgtgggatgaacaagagatagaagaacttatggtcggccttgaaacctacctggttctacaatgtcctgtcaaaatataccagacatttccaaatctagattatttaaacattttccagtgtcttatgttcttgagtcagcttaaaagtgttgcaagcatcttggacaagctgatttatggaagcaaggatgatgctctccttgcataccaaactgcttttgatcttgctgaaaatgaaaactaggctttcctcctaaatgtgcggaatca

SEQ ID NO: 34010 - DNA, 277 bp, Zea mays
aaccattcctcccaacaccacctcgcctgcgatcttcgtagcctccgtcgcgtcgagcatcgatcatgtcggcctactgcggaaagtacaaggatgagctcatcaagaatgctgcctacattggcacccccggcaagggtatccttgctgctgatgagtccactggcaccattggcaagcgcctttccagcatcaatgtcgagaacgttgaggagaaccgccgtgccctccgtgagctcctattctgctgccctggtgctctccagtacatcagcgg

SEQ ID NO: 34011 - DNA, 276 bp, Zea mays
cggacgcgtggaagctgtgagtctgtggtgacaagtggtcagcacaaccaacagcaaaacccagcagttctgcatcctccacaaagggatgcgaacaacccagcaggtctactcgctattgctgaggagacattggcagagttcatgtccaaggcgactggaactgctgtcaactgggtgcaaatggttgggatgaagcctggtccggattccgttggaatcatcgctgtttcgcacaactgcagcggcgtacagcacgagcttgcggccttgtga

SEQ ID NO: 34012 - DNA, 273 bp, Zea mays
ggaatcactccggctgcacccgccgacgccgctcatgctcccgcacaaggcacagctcgaacgtcaagataggaggttacaacatccccaagggcgccaacgtgatggtgaacgtgtgggcggtggcgcgtgatcccaaggtctggagcaacccgctggagtacagaccggagcgcttcctggaggagaacatcgacatcaagggcagcgacttcagggtgctgccgttcggtgctggccggcgtgtgtgcccgggcgcgcactcggcatcaa

SEQ ID NO: 34013 - DNA, 277 bp, Zea mays
cgacggcaaggagcccaacaagggtgtcaaccctgatgaggctgttgcctttggtgccgctgtgcagggaagcatcttgagcggcgagggtggtgacgagaccaaagatatcctcctccttgatgtggctcccctcaccctgggtatcgagaccgtcggtggagtcatgaccaagttgatcccgaggaacactgtcatcccgaccaagaagtcgcaggtgttcaccacctaccaggaccagcagaccactgtctccatccaggtctttgagggtgag

SEQ ID NO: 34014 - DNA, 276 bp, Zea mays
cccacgcgtccgcccacgcgtccgagaagagatcccgcgccgtcctcttctccacctccacctccacccatggcggcctccaccttcagcggcgacgagacggcgcccttcttcggcttcctcggcgccgccgccgcgctcgtcttctcctgcatgggcgccgcctacgggacggccaagagcggcgtcggcgtcgcctccatgggcgtcatgcgccccgagctcgtcatgaagtccatcgtccccgtcgtcatggcgggagtactcggcatctac

SEQ ID NO: 34015 - DNA, 269 bp, Zea mays
gtgctggccgttgcgggcgaaccgaaaatcacgggcgcgagagatcggagcacggcatgtcggaggagcagttcctcgccgtggcggtggaagccgccaagagcgccggcgagattattcgcaagggattctaccagaccaagaacgtcgagcacaagggccaggtggatttggtgacggagacggacaaggcctgcgaggacctcatcttcaaccacctccggaagcacttcccggaccacaagttcatcggggaggaggagtcgcgg

SEQ ID NO: 34016 - DNA, 272 bp, Zea mays
gccccgaccaccggggagcaccggatggggaccaccattgtcggggtctgctacgagggtggcgtcgtcctcggcgctgattccagaaccagcactggaatgtatgtagccaaccgtgcttcagacaagattacccaattgacagacaatgtgtacgtttgtcgctctggatctgctgctgatacacaagtcatttcggactatatacgttatttcctccaccaacacacaatccagcttggacaaccagctactgttaaagttgcagctaa

SEQ ID NO: 34017 - DNA, 274 bp, Zea mays
cccacgcgtccgcggacgcgtgggccagtaggctctttaagaaaattgaattgaacgaatctattagatatgcctcatggtacccctgttgagacctggcttaatgacctactttgtttggatcttgcaaactccattccaaatatcagcaggctacctcacccaaaagaatgtgatctgtattatgtcaaccgggacacacttttctcatatcacaaggagagcgagatatttttacagcggatgatggcactttatgttgcttcccactaca

SEQ ID NO: 34018 - DNA, 273 bp, Zea mays
  unsure (1)..(273): unsure at all n locations
gccagccactccaaacacttgcgccgccactgcctcacaggtaaggccgccatggtctccggttcgggcgtgtgcgcgaacantgcgaggtggacgcgcgccaccacatgctgggccgtctctcctcgatcatagccaaggagctgctcaatgggcagaaggtggtcgtcgtccgctgcgaggagatctgcatgtcgggcggcctcgtccgtcagaagatgaagtacctccgcttcctccgcaagcggatgaacaccaagccgtcccacgggc

SEQ ID NO: 34019 - DNA, 274 bp, Zea mays
ctaaactactactacacacacacacacacacacacatcctacgcatcttctcgcagccatctttgtggaagcaaggcgggcaacatcgtgtggctagccagcaagggagagaaacaagcacaagcatggcctcaaaacctggccctctgagtcgctggccatggcaagatcttggaaactacaagtacgcgctggtggctccatgggcggtgcgcacacgtacaggttcgtgaggagcgggagcggggagcgggacctgctcgccttcgccgtg

SEQ ID NO: 34020 - DNA, 271 bp, Zea mays
ggttcctcgagaccatgaaggccatacagggggcactgatagtgtcctccagcattcagatcattctgggctacagccagctgtggggtattttctccagattcttcagcccagtggggatgactccagtggttgcgctgctcggatttggcctcttcgaaagaggtttccctgtggttgggagatgcgttgagattggcctgccaatgctgatcctctttgtcgtgctgtctcagtatctgaagaacatacagataaaagaaatccccat

SEQ ID NO: 34021 - DNA, 269 bp, Zea mays
cccacgcgtccgcccacgcgtccgcccacgcgtccgagatgttgcaaggctgcatctgcagttgtcagcagcaaaattagcagcagccacagcaagaggcaatagaggaatccatgtgctgtttgtgactgattgcttcccaattccaaacctcttctcttgcaaggacctagtgaaacgtgaaggcaatgcttggatgtacaaacctgacgtgaaggctctaaaggagaagctcaggctgcctgttggttcctgtgagcttgctgttc

SEQ ID NO: 34022 - DNA, 266 bp, Zea mays
ccccacctcccggtccggcagcagagagcgggggtgcagagagatcgagatccggaggccgcgagtgggagcgccaccaccagcgactgcggcaatggcgggcacggtgacggtcccggggtcgtcgaccccctccacgccgctgctcaaggacgagctcgacatcgtgatcccgacgatccgcaacctcgacttcctggagatgtggcggcccttcttccagccctaccacctcatcatcgtgcaggacggcgacccgaccaaga

SEQ ID NO: 34023 - DNA, 270 bp, Zea mays
gggcaaggaggggtcaagcaactgatagtcatagtcttgcagagagggtaagtggaatgtaacattttctgttgtaaaaatgctattgtatgaatttcaagtggtctaaaacggtaggagcatcacttctgtaagttacatacaacatgaacttgaccacttaaagatcttgttgttttaacaggcacgtcgtgagaaaataagtgaacgaatgaaagttctccaagatcttgtgcctggatgcaacaaggttatgtggcaagcatcagt

SEQ ID NO: 34024 - DNA, 270 bp, Zea mays
gtctacacggctatcttgaagccagacaatgaggtcaaaattttggtagatggggaagaaaagaagaaggcgaacttcctttctgctgatgattttgagccagcacttatcccatccaagaccattcctgaccctgatgacaagaagccggaggactgggatgagagagctaaaattcctgatccagatgcagtaaagcctgatgactgggatgaggatgccccgatggaaattgtggatgatgaagccaccaagcctgagggatggttg

SEQ ID NO: 34025 - DNA, 123 bp, Zea mays
cggacgcgtggcggacgcgtgggcggacgcgtgggcctggccgtgtcgaccgccgaggcgaggaacatatagaccacgacatcggagaagaaatacgacgcggtggtgcagccgcagaccttc

SEQ ID NO: 34026 - DNA, 279 bp, Zea mays
ctcccatccagccgccaccaggtgcagagtctttcgtcatctcttctccggcgaagaacccccagtcgcccaccagatcacttgttaaactttgttgaggggtgatggcggtttctttcgcaaacctcaactccgaggcagggcttaaaaagcttgatgagtaccttctcactcgcagctacatcactggctaccaagcttccaaggatgacttggctgtctacacttcgttttcggctgctccctcgtccaagtatatcaacgtagcaaggtggttta

SEQ ID NO: 34027 - DNA, 278 bp, Zea mays
acgatcggcacttctgtaaaagcagctgctgtttaccttggaactgcacttgtaaagcttgtttgcttggcaacattgctcaaagtacctgagaatgatagctttgatccctgtcaggagttattgaaagttgttattggattcatagatgcagttggactgtattttgccttgacacagttgacccacagaaacatatctcagaatcataagttccaggctgttggtcttggttgggcttttgctgcttcagttctgcaccgactggcacctctctg

SEQ ID NO: 34028 - DNA, 277 bp, Zea mays
ggctgggttcgccggcgacgacgccccgagggccgtcttccccagcatcgtggggcgcccgcgccacactggtgtcatggtcgggatggggcagaaggacgcctacgtcggtgacgaggcgcagtccaagaggggtatcctgaccctcaagtaccccatcgagcacgggatcgtcagcaactgggacgacatggagaagatctggcatcacaccttctacaacgagctccgcgtggctcccgaggagcaccccgtcctcctcaccgaggcgcccctg

SEQ ID NO: 34029 - DNA, 283 bp, Zea mays
gcggcggcgcgggcggacaaggagcaggcggaggaggagctgtgccaagccacaatgggtatctcgcgtgactcgatgcacaagcgccgggccaccggtggaaagcagaaggcctggaggaagaagcgaaagtatgagcttggtcgccagccagccaacaccaagttgtcaagcaataagacagtgaggagggtccgtgttcgtggaggtaatgtgaaatggagggctcttcgccttgatactggtaactactcatggggaagtgaagctgttacccgcaaga

SEQ ID NO: 34030 - DNA, 283 bp, Zea mays
cttctgcgccgccacccactacaggtaaggaagaggaggagggcaggatgtcgcaccgtaagttcgagcacccgaggcacggctccctcggcttccttcccaggaagcgctcctcccgccaccgcggcaaggtgaagtcatttcccagggatgaccccaagaagccttgccatctcactgccttccttggctacaaggctggcatgactcacattgtccgtgaggttgagaagccaggatccaaactccataagaaggaaacttgtgaggctgttaccatcat

SEQ ID NO: 34031 - DNA, 282 bp, Zea mays
atgatgtggcattatcaattggtgatggtttgaggcctggttccatttatgatgcaaatgatagtgcacagtttgcagaactgctgactcaaggtgaactaacacgtcgagcatgggcgaaagatgtgcaggtaatgaatgaaggcccgggtcacatcccaatgcataaaattcctgaaaacatggagaaacagttggagtggtgtaatgaagcgcctttctatacattgggtcctttgacaactgatattgcacctggttatgatcacatcacttcagcca

SEQ ID NO: 34032 - DNA, 280 bp, Zea mays
tcaaaacttgcgaagagagtgatagcatgccttgatgttcgttcaaatgataaaggagatcttgtggtaacaaaaggcgatcaatatgatgtaagagatcatactagcagcaaagaggtaagaaaccttggcaagccagtcgatttagcaagccagtactacatagacggtgctgatgaggtcagcttcttgaatataactggtttccgtgactttccattgggtgatttgccaatgctagaggtactgcgttgtgcctctgaaaaggtttttgtgccac

SEQ ID NO: 34033 - DNA, 278 bp, Zea mays
cggacgcgtggaagcctcagatctcagtgaccagcgccgccgcttcgttcgtgtcgaggggagaagaggcaatggcggcgagcgagggcgtgctcctggggatgggcaaccccctcctcgacatctccgccgttgtcgatgacgccttcctagcaaagtatgacatcaagctgaacaatgccattctcgctgaggagaagcacttgcctatgtatgatgagttggctagcaacagcaatgttgaatatattgctggaggagcccccagaactctatca

SEQ ID NO: 34034 - DNA, 273 bp, Zea mays
gcagtttctcgttatgcccaagtcatgaagactgtaagggaaaaggcggatcttctctctgattctcaaaggattaaatataccattgagaccttcaccaagggcatccctgatgcacggacttacttgaatactcttcaacagctcagaataaagagtggtcttatagatcatcttggaattgagcctttgatgatggaagctcttgagaagattgagaaggacattaagaaaccacttttgaggagcgacaagaagaacatggccaccctc

SEQ ID NO: 34035 - DNA, 275 bp, Zea mays
cccacgcgtccgtcttggcttgcttttgctgcccagaaggttgttgaggttgatgctcttgctaaggcattggctggtcaaaaggatgaggcttacttcgcagcaaatgctgctgctcaggcctcgaggaaatcctcaccccgtgtgaccaatgaagaagtccagaaggctgctgctgctctcaagggctctgaccaccgccgtgggaccaacgttagtgctagattggatgcccagcagaagaagcttaacctccccatccttcccaccactac

SEQ ID NO: 34036 - DNA, 276 bp, Zea mays
aggaaaaggacattgatcccctgaccgataaagatgggaactcacatgtctgcaaagtttgtttcgaatctgcagccgctgcagtattgcttccttgccggcatttctgcttgtgcaagccttgctcgcttgcctgctcggagtgccctctgtgccgcacaagaatcgcagacaggataatcaccttcacgtgagctgcgttctagcttcaggtcattctgaagcacacatcctcttgtaaaatcttcaatggtatatgtttctctttttccttag

SEQ ID NO: 34037 - DNA, 277 bp, Zea mays
cggacgcgtgggcggacgcgtgggtgactgtggttccatttacgaaacacctgcttcatctggagtatcacactctgttggagagaatggccttcaagagcacagtgaatcggactcacttacggttagttcgtgaggtagaagccattggaggaaatgtctctgcatcagcttcccgtgaacaaatgagctatacctatgatgcattgaagagctatacaccagaaatggttgaagttctcattgacagtgtgaggaatccagcattcctcgattg

SEQ ID NO: 34038 - DNA, 274 bp, Zea mays
gtggaaaagtggccctatgaagctgctgctctagcatttgaggcaattccaaggactttggcccaaaattgcggtttgaatgttattaggataatgacacaacttcaagaaaagcatgctaatggtgaaaatgcgtgggttggcattgatggaaggactggtgatattgtcgatatgaaagagcgaaagatctgggattcctacagtgttaaagcacaaacgttcaagacagcaattgaggctgcttgcatgcttttgagaatcgatgacattg

SEQ ID NO: 34039 - DNA, 274 bp, Zea mays
gttagattctacaaggaggaagagaagaacgaacctgagtttgctaagaagctagcatctgttgctgacctttatgtcaatgatgcttttggcacggcacacagagctcatgcttcaaccgaaggagttaccaagtatttgaagcctgctgttgctggcttcctcatgcagaaggaacttgactaccttgttggagctgttgccaacccaaagaagccatttgccgctattgttggtggatccaaggtctcaagtaagattggtgtcattgagc

SEQ ID NO: 34040 - DNA, 275 bp, Zea mays
caaggaggagaacgtcacccttggacccactgtccgtgaaggagagtatgtctttggtgttgctcacatctttgcatccttcaatgacaccttcattcatatcactgatttgtctgggagggaaactctggttcggatcaccggtggcatgaaggtgaaggctgaccgtgacgagtcgtcaccttacgctgctatgcttgctgctcaagatgtcgcacagcgctgcaaggagcttggcattactgcactgcacattaagcttcgtgccaccggag

SEQ ID NO: 34041 - DNA, 268 bp, Zea mays
ggaagctgttgggcggcgtgaccatcgctcacggcggtgtgctccccaatatcaaacctgttctgctgcccaagaagacggcggagaaggcgtccagtggcgggagcaaggaggcaaagtcgcccaagaaggccgctaagtcccccaagaaggcatagactgactgtccggtgtgatctgatgtttagcagtaccttgttaccagtatgcggtgatgcgtaggctgtagatgggacgaatgtgctggtgtgtgtatgtgtcctgctgc

SEQ ID NO: 34042 - DNA, 266 bp, Zea mays
cggacgctgggccgcgagtccgcgactccgcaccaagcaaatcccctgcccccaaaatattgctagggattacaggggaggaaaatccaggcgcgcaggcctggcaatccgttcgtcggagaggccatgagctcggcgcaggatccgttctacatcgtccgggaggagatccaggagtcgattgataaattgcaaagtaacttccaccgctgggagcaaactgcttcaaacacaggagaatatgttcatctgacaaaggagcttct

SEQ ID NO: 34043 - DNA, 267 bp, Zea mays
cggacgcgtgggcggacgcgtgggggaatctgatcgacacactgatgtccttgattcgataacgacacatctatggaattggctcactatgctgaatggtctgaggagaaacgccaggattggctgttgtctgaactgaggggcaaacgtccattgtttggttcagatcttcctcagactgaagagactgctgatgttttaggcacatttcatgtccttgcagagcttcctgcagattgctttggcgcgtatatcatctctatggca

SEQ ID NO: 34044 - DNA, 268 bp, Zea mays
aacgtcggttccaagcagctccaggacatccgccggggcctcaggggcgactcggtggtgctcatggggaagaacacgctcatcaggcgttgcatcaaggtgtacgccgagaagaccggtaaccacacctttgacccgctcatggacctcctggtcggcaacgtaggcctcatcttcaccaagggagacctcaaggaggtgcgcgaggaggtcgccaagtacaaggtgggggctcctgctcgtgttggtctggttgctccagttgatg

SEQ ID NO: 34045 - DNA, 271 bp, Zea mays
agggctgctaagaaagtatccgctattctttcatgggaaaacacaaagaaagcaaacatagaagctgaactgaagaagattgaggaacaactggaaaagaagaaggctgaatatgcagagaagatgaagaacaaggttgcaatgatacacaaggaagccgaagagaagcgagcgatggtggaggcaaaacgcggtgaggaggtcctgaaggccgaggagatggctgccaagtaccgggccaccggccacgctcctaagaagctcatcggtt

SEQ ID NO: 34046 - DNA, 270 bp, Zea mays
cgagttactcatgcccacgatatcgtgcctcacctgccaccatacttctcattcttcccacagaagacctaccatcacttcccaagagaggtatggatccataatattggactaggaaccctagtgtaccccgtggaaaagatctgtgacgattctggtgaagaccctacatgctgcagatcagtaagtggaagcagcgtgcgagaccatatatactatcttggcgtcagtatgcatgcagaagactggagcagctgcagaatcgtcatg

SEQ ID NO: 34047 - DNA, 269 bp, Zea mays
agaattttccgtgttgactatgggcatcaagaagctgctaccaagtttgggaaggatccaagaacttacgaagtcttgacaaagcgttttattggcgatggaaatggcaaggtgaaggcccttgaggtagtgcgtgtgaagtgggagaaagtagatggaagatttcaactcaaggagatggaaggatcagaagagattattgaggctgatctcgtcctcctagctatgggattcttgggtcctgaagcgacaatagctgagaaattggg

SEQ ID NO: 34048 - DNA, 267 bp, Zea mays
atctgattatcttggcaagggtgttcttaaggctgtcagcaacgtaaacaacattattggaccagcgattgttggaaaggaccccactgagcaggttgagattgacaacttcatggtccaacagcttgatggaacctccaatgagtggggctggtgcaaacagaagcttggagcaaatgccatccttgcggtttcacttgctgtgtgcaaagctggagctatggtgaagaagattcctctttaccagcacatcgcaaatcttgctgg

SEQ ID NO: 34049 - DNA, 272 bp, Zea mays
cccacgcgtccgcgcggagatcgagagacaagagagggaaggcggcggcttgccggcttaagccttctctccctccgtcgtcgcctcctccttacgtccgcttcttcctcctgaatggagacgtcagcgccgcccaatgcccccgctccgccggcgcagcacggaggcggttgccggacttccagcagtcagtgcggctcaagtacgtgaagctggggtaccactacctcatatcccacgggatgtacctgctgctgtcgccgctgatggcg

SEQ ID NO: 34050 - DNA, 262 bp, Zea mays
cctcgatctccccgttcctcgtgttccgacggagggtggcgggcgactaatggggacgggggcggggagcgcgcgggctctggccgtggcgttcgccgtctcgcttctcgcctgctctggcgccgtcgctgtcgccagggcgcaggacaccgagcggatcgaaggaagtgctggtgatgtgctcgaagacgatcccgttgggaggctcaaggtgtatgtctacgagttgccgaccaagtacaacaagaagatggtggctaaa

SEQ ID NO: 34051 - DNA, 260 bp, Zea mays
gtcacaaggttcgagttcgtcaccgtctagtacgactgtgcgagggaggaagaggcgaggagaagatgcagatcttcgtgaagaccctgacggggaagaccatcaccctcgaggtggagagcagcgagtaccgtcgacaacgtcaaggccaaaatccaggacaaggaagggattcccccagatcaacagcgactgatattcgctggcaagcagctggaggatggacgcacgctggctgactacaacatccaaaaggagtc

SEQ ID NO: 34052 - DNA, 265 bp, Zea mays
cccacgcgtccgctaggttttttgattttagccgccgccgctgctcatctcacatccctcgagaagacgcctgctcctcgccgatcgatacgatggccgtcttctccgacctccacaccgccgacggcctcaagtccctcgaggctcacctcgccggcaaaacctatgtgtctggtgactccattactaaggatgacattaaggtcttcgccgcggtgccgtcgaagcctggcgctgagtttcctaatgccgcccgctggtacga

SEQ ID NO: 34053 - DNA, 261 bp, Zea mays
atcatccttcgtaagacatcatctgagtgccaactgcctgatgtctgccttgcagatattccagttaacctaccacaagaagaaaacatctctgtggcgaaagtagctattaagcagaggcctcaaaagaatctccatggcatgaacagctcaagtgctcactcctttagagacaatcaccagaaaagcgttgaagaaagaaaagaggaatacaacaaagcacgagcgcgtatatttaacaacggcgtcagtaatgctact

SEQ ID NO: 34054 - DNA, 258 bp, Zea mays
gaactgttgaatttgttgctacgaaggaatttctggttcgtgatccaatgcctgctgtatacttcttccttattgatgtctccatgaatgctatacaaactggtgcaactgctgcagcttgcagtgctatttcccagtctatttcagatctaccagaaggtcctcggacaatggttggaattgcaacatttgattctgctattcacttctacagtcttaaacgtgctcagcagcagcctttgatgctcatcgttcctg

SEQ ID NO: 34055 - DNA, 258 bp, Zea mays
agcggagaacgaccccacggtgacgacatgcttgctctgctggactgttactctgagtaagactgctgcttctgctgagcagccgaagagggcccctaagctcaatgaaaggatcctctcttctctgtccaggaggtccgtagctgctcatccatggcatgatcttgagatcggtcctgatgctcctgctgttttcaatgttgttgttgagatcacaaagggaagcaaagttaaatatgagcttgacaagaaaactgg

SEQ ID NO: 34056 - DNA, 256 bp, Zea mays
cccgctctcgagggccgtgacctgattgctagagcaaagactggaactggaaagacactggcctttggcatacccatgatcaagcaattaatcgagcaagacgatggtcggattacaaggagaggtcgtactcctcgggttctggttctagcacctaccagagagttagccaaacaagtcgagaaggaaataaaggaatcagcacccaagctcggcacagtgtgtgtttatggcggtgtctcatataatgtccagc

SEQ ID NO: 34057 - DNA, 258 bp, Zea mays
cccacgcgtccgccgacgggggtgcggctagctcaaccatggcggactccaaggccacctcggcggtcaccctccgcactcgcaagttcatgaccaaccgcctgctggcccgcaaacaatttgtgcttgaggttatccaccccggccgcgccaacgtctccaaggcggagttgaaggagaggcttgccaagatgtacgaggtgaaggaccccaacaccatcttcgtcttcaagttccgcacccacttcggtggaggca

SEQ ID NO: 34058 - DNA, 260 bp, Zea mays
cggagttcctcaaggctgagatcagagcttcttctggggttgaccagtacacaccgccggcattgctgggaagtgccaccacttggcaccggcctcggagcgtggaggagtactataagctggtagattctgagttgtttgaccaaagtaaaacaaaggtggttgtggggaacacagcttcaggcgtttacagagaaacagaggtgtatgataggtacatcgacctcagatgcatcccggagctgaattcggttagtaag

SEQ ID NO: 34059 - DNA, 258 bp, Zea mays
ctcaagtgcgagaactgcggggaggtcaccgccaagtccacctacgtcaccctcagcgagcaagtcgacctgcccaaaggacacggcgccgctcacctcgtccagaagtgcaagctttgtgggagagatggaacaattgtgatgattcctggtcaggggacaccacttactattgagcagagccagaaagaggagaagacttgtttgatggtgtttgactgcagaggctatgaacctgttgagttttcctttggcact

SEQ ID NO: 34060 - DNA, 256 bp, Zea mays
gcctaaaaagcctaaggtgacgatcgccgaggctgccgccctgatcgacgccgagaacctcgcagcgcacctcgtcgagatctcgtcatcatatgagaatcaacaggacattcaactcatgaggtttgctgattactttggccgggcatttgtagctgtaagcgcatcccaatttgcatgggcaaagatgttcaaggaatcaacagtgtctaagatggttgacatcccactgtgccatattcctgaggctgtcatc

SEQ ID NO: 34061 - DNA, 255 bp, Zea mays
atacagctcatggagctcggcggtaccgcaatgtcgctgctgctgctgctgctcgtgctcgccgcgtcgccattgcagcaggccagggcggttggcggcggcaggccgcgggtgccggccatcctggtgttcggcgactccatcgtggacacgggcaacaacaacgccgtcctcacgctcaccaagtccaacttcaggccatacggcaaggacctcaacggcggcgtccccaccggacgcttctccaacggcagg

SEQ ID NO: 34062 - DNA, 251 bp, Zea mays
tgcaaatgttgccctgaaaataaatgttaaggttgggggaaggaatactgtacttgttgatgctttggcaaggagaatcccccttgtcagtgacgtagctactattatctttggtgctgatgtgacccatccccatcctggggaagattctagtccttccattgcagctgtggttgcttctcaagactggcctgaggttacgaagtatgcaggattagtgagtgctcaaacccatcgccaagaattgatac

SEQ ID NO: 34063 - DNA, 254 bp, Zea mays
gtgagccatctttttattggagtactatactgccttattggctggagcttcggcatcccaaagcgcgcgccaatcaactcaacacttctgaagcagcttgttccagttgcggtttgccatgccattggccatgtaacaagcactgtgtcatttgctgctgtagctgtgtcatttgcccacactattaaagctctcgagccattcttcaatgcggctgcttcccagtttatccttggacaaccagttccattgac

SEQ ID NO: 34064 - DNA, 277 bp, Zea mays
atgggctaatacctgctggttctggtccaatgggcacgagagctggctcatattctgatgaagattctcagaagaagtctgcaggagctggccgtgataatgattgggagtgtccaaattgccacaacatcaactttggcttccgcacagtctgtaatatgagaaagtgcaacacacctagacctgaaaaccagggatctaagcctgatggtttaagagggtcaaaaccaaagacaccagagggcagttggaagtgtgagcagtgcaataacataaa

SEQ ID NO: 34065 - DNA, 275 bp, Zea mays
acccaatcagggatgaggatgctaagttcaagctttgcaaggttaggtctgttcagtttgggcagaagggcatcccttatctgaacacgtatgacggccgcaccatccgctaccctgaccccctcatcaaggccaacgacaccatcaagatcgatctggagaccaacaagattgtggacttcatcaagtttgatgttggcaacgtcgtcatggtgactggcggaaggaacactggccgcgtgggtgttatcaagaacagggagaagcacaagggc

SEQ ID NO: 34066 - DNA, 270 bp, Zea mays
cgcttcctgctctcttggcttgctgcttgccctcggagcagtgccttccgccgccgccgccgccgcctgttgtgagaaggagaggccggggctgggaggagatgagcgtgaccaagttcatcaagtgcgtcacggtgggggacggcgcggtgggcaagacctgcatgctcatctgctacaccagcaacaagttccccacggattacatccccacggtgttcgacaacttcagcgccaacgtctccgtggacggcagcatcgtcaacctgg

SEQ ID NO: 34067 - DNA, 271 bp, Zea mays
aaaggaaccaattctagagcatgtcacagctgcacttgtcaatcgttatcacctaaaatttacaactcgcgatgtttcttccctctggtttctttgtaagcaggaagcatctttgttgaatacaacaaatcaagcttgtgggctttttaatgaagctgaggttcgttttctggagtggacagatgatttggagggttttgttctaaaaggctatggtgagtcaattaactacaggatgggactgccattgctcaaggatgttgtccagtca

SEQ ID NO: 34068 - DNA, 272 bp, Zea mays
tcctcttctgtcccgtctccagctcttcgttcgttcccctctcgccgcccgtctcccccgcggtcgaggagccgccaatagcaaggagagggtttcctcctccctccacggctccaccgagctccccgatccctccgccccaaatcccacacacccggttggccaccgcctcgccatggatttggatctgtggatctccaaggtcaaggagggtcagcacctcgccgagcacgagcttcagtccctctgcgaatatgtgaaggagatcctca

SEQ ID NO: 34069 - DNA, 269 bp, Zea mays
agaaggttgtcatctctgctcctagcaaggatgcccccatgtttgtcgttggtgtcaacgagaaggagtacaagtctgacattaacattgtctccaatgctagctgcacaaccaactgccttgctcctcttgctaaggtcatcaatgacaagttcggtatcgttgagggtctgatgaccactgtccatgccatcactgctacccagaagactgttgatgggccctcatctaaggactggaggggtggaagggctgctagtttcaacatc

SEQ ID NO: 34070 - DNA, 267 bp, Zea mays
cgagggcttcagagcagtcctcgacgagatgtccagagacccgaagtcgtccacagaaggagggagggcgctgtaccgggacctcgcgtccgtgtacgtcgacgcgggccagcttctgggctctgtgaattcgccgccggtggaggccggggaggcgaggatcagccagagggaatggatcacctacgacttcctcgtcatcttgcacgccggcctcggcaggccagagaggataagggacatctggaggtccatggtggcgacctc

SEQ ID NO: 34071 - DNA, 273 bp, Zea mays
cccacgcgtccgtcctcaaccaaattcaaagtcacagcggcgaaactctcggcgatgtctggccgcggcaagggcgggaagggtctgggcaagggcggcgccaagcgccaccgcaaggtgctgcgtgacaacatccagggcatcaccaagccggcgatccgcaggttggcgaggaggggcggcgtcaagcgcatctccgggctcatctacgaggagacccgcggcgtgctcaagatcttcctcgagaacgtcatcagcgacgccgtcacctac

SEQ ID NO: 34072 - DNA, 271 bp, Zea mays
gagccgtacctggtgcagacgaacctgtacatcgacggcgtgggcaaccgggagcagcgcatcgacctgtggttcgaccccacggccgacttccacacgtacgccgtgctgtggaaccccagccaggtggtgttcatggtggacgacacgcccatccgggtgtacgagaacgccacgctgcaccaaggccacggccacggccaccaccggcacggcggcgctgcggcggaggccaacggcaccaacaccaccaccacgacgttggctgctg

SEQ ID NO: 34073 - DNA, 270 bp, Zea mays
tgcattccttcagttcagtagtgtgctctgacagtgagatggcgagcgtgaaggttttcgggtcacccacctcggcggaggtcgcccgcgtgctcatgtgcctcttcgagaaggaggtggagttccagctgatccgcgtcgacgcctaccgcggcaccaagcgcatgccccagtacctcaagctgcagccgcaaggcgaggcgctcaccttcgaggacgagagcctcaccctctccgactccagggggatcctccgccacatctcccaca

SEQ ID NO: 34074 - DNA, 268 bp, Zea mays
aaaccacacaccccacctaccccggccggaccggcaggcagcacagcatggacctcgccctcctagagaaggccctgctgggcctgttcgccgcggctgtggtggccatcgccgtggccaagctgaccggcaagcggtaccgcctcccaccggggcccccgggcgcccccgtggtgggaaactggctgcaggtgggcgacgacctgaaccaccgcaacctgatggccatggcgaacggttcggcgacatcttcctgctgcgcatgggc

SEQ ID NO: 34075 - DNA, 265 bp, Zea mays
atgctccagaggtacgagagctgattgttaggtgcgtctcacagatggttctgagtcgggttaataatataaagtctggttggaagggtgtttttatggtttttacttttgctgcagctgatgatacaagaagtactgtcctattggcatttgagacggtggaaaaaattgttcgagattattttcatcacataactgaaacagagacaacggcatttactgattgtgtgacttgtcttattgcatttacaagtagtcaatttaa

SEQ ID NO: 34076 - DNA, 267 bp, Zea mays
gcttcccaccgatccatttcagccgccgccgcgcgtacaagcaggagcagcaaggatgccggctggccacgggctgcgctcgcggacgcgcgacctgttcgcgcgccccttccgcaagaagggctacatcccgctcaccacctacctccgcacctacaagatcggcgactacgtcgacgtcaaggtgaacggcgccgtccacaaggggatgccgcacaagttctaccacggccgcaccggtcgcgtctggaacgtcaccaagcgcgc

SEQ ID NO: 34077 - DNA, 264 bp, Zea mays
gagattgtgaaggaagtctcttcctacctgaagaaggttggatacaaccctgataagatccacttcgttccaatctctggttttgaaggtgacaacatgattgagaggtccaccaaccttgactggtacaagggcccaaccctacttgaggctctggacttgatcaatgagccaaagaggccttcagacaagcccctgcgtctcccccttcaggatgtgtacaagattggtggtattggaactgtccctgttggacgtgttgag

SEQ ID NO: 34078 - DNA, 265 bp, Zea mays
gccaagaaggagatgaggattctcatggtcgggctcgatgccgccggtaagaccaccatcctctacaagctcaagctcggcgagatcgtcaccaccatccccactatcggattcaatgttgaaactgttgagtataagaacattagcttcactgtttgggatgttggtggccaggacaagatcaggcccctgtggaggcactactttcagaacacacagggacttatttttgttgtagacagcaacgacagggaacgtgttgttg

SEQ ID NO: 34079 - DNA, 270 bp, Zea mays
cccacgcgtccggaacagccaagcccgactacgcaacctgtgtgaagatctccactgatgcttccatcaaggagatgattcctccgggcgctctggtcatgctgactcccctcatcgttggaaccctctttggcgtcgagactctctccggcgttcttgctggtgccctggtttctggagtgcagatcgccatctctgcttccaacaccggcggtgcatgggacaatgccaagaagtacatcgaggctggtgccagcgagcacgcgagga

SEQ ID NO: 34080 - DNA, 260 bp, Zea mays
cggacgcgtgggcggacgcgtgggctcgagcgtctgtgccgacgtgtccgaggaccatccgaacatcaagaaagggcagatcgaaggctacggcgagcgcgagcaacgcagggccaaggtgcacctgaggtgcgcgcacgggcagtccatctccgcgatcagattcgcgagcttcgggacgcctgtgggcacctgcggcaacttccagcagggaggctgccactcggctagctctcacgctgtgctagagaagagatgca

SEQ ID NO: 34081 - DNA, 261 bp, Zea mays
attttgaatagcagagaggccagagaatttgccagtggggcactagctggtgctatgtcaaaggctattcttgcacctctatagactatcaggacaagaatgattgtaggagtaggacctaggcacatttttggtagtttggtggatatcatccaacaaaacgggtggcaagggctttgggcagggaatacaatcaacatgctccgcatcattccaacccaagcagtcgaactcggaacatttgaatgcgtcaagaggagc

SEQ ID NO: 34082 - DNA, 261 bp, Zea mays
gatccagcgaggcggcgaccctccctcctccccttgcttcgctcgtccagccctgaccacccgcatccccgtcagtcatggcagcggcagcaggcggaggcgcggtgcgtgcgctgtcccagaaggagcaggacatacagatgatgctcgccgccgacgtccaccttggcaccaagaactgcgatttccagatggagcgctatgcctttaagcgccgcaccgacggcatctacatcatcaaccttggcaagacatgggaga

SEQ ID NO: 34083 - DNA, 259 bp, Zea mays
gagaaggtgattggatatgccagaaccctaattgtggaaatctcaattttgctcggcgaactcactgtaacaactgcaacaagttccgctattcagcacgtgaagcatatgaacctaggcgcagcctcccttcaggagttaccccagccctccacgagggcctccaaggatggttggtccacctggtgatcgagcccctgcaagagagatggccaggtacagatccccacctcatggttggggagcaagtgatcccagg

SEQ ID NO: 34084 - DNA, 257 bp, Zea mays
cccacacgtccgcccacgcgtccgcagcacaaggagtacaagctcaaacaatagcgaacttttaccttgcatttgaatcaaatttgagcatcattcctgtgattaacaagattgatcaaccgactgctgatccagataatgtaaaggatcaattgaagaggttatttgatattgatccaagtgaagctctgcttacttctgccaagactggtagaggccttgaacaggtattgcctgctgttattgaacgcatacct

SEQ ID NO: 34085 - DNA, 261 bp, Zea mays
gggttggcttctcctccccctccggttcgggttcgggttcgtgaggttctccggggttcggtttcgtgggtgatcggatcgagatggcggcgtcggatgttgagtaccgctgcttcgtcggcggcctcgcctggtccacggacgaccactccctccacaacgccttcagcacctacggcgaggtcctcgagtccaagatcatcctcgatcgggagacgcagaggtcccgcggcttcggcttcgtcaccttctccacggagg

SEQ ID NO: 34086 - DNA, 261 bp, Zea mays
cagatttgttgtgcgatttaccaacaaggacatcactgcacaaatcatatctgctagtatagcgggtgatatggttcttgcttctgcctactctcatgagttgccacgatatggtcttgaagttggtctgaccaactatgcagctgcctactgcactggacttctgttggctcgccgtgtgctaaagattcgtggtttggataaggagtatgaagggcatgttgaaggcactggtgaagacttctctgttgagccagctga

SEQ ID NO: 34087 - DNA, 265 bp, Zea mays
cgatcccttcacaaagcgccgccgtcgccccatcgaacatggctccgaagaaggataaggccccgcccccgtcgtcgaagcccgccaagtccggcggtggcaagcagaagaagaagaagtggagcaagggaaagctaaaggagaaggtgaacaacgcggtgctgttcgaccaggctacctacgacaagctgctctctgaggtgcccaagtacaagcagatcaccccctccatcctatccgagcgcctcaggatcaatggctccct

SEQ ID NO: 34088 - DNA, 264 bp, Zea mays
gatgactgtaaccctagactttcctgtttcggcctcatgaagaacagtcgggatggaaaaagttacagtaccaatttggcatttacgcctccagaatacatgaggactggacgtatcactcctgaaagtgtcatatacagctttggaaccttgctgattgatgttcttagtgggaagcatattcctccgagccatgcccttgacctgattcgggaccgaaacttcaatatgctcttagactcatgtttagagggtcaattttca

SEQ ID NO: 34089 - DNA, 266 bp, Zea mays
cgattgtctcagagaggttgggcagcaccatcagcttctcagagtgtggagggattgagattgaggagaactgggacaaggttaagactattttccttcctactgagaagccaatgacgtctgattcatgtgctcctttgattgcaacccttccattggaggcacgcggaaaaattggtgacttcattaaaggagtgtttgccgtcttcctagacttggatttctcatttcttgagatgaatccgttcaccatggtcaatggggag

SEQ ID NO: 34090 - DNA, 272 bp, Zea mays
gccatctcggaggggaagctggccgttgtccttttggccggtggtcagggtactcgactgggaagctcagatcctaagggatgtttcaatatcggacttccatcaggaaagtcacttttccagctccaagctgaaaggattctgtgcgttcaaaagctggctgctcaatctagcgaaagcccgagtaacactgtgccgatccactggtacataatgacaagcccctttacagatgctgccaccgccaaattctttgaaacccgtagatattt

SEQ ID NO: 34091 - DNA, 261 bp, Zea mays
ccaacaaacatttgatcttgaaggggacagtggaagcctcataatcttaacaggacaagacggtgagaagccgcaacctataggaattatatggggtggtacagctaaccggggaaggttgaaacttaaaagtggccagggtccggagaactggacaagtggagttgatcttggccgccttcttgatctcttggagctagatctgatcacaacaagtgaagggctacaagctgccttggaagaacaaaggattactctagc

SEQ ID NO: 34092 - DNA, 259 bp, Zea mays
cgagtctcgtccacccgtcatcctcctagctcctctactcgccagtcgccatgggcaagattaagatcggaatcaacggcttcggaaggatcggcaggctcgtggccagggtcgccctccagagcgaggatgtcgagctcgtcgccgtcaacgaccccttcatcaccacggactacatgacctacatgttcaagtacgacaccgtccacggccactggaagcacagcgacatcacactcaaggactccaagacccttct

SEQ ID NO: 34093 - DNA, 259 bp, Zea mays
gccagattctgataacgaaacaaactggtccagagggaaagattgtgagcaaggtctacttgtgtgagaaactatctcttactaatgagatgtactttgccatcacccttgataggaaaactgctggtccgctcattattgcttgcagcaagggaggaaccagtattgaagatcttgcggagaagtatcctgatatgattattaaggttcctattgatgtatttaaaggaatcacagatgaggatgcagctaaagttgt

SEQ ID NO: 34094 - DNA, 257 bp, Zea mays
aagtaatccgcaacaagcagactgggcagtccgaagatacgggttcgtcgagttctacagccacgctgcggctgaaaaagttctcgaagggttttctggccatatcatgccgaacaccgaccagcctttcaggctaaactgggcatcgtttagcatgggagacaggcgctcggattctgcctcggaccattccatattcgtaggcgaccttgcctctgacgtcaatgacgccacgctgctggaggccttctccagca

SEQ ID NO: 34095 - DNA, 258 bp, Zea mays
gagttcttccaggacattgtcatagtgccttttatcgatagctatgacctcgttgtgttgaagaccgttgccattgccgagtatggggtgcgcgtcgtccctgcaaagtacgtaatgaaatgcgacgacgacacattcgtgaggatcgattcggtactggatcaagtgaagaatgttggaaacgataaaagcgtttacgtagggagtataaactacttccatcgaccactaagatctggcaagtgggcagtaacgtac

SEQ ID NO: 34096 - DNA, 260 bp, Zea mays
gtggccccatcctagacaacgttgctgtcaagaagctcttcactccggacaaaccaaaggataacgtggtgctgaatggagactttgaggagggcccttggatgttcccgaacaccagctttggcgtgctgctcccaactaaccttgatgagcagacatctgccatacctggctggatgatcgagtcaaaccgcgctgtccgctacatcgattctgatcagtacaaggttccccaggggaagcgtgccattgagcttctg

SEQ ID NO: 34097 - DNA, 258 bp, Zea mays
gacaactggtggaatcttgctccctacgactgctcagtccagacctcaaggtggcgaggtagttgctgttggagaaggaaggataattggggataagaaagttgatgtcagcattcaggttggagctcaggttgtgtattctaagtacgctggaaccgaggtcgcgttgaacgatcacagccatctggttctcaaagaggatgacgttataggtatcttagaaactgatgacgtgaaagacatgaagcctctgaacga

SEQ ID NO: 34098 - DNA, 260 bp, Zea mays
ccccgctcctctccctgctcgctgcacagggactcggcctccgggacggcagacccacaagcgccacacgctcgagactgtgccgtgggagtgggaggttcctcaggtgctgagcagtcgccggcggcgacgccggtgtcggagatgaaggagagaagcggctccagggcggcggtggacgagcgctacgcgcagtggaagtcgctcatccccgtcctctacgactggtttgccaaccacaacctcgtctggccatccct

SEQ ID NO: 34099 - DNA, 264 bp, Zea mays
cccacgcgtccgcggcgctccctcctgttttcctcttcttcttcctgtactatatagcctcccctcgcaaatcgtcacatacgagtgatgtcattccgcttgcttgattgttccagatattcgcagttgaccgggtcctcggagcacgatgaagtttgttgctgcctacttgcttgctgtcctcgctgggaacgccagcccctccgctgaggatttgactgccattctggagtcagttggctgtgaagttgacaatgaaaggat

SEQ ID NO: 34100 - DNA, 266 bp, Zea mays
cccacgcgtccgagaggattaaggctgtcaggcagatgattatggctcccacgcttgagctgaggcagcaggcgctcgaccgtctcttgccgtatcagaggtctgacttcgaaggcattttccgtgctatggatggactcccggtgaccatccgactcctggaccctcccctccacgagttccttccagaagggaacatcgaggacattgtaagtgaattatgtgctgagacgggagccaaccaggaggatgccctcgcgtgaatt

SEQ ID NO: 34101 - DNA, 263 bp, Zea mays
gctcctcctgctgaacttcatcggggtggtggccgggatctcgaacgcgatcaacaacgggtacgagtcgtggggccccctgttcgggaagctcttcttcgccttctgggtgatcgtccacctgtacccgttcctcaagggtctggtggggaggcagaacaggacgccgacgatcgtcatcgtctggtccatcctgctggcctcgatcttctcgctcctgtgggtccgcgtcgacccgttcctcgccaagagcaacggcccgc

SEQ ID NO: 34102 - DNA, 256 bp, Zea mays
ccgaatcaggggaccgttgattaccccagcttcaagctcgtcatcgtcggcgatggtggaactggtaaaactacatttgtgaagaggcatctcactggagagtttgagaagaaatatgaaccaaccattggtgtggaagttcatccgttggatttcaccactaactgtggtaagatcaggttctactgctgggataccgcagggcaagagaagtttggtggcctcagggatggatactatatccatggccagtgtg

SEQ ID NO: 34103 - DNA, 257 bp, Zea mays
ccagccgccaccaggtgcagagtctttcgtcatctcttctccggcgaagaacccccagtcgcccaccagatcacttgttaaactttgttgaggggtgatggcggtttctttcgcaaacctcagctccgaggcagggcttaaaaagcttgatgagtaccttctcactcgcagctacatcactggctaccaagcttccaaggatgacttggctgtctacacttcgttttcgtctgctccctcgtccaagtatatcaacg

SEQ ID NO: 34104 - DNA, 252 bp, Zea mays
ctcgaggaggcgttcaacataaccgtcgacgaaacaagcgcacaggacatcgcgacggtgcaggacgctgcagacctcatcgagaagctcatgctggaggcgcctccaaaggtcgtctagatcgatccatcagccttgtgatcggcgacttggcattttatgttaaattgttcatgttacccaatttgttctttattgatggttcaagatgagatttttgtatggatgttgctgaggtataaattagatgct

SEQ ID NO: 34105 - DNA, 251 bp, Zea mays
aataaatccttacatgctggggacaatggctggaggtgctgctgattgccaattttggcataggaacctaggaaccaagtgtcgtctccatgagctttcaaacaagcgaaggatctctattgctggtgcttccaaactgttggctaacatcctttattcatatcgtgggatgggactgtcgattggtacaatgatcgctggatgggatgagaagggtcctggcttgtactatgttgacagtgagggtgcgc

SEQ ID NO: 34106 - DNA, 253 bp, Zea mays
ggaggaggtggaggtcgccccgccggggcccatggagatccgtgtcaaggtcgtctccacctccgtctgccgcagcgacgtcactgcctggcaatccaaggcgcaacttgatctgttccccagagtcttcggccacgaggcatccggagtagtagagagtgtcggtgaaggtgtgaccgagttccaagtcggtgaccacgttctcactgtcttcattggggaatgcaagagctgcaagcactgcgtctcaggg

SEQ ID NO: 34107 - DNA, 253 bp, Zea mays
cggacgcgtgggggcgaagggaataatggaccagccaatgcgaacagcagtcaaggggctcctgcttccactggtgatgggcttctagacttcgatatgtacctttctgagatccaaagtagccagccctcgaaatctgagctggaacagtacctggacgaatccctcactccacgtatccaggagtttgatatcctgaactggtggaagctaaacacggtcaagtttccaaccctctctaaaatggcccgtg

SEQ ID NO: 34108 - DNA, 255 bp, Zea mays
caagtcgcggcccagcagggagcagagcctggttgactgggccctccccaagctgaacgacaagaggcggcttctccagatcatcgacccgagactggaggggcagtactcggccagagccgcccacaaagcctgcagccttgcgttctactgcctgagccagaaccccaaggccaggccactcatgagcgacgtcgtcgagaccctcgaaccgttgcagggcagcggtggaggcgatggacgcggccagccttc

SEQ ID NO: 34109 - DNA, 263 bp, Zea mays
  unsure (1)..(263): unsure at all n locations
ccgcggaggcggagccgtntcaagaagctggagaaggtgtccaagaagcaggaggaggggctcgtcaccaacaagtacaagcccaaggagccgtacgtcgggaggtgcctgctcaacaccaggatcaccggcgaccaagcgcccggggagacgtggcacatggtcttcagcacagaaggcgaggtcccctacagagagggccagtccatcggcgtcatcgcggatggcgaggacaagaacggcaagccgcacaagctcaggct

SEQ ID NO: 34110 - DNA, 258 bp, Zea mays
  unsure (1)..(258): unsure at all n locations
cccacgcgtccgcggacgcgtggngtgaaattcgtgatctcatggaggcggcggatatagacaacagtgggaccattgattatatagaattcattgctgctacattgcacctcaataaactggaacgtgaggaacatctagttgcagcattttcgtattttgacaaagatggcagtggttacattactgtggatgagcttcaacaagcgtgcaaagagcataacatgccagctgcttttcctgatgatgtgattaaag

SEQ ID NO: 34111 - DNA, 266 bp, Zea mays
atcgcgtcctctccgctacacctcgccgatcggatcgcgacgagacgccgcgcgatccgacctaggatgacgccaacgaccactctcgccgccggcggtcatggcgtacggcgaccgcgttaccaccttcgaggactcagagaaggagagctagtacggctatgtccgcaaggtctctggacctgtggttgttgctgatggaatgggtggtgctgccatgtatgaacttgtccgcgtcgggcatgataacctcatcggggaaatta

SEQ ID NO: 34112 - DNA, 263 bp, Zea mays
ggctgtgtgggctttgggcaatgttgctggcgattctccgaagtgtcgtgaccttgttctcgccaatggtgcattgatgcctctgctagcccagttgaatgagcatgcgaactctccatgttgaggaatgccacctggactctgtccaacttttgcaggggaaagccacagccatcatttgatcagactaagcctgctctgccagcacttgcacgacttatccattccaacgatgaggaagttctcactgatgcttgctgggc

SEQ ID NO: 34113 - DNA, 266 bp, Zea mays
gaacacatctacagtacagctcaatcatcgaattcttgccgcaacaacattactctctgtgggtggattatggttggctgcaaggaaaatagacatgcacccagcagtcaagtcactgatcggaagcacgcttgggatggctgctctccaggttacattgggcatatctacgctattgacgtacgttccaacctcgttgggctcagcgcaccaagctggagcgttgactctactgtcacttacgatccttctggttcacactctga

SEQ ID NO: 34114 - DNA, 265 bp, Zea mays
ctcttgccgacaagaatactgttgccatggtcattgtgaacccaggaaacccatgtggcaatgtgtactcctatgagcacctggccaaggtcgctgagaccgcgcgaaagcttggcatattcgtcatagcagatgaggtttacgcacacttgacatttggagagaggaaatttgtgccgatgggtgtgtttggggctgtggctccagtgttaacactggggtccatatcaaagagatggatggtgcctggatggcggcttggatg

SEQ ID NO: 34115 - DNA, 242 bp, Zea mays
ggaggatgcgcttcttcgtatcttgaccccaaggcgctctattgacatactgagggatgtgcacgctgccaaggagcgtgggaggccatatgtcattgtttttgttggggtgaatggagttggcaaatccaccaatcttgcaaaggttgcttattggcttcttcagcataacctcagtgttacacttgcagcatgtgacaccttcagatctggtgctgttgagcacctgagaactcatgcaa

SEQ ID NO: 34116 - DNA, 259 bp, Zea mays
cggacgcgtgggggttagacaagaggatgcgccttctgtgcttgagaggcatttccatgatttgcaaaagacatacggagctgtcttagctgttgatcttgtcaatacaggtggcggtgagggtcgcctccgtgaaaaatatgcaaaatctattgaacctattcttagtgaagatataagatatgtgcacttcgacttccaccgagtttggggtcatattcactttgagcgcctttctcagctatatgatcagatcaag

SEQ ID NO: 34117 - DNA, 260 bp, Zea mays
  unsure (1)..(260): unsure at all n locations
ctaacgctgccgccgcttcacaggtaagccgccgccatggtgtccggttccggcgtatgcgcgaacantcgtggtggacgcgcgccaccacatgctgggccgcctgtcgtcgattatcgccaaggaactgctcaatgggcagaaggtggtcgtcgtccgctgcgaggagatctgtatgtcgggtgggctcgtacgccagaagatgaagtacctccgctttctccgcaagcggatgaacaccaagccatcccatggaccca

SEQ ID NO: 34118 - DNA, 257 bp, Zea mays
aacctctccaactcgcagccgtgatggtgaccatgcagctgcggacgaggaagaggatgatgatgatgtccagtggcagactgacacttctattgaggctgcgaacacgtatgcaggagcagctgagtgcagcaaccgctgaaatggtgatgctgtccactgaggagactgagaagaagaaacatgcaacccacaaagatggcactgctaatggttcagcaaaagaaatacctgatgaaaagcctgccgtcactaag

SEQ ID NO: 34119 - DNA, 262 bp, Zea mays
ggtgaatactgctcgtcaatgggctttggatatatatgaatgtaggaggcccaggatcaaaagcctttataagactgacaagctagaacctctaggggaggctagggaaattctgaagtttgcaagagctcaagctcaaaagcaggcagctaatcttcatcacccacttgtttgtattgatgtcattgaagaaggtatagttgcaggaccacgggctggactctggaaggaagcaacttctttccaggaactgcttttctca

SEQ ID NO: 34120 - DNA, 261 bp, Zea mays
cggacgctgggcggacgcgtgggcttgaaggcaagatagagaagatggagatggataagaggataaaagaggatctgaagacagttgcgcttggaacgtcaaagatcaactatcttgatcctagaataaccgtggcatggtgcaaacgccatgaagtccctattgagaagattttcaacaaatctctcctcgcgaaatttgtatgggcaatggacgttgacccggaattcagattctaggagaccattggctaccatgtgc

SEQ ID NO: 34121 - DNA, 258 bp, Zea mays
ctgaaaatgaagctgatgtatctgcaggacaagatgctggatatcagaaatctttggttgatagattgacattgaagccagaaaagatagcaatccttgcgaaatccatacgcactcttgcaaatatggaagacccaatcaaccagatactcaaaagaacagaggttgctgtagacttagtgcttgaaaaaacatcttgccctctgggtgtgctgctgattgtttttgagtccaggcctgatgccttagtccagattg

SEQ ID NO: 34122 - DNA, 261 bp, Zea mays
gtcacaatgtcggcacaacctgcacagccggtatatggcggggagcttccagaagggctacagaagatttccaacatcatagcagtttcaagctgcaagggaggggtagggaaatcaactgttgctgtaaatcttgcctatacactagctggaatgggcgcccgggttggaatcttcgatgccgacgtctttggcccaagcttaccgactatggtttctcctgaaaaccggttgctagtgatgacttacctttagaaccca

SEQ ID NO: 34123 - DNA, 187 bp, Zea mays
gcagctagcgcgctcctcgagcccagcagagaaaggccggcctacccactctctctctctctctctccagtctccaccggcagcactaatcgtaatagccatgggctccaccgccggcgacgtggccgcagtggtgaacgaggaggcgtgcatgtacgcgatgcaactggcgtcgtcgtccatcctg

SEQ ID NO: 34124 - DNA, 251 bp, Zea mays
cagtgccaagaaagtcctcatagttgactgggatgtgcaccatggaaatggcacacaagagatattcgacggggacaaaacagtcttgtacatatcattacatcgtcatgaggatggaaacttttaccctggaactggagctgctcatgaggtgggagttcttgatggtcaaggattctcagttaatataccttggagccgtggtggtgttggagatgatgactacatctttgcttttcagactgtggtgc

SEQ ID NO: 34125 - DNA, 255 bp, Zea mays
caccgcggccgaccccagcaacgggggccgtggcaaggtggggaaggcggcgcacctggaggaggcggtggtgtcgctcaagtccacggcggacggggagaccgtgtaccgggtgagcttcgagtgggacgagtcgcagggcatcccgggcgccgtcctggtcaggaacctgcagcacgccgagttcttcctcaagacgctcaccctcgagggcgtcccaggcaagggcaccgtcgtcttcgtcgccaactcgtg

SEQ ID NO: 34126 - DNA, 257 bp, Zea mays
ctctttcccaaatccaccgccggctcggctcgcccatcttcgcgccaagcaccgaatctccgatggcccgcacgaagcagacggcgcgcaagtcgacgggcggcaaggcgccccgcaagcagctggccaccaaggcggcgcgcaagtcggcgccggcaaccggtggcgtgaagaagcctcaccgcttccgccccggcaccgtcgcgctccgggagattcgcaagtaccagaagagcacggagctgctcatccgcaag

SEQ ID NO: 34127 - DNA, 201 bp, Zea mays
ggatgggtcttgatgttggccctgatgccacgaaaaccttcaacgaagcattggacaccaccaagactgttatttggaacactcccatggggccgttccaaataacagtcttggtggtgtccaatgggagtgtttgagttcgagaagttaacagctggaactgaggcgattgccaagaagctagctgagcttacaaccacg

SEQ ID NO: 34128 - DNA, 274 bp, Zea mays
gttcgtgatgttcgtcttatcatggaccggaactcaagacgttctaaaggagtttggtacattgagttttacgacgttatgtctgttccaatggcaattgctctgtctggtcaaccgctgcttggacaagcagtgatggttaaaccatctgaggctgaaaagaacttagttcagtcaaatgcgacatcaggtggtgcggcttcaggtggagcaagaaagttgtacgttggcaatcttcactcaaatattactgaagaccaattgagacaggtat

SEQ ID NO: 34129 - DNA, 260 bp, Zea mays
agcttctgaacgttcagctcaagaagctcgtcgccggcggcaagctgaccaaggtgaagaactcgtacaagctgtcgtccgccgccaccaagccgaatcccaagcccaaggccgccccgaagaagcccaagactggcgctaagaagcccaaggccgctgccaagcccaaagctaagacccccgccaaggcgaagccgccacaaagcccaagcccgccgcgaaccgaaagccgtagtgaaccgaagacacccgcaacccaa

SEQ ID NO: 34130 - DNA, 273 bp, Zea mays
cccacgcgtccgcgccgtcgcctccgcctccgctgccgccgcgcaggtcagggtcatgtcgatcttcgagtacaacgggagcgccgtggtggcgatggtggggaagaactgcttcgcgatcgccagcaaccgccgcctcggcgtgcagctgcagacgatcgccaccgacttccgacgggtgttcaaggtccacgacaagctctacatcgggctctcggggctcgccaccgacgcccagacgctgtatcagcggctggtgttcaggcacaagtt

SEQ ID NO: 34131 - DNA, 272 bp, Zea mays
ggcaggggtacaaagatgaccctctacctcaaggatgatcagttggagtaccttgaggagcgccgcctcaaggatctgatcaagaagcactccgagttcatcagctacccaatctctctctggattgagaagaccactgagaaggagatctctgatgatgaagatgaggaggataagaaggatgaggagggtaaggttgaggatgttgatgatgaaaaggaagaaaaggaaaagaagaagaagaagatcaaggaggtttctcatgagtggca

SEQ ID NO: 34132 - DNA, 273 bp, Zea mays
cccacgcgtccgcccacgcgtccgcgtttagatcataccagagttgtagacataatgcgcaaggctggtcaattgcatcttgtgaaaccatatatggttgcagttcagagtaacaatgtctctgctgtgaatgaagccttgaacgaactttatgttgaagaagaagactacgagagactccgtgaatcagttgatatgcacgacaactttgaccaaataggtcttgcccagaagcttgagaagcatgaattgctggagatgaggaggattgct

SEQ ID NO: 34133 - DNA, 274 bp, Zea mays
cggacgcgtgggcggacgcgtgggcggacgcgtgggcggacgcgtggggaatatttggcatatgaatgacggaagcatgtacttgtcatcttgtcagatatgagatcttatgcagacgcacttcgtgaggtttctgcagcccgagaagaggtgccaggtaggcgtggttatcctggatatatgtatactgatctggcaacaatatatgagcgtgctgggcgtattgaaggaagaacagggtccattacccaaattcctattctgacaatgccta

SEQ ID NO: 34134 - DNA, 264 bp, Zea mays
aaccggggaggactgatgactgccatgctgctcacttgggtcttgatggggttgttcgccggatatgcttcttcacgcctgtataagatgttgaaaggatcggaatggcggacatcaccctgaggaccgccttcctgtttcctgggattgctttcggtattttcttcatccttaatgctctaatatggggggagaagtcgtctggcgctgttcctttcaccacaatgtttgctttggtcctcctctggtttggtatctcggttc

SEQ ID NO: 34135 - DNA, 266 bp, Zea mays
cccacgcgtccgctcaactccgcctcgagacctccccccctcgctggtctcagccatggtgaaatattcgacggagccgtccaaccccaccaagtccgctaaggccatgggccgtgacctacgtgttcacttcaagaacacacgtgagacagcttttgcccttaggaagttgtcactcaccaaggccaaaagttaccttgaggatgtgatcgcccacaagcaggccatcccgttccgcagtattgtggtggtgttgggcgcatgct

SEQ ID NO: 34136 - DNA, 262 bp, Zea mays
cgagagtggaggagggctgctgatgggcggaggagacgacgaccggagagcggcggcgctccagcgatcctcgtcgccatggagcgtgggcgagcggtggcgggcgcacgccgggatggtcctcgtcatgctcgcctacagcggttaccacgtcctcgccaagtccgtcctcaacgtgggcatgaaccaggtcgtcttctgcgtctaccgcgacctcctcgcgctcctcgtcgtcgcccccgtcgccttcctccgcgagaga

SEQ ID NO: 34137 - DNA, 268 bp, Zea mays
gtcaatgttatccgagttgcgccaagcaaagcaattgagctttttgcttttgatactgccaagaaattcttgactccaaaggctgatgagtctccaaagaccttcctacctccatcacttattgctggagcacttgcaggagtcagctcaaccctgtgcacatatcctttggagttgattaagaccagattgacgatagagaaagatgtctataacaacttcctccatgctttcgtcaagattttacgagaagaaggtccatcagagc

SEQ ID NO: 34138 - DNA, 269 bp, Zea mays
cgacgttctcaagtcggtcggtaagctcaccaacagtgagctgcaccaggtgttctccgagtggaacaagggcgagctcctgagcttcttgatcgagatcacggccgacatctttggcatcaaggacgagcatggcgatggctacctggtggacaaggtccttgacaagaccgggatgaaagggacagggaagtggacggtgcagcaggccgccgagctgtcggtggccgctcctacgatcgaggcgtccttggactcgaggttcctga

SEQ ID NO: 34139 - DNA, 271 bp, Zea mays
cggacgcgtgggcggacgcgtgggcggacgcgtgggcgcttctccacgccgccgccgccccgtgcgcgtcaccatggacggcaccttcgacatgatgcactacggccactgcaacgcgctgcgccaggcgcgcgcgctcggggacgagctcgtcgtcggcgtcatcagcgacgacgagatcaaggccaacaagggaccccccgtcacgccgctccacgagagaatggtaatggtccgtgctgtgaaatgggtggatgatatcattccagat

SEQ ID NO: 34140 - DNA, 271 bp, Zea mays
aggagatattgttctactgggtagcagacatccttgtctagaggcacaagatggtgttaactttatacccaatgattgcactctggtgagagggaaaagttggtttcagatcatcactggaccaaacatgggaggaaaatccacatttataagacaggttggtgtaaatgtattgatggcacaagttggttcctttgtaccttgtgatcaagcaagtattagtgtgagggattgtatttttgctcgtgttggcgctggtgattgccaactt

SEQ ID NO: 34141 - DNA, 276 bp, Zea mays
ctgggaggggcctgggttgtggtggacagcaagatcaatccagaccacatcgagatgtatgccgagaggactgcgaaagggaatgtccttgagcccgaagattggtggagatcaaattcaggccaaaggaactggaagattgcatgctaaggcttgacccagaattgattggtctgaatactaggctgaaagagatgaagaaacaaaatgccaacatctcggaaatggagaccatacggaggagtatgactattcggatgaagcagttgatgccta

SEQ ID NO: 34142 - DNA, 265 bp, Zea mays
ctcctcgcatttcttcccatccgatccccccttcgcaaccaaaaccccaactcgccccgcatcgatggcgcccaaggccgagaagaaacccgcggcgaagaagccggcggaggaggagcccgcggccgagaaggcgcccgccgggaagaagccgaaggctagaagcgggtccccgctggcaagtccgctgccaaggaaggcggcgagggcaagaggggcaagaagaagggcaagaagagcgtggagacctacaagatctacatct

SEQ ID NO: 34143 - DNA, 263 bp, Zea mays
ctgaaggagagcagcccggaggagggggagcaagcagcagccgtcggtggaagatgtcgtacctgctgccgcatctgcactcggggtgggcggtggaccaggccatcctcgccgaggaggagcgcctcgtcatcatccgcttcggccatgactgggacgagacctgcatgcagatggatgaagtgctagcagcagtagctgagcccataaagaactttgcggtcatctaccttgttgacatcacagaggtccctgatttcaac

SEQ ID NO: 34144 - DNA, 261 bp, Zea mays
ggaacaggcaaagttggattcatgtttgcccctattttggcattatggtttattaatttgggatccatcggaatatataatcttgttaagtatgacatttctgttgtgagagcattcaatccagtgtatatatatttgtttttcgagacaaacggcattaaggcgtggtcagctcttggtggttgtgtcttgtgcatcacaggagctgaagcaatgtttgctgatttgggccatttctctgtcaaatcaatacaggtagca

SEQ ID NO: 34145 - DNA, 261 bp, Zea mays
aaagaggtgtccctgccatcattggtgtgatggcgaacaggcggttgccttacccatctagggcgtttgatatggcacattgctcacgctgtctgattccttgggatgaacacgatggactgtaccttgctgaagtcgataggattctaaggccaggaggatactggatcctctcgggacctccgatcaattggaagacacaccacagggggtgggagaggacgaaggacgacctcaagcgagagcaggacaagatcgagg

SEQ ID NO: 34146 - DNA, 261 bp, Zea mays
gcccacacagcaactagtctttttaacgaatatgtcatgggagctctgtcagataagactgtccttttggtgacccatcaagtcgattttttgcctgtatttgattctgttctgttaatgtcagatggtgaaattattcgtgctgcaccttatcaagatttattggcacattgtcaagaatttcagaacctcgtaaatgcccataaagacactattggtgtttcagatcttaacagagtcagatcccatagaacaaatgaa

SEQ ID NO: 34147 - DNA, 262 bp, Zea mays
cggacggtgggacggacgcgtgggaggtaattggttctgagaaggataaggacagaatacctggcattgacatcacgcttaagacgggtgacacatggatgttcgctggccatcaagttcttgtactggaaactcctggacatacaacaggtgtttgatggaaaatttcttatgactcatcttatattcgttcttgccttcaaagttaactcctgcactgcacatgaaggcttttcgttaacttttcatgtatttttattag

SEQ ID NO: 34148 - DNA, 266 bp, Zea mays
catttctcgaaaccaatgaaagagtttgtctcactatgtttaaagaagaatccagcagagaggcctagtgccaaggagcttcttaagcatcgtttcataaaaaatgcccgaaagactccaaagcttttggagcgaataagagagcggccaaaatttgcagcaaaaagcatggatgccacacaaaatgggcaaacacatgatgaagaggaggattttggtacaggcactatcaaggtcaataggacaaaagatacagctccatcttt

SEQ ID NO: 34149 - DNA, 266 bp, Zea mays
ctcagggtgtgcatggccacttcaccaagcgccccgaggagattggagctggtgaccagggacacatgttcgggtatgcgaccgatgagacccctgagttgatgcccctcagccatgtccttgccaccaagctaggtgctcgtctcaccgaggtccgcaagaacggaacctgcccatggctcaggcctgatgggaagacccaggtgacagtcgagtaccgcaatgagggtggtgccatggtccccatccgtgtccacaccgtcctc

SEQ ID NO: 34150 - DNA, 269 bp, Zea mays
cacgagcgattgcggcggcggaagtaagaggcgatggggcactccaacgtgtggaactcgcaccccaagaactacgggcccggatcccgcgtctgccgggtctgtgcgaaccctcatggactgatcaggaagtacgggctgatgtgctgcaggcagtgcttccgcagcaacgccaaggacattggcttcatcaagtaccgctgaagtcagctgggcgggctatctgaatgccatctcttggacagtgtagtagaggcgatgccacaatt

SEQ ID NO: 34151 - DNA, 217 bp, Zea mays
ggccgcggcaaggcacgccgacacgcagccggcggtcgtgtgggcgtcgtattcgtcggtgtacgggctcaacacccaggcgcccttctccgaggagcaccgcacggaccgccccgcgtcgctgtacgcggccaccaagaaggccggcgaggccatcgcgcacgcgtacaaccacatctacgggctctccatcaccggcctccgcttcttcaccgtg

SEQ ID NO: 34152 - DNA, 158 bp, Zea mays
agcactcgccgccactcaccagcaaattcccaagccgccccttcccccatctctttcgcgccccatttgatcgattcctgatggcgcccaaggccgagaagaagcccgcggagaagaagccggcggaggagaaggccgagaagaagccaagggcggag

SEQ ID NO: 34153 - DNA, 191 bp, Zea mays
ctgaaggagagcagcccggatgagggggagcaagcagcagccgtcggtggaagatgtcgtacctgctgccgcatctgcactcggggtgggcggtggaccaggccatcctcgccgaggaggagcgcctcgtcatcatccgcttcagacatgactgggacgacacctgcatgcagatggatgaagtgctagca

SEQ ID NO: 34154 - DNA, 185 bp, Zea mays
cgacgttctcaagtcggtcggtaagctcaccaacagtgagctgcaccaggtgttctccgagtggaacaagggcgagctcctgagcttcttgatcgagatcacggccgacatctttggcatcaaggacgagcatggcgatggctacctggtggacaaggtccttgacaagaccgggatgaaaggga

SEQ ID NO: 34155 - DNA, 197 bp, Zea mays
cccacgcgtccgagggacttttgctcgctggacaagtacgtgtgggcgttcgtgaacaacaagccgctgtcgccgagctacaagtacagccggaagatcccggtgaagacgtccaagtcggagtccatcagcaaggacatggtccggcgcggcttccgcttcgtcggccccactgtcatccactccttcatggaggc

SEQ ID NO: 34156 - DNA, 169 bp, Zea mays
agggaggctctggaaagggctcatctaaaagatgttataaggaggaattctttaggattggatgctgaggtttctgaagctggtgaaaatttcagtgttggacaacgacagctgttgagcttagctcgtgcgctgctgagaagagcaaagatacttgtccttgatgagg

SEQ ID NO: 34157 - DNA, 173 bp, Zea mays
cccacgcgtccgggaagaatctggtgagcatatcattgctggagctggtgagcttcatcttgagatttgcctgaaggatctgcaagaggacttcatgggaggtgctgaaattattgtttctcctcctgttgtgtccttccgtgaaaccgttcttgagaagtcctgcggcactg

SEQ ID NO: 34158 - DNA, 184 bp, Zea mays
cccacgcgtccgggatactggacgggtaccgccggcgtacgacgccactgccgtgcggcggctgcggaaagccggcgctattgtgttggggaagacgaacctcgacgaattcggaatggggagcaccaccgagggctccgcgtttcaggtgacaacgaacccgtgggatgattcacgtgtgcct

SEQ ID NO: 34159 - DNA, 121 bp, Zea mays
gccgacaccgccccgccggcagccaaaatgccgttcaagaggttcgtggagatcgggcgagtggcccttgtaaactacggcaaggagtatggccgcctcgtcgtcatcgtcgacgtcgtcg

SEQ ID NO: 34160 - DNA, 139 bp, Zea mays
caacaaactcaccgggccaatcccaccgtcaatcagtaatctggaagactctctcttcgaggtactccttctcaacaaccagctctccggctgcctcccccacgagctcggcatgctcaccaaggcggccgtgattgac

SEQ ID NO: 34161 - DNA, 159 bp, Zea mays
ctattatcctgttaatcttggcatctatgtggaggatggcagcaaagagctgtctgtactggtagacaggtcaattggaggttccagtataaaggatggacaaatagagctaatgctacacaggaggctactccatgatgatgggaaaggcgtcgccga

SEQ ID NO: 34162 - DNA, 234 bp, Zea mays
ccggtccaggtgtccagcggatagcacctcctctgttctccatgtttggagcagtagctcgtcttctcagcacgaagccagtcgcaacagatgtcataggtatcgatctaggcacaacgaattcctgcgtctccgtcatggaaggaaacacaccacgggtgattgaaaacgcagaaggcgcgaggacaacaccctccattgttgccaagaatcagaatggtgacctgttgattg

SEQ ID NO: 34163 - DNA, 253 bp, Zea mays
ctctttccaccatgcagtaccttcctcttccggacaagtgtgcagatgacaagccgtttgtcccaccctaccaagtatcaaaggagaagataaaaagcataggcatcgagttgattccactggagacgagcgtcaaggagaccatcgaaagcttgaaagagaaggggttcgctagtttttgactcgagcaagctgtgaaacataagtgttactgtactacgtgatgttgcattgtatacatgcatcggacttc

SEQ ID NO: 34164 - DNA, 193 bp, Zea mays
gaggagacggagaggggagacccggtcactaccaatgccaagaataagaaaccagagaggacagtcgtcaatccaatccgagtctcctccaaaaacccatcaatctgcaggaacgagagcagcaggagagcatcctaggaaaaaagttaggaccaactgaccgagcaaaaaaggtagcatctctgtatcacca

SEQ ID NO: 34165 - DNA, 180 bp, Zea mays
ggttttgctgctctccgaccccgagctccgaacgccgcagcatcaggcgcgccccccctcgcgtgtgaccgagatggcgctgccgaatcaggggaccgttgattaccccagcttcaagctcgtcatcgtcggcgatggtggaactggtaaaactacatttgtgaagaggcatctcactgg

SEQ ID NO: 34166 - DNA, 225 bp, Zea mays
aaccactctccagatgcatgggatcatatgcagttcaaggatgtttgcgttaaagttgcgaatgttgagctatactacaaggcagttcacttctatttgcaggagcatcctgatctcatcaatgatatgctgaatgtgcttgcacttcgtttagatcataccagagttgtagacataatgcgcaaggctggtcaattgcatcttgtgaaaccatatatggttgca

SEQ ID NO: 34167 - DNA, 198 bp, Zea mays
ggacgcgtggctggactacctggagctgcagccggacctgtcggcgctggtccgcggggcgcacacgattccggtgccccaacctggggctcaccagctgggtgcgcctgcccatccacgacgcggacttcgggtgggggcggcccgtgttcatgggccccggcggcatcgcctacgaggggctcgcgttcgtgctcc

SEQ ID NO: 34168 - DNA, 174 bp, Zea mays
gttgttgttcctgcccactcaaaagtttcattacttcctcagccttcaaatgaagatagcgatgaagaacttgagtatgctgacactaactctggaattgcagatagtccaccattttccagtatgaggagtaatggtgatcaagcaactgttccttcggaagaagatgagttg

SEQ ID NO: 34169 - DNA, 168 bp, Zea mays
gttgatggaatggatgttcttgctgtgaacaagcgtgcaaatttgcaaaagatcatgctgttgcaaatggcccaattgtccttgagatggatacctacaggtaccatggccactctatgtcagatccaggaagcacttaccgcaccagggatgagatttcaggtgtca

SEQ ID NO: 34170 - DNA, 133 bp, Zea mays
ctcaaggatctcccttgctgacattgctaagaagctaagactagactctgagaaccctattgctgatgcggagagcattgtagccaaggccataagagatggcgccattgacgccaccatagatcatgcaaat

SEQ ID NO: 34171 - DNA, 172 bp, Zea mays
gaaagatataccaacgtgcctttggaggacagagcttagattttggcaaaggtggacaagcctaccgttgtgcctgtgctgctgacagaacaggacatgctatgctacacacgttatatggtcaagcaatgaagcacaatactcaattttttgtggaatactttgcattgga

SEQ ID NO: 34172 - DNA, 176 bp, Zea mays
cactcatcttttctcgtttagaacctctaaaatttcccccactcgccagtcgcagcagcacctgtagcagccatggacgccagcggaccggtagcaaggggaagaagggggcggccgggcgcaaggcaggcggccccaggaagaagtcggtgacgcggtccgtcaaggccgggctg

SEQ ID NO: 34173 - DNA, 275 bp, Zea mays
gtctttaaaggatggattgaggagaatggaactgctcctgttaagccaggcaccggattaactgttgctgtcaagacactcaaccatgatgggttgcaggggcataaagagtgggtggcagaagttgattttcttggaaaccttcagcatccacatctagtgaaattggttggctactgcattgaagatgaccagaggttgcttgtgtatgaatttatgccccgtggaagtttggagaatcatctttttagaaagtcattgcctctaccatgggc

SEQ ID NO: 34174 - DNA, 273 bp, Zea mays
ggccgctccgcctcgccgcctcaaggtccgcgcgggctaccagactcgttgcacgcgccaggtacgtcgatgacttgccgctggtcgggaacaaggcgccagacttcgaagccgaggctgtgttcgaccaggagttcatcaacgtgaagcgctctgattacattgggaagaagtacgtcattctgttcttctaccccttggatttcaccttcgtctgcccgaccgagattactgcgtttagtgacagatacgaggaatttgagaagttgaaca

SEQ ID NO: 34175 - DNA, 269 bp, Zea mays
ggacggtggcggacgcgtgggcggacgcgtgggcgctctcctcgcgggcgcgcacaggtacgagtcactgcgcagtctgtggatgtcgtcctgccagatcaccctgggtggctgcaaggcccttgcggccaccatgccaaacatcaatgtcgaggtcatcggtggggcgagctttggtgcgatggatggtggtgtcagcggtgcgaggaaggtggacatgctctacctctaccgtactctggctggacctagatgcgatacgccaggat

SEQ ID NO: 34176 - DNA, 270 bp, Zea mays
aaatcaacaaggtcgttaagctccaagaagagcttgacattgatgtgcttgtgcatggcgagcctgagagaaacgctatggttgagtacttcggtgagcagctctccggttttgcgttcactgccaatggctgggtgcagtcttatgggtcaaggtgcgtcaagcctccgatcatctacggtgacgtgagccgccccaaccccatgaccgttttctggtcgaagcggcgcagagcatgacgtctcgcccaatgaaggggatgctgactgg

SEQ ID NO: 34177 - DNA, 272 bp, Zea mays
caactagaaattccccagcccggttccttttcgtgcggtttgatctcgtcggaggcccggccgcagttccgccatcagccatcgaattcgatggcggccaacttcgggaacaagatccgcaacgccaagctggttcttcttggagatgtaggcgctggcaaatctagcttggttcttcggtttgtcaagggacagtttgttgaattccaggaatcaacaatcggagcagctttcttttcccagaccttagcggtaaatgatgagactgttaa

SEQ ID NO: 34178 - DNA, 270 bp, Zea mays
atcgggggaggatggtgcttgtgcttgcgctgggggatctgcacatcccgcaccgggtgcccgacctgcccgccaaattcaagtccatgctcgtgcccggcaagatccaacacatcatctgctctggcaacctctgcatcaaggaagttcatgactacctgaaaagcctttgccctgatctccacattactggaggtgaatatgatgagtatgctcgatacccagagactaagacacttacaattggtcagtttaagcttgggctgtgcc

SEQ ID NO: 34179 - DNA, 269 bp, Zea mays
ttcgtggtttcccctagctccatacgagcagtagttgggccttgcacgtaccgtacgtctagctagctatatatatagcttgtgttctactgctttttagtttaattacctgcctgcattggagagttggatctgtttcatttggtggtgtttgctttactattaggtcagtatctgtttgtggagacttggtgtttaatttatttagccgtttgtgactggttgtagctagcggtggtgcggtggtgatgttcttgaggcatgaataa

SEQ ID NO: 34180 - DNA, 272 bp, Zea mays
ggacgctgggtcctgtttaccaaaagctcccagaggatgttgagatttggaatgccatgtctactttgccaaagtccatgtgctggaagatggtcaacaagactaaggataagttaaaccaagttggtatggtcatatatcagaaaccaatggacaatatttgctatgagaaaagatctgaaaacagcccgccattgtgcaaggaatctgatgatgcagatgctgcttggaatgtaccgttggaagcatgcatgcacaaactgcctggtggc

SEQ ID NO: 34181 - DNA, 274 bp, Zea mays
agaagatgacccaaatcatgtttgagaccttcaatgttcctgccatgtatgtcgccatccaggctgtgctttccctgtacgccagtgggcgtacaactggtattgtgttggactctggtgatggtgtcagccacaccgtgccaatctacgaaggttatgcccttcctcatgccatcctgcgtcttgaccttgctgggcgtgacctgactgacagcctgatgaagatcctcaccgagagaggttactccttcaccaccacggccgaacgggaaat

SEQ ID NO: 34182 - DNA, 264 bp, Zea mays
ccgcaagcctctggacagtctgaggaagacatgctgcagtgcttcattgattccaagtacaagaatgggcgccccaccaccgagggtgaggtaaccgggctacttatcgcagcgctctttgctggacagcataccagctcaatcacctcaacctggactggagcgtacatgcttcgcttcaagcagtactttgcagaagccgtagaggagcagaaggatatcatgagacggcatggcgacaagatcgatcatgacatcctggca

SEQ ID NO: 34183 - DNA, 268 bp, Zea mays
cgacgacctcaagaaggcctatcggaagctcgccatgcgatggcaccccgacaagaactccaccaataagaaggaggcagaaaccaagttcaaggagatctctgtggcatacgaggtccttagtgatcccaagaaacgtgcaatctatgatcagctaggggaagaagggctcaaggggcagccgcccccaggagcaggaggtcctggcacatctcccttcttccctggcggggttcattccaccgctcaccattttaatccgaggagc

SEQ ID NO: 34184 - DNA, 268 bp, Zea mays
tgttctccgagtggaacaagggcgagctcctgagcttcttgatcgagatcacggccgacatctttggcatcaaggacgagcatggcgatggctacctggtggataaggtccttgacaagaccgggatgaaagggacagggaagtggacggtgcagcaggccgccgagctgtcggtggccgctcctacgatcgaggcgtccttggactcgaggttcctgagcgggctgaaggacgagcgggtggaggcctccaagatcttccagggtga

SEQ ID NO: 34185 - DNA, 269 bp, Zea mays
atggtgcttaacttatcacaaggagaactttgcatatgaacattgggatgacattcttgacatatgcaatcagtatgatgtggcattatcaattggtgatggtttgaggcctggttccatttatgatgcaaatgatagtgcacagtttgcagaactgctgactcaagttgaactaacacgtcgagcatgggcgaaagatgtgcaggtaatgaatgaaggcccgggtcacatcccaatgcataaaattcctgaaaacatggagaaacagt

SEQ ID NO: 34186 - DNA, 262 bp, Zea mays
gcaagttgcacttaaccctgataagtggctagagttcaagctccaagagaaggcaacagtcagtcacaactcacagttattcaggttttcatttgatccatcaactatactgggacttgatgttgcctcgtgcctcatcacaagggcacctataggcgaggaagctgagggaagaaggaaatatgtgattcgcccgtacacacctatctctgatccagactctaaagggtattttgacctattgatcaaggtttatcctgat

SEQ ID NO: 34187 - DNA, 259 bp, Zea mays
cccacgcgtccgcccacgcgtccgcaccctccgagtcagagataaagagcattgcaacatggctgcaggataatcatgatggttcaactgggctgagtactgacagcttagtggaagcgggttatcctggtgctgttgcacttcgtgaagttgtgtgtggcatggcggccataaagatctcttccaaagattttatcttctggttccgatcgcacacaacaaaggagatcaagtggggtggggctaagcatgaaccggt

SEQ ID NO: 34188 - DNA, 260 bp, Zea mays
ggcaccacggccaccacggccagaacccgccggcgcacggcggcgtgcaccagcccaccttcaagatcttctgcaaggccgacgaggggtactgcctcaccgtccgcgacggcaacgtggtgctggcccccgccaacccgcgcgacgagcaccagcactggtacaaggacatgcgcttcagcacccaggtcaaggacgaggagggcaaccctgcgttcgccctcgtcaacaaggccactgggctcgccatcaagcactcc

SEQ ID NO: 34189 - DNA, 258 bp, Zea mays
cggacgcgtggcggacgcgtgggcggacgcgtgggcggacgcgtgggcagcggaaaacttgacatcttataggctcagggcaatgagtatgtctttgttgcaaactcagacaacttgggtgctatagtcgacatcaagatcctaaaccatctgatcaataaccagaacgagtactgcatggaggttactccaaagacgctggctgacgttaagggtggcactctcatctcttacgaaggaagagttcagcttttggag

SEQ ID NO: 34190 - DNA, 258 bp, Zea mays
gtggagcagagttggaaggtgttgtcaaaagtgctgtctcatttgctttgaaccggcagataaccatggatgacctcactaaacctttggatgaggaaagcatcaaggttaccatggatgattttgtgaatgcacttcatgaaattacccctgcatttggtgcttccaccgatgatctcgaaagatgcagattgcgcggtattgttgattgtggcaaggcacataagcacatttatcaaagagctatgctcctcgtag

SEQ ID NO: 34191 - DNA, 259 bp, Zea mays
cttgaactctcctggcattacccttagtgatgagcttaaaaagctcaaggaatttgcaaaggatttgccacctgagctcaaaggactggctatagtcaactgcgcaacattcgtatgttaaacaattcgtttgcgaggtcagaggcctctgaggagcagaaaccacctagcggggatgatgatgtataccatttcataaactacgttccagtggatggtgtcctgtacgagctcgatgggctaaaggaaggaccaataa

SEQ ID NO: 34192 - DNA, 267 bp, Zea mays
gggatgatggacgtgatgaacgggtgcaagaatctgaggaagcttgagatcagagacagtccatttggcgatgttgcactcttgggaaatgttgccaagtatgagacaatgcgatccctttggatgtcttcatgcaatgtcacattaaaggggtgccaggtccttgcatcgaagatgccgatgctcaatgtggagatcatgaatgaactagatggaagtagtgaaatggagaaccatggagacctctctaaagtggacaagttatat

SEQ ID NO: 34193 - DNA, 183 bp, Zea mays
agcagccttggctccagctcattgggatgggcaccatttcgttccggctctgctgatgcagaaccaggaagatgccgccgcacagatggcaagaagtggcggtgctctagagatgctgtcggggagcaaaaatactgtgagcgacacataaaacgtggttgccaccgttcaagaaagcatgtg

SEQ ID NO: 34194 - DNA, 240 bp, Zea mays
gcccgtgtcgctcgagctgggcggcaagtctcccgtcatcgtcttcgacgacgccgacctcgacatggccgttaacctcgtcaacttcgccacctacaccaacaagggcgagatctgtgtggccggcacgcgcatctacgtgcaggaagggatctacgacgagttcgtgaagaaggccgccgagctcgccagcaagtccgtggtcggagcccgttcaacccgagtgtcagcaaaggcccc

SEQ ID NO: 34195 - DNA, 286 bp, Zea mays
acgtacgcgtcagcggacggtgggtcatcattgacacctacggtggctggggacccatggtggtggcgctttctccggcaaggagccgaccacagcttattgcagccgacgctatctactaaggcaccatacattgatgtctgcgatgacacggactattcttggagagcaaagggcttccatgagcaagcaaaagctgccggtgttccggctattactactgctggcatctatccaggagttagcaatgtgatggctgctgagcttgtacatgctgccagaagtg

SEQ ID NO: 34196 - DNA, 299 bp, Zea mays
cccacgcgtccgcaccatcgcaaccagcgctacacactacaacggcatcctggagtacaatgcgcacagtctgtatggcttctcgcaggccattgccacgcatacggcgctgcaagggctgcaggggaagaggccgttcatcctgacccgctccacgttcgtcgggtcgggggcgtatgccgcgcactggaccggagacaacaagggcacgtgggaaaatctccgttactcgatctcaaccatgctcaactttggcatcttcggcatgcccatggttggctctgacatctgcggtttct

SEQ ID NO: 34197 - DNA, 275 bp, Zea mays
acgagtgctggtttccctgctggaaagtacctctttgctggtgttgtggatggacgcaacatctgggctgatgatcttgctacatctctcagcactctccagtctcttgaggctgttgttgggaaggacaagcttgtcgtatcaacttcctgctcgctcatgcacaccgctgtggatcttgtgaacgagactaagcttgacagcgagattaagtcttggcttgctttttgcccagaaggttgttgaggttgatgctcttgctaaggcattggctg

SEQ ID NO: 34198 - DNA, 296 bp, Zea mays
ggacggtggcggacgcgtgggcagagacgtacatagagttctccataccattgttcaggagcagggcatccctcgacagttctaaggccgagagcttcgtgaagaatctccaaatggagggcagatatctgagggatgtgtggtaaagagcgattggatgaacattcgttcgtattacacacgtgtacaactactaccggaagagcactgacaatggactagatctgatatttttattgcttctatatttatttttattttcttttgcttcgttctcttcaagagctctttgcttt

SEQ ID NO: 34199 - DNA, 298 bp, Zea mays
atctcctcgtcgtcgcctcgctgtctcctccgccgttgcctgcgatcccgatcatggagggcgacagtaccaacctcgacgcggctatagagtcgctcctgaacgtggagaagcagatgaggctggccggcgatgtcgccggcacgcggaaggccgtcatcgacatcgtcgagctctgctacaaggccggcgcgtggaagacgctaaacgaccagatcgttctcctctccaagaggagaggccagcttaagcaggccattactgctatggttcagaaagcaatggactacattgattt

SEQ ID NO: 34200 - DNA, 297 bp, Zea mays
cccacagaagcctggtaaactgaactgtcgtatttacatgtcaacagggaggtgctcatatgggtcatcgtgccacttcaatcatccacggctcaaagcagaactagaagtttcaagtttcgcttctgaacaaagtaatcatgaagctgaatttctggaactgaaccgtgttggcctccccattagagaaggagcaaggaagtgtatctattacatgcgtaatggtacatgcagatatggaaagaaatgttgttttaaccatccagagcaagttcttgatgttcaacacacactgca

SEQ ID NO: 34201 - DNA, 111 bp, Zea mays
gggctggcttctgctccccctcttatcaagtcctcctcgggttagggctccttatggctttgtggacgggcgatgtcggcggctgatgtgcagtaccgttggttcttcggc

SEQ ID NO: 34202 - DNA, 284 bp, Zea mays
cggacgctgggtcatcattgacacctacggtggctggggagcccatggtggtggcgctttctccggcaaggacccaaccaaggttgaccgcagcggagcctatgtcgcaaggcaggctgccaagagcatcgtcgccagcggccttgctcgccgcgccatcgtccaggtgtcttacgccatcggcgtgcccgagcctctctccgtgttcgtcgacacgtacggcaccggcgcgatccccgacaaggagatcctcaagattgtcaaggagaacttcgatttcaggc

SEQ ID NO: 34203 - DNA, 260 bp, Zea mays
gccgccgcttccgcttccgctccgtcgctcgcctcacgcctccggcgccacctccaccatggccccgaagaaggagaaggccccgccgccatcgtccaagccggccaagtccggaggcgggaagcagaagaagaagaagtggagcaagggtaagcagaaggagaaggtcaacaacgctgtgctcttcgaccaggccacctacgataagctgctctccgaggtagcccagtacaagcagatcaccccatcaatcctatctg

SEQ ID NO: 34204 - DNA, 283 bp, Zea mays
ctccgcggtttcgcttccccccgtcttcccaagcctttgcttcgctcttcgcttcggattccctctgctcatggccgggagagggaaggcgatcggctcaggggccgccaagaaggccatgtccaggagctccaaggccgggctccagttcccagtgggaaggatcgccaggttcctcaaggccggcaagtacgccgagagggtcggcgccggcgcccccgtctacctcgctgccgtgctcgagtatcttgctgctgaggttctcgagcttgccgggaacgcg

SEQ ID NO: 34205 - DNA, 266 bp, Zea mays
  unsure (1)..(266): unsure at all n locations
cccacgcgtccgcgaggtgttcgtcggcgggctgccgcggtcggccacggaaagcacgctccgagagatattttcttcatgcggagagattattgacgcgcgcataatgaaagatcagagtggtcactcaaagggatatggttttgtgcggtttgcanagagggattatgctaatactgccanaaggcaaaagaatggtattgaggttcaaggaaagaggcttgtggttgagctttcaatggatcaagatacagtcttctttggaa

SEQ ID NO: 34206 - DNA, 287 bp, Zea mays
gacttttaatggtaaaaagtgggagaagtttaacagtgagaaggtggcatcacttgcttatgctagaatccaagggaaaacagctctgattgctcatttccagaactctagtttgatgaatgaggacaaacgttggcgccccatactcttccactcagatggtcctaatgcaggagatcaggaacctttccctatgggtacaaacatccgagccaggtctgggagatccgggacttcctctggtgaagaaaatcaccatgatatccagacagtcttgaccacggtga

SEQ ID NO: 34207 - DNA, 289 bp, Zea mays
cccacgcgtccggggaagccattgcctctatttcagaaagcttttattggtctgactgctggtgcaattggtgcttgtgttggtagtcctgctgatctggcactcattagaatgcaagccgattcgaccctgccagttgcacaacgacgcaactataagaatgctttccatgcactctaccgtatcagtggtgatgagggagtccttgcgctttggaagggtgcacgtccaactgtggtgagagctatggcactcaatatgggtatgcttgcttcctatgaccagagtg

SEQ ID NO: 34208 - DNA, 292 bp, Zea mays
cccacgcgtccgcgtttctatcgggcacctgagatcattcttgggttagcctatgatcatcctttagacatgtggtcagttggctgctgtctatatgagctttataccggtaaagtcttatttcctggtccatcaaacaatgccatgcttcggcttcatatggaattgaagggtccattccctaagaagatgcttcgaaagggtgcctttactatgcaacactttgatcaagatctcaattttcatgctaccgaggaggatcctgtgactaaaacggctgtgagaaggttat

SEQ ID NO: 34209 - DNA, 278 bp, Zea mays
gcaatttctgaaggaaaacttgaagatgctattgaacaccttaccaacgcaatagtgctgaatccactctcagcaatcatgtatggtactagagcatctgtgtttataaaaatgaagaaaccagctgctgccattcgtgatgccaatgctgctctagagatcaacccagactctgcaaaaggctataaaactcgtggaatggcatacgccatgcttggcaaatgggaggaagctgctcatgatctgcacacagcatctagcatggattacgacgagga

SEQ ID NO: 34210 - DNA, 286 bp, Zea mays
ctcaagttcatcgacacatcatccaaatttgggcacggtcgcttccagactaccgatgagaagcagaggttctttggcaagctcaaggcgtaaggtgctgcacggtcgcttccagactaccgatgagaagcagaggttctttggcaagctcaaggcgtaaggtgctgcggtgcagcgacaagtcccatttctcaaaatcatcaaactgtgatacttttgtttgtaaccttgctgtactaagttttgtagccggatggtttgggagcatggtccggtcttctatgga

SEQ ID NO: 34211 - DNA, 284 bp, Zea mays
cactcggaccaaagggaaggaatgttgttttggagagcaagtatggttctcctaaaattgttaacgatggtgttacagttgccagagaggttgagctggaggaccctgtggagaacattggtgctaaattggtcaggcaagcagcagctaagaccaatgatctagctggagatgggacaaccacctctgtggttcttgctcaggggctgatcgctgagggtgttaaggttgtggcagctggtgctaatcctgttcagattactcgtggtatcgagaaaacagcg

SEQ ID NO: 34212 - DNA, 280 bp, Zea mays
ctttctcctgatgtacgcactattgaccagatacgaacgattgatcgcaattgtgaaattccccatgaaggccctttctgcgatcttatgtggagtgaccctgaggagatagagacatgggctgttagtccccgtggagcaggttggctgtttggatcgcgagtaacagcagagttcaactttgttaatggtatcgagctagtttgccgggctcaccagctggtccaggaaggcttaaagtacatgttccaggagaagggccttgtaactgtgtggtctg

SEQ ID NO: 34213 - DNA, 288 bp, Zea mays
atggaatttggtgaattggccaaacatgttgaaagcagcataactgggaatgattttacgttccctgttgggggaagttgtgaagatgatgatgtacttacagagtcaaaaataaaggcatttcttgaggagaaggctcttgacctgaaaaagctacaaacacctttgtatgaggagttctacaacactgtgcatggagggagttttcagggagctgatcaaacttccaagggaaaactcccaattagtccaaaattgccccctcgaggaaagtcgcctccatgcaag

SEQ ID NO: 34214 - DNA, 285 bp, Zea mays
cggactcggaggagcaccacttcgaatcgaaggccgacgctggggcgtccaagacctacccgcagcaggctggcaccgtccgtaagaacggcttcatcgtcatcaagaaccgtccctgcaaggttgtggaggtttctacctccaagactggtaagcatggccacgccaaatgccactttgtcgccatagacatattcaatgggaaaaagcttgaagatattgttccttcatcacacaactgtgacattcctcatgtgaaccgtactgagtatcagctgattgata

SEQ ID NO: 34215 - DNA, 280 bp, Zea mays
gaagcctcatgaccttaagaaggcctggaaggtgagcgtgctcaccgctgtcatcaagcacatgtcaccggacatagagaagatccgtcgcctggttcgccagtccaagtgcctccaggacaagatgactgccaaggagatctcaacctggctggcggtcgtcaagcaggaagaggagctgtacctgaagctgaacccgggcgcacgcccaccggcgtctactggtggcatcgcaagcgccatatccttcaacaccagctcgagcgagtatgatgtggac

SEQ ID NO: 34216 - DNA, 191 bp, Zea mays
cccacgcgtccgagcgcctccaccctcctcgccgcctcactccctctgaggtcgcagatccgtccggttagacgaagccgcccgcacccatggcctccggtgagctcgcctgcacctacgccgccctcatcctcagcgacgacggcatcgccatcaccgccgagaagatcgccaccatcgtgaaggcggcc

SEQ ID NO: 34217 - DNA, 264 bp, Zea mays
gtcttacattacccgattgccgcccataagtgaggagaatgaggctgagggtccctatgccgttgtgatggcacctactcgtgagcttgctcaacaaattgaggaggagactgtgaaatttgcaacctatctaggcatcaaagttgtctcaattgttggtggtcagtcaattgaggaacagggtttcaagattaggcagggctgtgagattgtaattgctacacctggtcggcttcttgaatgcttggaaaggaggtatgctgt

SEQ ID NO: 34218 - DNA, 269 bp, Zea mays
aagaaatcaatatacagccgagaccgaaacttgtggcaccttagccatgagggtgacatcctggaggacccagcaaatgagccaaaggaagatatgtatatgatgtcgattgctccagaaaatgcgccctcgaaacctgagtatttggagattggtatcattgctggtgttcctgtttcaatcaatggccgagacctctcaccagcatccctcctcgcggagctcaatgaaatcggtggaaagcatgggattgggcgtatcgacatggt

SEQ ID NO: 34219 - DNA, 238 bp, Zea mays
ggcccccataccttccagcctgctcgtttccatcagcaagagcttcaggtcatccaacagagtgagctggaggcctctttaccaaggctacgcaaacgcagactccgacccagaacctgggaggtgccggcggacagacggaaagaagtggcggtgctccaaggaggcgatgcctgatcacaagtactgcgagcgccacatcaataggaaccgccaccgttcaagaaagcctggggaa

SEQ ID NO: 34220 - DNA, 272 bp, Zea mays
ggaaatcttgaggctcatttcaatggtttcagatattctacttcaaggtctgatgagcgtgtggacatcatgtttggaaatataaagcatgcctttttccagcctgcagagaaagaaatgattactctccttcacttccatttgcacaaccatatcatggttggaaacaagaagacaaaggatgttcagttctatgttgaagttatggatgttgtacagacgcttgggggcagtagaagatcggcacttgatcctgatgagattgaagaaga

SEQ ID NO: 34221 - DNA, 269 bp, Zea mays
aagaaatacaccactttactcaagatgatctaatgacagaagatgttttcattctggactgtcacacgagcatatttgtttgggttggtcagcaggtggatgttaaaggcaggttacaagctctggatgctggggagaaatttattgtgcttgattttcttatggaaaaccttgcccgtgaaacaccagttttcaccgttatggaggggaatgagcctccctttttcactagattcttcacctgggactccgcaaaatcactgatgcat

SEQ ID NO: 34222 - DNA, 269 bp, Zea mays
aatctgcgaggctactgccggctccccacagcgaactactcgtatatgatttcgttgagctgggcagcttggaatgctaccttcatggagatgaacaagaggagcagccattgaactggaacgcgcggatgaaaatcgcgcttggctcggctcgaggcctggcatatctgcaccacgattgctcgcccgggatcgtgcatagggacatcaaagccagtaacatcctgctggatagaagcttggagcctcgtgtctccgattttggcctc

SEQ ID NO: 34223 - DNA, 270 bp, Zea mays
gtcgcttcgcctcctacctggcctccatcggcttcgtcgaggccaagtcggacacgtccctgttcatctaccggcgcggcaacgacaccgtctacctcctactctacgtcgacgacattgtgctcacggcatccaccgccgaccttcttcaccgcacgatcgtcgcccttcagcgggaattcgccatgaaggacctggggccccttcaccacttcctcggcatcaccgccgagcgccggcctcagggtctcttcctccaccaacgccagt

SEQ ID NO: 34224 - DNA, 198 bp, Zea mays
ggatcatatggtgacctttaccggggtacatattgcagtcaagatgttgctattaaagtgctgaaacctgagagaataaatgcagacatgcaatgagaatttgctcaggaagtatatattatgaggaaggtccgtcacaagaatgttgtgcaatttattggggcttgcactaaacccccaaacctatgtatagtcaca

SEQ ID NO: 34225 - DNA, 263 bp, Zea mays
aggaaaggctcgccttggatcgattgaactggttgtgtggcttccagccctgtgcaggaagatggaggtcccttactgcattgttaaaggaaaggctcgccttggatcgattgttcacaagaagaatgcatcagtcttgtgtctcaccactgtcaagaacgaggataagcttgagttcagcaagatcttggaggctattaaggcaacttcaacgacaagttcgatgaggtcaggaagaagtggggaggtggcatcatgggatc

SEQ ID NO: 34226 - DNA, 264 bp, Zea mays
ctggaaaggatgacattgatgtgggttctatccggatgacgctgttcaacatctttggtgatgatgccagcccaaagattaagaagttcatgaaggtcatgctcggaaagttccaccagggccagtcaggtgagcaaggcagtggtggtggtggtgtctttggcatggttggtgcccttgctcaggagttcttgaaggctaagcttgaagggaaggaggaagaggctttcaaacctgcattagagcaagaggttcacagtgttg

SEQ ID NO: 34227 - DNA, 261 bp, Zea mays
cccacgcgtccggccccctggcaacactgggctggatccgtcccagacctctttcttccaggtgcttaacatccccaccaagattaacaagggtaccgtggaaattatcacccctgtggagctgatcaagaagggtgaaaaggtgggctcgtccgagtctgccctgctcgccaagctgggtatccgccccttctcgtacggcctccaggtcaccagtgtctacgaggatgggtccgtgttcagccctgaggtgctcgacct

SEQ ID NO: 34228 - DNA, 249 bp, Zea mays
gggccatctacaaggtgtgcacgcggaccggtgctccatcatggacatcgttgccggcctggacgccgccgtcaaggacggcgtcgacgtgctctccttctccatcagcgccacggacggcgcgcagttcaactacgacctcatcgccatcgccacgttcaaggccatggagcacgggatcttcgtcagcaacgcggcgggcaacgacggcaccgccgcgggctccatcacaaacggcgcgccatggat

SEQ ID NO: 34229 - DNA, 266 bp, Zea mays
catatgtggacgagtctgttgttatcgacataaacccagacaacaaggacatgtcgcctgagttcctgaggtggctccgcggaaggaatctctcgagcgatgaccggattatgcgcctcaaagaagggtatatcaaggagggcagcaccgtgagcgtgatgggtgttgttcaaaggaatgagaacgtgctgatgatcgttcctccggctgaacccatctccactggctgccaatgggccaaatgcatcctcccgaccagcctcgac

SEQ ID NO: 34230 - DNA, 247 bp, Zea mays
cccacgcgtccggttatcccgagctaccatattcaagcctcagcatccgtaccgccgatgtgtgaatgatgtatataaggactttcctactactgctttaacacttttggaccatctacttgccgtagaacctgggaataggggtaccgctgcatctgcccttgacagtgaattttttacaacaaagccatatgcctgcgatccatcaagtctacccaagtatcccccaagcaaggaatatgatgct

SEQ ID NO: 34231 - DNA, 266 bp, Zea mays
cggacgcgtggcaagaacagttgaggttgaagaggaggaagaatcaaaaggtgaagaggctactgaagaatcaaaaagtgaagaggctactgagggtgaaaagcagaaaaagaagaaaaccataactgagaagtactgggactgggaattggctaatgaaacgaagcccatatggatgaggaatccaaaggaagttgagaaaactgagtacaatgaattctacaagaagacatttaatgagtttctggatccgcttgcttacactc

SEQ ID NO: 34232 - DNA, 255 bp, Zea mays
cggacggtgggctttgaaacccaaatggagaagtggatgggagcttgtgattgcattataacaaaggctggaacaggtaccattgctgaagccttgataaggggtcttcctataatccttaatgacttcatacctggacaggaagttggcaacgtaccttatgttgtggacaatggtgcaggtgtgttctcgaaaagccccaaggaaactgctagtcttgttgcccgctggtttggtccagattcagaggaattg

SEQ ID NO: 34233 - DNA, 200 bp, Zea mays
gcaagtcaggtgagccgataactgctgatgatcttggtgttggaggtgcattgactgtcttaatgaaagatgctattcatcccaccctcatgcaaactcttgaaggcacaccagttttagtacatgctggaccatttgctaacattgctcatggaaactcttcaattgttgctgataagattgctttgaagttggttggg

SEQ ID NO: 34234 - DNA, 248 bp, Zea mays
cgaacaaaccacacaccccacctaccccggccggaccggcaggcagcacagcatggacctcgccctcctagagaaggccctgctgggcctgttcgccgcggctgtggtggccatcgccgtggccaagctgaccggcaagcggtaccgcctcccaccggggcccccgggcgcccccgtggtgggaaactggctgcaggtgggcgacgacctgaaccaccgcaacctgatggccatggcgaacggttcgg

SEQ ID NO: 34235 - DNA, 265 bp, Zea mays
cgccgctgccgcatctcctctacaggtaagaaggagagaaagagggcgaaatggtgaagcacaacaacgtcatccccaacgggcacttcaagaagcactggcagaactatgtcaagacatggttcaaccagcccgcccgcaagcagaggcgccgcatcgcacgtcaaaagaaggctgtgaagatattcccacgaccaactgctggccctcttcgtcccattgttcaatgccagactctcaagtacaacatgaagtcaagggctgg

SEQ ID NO: 34236 - DNA, 258 bp, Zea mays
gttcaaggacattgaattatccaaagaaataaacgattcattcaggcaatcatctcaagctaggacaaagcttccctcaggcattgaaatgagtgttcatgtgcttacaacaggctattggcctacatatccaccaatggacgtgaaactcccacacgaactgaatgtgtatcaggatatatttaaagagttctatttgagcaagtacagtggaaggcgtttaatgtggcagaattctttgggacactgtgtcttgaa

SEQ ID NO: 34237 - DNA, 259 bp, Zea mays
gttgactatggcaagaagtccaagctcggtttcaccgtgtacccatccccccaggtgtccacatccgtggttgagccatacaacagtgtcctgtccacccactctctcctcgagcacactgatgttgctgtcctgctcgacaatgaggccatctatgacatctgccgccgctcccttgacattgagcgcccaacctacaccaacctcaacaggcttgtgtcccaggtcatctcatccctgactgcttccctgaggttcg

SEQ ID NO: 34238 - DNA, 173 bp, Zea mays
gaaaagcttcatgctgagtgggcagcagccaagttatcttgcaagaagcgcctggccaaacatgtgttggatgtgacaggtgttacgattgatccaactagcctttttgatatacagattaagcgcatacatgagtacaagagacagctcctaaacatattgggagctgttta

SEQ ID NO: 34239 - DNA, 293 bp, Zea mays
agaagagcggcggcgcggacggacaaggagcaggcggaagaggagttgtgccaaggcacaatgggtatctcgcgtgactcgatgcacaagcgccgagccaccggtggaaagcagaaggcctggaggaagaagcgaaagtatgagcttggtcgccagccagccaacaccaagttgtcaagcaataagacagttaggagggtccgtgttcgtggaggtaatgtgaaatggagggctcttcgccttgatactggtaactactcatggggaagtgaagctgttacccgcaagacccg

SEQ ID NO: 34240 - DNA, 290 bp, Zea mays
gttcgctacaatagactttgacatggaccttggagggcagttctccttgtcagatcatgacagtgcagctgaagatgaagaggaacgacctactttagttcgcaggacaactatagggaatggtcctcccgattcaatacatgattggaccaaagatgctgattttggtatgtccggtcagaatgagcccactcaactctattctaagaagaattggcgactacttcgatgccaaaatgggttgcgcatttatgaagaacttctggaagttgaataccttgcaagaagct

SEQ ID NO: 34241 - DNA, 295 bp, Zea mays
cggacgcgtgggcggacgcgtgggttgcaaccgattgccttcccccctcccaacccaagaccgatggcgaccaaggccgagatgaagcccgcggcgaagaagccggcggaggaggagcccgcggcggagaagacgaccgccgggaagaagcccaaggcggagaagcggatccccgctggcaagtccgccggcaaggagggcggcgagggcaagcgtggcaagaagaagggcaagaagagcgtggagacgtacaagatctacatcttcaaggtgctgaagcaggtgcacccggaca

SEQ ID NO: 34242 - DNA, 288 bp, Zea mays
gttgcaatcactcaagaaaattctctgttggataacactgccagaatagagggatggttagctcggtttcctatgtttgactgggttggtggtaggacttcagaaatgtcagctgttggtttacttccagctgcattgcagggtattgatatcaaggaaatgctagttggtgcagctttaatggatgaggaaacccggaacactgtggtatcacattattaataacacggacaacttgcagtgatggcatgattatctatatgtgtcatgtcaacatgtttatctttt

SEQ ID NO: 34243 - DNA, 293 bp, Zea mays
  unsure (1)..(293): unsure at all n locations
agtcactggacgcatacttcatcgtgtaactcatcatggtgcacaaggccctgtacatgcagtcttgagcgagaactgggttgtttatcattattttaatctgcgagctcacagatttgaaatggcggtgattgagatatatgatcaatctagggcggacaataaagatgtcatgaagctcatacttgtgaagcataatctttcagcaccaattacatcatacgcccgccctgaggtggcagtanaatcccagtcatactttttcacccattcagtanaagcaatggcagtta

SEQ ID NO: 34244 - DNA, 291 bp, Zea mays
  unsure (1)..(291): unsure at all n locations
cggacgggaagcacctccaatcccctcgcccccacggaccctcgccgccggggaagcgccgctcgctcaggaggacagccatggcgccggagccggaggatgatattatgaacgagaagaatccccgcccgctcgacgaggacgacatcgcgctcctcaaaacctatgggcttgggccgtactcgactagcattaagaaggtcgagaaggagatcaaggaaatnggccagaaaatcaatgacctttgtggtataaagagtctgatacagggtggctccacctagccagtgg

SEQ ID NO: 34245 - DNA, 294 bp, Zea mays
tctcaattctgtcattgctgggcgttatcatgtatcagagtatttggggtcagctgctttcagcaaagccatccaggcacatgatttgcacacaggaatggatgtatgtgttaaaattataaaaaacaacaaagattttttcgaccagagccttgatgagatcaagcttctgaagtatgttaacaagcatgatcctggtgacaagcatcagcttctgcgtctgaacgatgacctctactatcgggagcattatgtgatagtctgtgaacatctgtaggcgaatctgtacgagta

SEQ ID NO: 34246 - DNA, 295 bp, Zea mays
gcctgcgccgccgcttcgttcgtgtggaggggagaagacaggaaatggcggcgactgagggcgtgctcttggggatgggcaaccccctcctcgacatctccgccgtcgtcgatgacgccttcctgacaagtatgacatcaagctgaacaatgctattctcgctgaggagaagcacttgcctatgtatgacgagttggctagcaagagcaatgttgaatatattgccggaggagccacccagaactctatcagggttgcccaatggatgcttcaaactcctggtgcaacaagttac

SEQ ID NO: 34247 - DNA, 272 bp, Zea mays
ctaggaagccaaagggtgtactgcatacttctgggggctacatggtgtacactgcaacaacatttaagtacgcatttgactacaagccaactgacatatactggtgcactgcagactgtggctggattactggacatagttatgtaacatatggtcctctcctgaatggtgctacggttctcgtttttgaagggacgccgaactaccctgattcgggccgatgctgggatattgtggacaagtacaatgtgacaatattttatactgcccca

SEQ ID NO: 34248 - DNA, 289 bp, Zea mays
caaaactctagctagctagcagggggggaaatggctccacttctcgccgcagccatgaaccacgctgcccatccagtccttagaagccatctaggacccaacaatgagagtttctcacgacaccacctatcttcttcaccgcaaagcagtaagcgaaggtttaaccttagctttacgccacgatctgcaagagtaggcaatcaaaatggagtccaattgttgagcccttcggaaatccctcgaagggactggttcccctccgacttcatctttggtgccgccacttcag

SEQ ID NO: 34249 - DNA, 198 bp, Zea mays
ctcaattggctactaccacggagatctgaatgccttgagggacgacattgtggagctgaagccgactctactggttggggtgccccgagtgtacgaaaggatttatgaaggtatcttgaaggccattgcggaactcagacctctaagaagggtcatctttaatgctttgtacaaccgcaaactggcaaccatgaaagc

SEQ ID NO: 34250 - DNA, 255 bp, Zea mays
tgatgttcagcaggtgtccctggtcatcaactatgatctccccacccagccagagaattacctgcatcgcattggtcgtagtggtcgtttcggtaggaagggtgttgccatcaactttgtgacccgcgacgacgagcggatgctgttcgacatccagaagttctacaacgtgttgattgaggagctgcctgccaacgtcgctgaccttctgtgatcattttgaagaaaaacagatctaaaagaacggtggtgggg

SEQ ID NO: 34251 - DNA, 287 bp, Zea mays
cagcagccaagtttctgtggtacctgttcttcatgtacttcacgttgctgtacttcactttctatggcatgatgacgacggcgatcactccaaaccataccattgcgcctattattgcggctccattctacacgctgtggaatctcttctgtggattcatgatcccaagaaagcgcatcccagtttggtggaggtggtactactgggccaacccggtgtcgtggacgctctacgggctcctgacctctcagttcggcgacctggaccagcccctgcttatggccgac

SEQ ID NO: 34252 - DNA, 289 bp, Zea mays
gccacgcgtccggccacgcgtccgcggacgcgtgggctgttggaaaatctctcgtggaagaggataaacttgagctcgcaacttctcttattgagaaggcgaaggcaaagggggtttctcttttgcttcccactgatattgtagtagcggacaagtttgcagccgatgctgagagcaagattgtccctgccactgctatccctgatgactggatgggtcttgatgttggccctgatgccacgaaaaccttcaacgaagcattggacaccaccaagactgttatttggaa

SEQ ID NO: 34253 - DNA, 275 bp, Zea mays
gcggaagccaaagggtgtactgcatacttctgggggctacatggtgtacactgcaacaacatttaagtacgcatttgactacaagccaactgacatatactggtgcactgcagactgtggctggattactggacatagttatgtaacatatggtcctctcctgaatggtgctacggttctcgtttttgaagggacgccgaactaccctgattcgggccgatgctgggatattgtggacaagtacaatgtgacaatattttatactgccccaactc

SEQ ID NO: 34254 - DNA, 279 bp, Zea mays
ggagaacttgtacgagggaccccttgatgatgtgtatgcaactgctatcagaaactgtgatccagagggtcctcttatgctgtatgtttcaaagatgattcctgcatctgacaagggcaggttctttgccttcggtcgtgtcttctcagggaaggttgctactggtatgaaggttcggatcatgggtcccaactatgtccccgggcagaagaaggatctgtatgtcaagagtgtccagcgtactgttatctggatgggaaagaagcaagagtcggttga

SEQ ID NO: 34255 - DNA, 212 bp, Zea mays
gaggaaattgctctcgcagaagctgatgttgcaagattaaaacagaaggttgcagagctgcatctccaactcaatcaacagcgccagcaccagtatggctcttcggtagatgcaaatgattgtcctccgcaccttccaaatcatctctcacagaacactgtccaaactggatttgataggaccgttgctttttgtaatcaagagaagcaaag

SEQ ID NO: 34256 - DNA, 277 bp, Zea mays
atgtccgccctggtgactggtactgctcctgcggcgcacacaacttcgccagccgctccaactgcttcaggtgctctgcctacaaggaggaggctgccggcgcctttgatagtgacatgtcacgctcacggggctacgccggcttcggcagcggcgctgccgcccgtaccaaccgccccggttggaagtctggagactggatctgcaccaggtccggttgcaacgagcacaacttcgctagcaggatggaatgtttcaggtgcaacgcgccacggga

SEQ ID NO: 34257 - DNA, 279 bp, Zea mays
accacgaggagtacgtgcggactcgagatgcgtgcagctattcacctgcggctggctgcccgctgccgcatcgcccaaggcgctcgtcttcctctgccacggctacggcatggagtgcagtggcttcatgagagaatgcggcgtgcggctggcggcggccgggtacggcgtgttcgggatggactacgagggccacggcaagtcgatgggcgcgcgctgctacatccgcagtttccgccgcctcgtcgacgactgcggccatttcttcaagtccgtctg

SEQ ID NO: 34258 - DNA, 279 bp, Zea mays
aacacttcttcttgcgttgcatcaagagtggcaggtcaaggcccgtgatgaggttcttaaagtgtgcggaaagcatgagcaccctaatgcagaaaacctgagcgatctcaagattgtgagaccatctatttgaaaagttcatacatttgtagtgcttttgagatgattttatgctgtatttatagtgctatatttttgctatgtggatcaggtaactatggtgttaaaagaaaccctcaggctgtatcctccagctacatttatcaatcggactgccac

SEQ ID NO: 34259 - DNA, 279 bp, Zea mays
gaggatattactggggttaagttctcaacagatggacagagtcttctgtcaagaagtatggatagtactcttaagatatgggatttgagaagaatgaaaactcctttgaaagtatttgaagatctgccaaatcactacgctgagacaaatgcagcatttagctcagatgagcagcttatttttacaggaacatctattgaaaaagatggtgacaatgggggattactttgtttctttgatagaaagaaacttgagcttgtatcaagggtgggaatttca

SEQ ID NO: 34260 - DNA, 283 bp, Zea mays
ccccgagtcgccgtcgtctgctccgggctgctgttctgcgcctccacaaggctttggcctctgttgtaagatttaagcttaacctccaaccatgggcaaggagaagtcccacatcaacattgtggttattggccatgtcgactctggcaagtcaaccaccaccggccacctgatctacaagcttggaggcattgacaagcgtgtgattgagaggttcgagaaggaagccgctgaaatgaacaaacggtccttcaagtacgcttgggtgcttgacaagctcaag

SEQ ID NO: 34261 - DNA, 285 bp, Zea mays
gccgctccgcctcagcgcgtcgcccgccgccacatcctacagcgacctcatcgatcaccttcaactttcaatcatggcggacgtcgatgtcgaaccggaggttgccgccggcgctcccaagaagaggacgttccgcaagtacagctaccgcggcgtcgacctagatgcgcttctcgacatgtccacggacgacctcgtccagctcttccccgcgcgcgccaggagaaggttccagaggggtctgaagaggaagcccatggcactcatcaagaagctgcgcaaggc

SEQ ID NO: 34262 - DNA, 278 bp, Zea mays
cccacgcgtccgtgactggcgaggcaaaagcgcaaacgcgaccacagacagagcgcgcttcaaggcctttttttttgagataacaaggaggagaggaggagatggcggtcacgatcacctgggtgaaggcgaggcagatcttcgacagccgcggcaaccccaccgtcgaggtggacgtgggcctcagcgacggcagctacgcgaggggggccgtacccagcggcgcatccactggaatatatgaggccttggagttgagggatggaagatctgattat

SEQ ID NO: 34263 - DNA, 250 bp, Zea mays
ctcgtctccgccttctccgagctgatgggccgcgagggcggctgctcccgcgggaagggcggatccatgcatttctataagaaggatgccaatttctacggcgggcacggcatcgtcggcgcgcaggtgcccctcggatgcggcctcgccttcgctcagaagtacaagaaggaggagacggccacgtttgccctctatggtgacggtgcggctaaccagggacagctctttgaggctctcaacatttcgg

SEQ ID NO: 34264 - DNA, 279 bp, Zea mays
gaaatgattactacggaggagattccacctccctaaacctgaaccagctctggaagaggtttaggggggaagacaagccaccggcacatctaggtgcaagcagagattacaatgtagacatggttccaaagtttatgatggcaaacgggactttggttcggtctctcattcacactgatgtgacaaaatatttgtcattcaaagctgttgatggaagctatgtcttcagcaaacggaagattcacaaggttcctgccaccgatatggaggctctaaaat

SEQ ID NO: 34265 - DNA, 277 bp, Zea mays
cggatgcggaggaggagcccgcggtaccggagcccgtagaggcgcactcgccgccgcgggggctgggaaggacgccgacatcttcgctgttgtcatgattggttcaagacaatacattgtgatgccgggcaggtatatatacacacagagactgaaaggtgccaatgtcaatgatcagatcatattaaacaaggtgctactggtgtcaactagagaaaaagcttacattggcatgccagtggtgaccaacgctgctgttcacgcagtggttgaagaa

SEQ ID NO: 34266 - DNA, 275 bp, Zea mays
  unsure (1)..(275): unsure at all n locations
acccgcacaacggcacgattctcctcctccgtccgcgtactctcggtttcggcgatgtcggggcgcggcaagggcggcaaggggctgggcaagggcggcgccaagcgccaccgcaaggtgctgcgcgacaacatccagggcatcacgaagccggcgatccgtnagctggccaggaggggcggcgtcaagcgcatttctgggctcatctacgaggagacccgcggcgtgctcaagatcttcctcgagaacgtcatccgcgacgccgtcacctacac

SEQ ID NO: 34267 - DNA, 271 bp, Zea mays
caactttatcattcattgcagaaattttcctcttcctctatgttgggatggatgcattggacattgagaagtggaaattagctagtagcagtcctaagaaaccaattgctttaagtgcaattattttgggcttggttatggttggaagagcggcatttgtattccctttgtcgttcttatccaacctaagcaaaaaggaggcccgtccaaagatctccttcaagcaacaagtaatcatatggtgggctggtctcatgagaggagcagtgtc

SEQ ID NO: 34268 - DNA, 270 bp, Zea mays
ctcatctccacctctcctccggctagggtgttcacgcctgccgcggcgaacttctgccctccccggcgtcgcgctctggtcgtcgtcggccgggaagatggctggcggcttcagggtacttcatctggtcaggccctttctggctttcttgccagaggtgcagagcgcggataggaagataccattcagagaaaaagttatctacactgttatttctctcttcatttttctggtgtgcagccagctcccactctatggcattcattcaac

SEQ ID NO: 34269 - DNA, 273 bp, Zea mays
tgatgaaaccggcatcattgtcttcactgcaagaaacgatcaagtggatgtaattaggcctggaacaactgttgaactgaggaacgcaaagatcgacatgttcaagggttcgatgcggcttgcagtggacaagtggggaattgtcaaagctgctgaaagctcagctgagtggacagtcaaggaggacaacaacctgtccttaattgagtttgagctggtgaccgtgacggagtgaaaaccgccattgcttaggagtattgttggttttctgtg

SEQ ID NO: 34270 - DNA, 273 bp, Zea mays
gggatatggcccaggacctgagctaggccgatatagctatgggtttagaggttctccaatgccggtttctagcccatggtctggtggagcattagctgaaaacactgacaacattgcttcacgaaagcgccgtggaggccctgatggactttctgagggtgactggacctgtcccaaatgcgacaacattaacttttccttcagaagcacttgcaacatgaagaaatgtggagccccaaggccaactccgggaggtaacacgagctcatctcg

SEQ ID NO: 34271 - DNA, 255 bp, Zea mays
ggcttttccacaggtccgagtctctgctgtactaactaatgctccttatttgctgaacttggattgtgatcactatatcaataatagtaaggctataaaggaagcaatgtgttttatgatggatcctttgcttggaaagaaagtttgctatgtgcagtttcctcaaagatttgatgggattgatcgccatgatcgatatgctaacagaaatgttgtctttttcgatatcaacatgaaaggtttggatggtatcca

SEQ ID NO: 34272 - DNA, 273 bp, Zea mays
acccggaaggccggaacccacctgctgcgcacctgcaagcctcgagtggagctcttccacggccgcggtggagatggcggcgaatctggaggacgtgccgtcactggatctgatgcacgagctgctccgccgcatgaagtgcagctccaagcccgacaagcgcctcatcctcatcggtccacctggctctggaaagggaactcagtctcctattatcaaggatgaatattgcttgtgccatttagccactggtgacatgctgagggctgctgt

SEQ ID NO: 34273 - DNA, 259 bp, Zea mays
ggcattgacaagcgtgtgatcgagaggtttgagaaggaggctgctgaaatgaacaagcggtccttcaagtacgcatgggtgctcgacaagctcaaggctgagcgtgagagaggtatcaccattgatatcgctctgtggaagtttgagaccaccaagtactactgcacggtcattgatgcccctggacaccgtgacttcatcaagaacatgatcactggtacctcccaggctgactgtgctgtccttatcattgactcca

SEQ ID NO: 34274 - DNA, 268 bp, Zea mays
gaataatgagctacacaacagcatcagctcagcaattcttcatactcgcagaattcttggcatcttggaagccgttttctccctgaagccatcatcagttggtacctcatggagctatagctcaaatgaaatagttgcagcagctatggttgctgctcatgtttctgagttatttcgtcggtccaggccatgccttaatgcactctctgcactaatgagatgcaagtgggatgctgagatttcgaccagggcatcatctctctaccat

SEQ ID NO: 34275 - DNA, 268 bp, Zea mays
cccacgcgtccggttggcttctcctccccctccggttcgggttcgggttcgtgaggttctccggggttcggtttcgtgggtgggcggatcgagatggcggcgtcggatgttgagtaccgctgcttcgtcggcggcctcgcctgggccacggacgaccactccctccacaacgccttcagcacctacggcgaggtcctcgagtccaagatcatcctcgatcgggagacgcagaggtcccgcggcttcggcttcgtcaccttctccacgg

SEQ ID NO: 34276 - DNA, 268 bp, Zea mays
ctcatctctgaagaccttccagatgttgatatttctgttgtcggtgtcaccagcttcagtggacccgaaggcccctttgatgtggatgtctttgactctagtgtaaattacataaagttaatgaagacaatttttgacttcgaagcaataaaaaagctactgacctccccaaagtttacattctgttatgatgcgctccatggtgttgctggagcttatgccaaacacatctttgtggaagagcttggtgctgatgaaagctcactgt

SEQ ID NO: 34277 - DNA, 246 bp, Zea mays
ccgtcatcgatctcgtttcaaatccatccatcctcgtttcctccgtcccgcagcatctcaaccccatggccaagatcaagatcgggatcaatgggttcggcaggatcggaaggctggtggccagggtggccctgcagagtgacgatgtcgagctcgtcgccgtgaacgacgccttcatcagcagcggctacatgacctagatgttcaagtacgacactgtgcacggacaatggagacaccatgaag

SEQ ID NO: 34278 - DNA, 269 bp, Zea mays
cggacggtgggcgccgccgctgcagtgtccatagccaccgcaggagactgagatggggggttttgtcaagacccacaagaccaatgcgtacttcaagcgtttccaggtgaagttcaagagaaggcgcgctggcaagacagactacagggccaggataaggctgattaaccaagacaaaaacaagtacaatacacccaaatacagatttgttgtgcgatttaccaacaaggacatcacagcacaaatcatctctgctagtatagcaggtg

SEQ ID NO: 34279 - DNA, 264 bp, Zea mays
cccacgcgtccggttcttcagacttacaacgggacaatgatgccaaatgttgagttgccattccggttgaattgggctagtgctggtgaaaaacgtgatgacacccccgactatacaatatttgttggtgatttggctgctgatgttacagactatgtattacaagagacatttagggcacattacccttctgtgaagggtgcaaaagttgtaacagacaagctgacaatgcgcacaaagggttatggttttgtgaagtttggt

SEQ ID NO: 34280 - DNA, 267 bp, Zea mays
cacgagtcatggaaggagaaaacgaagagtggaatattttgttttaagtacaagctgctgcgagagccaggacaacctgatggggttgcaatctggaagatgtcccagaaatgggtacaaaatccactgactagaggcagtgttttaaatcctgatctatcatctggtgcagaaaatcttccagtgtgtcttgttaatgacattgacagtgatgaagtgccacaccatttcacatataccactcaggtcgaacacttgaaaccactc

SEQ ID NO: 34281 - DNA, 265 bp, Zea mays
ggcagacggttgctgttggagttatcaagagtgtggagaagaaggacccaaccggcgccaaggtgaccaaggctgctgccaagaagaaatgatgcgatcctgcgcctgctttagcaatacctagttttcatcattacaagttttgtttgtggtcgttgctgttattgtgtgaactgttgagctctgttagcctgtgcacttttatctatttatttggtaccttcttgctatttcaccttctgcaatacaagaatgctgtaagagc

SEQ ID NO: 34282 - DNA, 307 bp, Zea mays
cgttgttactgtccgtcgtggttgccgcgcacagacttgccctgccgacctcgacagcaaatgcgacggtggcgcgcctgatgactgggagggggaattcttccccggcgtcccgaaaatcaagtatgagggtccaacaagcaagaaccctcttgcttataagtggtataacaaggaggaagtcattctcggaaagaagatgaaggactggatgcgcttcagtgttgcgttctggcacacgttccgtggtactggtgctgatccttttggtgcgcctacaaaggtttggccttgggaggacggcaca

SEQ ID NO: 34283 - DNA, 301 bp, Zea mays
ggcaagcatgtgccgagggccatcttcgtcgaccttgaacccactgtcattgatgaggttcgcactggctcgtaccgccaactcttccacccagagcagctcatctcgggcaaggaagacgcagctaacaactttgcccgtggccactacactgttgggaaggagattgtcgatctatgcctggaccgtgtgcgcaactatgcagacaactgcactgggctgcagggattcttggtgttcaatgctgttggtggtgggactggctctggacttgggtcacttttattggagcgcctttcag

SEQ ID NO: 34284 - DNA, 301 bp, Zea mays
caccccggcagccgcaaacgccttcgccgtcgcgtcccgctcctccgcccgcccgacgcgacccctaggacctggagagagaggtcggcatggctgccgcagtggtcgacgacgctggtatggacgccgtccagaagcgcctcatgttcgaagacgaatgcattttggtggacgagcaggacaatgttgttggccatgagtcaaagtacaactgccatttgatggaaaagattgattctgagaatctgctacatagggcattcagtgtgttccttttcaactcaaaatatgagctgctact

SEQ ID NO: 34285 - DNA, 302 bp, Zea mays
gcgccccccacccacccacccactcgcttcagccgcctccgccgcgcgtacaagcaggtggagacaggatgccggctggccacggcctgcgctcgcggacgcgcgacctcttcgcgcgccccttccgcaagaagggctacatcccgctcaccacctacctccgcacctacaagatcggcgattacgtcgatgtcaaggtgaacggcgccgtccacaaggggatgccgcacaagttctaccacggccgcaccggtcgcgtctggaacgtcaccaagcgcgccatcggcgtcgaggtcaacaag

SEQ ID NO: 34286 - DNA, 296 bp, Zea mays
ggaccgtggcggacgcgtgggcggacgcgtgggttggcatccaagttggaaactgcaccagtaaccacatgttgatgtagatgtcaatgcatcagagcttctaaaagaaaagggaaatagcgctttcaaaagaagacagtggatcaaggcaattgagttttactcagaggccatcagtttgagtgacacaaatgcaacatattactgcaacagagcagcagcttatctggaactgggccgttttaagcaggccgaagcagattgtgaccgggccttactgttggatagaaagaatg

SEQ ID NO: 34287 - DNA, 294 bp, Zea mays
cccacgcgtccggtgccatcctcgtcgtatccggtgccgacgggcccatgccgcagaccaaagagcacatcctcctcgccaagcaagtcggtgttcccaagatcgttgtcttcctcaacaagaaggacatggtcgacgacgaggagctgctcgagctcgtcgagctcgaggtccgcgagctgctcagcaactacgagtacgacggcgacgacgtaccaatcgtcgctggctccgcctcaaggcgctcgaggctctcatggtcaacctgcactgaagcgcggcgacgatgagtgg

SEQ ID NO: 34288 - DNA, 301 bp, Zea mays
ctatgttgaagtggtcagcaagcacaatgatgataaacagtatgtgtgggaatcaaaagctgatggatcatttgccatctctgaggatacatggaatgagccccttggccgtggaactgagataagattgcatctgcgagatgaggccaaggagtacttggaagaggataagctaaaggatttggtgaagaagtactctgagttcatcaacttccctatctatttgtggtcgaccaaggaggttgatgttgaagtgcccactgatgaggatgagacaagtgaagaagaggatcaactccag

SEQ ID NO: 34289 - DNA, 302 bp, Zea mays
cacacagaaaaccctagccgccgccaccgaagcggcctcccaggtaagcaggagcgtccaccccgccgccgtcatgaagcgcaatccccgcgtcacgagctcccgccggaagtgccgcaagggcactttacggccccgtcctccgtccgccgcgttctcatgtccgccgggctgtcgacggagctccgccacaagtacaacgtgcgctccatcccgatccgcaaggacgacgaggtgcaggtcgtgcgcggcacctacaagggccgcgaggggaaggtggtgcaggtctaccgccgccgctg

SEQ ID NO: 34290 - DNA, 296 bp, Zea mays
gtcaggcattagcatgtgttccttttatttctagcaaatcagacaaaatacagaaccacagaaaaaggggggtcacgagttcagatcatgttctcagccaggaacgcccatctgctttattaacaccttacacggaattcccgagggtgtgaggcttgaatcgatcaatagacacgagctttcggcgggaaggactctacttcatcgtctaatgtgttcatgtgcactggcctgtatgccaatcgaaccttctcgttttcccagtaccccagtgagtgcttcatccacttctcgtc

SEQ ID NO: 34291 - DNA, 293 bp, Zea mays
accgtgacttcatcaagaatatgattactggcacttcccaagctgactgcgctgttcttatcattgactccactactggtggttttgaggctggtatctccaaggatggacagacccgcgagcatgctctccttgctttcacgcttggagtgaagcagatgatttgctgttgcaacaagatggatgccaccacacccaagtactccaaggcccgttatgatgagattgtgaaggaagtctcttcctacctgaagaaggttggatacaaccctgacaagatccactttgttccc

SEQ ID NO: 34292 - DNA, 299 bp, Zea mays
atagacccagcacggcggtattccgaggctgagatatggcaggaaatacaatctaaacctatgctatgttgaacaaggccctcgagtgctgccagctaaaggatatagtagcctcaaaaccggagaagcttgatgcactagtcgccgacatgggggagaactggagcgtagggcagaagcagcttctgtgcttcggccgagtcatactgaaacgcagccggatcctcttcatggacgaggcaacggcttcggtcgattctcaaacagacgcggctatccaaaagatcatccgcgaggag

SEQ ID NO: 34293 - DNA, 277 bp, Zea mays
caatggtgaaggctgttgctgtgcttggtagcagcgatggtgtcaagggcaccatctttttcacccaagtgggagatggccctaccactgtcaccggaagtgtctctggcctcaagcctggcctccatgggtttcatgtgcatgcgcttggtgacaccaccaatggctgcatgtcaactggaccacactacaatcctgcgagcaaggaacatggagcaccagaagatgagaaccgccatgccggtgatcttggaaatgtgacagctggagcagatgg

SEQ ID NO: 34294 - DNA, 285 bp, Zea mays
catcaattgagaaagaggtcttccctcaaattgcagctgatcaacagctctatgcaatggtccttccaggtttttggatggatgttggtcagcctagggactacattactggcttgcgtctttatctagactcgattaggaagaaatcagctgccaagctagctactggagcacatgttgttggcaatgtgctggtgcatgagagcgccaagattggagaaggttgtctgattggtcctgatgtcgccattggacctgggtgtgttgtggaggacggcgtgaggc

SEQ ID NO: 34295 - DNA, 288 bp, Zea mays
agcgttttcctctccgagtcctccctggcctctcaaccactcatcatcgccttcgcaggcatcgccctctcgccgggccgtccgattccgccatggcttccgatgagagcaaaaattcaaaaccagagaagccatcttcagcagctggtgcaggcctccccaatccgtttgatttttcttctatgagcaacttgctcaatgacccatcgataagagagatggctgagcaaattgcaagtgaccctgtgttcaaccagatggctgaacagcttcagaaaagtgctcagg

SEQ ID NO: 34296 - DNA, 288 bp, Zea mays
gggagggtcggcacaggacatcacggcagagcagccaccacggcgtctgcacagcatcaccgtccgcgctggcgttgccgtcgactccatcgagttcacctacaccgacgacgctgggcagaggcgcactgctgggcggtggggtggacttggcggcaatgttcgaacgatcgaccttggcgacgcagaggatgtcagggaagtctcgggaacatacggcgcatttgaaggtgccattacgctgacctcgctcaggctcgtcaccagcagcagaacctggggcccctg

SEQ ID NO: 34297 - DNA, 185 bp, Zea mays
aagctctcaacgagcaccatgtcctcctggagggtaccctcctgaagcccaacatggtgactcctggctccgactctaagaaggtgacacctgaggtgatcgcccagtacaccgtccgtaccctccagaggaccgtccctgctgctgtgcctgctgttgtcttcctctccggtggacagagcgag

SEQ ID NO: 34298 - DNA, 181 bp, Zea mays
cccacgcgtccggaccttgttcttctttgtacatctactccagatgatctgtttggaggtgctgctcagtggggtgcacaaaagcttttggatttgatattacagctgcttgtagtgggtttttagtcggcttaatcacagctactcgctttatcaaaggcggaggttttcagaatgtctt

SEQ ID NO: 34299 - DNA, 182 bp, Zea mays
agaattctactgttagatgaagctacaagtgcgctggacgccgagtctgaaaggatcgtgcaggaagctcttgacagggtcatgtcgaataggacgactgtcatagtcgcacaccgtctgagcaccgttagaaacgctgacaccattgccgtcattcatcaaggaacactagttgaaaaggg

SEQ ID NO: 34300 - DNA, 188 bp, Zea mays
tatccgtctacagagacttaaagccagagaacattttacttcatagagatgggcacatttcattgacagactttgatttgtcttgcttgacatcctgccgaccacaagtgtttcttccacacgatattgataagaagaaaaacaggaggaagagcaggagtaatcccatattttttgctgaaccaatg

SEQ ID NO: 34301 - DNA, 189 bp, Zea mays
tctccgagaagagcggcggcgcgtacggacaaggagcaggcggaagaggagttgtgccaaggcacaatgggtatctcgcgtgactcgatgcacaagcgccgagccaccggtggaaagcagaaggcctggaggaagaagcgaaagtatgagcttggtcgccagccagccaacaccaagttgtcaagcaat

SEQ ID NO: 34302 - DNA, 169 bp, Zea mays
gctggtgagaacttggataactttggcgatgtaaagaacattcttgtcgaaatgggaacatactttcaagttcaggatgattatttagattgtttcggtgatcctgaattcattggcaagatcggaactgacattgaagactacaagtgttcctggctagtcgtgcaag

SEQ ID NO: 34303 - DNA, 177 bp, Zea mays
cccacgcgtccgcccacgcgtccgcaatccttcaagcgcaactgcctcctcctcgtcgtccggtcgtgagaagggatggcgggccgtggcaaggctatcggcgctggccgccgaagaaggcaacgtcgaggagctccaaggccggactccagttccccgtcggcaggattgccaggt

SEQ ID NO: 34304 - DNA, 174 bp, Zea mays
gttcatgctgcaaccggaggcgatgacacggatgacgagcccgaggtgatcgccgtgaactccgtgttcgagctgcaccggcttcttgcaccccggtgccctcgagaaggtcctgggcacggtgcgcgcggtgcgccgaggatcgtgaccgtggtcgagcaggaggccaaccac

SEQ ID NO: 34305 - DNA, 176 bp, Zea mays
gtcgcgacgactgggcgagaccgccgccgccgccgccgcctgagttctttagaaatggctgatggtgaggacatccagcctcttgtctgcgacaatggcactggaatggtcaaggctggttttgctggcgacgatgcaccaagggctgttttccctagtattgttggccgtcctcg

SEQ ID NO: 34306 - DNA, 178 bp, Zea mays
cgagaccccaagcaccagcgcggcggcggcggcggcggcgaccatggctgtcgggaagaacaagaggatctccaagggaaagaagggtggcaagaaaaagaccgtcgaccctttctctaagaaggattggtatgacatcaaggcaccgtcggtgttcagtgtgcgcaacatcgggaag

SEQ ID NO: 34307 - DNA, 173 bp, Zea mays
ctggaaaggatgacattgatgtgggttctatccggatgacgctgttcaacatctttggtgatgatgccagcccaaagattaagaagttcatgaaggtcatgctcggaaagttccaccagggccagtcaggtgagcaaggcagtggtggtggtggtgtctttggcatggttggt

SEQ ID NO: 34308 - DNA, 173 bp, Zea mays
cccacgcgtccgtgcctacgagtacatggttgactactcaaccatcaacaagcaggctggaaggttggagaatgtggttggctggtatcactcacaccctggctatggatgctggctgtcaggaatcgacgtgtcaactcagatgctcaatcaacaattcacagaaccattct

SEQ ID NO: 34309 - DNA, 171 bp, Zea mays
gaacaacgtatacgcggaggggtgcctgttcgacaagcacgcgcggacgggctggccttcgtgacgctcaagcacgacggggagcgcgagttcatgttctacaggaacccgagcgcggacatgctgctgacggaggcggactggtacctgggcctggtgcggcgcgccagg

SEQ ID NO: 34310 - DNA, 173 bp, Zea mays
ggagaagcagccgccgttgctgctgccgcgtccacagaatggggggtttcgtgaagacccataagaccaatgcgtatttcaaacgtttccaagtgaaattcaagagaaggcgggctggcaagacagactacagggccaggataaggctgattaaccaagacaaaaacaagtac

SEQ ID NO: 34311 - DNA, 172 bp, Zea mays
tgttgcatggtctaaatgagcatagtggaaggtacagccatttcgcaaaactgttgaatgatcaagggcttaaagtttatgccatggactggattggacatggtggaagtgatggagttcatggatatgtttcgtcacttgatcatgctgttggtgacttgaaagaatttct

SEQ ID NO: 34312 - DNA, 173 bp, Zea mays
ggccgacggaaagctggtggcgtcggtgcttttcgagcgtctccccgtcgtcatccccaagatccaccccgttgtctacgctttccaagaattctcatttcggtggaggcagcagtacagacggcaataccccgaggaggtcctcggcaaggccgacgcgaggggtaagggtg

SEQ ID NO: 34313 - DNA, 171 bp, Zea mays
cccacgcgtccgcccacgcgtccgataagcttcaagatgtgcttccacctgaaattggtgaactgaagaaactgacacacttgtatttgagcttcaacaacttcaaaggcgagattccggtggagcttgcaaacctgccagaacttcgttacctttatcttcacgagaacc

SEQ ID NO: 34314 - DNA, 170 bp, Zea mays
ggaatatggtggtgttcctcagtctgcgactccagaatctcttctgaaagaagctatccatgtcataagttgtggctacgaggacaagactgaatggggaactgagattgggtggatctatggttctgtgacggaagatattctcactgggttcaagatgcacgcacgag

SEQ ID NO: 34315 - DNA, 254 bp, Zea mays
gggaacaggagctggcctgtttgaggtcaagaagataggtgatgaattctttgcctttattgttgactgtaaagatcccaaggcatgtactgttttgttgaggggagcaagcaaagatgtattgaatgaagttgagagaaacctgcaggatgccatgtccgttgcaagaaacattttgaaaaatccgaaactccttcctggaggtggtgctacagagctgactgtatcagcaacactgaagcaaaagagttctt

SEQ ID NO: 34316 - DNA, 252 bp, Zea mays
cccacgcgtccggcttaatgatctgttcaaggttgccgtcagccagcccaaggtccctgttggtgttgatcccaagtcaatattgtgtgagttcttcaaggctggccagtgccagaagggttttaagtgcaaattctctcatgacctgaatgtccagaggaagggtgaaaagattgatatctatacagacaagcgtgatgcagaaaccatggaggactgggatcaggaaactcttgagaaggttgttgaatc

SEQ ID NO: 34317 - DNA, 259 bp, Zea mays
gctatctcgagctagctagctgctgtaagccgttgccatggccaaaatggtgttgctctgcgtgctcgtctccttcctcctgatgcccttggcctccctagccctgacgcaggacttctgcgatcgccgacgctgacctagcagcgcacacgtccggcggggtacccgtgtcaagtccagcgtcaccgccaacgacttctacttccacggcctggccggccagggcaaaataaacccactcatcaaggccgccgtgacc

SEQ ID NO: 34318 - DNA, 248 bp, Zea mays
cgcatttgggatcagaaatgtgacacacattgagaaagctctatcagaagcttacagttgatggttctaaagcaagggtggaggttcctatgcttggagttgagtcatgtggatgtccctgatttttaaatagatgaaaagtttgctcagatgattcaggaagccggattccagagggtggaatatgaaaacctcctgagcggtgtagttgccattcattctggactgaaactgtagagctgaataca

SEQ ID NO: 34319 - DNA, 254 bp, Zea mays
tgtagccaaggctaacaagctcaagctcgagtacaacaaggccatcgctgcctacaacaagggcgagagcactgcagctaagaaggctcctgccaaggaggaagaggaggaagatgaatgaggagtctggacaagtccaagtctggaggtcaatgacgaggatgatgaagagggtagtgaggaggatgaagatgatgacgaatgatggagctcctcgagacaatggaccgtgcttcatccaacaatggagcggc

SEQ ID NO: 34320 - DNA, 210 bp, Zea mays
atcactggtactgtgcctgaggaggttgccgtgttgcctttgctgacaaaaattgatttgtcaacaacaatctctatgggaaacttcctacttgcttccaagaatgtggcgttaatactgctggtaaccctaacataggcaaggatgctcctgcaccaactgcaggaccaggtagtagcaacaacagtccatcgggaggaagcagtagcg

SEQ ID NO: 34321 - DNA, 250 bp, Zea mays
agagacgctgggcggacgcgtgggcaacccgtcagcccctctcgtttttcatccgccttcgcctccaaccacgtgcgctccaaccctcctccaggaaagcgagagcttctgcataagaacaacaaatcaaaagcgtgatcagctcggtgccaacaaaacctcaacaaccaagtttcatgtctgatctcgacgtccagcttccatctgcctttgatccgtttgctgaggcaaatgctgaggactctggtgc

SEQ ID NO: 34322 - DNA, 255 bp, Zea mays
cggacgctggcggacgcgtgggctgcagtcaccactcccaagccagtacccacagtcctacgagcagtacgcacgcaagtgtgcaagagacaaaacggtcgacatggctcgcacgcaatgctgccgtagcgagtcgccgtgagtggccgcgcgtgctgctgctggcagcggcggcgacgacctcggaggccgccatcacctgcgggcaggtgagctccgccatcgcgccctgactctcctacgcccgcggcacgg

SEQ ID NO: 34323 - DNA, 251 bp, Zea mays
gtccagaaccggcaggccaaggtctccgtcgtcccctccgccgcggcgctcgtcatcaaggcgctcaaggagccagagagggaccgcaagaaggtcaagaacatcaagcacagcggcatacatcagcctcgtacgacgtcatcgtagatcgccaggaccatgaggcacaggtccatggccaaggaattggccggcaccgtcaaggagatcctcggtacctgcgtcacgtcgggtgcaccgtcgacggcaag

SEQ ID NO: 34324 - DNA, 252 bp, Zea mays
  unsure (1)..(252): unsure at all n locations
cctttatacacaaagaggtatggaattgtaaatggagaagtggaggtagatggtgtttgtgatgaaccggccagtgagaatactgttgagggaaaagaaccagacgctaaaggagttcctagactgttaggcttactgccantgaaaacaaacgaggttttgtctgaggagatacaagagcgcgatgaagccgctttgaaatatctaaaagatatcaagtggtctagaatcgaggatcctaagggtttcaag

SEQ ID NO: 34325 - DNA, 247 bp, Zea mays
caaagggaattctgtgggcctaccgtcaacagactggtgaagaggatgctcagcttactccgctcttgcgccttggagctggagcatgtgctggtatcatagctatgtctgctacttacccgatggatatggttaggggaaggatcactgtccagacagacaaatctccctaccagtaccgtggtatgtttcatgcactgggtacagtctaccgtgaagaaggctttcgtgctctatacaaagggtg

SEQ ID NO: 34326 - DNA, 188 bp, Zea mays
cgagttggagcacctcatcatactgacagctagccggtgcttgctgggaagggaggtgcgagaaaagctgttcgacgatgtttctgctctctcatgaccttgacaacgggatgcagccaatcagtgtcctcttcccgtacctcccaatccctgcgcataagcaccgtgacagggcacgggcacgtttg

SEQ ID NO: 34327 - DNA, 240 bp, Zea mays
ctctctcagggcagggcgacgaggtcacagcggttcgtggtgcgtgcgaacgccaaagacattgcctttgaccagaaatccagggcagcgctgcaggccggcgtcgagaagctggcaaacgccgtcggtgtcaccctcgggccacgagggaggaatgtggtgctcgatgagtacggcaaccccaaagttgtgaatgatggagtcactattgcccgtgctattgagctgtatgatccaatg

SEQ ID NO: 34328 - DNA, 244 bp, Zea mays
cggacgctgggtcggacgcgtgggcggacgcgtgggttacaaagttagtgaatcattcccctacaagtggaatcaacaagaaatgcaaagaaggttatcatgttacatcaatgacaactgcaggaagccgctggggtgtagttatgtcaaggaactctggatactctgaacaggtagtggagttggattttctttatcctagtgaaggtattcaccgacgatgggagaacggatatagaataac

SEQ ID NO: 34329 - DNA, 248 bp, Zea mays
catatctcctcgcatttccttgcaaccgattgccttcccccctcccaacccaagaccgatggcgcccaaggccgagaagaagctcgcggcgaagaagccggcggaggaggagcccgcggcggtagaagacgaccgccgggaagaagcccaaggcggagaagcggatccccgctggcaagtccgccggcaaggagggcggcgagggcaagcgtggcaagaagaagggcaagaagagcgtggagacgtac

SEQ ID NO: 34330 - DNA, 248 bp, Zea mays
cacccggaaaggcgctctgcactggaaggtcgtgtcggtgtacatcaaccggatgggcctggtgatgctgaagacgaagagccggcacgtggcagggacgatcacgaagaagaagattaagttgtggtggtcgagagtgtgcagtggacgtgccggcgtggcccgggcggcacctgctggaggacggcgggcaccggcggtacttcggcctgcgcacggcggagcggcgggtggtcgagttcgagtgc

SEQ ID NO: 34331 - DNA, 248 bp, Zea mays
ctctttcttcttatctttctgcctgtagtccagacaagactctgaaatggtgtgataggctgcaagtgctgattgccattgctaaggctgttcatttcctacatacaggaataattgcctggtatcctgtatccaattcggctaaaatcttccagtattttggttgatgaacaccatacggcaaagttgagtgactatggattatctataatcacagaggagatatacagacatgaggtaataggaca

SEQ ID NO: 34332 - DNA, 244 bp, Zea mays
tcttctgaagggagtcgttgcgacaactgatgttgtggaagcgtgcactggcgtgaatgtggccgtcatggttggtggattccccaggaaggagggaatggaaaggaaagatgttatggtctaaaaatgtttcaatccacaaaaaccaagcatctgctcttgaagcccatgcggcccccaactgcaaggttctggtggttgccaacccagcgaacaccaatgctcttatcttgaaagaatttgc

SEQ ID NO: 34333 - DNA, 241 bp, Zea mays
catctggggaatacacccttgcaactggggttgcaatagtttcggtctttgccgctatgagctttggccttggatgggctgttggatcacaacctctgttttgggctcttttcataagctttgttcttgggactgcatattcaatcaatctgccgtaccttcgatggaagagatttgctgttgttgcagcactgtgcatattagcagttcgtgcagtgattgttcagctggccttttttct

SEQ ID NO: 34334 - DNA, 276 bp, Zea mays
gtccggatccctactaaggttctccacatcaccactcgcaagtccccttgcggtgaaggaacaaacacatgggatcggtttgagttccgcattcacaagagggtgattgacctaatcagctcccctgatgtggtgaagcagatcacctccatcacaattgagcccggtgttgaggttgaggtgaccattgccgacgtgtaaggacgtgaagttcagcaatgtcatcgacaatctttttctttgtgctccctgtgtgctcgcaagagagattttgaa

SEQ ID NO: 34335 - DNA, 279 bp, Zea mays
cgccacttgcttgagtagcgaacgcagagagcaatggcgtcgctgtcgtgcgcctccacgctgccctggacccccgcctcctacccgcggccctcggcggggcgctgccttacggcctctcgccgggctccgtcgctggtcatcgtcgcccaggggaaggtcaagaagtaccgcctagtcatattgacagacgacatagaagaggtggggaagaaaggggatacactgaaggtgcgagctggattctaccgcaacttcctccttcccaagggcaaggct

SEQ ID NO: 34336 - DNA, 281 bp, Zea mays
cccacgcgtccgcagctgattgatatttctgaggatggatttgtgagccttcttacttcagatggcaacactaaggatgatcttagactcccaactgatgagactcttgtggcccagattaaggaagggttcgataacgggaaggatcttgttgtgactgtccagtctgcgatgggggaggagcagatctgcgcgctgaaggatgttggccccaagtaacttccttggctttggagacggaaccctactctatctcaacttaaatcggaaaagaagtgtat

SEQ ID NO: 34337 - DNA, 282 bp, Zea mays
cccacgcgtccgagtgaagtttgaaatagaggatgcgataggagatgtcataggggagctgctgaagacagcctaagaggaacccaagtggatatttttctcgcatggtctagtttttttcccccacaatccattagaagctcagtctataaagtgttgttcattttctagttttcttactgatgaggtggtaaaataaaaaaagcatgggtcaattagaaagtctagtaagtcatagaattgatgcgctagtcttacacaatatttttcattgccatttcg

SEQ ID NO: 34338 - DNA, 281 bp, Zea mays
ccgttcctgcatttctgaaggtgcagttatagaggactctttgctaatgggtgcagactattacgagactgagaatgataagaatgtcctttctgagactggtggcattcccattggtattgggaaaaattcacatatcagaaaagcaatcattgacaaaaatgctcgcattggagaaaatgtgaagataatcaattttgataatgtccaagaagcagtaagggagacagaaggatattttatcaaaagtggaattgtcacggtgattaaagatgctttaa

SEQ ID NO: 34339 - DNA, 267 bp, Zea mays
agctcttccacggccgcggtggagatggcggcgaatctggaggacgtgccgtcactggatctgatgcacgagctgctccgccgcatgaagtgcagctccaagcccgacaagcgcctcatcctcatcggtccacctggctctggaaagggaactcagtctcctattatcaaggatgaatattgcttgtgccatttagccactggtgacatgctgagggctgctgtggcggccaagacacctctacgtatcaaacctaaagaagctatg

SEQ ID NO: 34340 - DNA, 281 bp, Zea mays
gatgggttcaactacatcaaagaatcttttgaaaatggtactcttcaccttattgggttgttgagtgatggtggtgtccactcccgccttgaccaactacagttacttctgaaaggtgtcagtgagagaggagcaaaaaaaattcgtgtgcacatccttaccgatgggcgtgacgttttggatggaagcagcgttggtttcgtggagaccctagagaatgatcttttggagcttcgaggcaagggtattgatgcacagattgcatctggtggtggaaggat

SEQ ID NO: 34341 - DNA, 281 bp, Zea mays
accaaaagttgaagataaaccaaaggtagaggaaaaagccccaaaagtagatcctcccaagatgcaagcaccaaagccaactgcaccatcaaaaacatccccttcagaaccacagctccctccaaaagaacgagagcggcgggtgccaatgccaaggctcaggaagcgtattgcaaaccgtcttaaggattctcagaacacctttgcaatgctgagtacatttaatgaagttgacatgaccaattttgatgaagcttcgtctgattataaagatgaatttg

SEQ ID NO: 34342 - DNA, 272 bp, Zea mays
ccgttcctgcatttctgaaggtgcagttatagaggactctttgctaatgggtgcagactattacgagactgagaatgataagaatgtcctttctgagactggtggcattcccattggtattgggaaaaattcacatatcagaaaagcaatcattgacaaaaatgctcgcattggagaaaatgtgaagataatcaattttgataatgtccaagaagcagtaagggagacagaaggatattttatcaaaagtggaattgtcacggtgattaaag

SEQ ID NO: 34343 - DNA, 276 bp, Zea mays
tgaagctatatctaagatgcacaatatgagcgctgctgacttcacatcagcgcgtacattgattgacgagtatgacctgtatggtctagtggcatactccaagcatcatatacactcagaagttcctgacatttatcgtttagctgcaagacactcaaggggcgtttgtacatgtagctcacttcgaacaatttggagttactctgacagaggctgctatgaatggttagcatataatcgcgacaataaatggaacccctgctgaaattaatcagg

SEQ ID NO: 34344 - DNA, 276 bp, Zea mays
gtcgccactattattgcggggggtagtgatgcagtgacaggccacataatatcgactacgattgggggaaagaatggtgaaccaaagaggaccatcagctatatggctgagcgagttgttggaactggatcgtttggggttgtcttccaggcaaaatgcattgagactggtgaaactgttgcaattaagaaggttctacaggacaaaagatacaagaatagggagttacaaataatgcgatcaattgaccattgcaatgtcatttccctgaagcat

SEQ ID NO: 34345 - DNA, 277 bp, Zea mays
cccacgcgtccgagagaatagtagattggcttgctagcaacttcaagaaagatgaaggtattgatcttctgaaggataaacaagcccttcagaggcttactgaggcatcagagaaagctaagatggaactgtcaacgctgacacaggcaaatattagcctgccattcattactgctactgctgatgggccaaaacacattgaggcaaccctctcgagagccaaattcgaggaactatgttcagaccttatagacaggcttaaaactcctgttaataa

SEQ ID NO: 34346 - DNA, 278 bp, Zea mays
gaagaagccggcggccgaggagaaggcggagaagacgaccgcaggcaagaagcccaagtccgagaagcgcctgcccgcctcgaagtcctccggcaaggagggcggcgagaagaaggggaagaagaaggccaagaagagcgtggagacctacaaaatctacatcttcaaggtcctaaagcaggtgcaccccgacatcggcatctcctccaaggccatgtccatcatgaactccttcatcaacgacatcttcgataagctcgccggcgaggccgctaagc

SEQ ID NO: 34347 - DNA, 277 bp, Zea mays
cggacgcgtgggcggacgcgtgggcgaggtgcaggtcgtgcgcggcacctacaagggccgtgagggcaaagtagtgcaggtgtagcgccgtcgctgggtcatccacgtcgagcggatcacccgcgagaaggtgaacggctccaccgtgaacgtgggcatccacccttccaaggtgatggttacaaagctgaagcttgacaaggaccgcaaggctctcctcgaccgcatagcccggggccgcgccgccgacaaggctaagggcaagtttactgccgac

SEQ ID NO: 34348 - DNA, 257 bp, Zea mays
atattgaactgggtgtactgatggccatggatggtgttgctgttggggaggaggcgatgcatatcggacagggtttgtgggtggcaatgggccggggtaatatggtggtggcggtggcggtggccatggatgcgttggggtgcagggcagcggtggcggcaggacggggcatggcgggcactgtggtggagggtgatagactggcgcagtatgaggcggtgatggtggaggtggggaatgcggtagtggtgatggtg

SEQ ID NO: 34349 - DNA, 271 bp, Zea mays
ggagctcggctgcgtgttcctgaccggcgagaggctcaagtcccccggcgaggagtgcaacaaggtgttcgtcggcatcagccagggcaagctcgtggaccccatgctcgagtgcctcaaggagtgggacggcaagccgctgcccatcaacgtcaagtaaagaacgccaaggagaagaggagggaggggaggaaatacgtgaaaaaaaataaaacctgtacacgtgtatgtccagatcgtgtgtcgtcgatcgttcttcgttgttgatttt

SEQ ID NO: 34350 - DNA, 271 bp, Zea mays
cccacgcgtccgagcccatacagacgtttcggccatataacattgctcatcgtggatcaaatggggaaattcccgaggaaacagctgctgcatacatgagagctattgaagaaggggcggattttatagagtctgacatccttgctagcaaagatggggccttgatttgttttcatgatgtaacacttgatgatacaactgatgttgccaagcgtaaggaatttgccaatcgaagaagaacctatgaagtggagtggtttaatgttactgg

SEQ ID NO: 34351 - DNA, 272 bp, Zea mays
ggtcattgttgctgataactttttcaccggttcaaaagataacctgaagaagtggatcggacacccaagatttgagctcatccgccatgatgtcactgagccacttcttgtggaggttgaccagatctatcaccttgcttgccctgcttcaccaatcttctacaagcacaatcctgttaagaccatcaagacaaatgttattggtaccctgaacatgctgggacttgcaaagagagttggagctaggattttgttgacatcaatatctgaag

SEQ ID NO: 34352 - DNA, 266 bp, Zea mays
cccacgcgtccggtgggtgccgggttttatttgaatgccacaaatgaaaagtggaaaaactggcgcatgtatgactacattgtgaaggaacttccaaaagttttaagtgataactttgaacaactcaacacgtcacaggcatcaatttttgggcactcaatgggagggcatggcgcgctgacaatttacttgaaaaacactgataaatacaagtcggtgtcagcatttgctccaattgccaatccgataaactgcccttggggtca

SEQ ID NO: 34353 - DNA, 276 bp, Zea mays
ctcggatccgcccgaccacgaccaccccgcgccgccgccgcgcagcagcagcagatcagagaagatggccggactcgacaccttcctcttcacctcggagtccgtgaacgagggacaccctgacaagctctgcgaccaggtctcagatgctgttctggacgcttgccttgctgaggaccctgacagcaaggttgcttgcgagacctgcaccaagaccaacatggtcatggtctttggtgagatcaccaccaaggccaatgtcgactacgagaagat

SEQ ID NO: 34354 - DNA, 284 bp, Zea mays
aagaaataaatcagttgagaaagctggaggtgacctttgggacaaacaccatgttgaaactgatcatggccaagataattgtctggaccaagaagttcctcaggaagccgaacgaacctctgataaatcaaataaatcaagtgggacagaggatgtgaaatctgatcttgctttggacaatgttgcagagtttgagatccaatgggaagaaatttctattggtgaacggattggccttggatcgtttggagaagtttatagaggagaatggcatggaacagaag

SEQ ID NO: 34355 - DNA, 280 bp, Zea mays
aagaactggtgcaagagcaagaagaaggctttcacaaagtatgctctcaaatatgaaaatgatgctggcaagaaggaaattcagctgcagcttgagaagatgaagaaatatgcttctgttatccgtgtcattgctcatacccagattaggaagatgaagggtttgaaacagaagaaggctcacctgatggagattcaggtcaatggtggtaccattgctgacaaggtggactacggctacaaattttttgagaaagaggtccctgttgatgctgtcttcc

SEQ ID NO: 34356 - DNA, 284 bp, Zea mays
cccagacatttacttcattttcctatggaaccggggtctttgccccaggacgatgctcaccgggactagactgtgccatcccaactgggaattcactcgtcgaaccttacattgctggccacaacattcttctagcccacgctgaggctgttgatctttacaacaagtattacaagggcgagaacggccgcataggtcttgcatttgatgtaatgggtcgtgtgccatacggaacatcatttctagatgaacaggccaaagaaaggtccatggacattaaccta

SEQ ID NO: 34357 - DNA, 283 bp, Zea mays
gtcggagatggaggatttcctgaacaagttcttccccgggttgctcaagaggacggcgcgcgccaacaaggacgtgtactgcatttacaacaaccaggcgctgacggccttcacgtcgtcgctgtacgcgttcggcatggtggggacgctgctggcgagccgcgtgacccggcggctggggcggcaggccgtcatgctgatcggcggcggcctgttcttggccggcgccctcgtcaacgccgccgcggccaacatcgccatgctcatcgtcgggaggatgctg

SEQ ID NO: 34358 - DNA, 283 bp, Zea mays
gtcagtaactaggactaggttgggctcgagagaaggaacgggaagaacgaggccgacgagaactgggaaggcatggcgatggggttagaggacggcgagtacggcgccttcatggagaaattcaagatgctgccttcgcaatctcagcatcagcagcagctcccgcttcacggcctcaccttcgctatcaaagacatcttcgacatcagcggccgtgtcactgggttcggcaacccggactgggcgaggacgcatgcccccgccggcgccactcccccgtcgt

SEQ ID NO: 34359 - DNA, 284 bp, Zea mays
aggcccttcccggtgacaatgttggcttcaacgtgaagaatgttgctgtgaaggatctgaagcgtgggtatgtggcctccaactccaaggatgaccctgccaaggaggctgctagctttacctcccaggtcatcatcatgaaccaccctggccagattggcaatggctatgccccagttctggactgccacacctcacacattgctgtcaagtttgctgagctcgttaccaagattgataggcgatccggcaaggagctggagaaggagcccaaatttctcaag

SEQ ID NO: 34360 - DNA, 280 bp, Zea mays
ttctctttccagtcgccctgtgccatggtattggtcacatcactagcaatgtgtccttcgctgctgttgcagtctcatttgctcacactatcaaagctctggagcccttcttcagcgcacggctactcagtttatccttggacagcaagttcccttctctctgtggctttctcttgcccctgtggtcattggtgtttcaatggcatcccttactgagctttcattcaactggactggcttcatcaatgccatgatatcaaacatctcattcacttacagg

SEQ ID NO: 34361 - DNA, 284 bp, Zea mays
ggcttttccacaggtccgagtctctgctgtactaactaatgctccttatttgctgaacttggattgtgatcactatatcaataatagtaaggctataaaggaagcaatgtgttttatgatggatcctttgcttggaaagaaagtttgctatgtgcagtttcctcaaagatttgatgggattgatcgccatgatcgatatgctaacagaaatgttgtctttttcgatatcaacatgaaaggtttggatggtatccagggccccatttatgtgggtactggatgtg

SEQ ID NO: 34362 - DNA, 278 bp, Zea mays
gttcgccgccaaggactacacggacccgccgccggcgccgctggtggacgcggcggagctgggttcgtggtcgctgtaccgcgcggtgatcgcggagttcatcgcgacgctgctgttcctgtacgtgacggtggcgacggtgatcgggtacaagcaccagacggacgcgtctgcgtcgggggccggggcggacgcggcgtgcggcggcgtgggcgtgctgggcatcgcgtgggccttcggcggcatgatcttcgtgctggtctactgcaccgccggca

SEQ ID NO: 34363 - DNA, 274 bp, Zea mays
gcgaggggatccggtacaagaagaatgaagtcttcttggatgtagtggagagtgttaacattctagataacagcaatggccagattgtgagatcagatgtggttggggcactgaagatgcgaacatatttgagtggaatgccggagtgcaaacttggcttgaatgatagggttcttttggaggctcaaggcagagcaactaaaggcaaagcgatagacctcgatgatatcaaatttcatcagtgtgtacgtttggctagatttgagaatgatag

SEQ ID NO: 34364 - DNA, 281 bp, Zea mays
gcattctcgaattacgattcccaatccagcaaaccctaccagccttttgcaaactcagagagggacccgatggcacccaaggcggagaagaagccggcggcgaagaagcccgcagaggaggagcccgcggccccggcggagaaggcccccgctgggaagaagccgaaggggagaagcggctcccggcgggaaaatccgccggcaaggaaggcggtgttgacaagaaggggcggaagaaggccaagaagagcgtggagacgtacaagatctacatcttcaag

SEQ ID NO: 34365 - DNA, 273 bp, Zea mays
accgctccaccgctaaaccctcgagtgctcttccgcgcggcggggcgccgagcgtgaaagccacctgctctcgtccagtcgcactcgcgccgcgaggggaaaccctaggagcggcagatctagagcgggcgctctcgatccggccgcgtagacgcacgttttggccggggaaatggcggaggatcctgccgccgaacaggagacgcggcagctagaggaccggctcagggaggtcggggaacggctgcaggcgcctcccgacgacgcggagga

SEQ ID NO: 34366 - DNA, 275 bp, Zea mays
tgaaaagatagggaagtactgtgatgtaacacttatgtcgctggcatatgccgggacaggaaatgtgcttaaggttcagaaacttcttggcatttgttcacagcatcttgagaaaggtgaaacacaccaagggccagctgtccttggaattgctcttattgctatggctgaagaattaggagctgaaatggctgtacgttcacttgagcgtcttctgcagtatggcgagcagaatataagacgagcagttcctcttgctcttggtatactctgca

SEQ ID NO: 34367 - DNA, 277 bp, Zea mays
cctctacctaccggagcagggagcacgccgcacgagccctttccgccgccgccaaaatggtgaacgttcctaagaccaagaagacctactgcaagaacaaggagtgcaagaagcacactctccacaaggttactcagtacaagaagggtaaggatagcctgtctgctcagggaaagcgccgttatgaccgcaagcagtcaggatatggtggccagaccaagcctgtcttccacaagaaggccaagaccaccaagaaaatcgtgttgaagctgcagtg

SEQ ID NO: 34368 - DNA, 270 bp, Zea mays
cccacacagaagcggcggcggcggacaaacgcaggcgaaggcgagggtgtgagggaaggagcaccagccatggtgcacgtcaacttctaccgcaactatggtaagacgttcaagaaaccaaggcgtccttatgagaaggagcgtcttgatgctgaactgaagctggtcggtgagtatgggctgaggtgcaagcgtgagtattggagggtccagtatgcactgagcaggatccgtaatgctgcaaggcacttgctcacccttgacgagaag

SEQ ID NO: 34369 - DNA, 275 bp, Zea mays
ggttgatgctcttgctaaggcattggctggtcaaaaggatgaggcttacttcgcagcaaatgctgctgctcaggcctcgaggaaatcctcaccccgtgtgaccaatgaagaagtccagaaggctgctgctgctctcaagggctctgaccaccgccgtgggaccaacgttagtgctagattggatgcccagcagaagaagcttaacctccccatccttcccaccactacaatcggttcgttcccacaaaccgttgagctcaggagggtccgccgtg

SEQ ID NO: 34370 - DNA, 235 bp, Zea mays
agaagagaagcacgcccaaaaattccaaggtttttcacctcttggagcgcaccaacaccacccggagaccggagcgactcgccaccggcgcggaaaaggagggcggaggctcgatggcggatgagaatcaggctggaaagaaagaggaggaggaatttagcacaggccctctgtcagtcctaatgatgagtgttaagaacaacacccaggtcctcatcatttgcggaaacaacaa

SEQ ID NO: 34371 - DNA, 276 bp, Zea mays
cgccgagaagaccggtaaccacacctttgacccgctcatggacctcctggtcggcaacgtaggcctcatcttcaccaagggagacctcaaggaggtgcgcgaggaggtcgccaagtacaaggtgggggctcctgctcgtgttggtctggttgctccagttgatgttgttgtgccccctggcaacactgggctggatccgtcccagacctctttcttccaggtgcttaacatccccaccaagattaacaagggtaccgtggaaattatcacccctgt

SEQ ID NO: 34372 - DNA, 285 bp, Zea mays
atgggatatcacaatgtcagacctcctggccgggaagtctttgctaacagagttccgtgggattgcgtttgttggtggtttcagttatgcagatgtgctggattcagcaaaaggttgggctgcatcaatcaggtttaacaaacccctcattcagcaatttcaggaattctaccataggccagacacgttcagccttggagtatgtaatggttgtcaacttatggctcttcttggctgggtgccaggatctgatgttggaggttctcttagtaaaggtggagatat

SEQ ID NO: 34373 - DNA, 288 bp, Zea mays
cccacgcgtccgcccacgcgtccggctcctcagttctcgtcatcgtcctcgcgctcagtgtcatttgcagttcccggcagcagccatggcgtcggtgcagctgtctgggccgcgggtggtggcggctgcgaaaccggctgcgttgggcgggctcctcctgacgccgtcccttgcggtgccaaaggggcggagaaccagggggctcgtggtgagggccgccacggtcgtgtcacctaagtatacatccataaaaccattgggagacagagtacttgtgaagatcaagac

SEQ ID NO: 34374 - DNA, 282 bp, Zea mays
cggacggtgggcgccgctcctcctcttcgccaggcgccgcctgccgctcgcgcccctcgttacctcctccacacgccgttgaggccaagtcggcagacgaggaggaggagaaggccggagagcccgtcgaaatggaagctggggagtttgaggaggtgctagcctcaggcggcgagggtgaggggcagtacgccgcggtggagccgccagaggaggccaaggtctacgttgggaaccttccctacgacgtcgacagcgagggactcgcgcagatcttcgacc

SEQ ID NO: 34375 - DNA, 288 bp, Zea mays
ttgacactctttttcaacatatatgactgttttcattgttataacctcttgccatgctgcatgtttcattcataatctatattgtttctattcagattgccatctctgcatccaacactggaggtgcctgggacaacgcaaagaaatacattgaggctggtgcatctgagcatgcaagaaccttgggcccgaaaggttcagacccacacaaggctgctgtcattggtgacaccatcggtgataccctcaaggacacctcaggcccctcgctgaacatcctcatcaagc

SEQ ID NO: 34376 - DNA, 286 bp, Zea mays
cacacgcgtccgcccacgcgtccgcgactccgccgccgcccgcagctccgcctcagcgcatagcccgccgcgacctcatcgatcaccttcaactttcaatcatggcggacgtcgatgtcgaaccggaggttgccgccggagctcccaagaagaggacgttccgcaagtacagctaccgcggcgtcgacctagatgcgcttctcgacatgtccacggacgactcggtccagcttttcccgggcgcgccagaagaaggttcagaggggtctgaagaggaacccatggc

SEQ ID NO: 34377 - DNA, 287 bp, Zea mays
ccacccgccactgctgcgccaccaacggcttctgccgctcggagcctcttcagacgttcacgatccacgggctatggccggactacgacgacgggacctggccgtcgtgctgccgccgcacccaattcgagatggacaagatattgccactgaaggaggtgcttgacaagtactggccgtccctctactgctccaaatctggaacatgcttcagcggcaagggactcttctgggctcacgagtgggagaaacatggaacctgctctgcccctgtggttcaggatgaa

SEQ ID NO: 34378 - DNA, 292 bp, Zea mays
caagaaggatatcactggcaacccgagggctctccggaggctgaggacctcttgtgagagggccaagagaactctgtcttccactgcccagaccaccattgagattgactcgctgtacgagggcattgacttctactccaccatcacccgtgccaggtttgaggagctcaacatggacctgttcaggaagtgcatggagcctgttgagaagtgcctgagggatgccaagatggacaagagcagcgtccatgatgttgtccttgttggtggctccactaggatccccagggtg

SEQ ID NO: 34379 - DNA, 276 bp, Zea mays
caaaaaatcccccattttcttcgaggcgaggagagcgtgaaagacagggcaccggcagcgacgatgtcggggcgcggcaagggcggcaaaggtctgggcaagggcggagcaaagcgccaccggaaggtgctccgtgacaacatccagggcatcaccaagcccgccatccggaggctggctcggaggggcggcgtgaagcgcatttcggggcttatctacgaggagacccgcggcgtcctcaagatcttcctcgagaacgtcatccgcgacgccgtc

SEQ ID NO: 34380 - DNA, 272 bp, Zea mays
ggtgggttggcttctcctccacctccggttcgggttcgggttcgtgaggttctccggggttcggattcgtgggtgagcggatcgagatggcggcgtcggatgttgagtaccgctgcttcgtcggcggcctcgacaggtccacggacgaccactccctccacaacgccttcagcacctacggagaggtcctcgagtccaagatcatcctcgatcgggagacgcagaggtcccgctgcttcgtgttcgtcaccttctccacggaggaggcgatg

SEQ ID NO: 34381 - DNA, 281 bp, Zea mays
cttcaatgcggctgcttcccagtttatccttggacaaccagttccattgacactctggctgtctcttgttccagtggtgattggtgtctcggtagcatccctcactgaactctcatttaattggactggcttcattaatgccatgatctcaaatatttctttcacctaccgaagcatctattctaagaaggctatgactgacatggatagtaccaacttgtatgcatacatatcaataattgctctctttgtctgcatcccccctgcaattattattgaag

SEQ ID NO: 34382 - DNA, 279 bp, Zea mays
cgtctctctctctctctctctgtctctctctcgtagccgcgtccatctcgcagcagcaagcaagcgcgaccaaatggcgcctctaggagacggcggagctgctgccgcggcggcgtccaacaacctggtggtgtcgttcggcgagatgctgatcgacttcgtccccgacgtggccgggctgtcgctggccgagtcgggcggcttcgtcaaggcacccggcggcgcgcccgccaacgtcgcctgcgccatcgccaagctcggcggatcctccgccttcgt

SEQ ID NO: 34383 - DNA, 278 bp, Zea mays
tggcttctcctccccctccggttcgggttcgggttcgtgaggttctccggggttcggtttcgtgggtgagcggatcgagatggcggcgtcggatgttgagtaccgctgcttcgtcggctgcctcgcctgggccacggacgaccactccctccacaacgccttcagcacctacggcgaagtcctcgagtccaagatcatcctcgatcgggagacgcagaggtcccgcggcttcggcttcgtcaccttctccacggaggaggcgatgcggaacgccatcg

SEQ ID NO: 34384 - DNA, 275 bp, Zea mays
ctgaggaggccctcgctacccagccattagcaaattcccttatgctgtccaagacttatcttacgctatgtctgtagccttttgttattacaagtactcaagttttgagtttttgagatgtggctatgacaatgtgatgaagaaccctaaaccatcgtattagagtgaaacttgtttctatatagagttccaagtttcttgaacctcaaaaaaaaaaaaaaaaaaaaaaaaaaaaaaaaaaaaaaaggaaaaaagaaaaaaaaaaaaagggcggc

SEQ ID NO: 34385 - DNA, 281 bp, Zea mays
gaaagtccttcaactcgaaaccgcagctggtgcagctattcggttcttcgacaaagcgattggaattaatgttccccgctcaaggtttctcccagtgaaggctacatctgatctgttgcttgtgcagtctgatctttacaccttggttgatggctttgtcatccgcaacccatccagagcgaatccagctaacccttcaattgagcttggacctgagttcaagaaggttgccaatttccttgctcggttcaagtccatccccagcatagttgagcttgaca

SEQ ID NO: 34386 - DNA, 286 bp, Zea mays
cgctcacgggcctgggactcttcttcttcgcgttccccggggtcaccaagtgcatcgaagtgggtctccccgcccttgtcctcctggtgatcttcgcagagtacgcctcccacgtgttcgctaaggggagcttcgtgttcagccggtgcgccgtgctggtgaccgtcgtgatcatctggatctacgccgagatcctgacggcggccggcgcctacaacgagaggggccctgtgacgcagttcagctgccgcgccgaccgctccgggatcatccagggctcaccttg

SEQ ID NO: 34387 - DNA, 278 bp, Zea mays
cccatccgatccccccttcgcaaccaaaaccccaactcgccccgcatcgatggcgcccaaggccgagaagaaacccgcggcgaagaagccggcggaggaggagcccgcggccgagaaggcgcccgccgggaagaagccgaagcggtagaagcgggtccccgctggcaagtccgctgccaaggaaggcggcgagggcaagaggggcaagaagaagggcaagaagagcgtggagacctacaagatctacatcttcaaggtgctgaagcaggtgcacccgg

SEQ ID NO: 34388 - DNA, 275 bp, Zea mays
cccacgcgtccggcggactatctggcccaggagcaccgctttctttatgaaaaaatatcaccttttattttggattggaactggcgcaaggataagttactgtttgagttcggtctgtggtctccagacattctatgtcttcaggaggttgacaaatttacagaccttgaacaagaaatggcaagccaaggatataacggtacatggaagatacggactggagatgcagctgatggatgtgctattttttggagaacaacaaggttccagttgcg

SEQ ID NO: 34389 - DNA, 276 bp, Zea mays
atgagaacatagatgtatcatctcttaagagagaatacaagaaaaaggctatgttagtccatcctgataagaatatgggcaatgataaagctgctgatgcatttaaaaagcttcaaaatgcatatgagattcttcttgattcactgaaacgcaagacatatgatgatgagttgaggagggaagacctcttgaactacttcaggcagagtgtttctcaaaagaatggaagaaacagtactttccaacatgggttcagcccttcagaaggtgttgatg

SEQ ID NO: 34390 - DNA, 278 bp, Zea mays
cccacgcgtccggccttgggctcctggggcatcgccttcacccctcacatcctcaccgtcaaggccggcgaggatgttgcttcaaaaataatgacattctcacaacaaggccctcgcacagtctgcatcctttccgcgaatggtgcaattagtaatgttacacttcggcagccagccacatctggtggactagttacttatgaggggcgctttgagataatctcgctatctggttctttcctgcttgcggaggatggtgatactcgcagcaggactgg

SEQ ID NO: 34391 - DNA, 273 bp, Zea mays
agaggccttcggacaagcccctgcgtctgcccctccaggatgtgtacaagattggtggtattggaactgtaccggttggtcgtgtggagactggtgtcatcaagcctggtatggtagtcacctttggtccaactggcctgactactgaggtgaagtctgttgagatgcaccacgaggcgcttcaggaggctcttccgggcgacaatgttggcttcaacgtgaagaacgttgctgtcaaggatctcaagcgtgggttcgtggcctccaactcca

SEQ ID NO: 34392 - DNA, 275 bp, Zea mays
acaccccccgagctcagcttagctccactccagctccaatcacagtcgtgaccagagcgcgagagctagctagagggccgtgaaaatgccgatcaataggatcgccctggggagccaccaggaggtgtaccacccgggcgccctcaaggcggcgttcgctgagttcatctccaccctcatcttcgtcttcgccggccagggctccggcatggccttcagcaagctgaccggcggcggcccgacgaccccggcgggcctgatcgcggcggcggtgg

SEQ ID NO: 34393 - DNA, 270 bp, Zea mays
gcgccgacgcctgcgtctgggacggcggcaggcagcgctgccctgagggcaccatggaggccgccgccgtcgcgggtgccggctccggccgcggctggtggaaccagcagctcagcgacatgagctaccgccgcatgcgctgggtgcagcgcaagttcatgatctacaactactgcgccgacgccaagcgcttcccgcagggcgtgcccgccgagtgcaagctccggtgagggagcgaggtttgttgggacgtccgtggggcatcaaaac

SEQ ID NO: 34394 - DNA, 267 bp, Zea mays
gagaggtggctcaagttcatcgacacatcgtccaaatttgggcacggtcgcttccagactaccgaatagaagcagaggttctttggcaagctcaaggcgtaagagtagggcggttcagcgaagtcccatttctcaaaatcatcaaactgtgatacttttgtttgtaaccttgctgtaccaagttttgtagccggatggtttaggagcatggtccggtcttctatggatcgttccatgcttcagaactgtagtgtctatgttttgtgc

SEQ ID NO: 34395 - DNA, 269 bp, Zea mays
cgcctacgtgctctaccccatgcgcgacgccatccaccccactgcgctcgctgatcgcctcctcgcctcgctcgggcccagcttcctcggacccgttgccatcctccgcgtctggagcttctgcctcttctacgtcatggccgagctctggggcagtgtcgtcatatccgtccttttctgggggtttgcaaatcagattactacagttgaagaggccaaagagttctacccgctgtttggccttggtgccaatgtggccctcatcttct

SEQ ID NO: 34396 - DNA, 269 bp, Zea mays
atgtggaccatggcaagtctacgcttacagattcccttgtggcagctgctgggattattgcccaggaagttgctggtgatgttcgcatgactgatactcgtgcagatgaagcagagcgtggcattacaatcaaatctactggtatctctctttactatgagatgactgacgagtcactgaagaactacaagggtgagagagatggtaaccaatacttgatcaaccttattgactcgcctggacacgttgatttttcttcggaagtcaca

SEQ ID NO: 34397 - DNA, 269 bp, Zea mays
ggagccctcgactggtacaaggtcgtgcacgggaaccaggcctggcggctggagtcgtgcacctggctgcacgccggcctcatccacctcctcgccaacatgatcagcctcatcttcatcggcgtccgcctggagcagcagtttggattctggaaggtgggcctggtgtacctcgtctctggcttcggagggagcgtgctctccgtcttcttcatcaggaagggcgtctccgtgggcgcctccggcgcgctcttcggcctcctgggagc

SEQ ID NO: 34398 - DNA, 261 bp, Zea mays
agggacatcgttggaagtgcttattatgttgcgcctgaagtccttaagcggactatggaaaagagatagatgtttggagcgcaggtgttattttgtacattcttctcagtggtgtgcctccattttgggctgaaactgaaaaggggatatttgatgctattctgcatgaggagattgactttgaaagtcaaccttggccatcaatttctgagagtgctaaagacttggttagaaagatgttgacacgagatccaaagaaaa

SEQ ID NO: 34399 - DNA, 262 bp, Zea mays
agcttatcagaataagaacatgttgcaagctggcatgattgttggaggatgggataagtacgagggaggccaaattttctcagtccctcttggtggaacgatcttgaagcaaccatttgcaattggaggctcaggttccagttatctttatgcacttcttgatcatgaatggaaagagggaatgagccaggaagaggcagagaaatttgtggtgaaggtagtttcccttgctatggcccgtgatggtgctagcggaggggtt

SEQ ID NO: 34400 - DNA, 264 bp, Zea mays
cccacgcgtccgctattattgcgtcacaaagggcataccatgctcatccattccacggcgtacagacctcggagagtcgatctgtattactcaagctggtgcatccgcgcagtggagtccaggagagggaacggaggaggaaggggggcgacggcctgtgaggttctgctgttccaccacgaggacatgggcatcccgtacgagatcgccaagctgggcatcaggcaggggatgtgggggtgcgtgaagaggatcgagccgggg

SEQ ID NO: 34401 - DNA, 261 bp, Zea mays
agcttatcagaataagaacatgttgcaagctggcatgattgttggaggatgggataagtacgagggaggccaaattttctcagtccctcttggtggaacgatcttgaagcaaccatttgcaattggaggctcaggttccagttatctttatgcacttcttgatcatgaatggaaagagggaatgagccaggaagaggcagagaaatttgtggtgaaggtagtttcccttgctatggcccgtgatggtgctagcggaggggt

SEQ ID NO: 34402 - DNA, 262 bp, Zea mays
cggacggtgggtccgccccgacaatttcgtcttcggccagtccggcgccggcaacaactgggccaagggcacactacaccgagggcgccgagctcatcgactccgtgctcgacgtcgtgcgcaaggaggccgagaactgcgactgcctccaagggttccaggtctgccactcgctgggaggaggtacaggttcaggaatgggcaccctgctcatctccaagatcagggaggagtacccggaccggatgatgttgacattctc

SEQ ID NO: 34403 - DNA, 261 bp, Zea mays
cggacgcgtgggcgcgtatgcttccgcactggcggcggggttatggtggagtgcgacgcgtgcctcggcggacttccacctgcgatgcgtgcgaccgccgcttcggagggtgcctgaaggtgattgggcgtgcccttactgcgaggccgagcgcgccggtaaggtggtcgagcggcccaggccgcctgaggggaagcgcgtcgtgaggaccgccaaggaaaaactcctttccagcgacctgtgggctgcacgcatcgagag

SEQ ID NO: 34404 - DNA, 261 bp, Zea mays
cgtcgccccacgcccccacggaagtttcggcggcgccggcgtgctcgtgatctcaaccaaggcgtgcctccgctccggtcacccgtctccacgcaaccatgtcgagaaggaagaccagggagcccaaggaggagaacgtcactcttggacccactgtccgtgaaggagagtatgtctttggtgtcgctcacatctttgcatccttcaatgacaccttcattcatatcactgatttgtctgggagggaaactctggttcgga

SEQ ID NO: 34405 - DNA, 258 bp, Zea mays
cggacgctggggttccctatccctttcagtggggtgctccgacgtttgacgccggagaagctttcgctaagatgatgacttcgttcattgctcttgtagagtcaactggcgccttcatcggtgcttcgagatatgcgagtgcaactatgattcctccagcgattatcagtcggggcgtgggatggcagggcattggtctgttgctcgattcatttttcgggacagcgaacgggacatcggtttcagtagagaatattg

SEQ ID NO: 34406 - DNA, 260 bp, Zea mays
aacaatactgtgcaaggtccagcgcgtgctatgatggctgatctgtgcggtcatcatgggcctagtgcagccaactcaatcttctgttcttggatggcgctgggaaacatcctaggctattcctctggttccacaaacaactggcacaagtggtttccgttccttatgacaaacgcgtgctgtgaagcctgcgcaaacctgaaaggcgcgtttctggtggctgtggtgttcctagtcatgtgcttgactataaccctgtt

SEQ ID NO: 34407 - DNA, 299 bp, Zea mays
cccacgcgtccgagagaagcacgcccaaaaattccaaggtttttcacctcttggagcgcaccaacaccacccggagaccggagcgactcgccaccggcgcggaaaaggagggcggaggctcgatggcggatgagaatgctggaaagaaagaggaggaggaatttagcacaggccctctgtcagtcctaatgatgagtgttaagaacaacacccaggtcctcatcaattgccgcaacaacaagaagctacttggccgtgttcgtgcttttgatcgccactgtaacatggtgctcgagaag

SEQ ID NO: 34408 - DNA, 296 bp, Zea mays
atcagttgttaatgctttatcagagacacttgaagttactgtttggcgtgatgggaaggaacacagacaaagctattcgcgggggaaaccaaccactaggctaactagtagcacactgactggtgaaacaagctctcgtcaagggacgcgcatcagattttggcctgataaagatatatttaccaccacgatcgattttgacttcaatacaatctccagtcgcatacgggagcttgcctttctaaatcctgagctaacaataatcttgacaaaggaagaagggcacacagttcaac

SEQ ID NO: 34409 - DNA, 295 bp, Zea mays
aaagcttaatacaatccaaaaggaaagtgatgagaaaaaacgcaaaatcaagaagacagaacgtgctcttaaagtcgctgaggaggaattaatgaggttgcagttagaagtaactgctaaatcaaaacagctgtcagaggttcatggagcatggttaccaccttggctaatggcacaatatgctcgttatgcggaggttgtctcaggtcactggaatcaacatgggaaacctgctgtgcagaatgttttgcataaggcatcagaaaaatcagcacaggcaaagaaatgggctgaa

SEQ ID NO: 34410 - DNA, 293 bp, Zea mays
cccacgcgtccggttttgagcatccttccgaagtgcaacacgagtgtatccctcaagccattcttggaatggatgtcatctgtcaagctaaatctgggatggggaaaactgctgtttttgtcctttcatccctccaacaaattgaccctgttgcgggtcaggtagcagcacttgtactgtgccacacaagggaactggcttatcagatatgccacgaatttgagaggttcagcaaatatcttactgaagttaaagttgctgtcttctatggaggtgttcacatcaggaagcat

SEQ ID NO: 34411 - DNA, 287 bp, Zea mays
ggcgcacgaggcaatttatagggaggaagaggaggggccgggcctgagcagagcaggccggaccagccatctctcctctgaggcgtcgaggggaggcggcgcccgagatgggggactccggtggctccgtcgtgtcggtcgacgttgagcgcatctcctttggcggcaaggaacaccatatacaaacgaatcatggacctgtatctgttgcagtgtatggtgaccatgacaagcctgcccttgttacttaccccgatattgctttaaactatatgtcctgcttccaa

SEQ ID NO: 34412 - DNA, 284 bp, Zea mays
cggacgctgggtcgtgcctgacgacatcgatgtgcactgccttgctagtttgatcaaggcctggttcaacgaactccctgaaggcgtgcttgacaggctttcacctgagcaagtccttcactgcaacacagaggagcaatgcattgagctcgtgaagcttcttccagcaacccaggctgcacttcttcattgggtcgttgagctcatggctgatgttgttgaggaagaggagtcgaataagatgaatgcaagaaatgttgccatggtttttgcaccaaatatga

SEQ ID NO: 34413 - DNA, 286 bp, Zea mays
cgagttctcctcaaccaaattcaaggtcacagcggcgaacctctcggctatcatgtctggccgcggcaagggcgggaagggtctgggcaagggcggcgccaagcgccaccgcaaggtgctgcgcgacaacatccagggcatcaccaagccggcgattcgcaggttggcgaggaggggcggcgtcaagcgcatctccgggctcatctacgaggagacccgcggcgtgctcaagatcttcctcgagaacgtcatccgcgacgccgtcacctacaccgagcacgcccgc

SEQ ID NO: 34414 - DNA, 282 bp, Zea mays
gaacctcgctacgaacctgtttaagatgcttctcaagtaccggcctgaagacaaggctgccaagaaggagaggcttctgaagagggcccaagctgagaatgaaggaaaaactgttgagtcgaagaaaccaattgttgtgaagtatggccttaaccatgtgacttacctcattgagcagaacaaggctcagcttgttgtcatcgctcacgacgtggatccgatcgaacttgttgtgtggcttccagccctgtgcaggaagatggaggtcccttactgcattgt

SEQ ID NO: 34415 - DNA, 276 bp, Zea mays
cccacgcgtccgcccacgcgtccgcccacgcgtccgctccattctcagccgccgccaatcccttcccgtgctccgcaaccgctgagtgagaagaagagatggccggcaagggcgatggcccggctatcggcatcgatctcggcacgacgtactcttgcgtcggcgtgtggcagcacgaccgcgtcgagatcattgccaacgaccagggtaaccgcaccacgccctcgtacgtcgccttcaccgactccgagcgcctcatcggagatgcggccaaga

SEQ ID NO: 34416 - DNA, 269 bp, Zea mays
gagctgctcaaggcgcaagtacgtcaggcgttcgatgctgccagcatggatgttgcaggtctgatcacgtacgtcgacaccctcgaacgcctcggcttagacaaccacttccgcgacctcatcggagctgccctggaacgaatcggagctgaggagctgccggagcacggcggcggcctgcacatcgtcgcgcttcggtttcgcctgctccggcagcatgggatatgggtatctacagatgtgttcgacgcgttcagagaagacgccgg

SEQ ID NO: 34417 - DNA, 284 bp, Zea mays
cagagcctcattcatctccattcgaaacaccctcgcacccacactctcccttcgtccccagcctaaatccccgcaaagatggctcgcacgaagcagacggcgcgcaagtccacgggcggcaaggccccgaggaagcagctggcgaccaaggcggcgcgcaagtcggcccctgcgaccggcggcgtgaagaagccgcaccgcttcagaccgggcaccgtggcgctgcgcgagatgcgcaagtaccagaagagcacggagctgctcatccgcaagctagccttcca

SEQ ID NO: 34418 - DNA, 280 bp, Zea mays
gatgggttcaactacatcaaagaatcttttgaaaatggtactcttcaccttattgggttgttgagtgatggtggtgtccactcccgccttgaccaactacagttacttctgaaaggtgtcagtgagagaggagcaaaaaaaattcgtgtgcacatccttaccgatgggcgtgacgttttggatggaagcagcgttggtttcgtggagaccctagagaatgatcttttggagcttcgaggcaagggtattgatgcacagattgcatctggtggtggaagga

SEQ ID NO: 34419 - DNA, 279 bp, Zea mays
ggccacctcttccaggtcgagtacgccctggaggccgtccgcaagggcaacgccgccgtcggcgtccgccgcacggacaccgtcgtcctcggtgtggagaagaagtcaacccccaagctccaggactccaggtccgtgcgcaagatcgcgtgcctggacacccacatcgctctggcatgcgcggggctgaaggcggacgcacgcgtgctcatcaaccgcgcgcgggtcgagtgccagagccaccgactcaccgtcgaggaccccgtcaccgtcgagtac

SEQ ID NO: 34420 - DNA, 275 bp, Zea mays
gtccgtgaagttttctggagggagcacaaacttctcgacaccgaaaaaggctcttcttatgcgggccgagactaacatgcttctgatgagcccagccactgatggaaagccacacgccaagggggtgcatcagttggacattgagacggggaaggtggtttcagaatggaagtttgagaaggatggagcagatattaacatgagggatatcaccaatgatagcaaaggtgctcagctggattcgtctgagtccaccttcttgggactggatgaca

SEQ ID NO: 34421 - DNA, 274 bp, Zea mays
atggggatggtgctgtaactggtggatctgacggagaaagggagagagacactcgtcccccgtaccgtggcggaggcagacgtggtggttacaggaatgttgagtttgctgatgactctgagaggccaccacggagaaactatgagcgccacagcgggactggccatggctatgagatgaagcgtgatggcgcagggcgtgggaactggggcactgccactgatgaacttattgcccaggatgcagaggactccccgaagatggaggaggctgc

SEQ ID NO: 34422 - DNA, 277 bp, Zea mays
ctaggctccccaccaagattctgtggatgaggaggatgcgtgttctgaggcgcctgctccgcaagtaccgtgaggccaagaagatcgacaagcacatgtatcatgacatgtacatgaaggtcaagggtaatatgtttaagaacaagagggtgcttatggagagtatccacaagtccaaggctgagaaggccagagagaagacactttctgatcagtttgaggccaagcgtgcaaagagcaaggcaagccgtgagaggaagattgctaggagggagga

SEQ ID NO: 34423 - DNA, 275 bp, Zea mays
ctgctgtgaagtgcccttcaatatcatatcatttagtgggaaccaaaaagatacaacaagaactagcaaagcctaatgtgcttgaaaggttccttaaaagtgaggaaattgacaaggttcgcaaatgttttgctggcttatggagtttggatgacgaatatattataaaaactgcagtggaaaaacctgagttgtttgtattgaagcctcaacgtgaaggcggagggaacaacatctacggtcttgatttgagggaaacgcttgtcagactacag

SEQ ID NO: 34424 - DNA, 278 bp, Zea mays
accacgcgtccgtgggattcaaaatgttttggccctcagaggggatcctccacatgggcaagacaaatttgtgcaagttgaaggcggatttgcttgtgctcttgatttggtgcagcatattagagccaagtacggtgattattttggcataactgtagctggttatccagaggcacaccctgatgcgatacaaggtgagggaggtgctacattggaagcatatagcaatgatcttgcgtacttgaagagaaaggttgatgctggtgctgaccttattg

SEQ ID NO: 34425 - DNA, 278 bp, Zea mays
aaaaacaatacatagatcaagatggaatgtacatgaataaaagctgctcatgaaaatagacatagagcttgaaggagcatgtgagggttcacttgcgtgttctacttgtcatgtaatagtaatggatgtaaactactataacaaattagaagatccagcagatgaagaaaatgatatgcttgaccttgcatttgggctcacagagacatctcgcctcggctgccaagtgatcgcgaagctgaactcgatggtattcggctggcattacctgtagccac

SEQ ID NO: 34426 - DNA, 281 bp, Zea mays
gctcaaacaagtcacgaaacagaagaatgaagctgttcgaagccaggattttgagacggctggggaattgagagaccgtgaaatggaattgaaggcccagataacagccctcattgacaagagcaaggaattgagcaaagcagaggaagagtctggagagacaggacctatggtcaatgaagaagatatccagcacatagtatcttcatggactggcatccctgtggagaaggtttccagcgatgaatctgataagcttcttaagatggaagagactttgc

SEQ ID NO: 34427 - DNA, 290 bp, Zea mays
atgctgcaaggcacttgctcacccttgacgagaagaacccccgtcgtatctttgagggtgaggcacttcttcgccgcatgaaccgctatgggctgcttgctgagggtcagaacaagcttgattatgttcttgccctcaccgctgagaacttcctcgcaaggcggcttcaaacacttgtcttcaaagctggcatggccaagtccattcaccatgctcgtgtcttgatcaagcagcgtcacatcacggttggcaggcagattgtcaacgtcccatcagtcatggtgagggtg

SEQ ID NO: 34428 - DNA, 283 bp, Zea mays
ctaggctccccaccaagattctgtggatgaggaggatgcgtgttctgaggcgcctgctccgcaagtaccgtgaggccaagaagatcgacaagcacatgtatcatgacatgtacatgaaggtcaagggtaatatgtttaagaacaagagggtgcttatggagagtatccacaagtccaaggctgagaaggccagagagaagacactttctgatcagtttgaggccaagcgtgcaaagagcaaggcaagccgtgagaggaagattgctaggagggaggagaggct

SEQ ID NO: 34429 - DNA, 286 bp, Zea mays
  unsure (1)..(286): unsure at all n locations
agcacggagctgctcatccgcaagttgcccttccagcgcctcgtccgtgagatcgcgcaggacttcaagaccgatctccgcttccagtcctccgccgtcgccgcgctgcaggaggccgccgaggcctaccttgtggggctctttgaggacactaacctctgtgccatccacgccaagcgcgtcaccatcatgcccaaggacatccagctcgcgcgccgtatcaggggcgagagggcctgagcgangctggctcctctcaccgcaggcggcgtcgttgttgcttcgg

SEQ ID NO: 34430 - DNA, 277 bp, Zea mays
cccacgcgtccggcttctcctcccgctccggttcgggttcgggttcgtgaggttctccggggttcggtttcgtgggtgggcggatcgagatggcggcgtcggatgttgagtaccgctgcttcgtcggcggcctcgcctgggccacggacgaccagtccctccacaacgccttcagcacctacggcgaggtcctcgagtccaagatcatcctcgatcggaggaccagacagaacgttgcgtcggcttcgtcaccttctccacggaggaggcgatgcgg

SEQ ID NO: 34431 - DNA, 287 bp, Zea mays
cggacgcgtggggaaaaaattggcaaccgtctggcaggatggaaaggaaatcttctaagccgagctggcagtctcacgctcgtgtcttctgttctgtcctccatgcccacctaccacttatcggtttttcccctcgcggcttgggcacgcaaacgcattgacaggatccggcgctcctttctttgaaaagggaacgccgactcaaatggtggtcactgcctcgtcgcatggccactagtttgcaagcccaaagccctcggtggcttgggggttctcaaccttgacaa

SEQ ID NO: 34432 - DNA, 284 bp, Zea mays
aaagcctgtctcaggaagtctcctgtggccaaggatgttgacttgaatgctctcgccaaatacacccagggtttcagcggtgcagatatcacagagatctgccagcgcgcgtgcaagtatgccatcagggagaacatcgagaaggatatcgagagggagaggcgcaggaaagacaaccccgaggctatggaggaagacgaggtagacgacatcgctgaaatcaaggctgctcacttcgaggagtccatgaagtacgcccgtcgcagcgtgagtgacgccgacat

SEQ ID NO: 34433 - DNA, 284 bp, Zea mays
cccacgcgtccagcggcgacgactgggcgatcgccgccgccttaagccaggtgctcaggtctgccacttggcacttcgccggcgacgagcacctaacagagagatggctggtggttttcgagtactgcatcttgtgaggccatttctggctttcttgccagaagtacagagtgctgataggaaaataccattcagagagaaagtgatctacacggtcatttctctcttcatttttctggtctgcagccagctcccactctatggcattcattcaactactggcg

SEQ ID NO: 34434 - DNA, 283 bp, Zea mays
ctggatttgatgccactgacgttctcaataagctgaggcagaaacatgcatctggtgaaggtgctaattatggtgtagacataaacactggcggaattgctgattcctttgcaaactttgtttgggaacctgctgttgtaaagatcaatgctataaatgctgcaaccgaagcttcctgccttattcttagtgtggacgagacagtgaaaaacccaaagtcggagagcgcacaaggtgaagctgctgccggtgcgatggctggtcgcggtcgaggtgcaatgcg

SEQ ID NO: 34435 - DNA, 244 bp, Zea mays
cgaggaactcccgggctcgaggagatcgggacgatgatgggagggcgcgctctgctgctgctcctggtctcggcgctgctcgttcagatccgcgcctctgacccgctgctgtacgagccgtttgatgaggacttcgagggtagatggatcgtctccaagaaggatgaataccaaggtgtatggaagcatgccaagagtgatgggcatgaggactatggcctccttgttagtgacaaggcaagga

SEQ ID NO: 34436 - DNA, 285 bp, Zea mays
cccacgcgtccgcccacgcgtccgaaactgacaatgtacagaggatcaagattgccaactgtatgttccaatagattccctaccatttcaggcttctggaggcattgtctaatcagttcctcccacagttcatcatcatgctgttccgtaacaaattcaacagcctcctgcatgtcttccagtttgtttataattgtcgacagagcttccttagcattgcccattcgaccaaggacaaaaacttgctcccttacaagttctttttgtgcaaagatttcatatgcc

SEQ ID NO: 34437 - DNA, 280 bp, Zea mays
aggggctccaagaccttgggctcatcggctgatatctttgctggcatctttccaaaaaactatgaaccacctcctggtgatttttattttgaagttgatgataattcccctgttgtccaggatgatccccttcttttcgattataatgttgaagaacgagtaaatgattttgttgctgcagctgtagcacaggcaaatatcacgaggacaaatcatatcatgtttacaatgggaacagacttcaaataccaatacgcagagagttggttcagaaatatgg

SEQ ID NO: 34438 - DNA, 256 bp, Zea mays
aaagagtatgttcagcacaaaatggcgcaaaaggctgccgagctttggagcatcatttctcagggcggctacatttatgtttgcggtgacgcaaaaggcatggctagagatgtccatcgcacgctacataccatcgtccaggagcaggggtctatggacaacaactccaaggcagaaagctacgtgaagagcctgcagatggaagggagatacttgagagatgtttgtgacgtatgccaagtaacgtggaccctgt

SEQ ID NO: 34439 - DNA, 261 bp, Zea mays
caggaaatcaagtcctcctcaattccacgctgccactaagtcgccgtcctccgcgccaagcatcgaagctccgatggcccgcacgaagcagacggctcgcaagtcgacgggcggcaaggcgccccgcaagcagctggcgagcaaggcggcgcgcaagtctgcgccgggcagcggcggcgtgaagaagccccaacgcgtccgccccggtagcgtcgcgctccgggagatccgcaagtaccagaagagcacggagctgctcat

SEQ ID NO: 34440 - DNA, 277 bp, Zea mays
cccacgcgtccggaaagatgattcaacgtccggaagcttcattaaaaactgggtttcaattgggaagagcgcaaggttaagcacaagagctgcagctggaaatttgagttttgacatgcagtgcaaacattgtgaaaaggaatcaataaatagctctctgttgaacttgttaacatacctatggatagagaagagggtgaatgaaggtactttgaatctccacggaggctactacaactttattgattgcacatttgagaaatggacattattgtac

SEQ ID NO: 34441 - DNA, 275 bp, Zea mays
cgcctcgccgctgttccccgcaacctatcgacccaatctcgtccgacccggcgcgtcgtcccctccagatctccgtcgccctctccaggtagcagaaactgttctgctgcagtctgacaaagtggagggcttaggagcttctgcttcttttatgtctgaacaatctttgctttatttgggattgttgggagagtactctcgtgcaacgaggaaaaggcacaaggttccgtcccactgcatgcgtcaagagcctgtctggttttcttgttctgatt

SEQ ID NO: 34442 - DNA, 275 bp, Zea mays
ctcttctactacttcgtgcgctcggagcgcgacccctacgaggacccgctgctgctgtggctgtccggcggcccaggctgctccggcatctccggccttgcctacgagataggacccttaaaatttgatgcccgagggcaaggtgaatttcccactcttctctaccgaccggagacatggaccaaggtgagcaacatcatatttgtggactcgccggtggggactgggttctcgtacgccaagtccgaggaagggctcgagaccggcgacaccaa

SEQ ID NO: 34443 - DNA, 274 bp, Zea mays
agcatattctacttcctccatcaaggagggaattcagggatatttacgtcgtgtttgaacttatggagtctgatttgcaccaagttataaaggctaatgatgacttaaccccagagcattatcagttcttcttgtatcagttgcttcgaggtttgaaatacatacacacagcaaatgtattccatcgagatctcaaaccaaaaaatattctggcaaatgctgattgtaagctcaaaatatgtgattttggcctagcaagagtagctttcagtga

SEQ ID NO: 34444 - DNA, 246 bp, Zea mays
ctcttattcttgatatttttaatcaaagggcagcaacacatgaagcttctttacaggttactttggcacagatggaatatcaacttcctaggttgacgaaaatgtggagtcacctggaacggcaggctggaggtcaagttaagggtatgggtgagaagcaaattgaagttgacaagcgcatcttgagaactcaaataagtgccttgaggaaagaattggaatctgtacggaaacaccgaaagttgt

SEQ ID NO: 34445 - DNA, 280 bp, Zea mays
ccatgttcaagaggattaatgccaaggagcatgttgttggctggtacagcactggcccaaaactaagggagaacgacttggatgtccatgcattattcaacagttatgttcctaatccagtcttggtgattattgatgtccaacccaaggagctgggtataccgaccaaagcgtactacgctgtggaggaggttaaagagaatgcaactcagaaaagtcagaaggtatttgtccatgttccttcagaaattgcagctcatgaagttgaggaaattggagt

SEQ ID NO: 34446 - DNA, 281 bp, Zea mays
gcgatctagaagcacccctctccctctctctctcttcgccgtccgaagctccgcaccccaatctaatcgacacctcaccgagatgggccgcaagttcttcgtcggtggcaactggaaatgcaatggaaccacagatcaggtcgagaagattgtcaaaaccctgaatgaaggacaggttcccccttcagatgttgtggaggtcgttgtcagccctccttatgtcttccttcctgtggtcaagagccagctgcgccaagagttccatgttgctgctcagaact

SEQ ID NO: 34447 - DNA, 278 bp, Zea mays
gtcttgaccgctcatctgcagattacatcggcatgttggccactgtgatgaatgctatatttcttcaagcaacaatggagagcatcggaataccgacccgtgtccaaactgccttccgtatgtcagaagttgcagaaccgtacatacgccgaagagctgtaaggcatttagagaaaggaagagttgtcatatttgctgctggaacagggaacccattcttcacgacggatacagctgctgctctccgttgtgccgaaatcaacgcagaggtaatgctg

SEQ ID NO: 34448 - DNA, 274 bp, Zea mays
tgctgagaagtctggagagaaatcaaatgatgaagtgaaaagtcagctatctcatttccttccaacttctcgccggatcatgcagttttcaaatgggcaggctccttcgccaggtgctcgtgttgtctatgtagatggcacatttgatcttttccacgctggccatgttgagttcctcaggagtgccagacaacttggtgactttcttcttgtgggtatctatgacgacgagtcgatcagggatagaagaggctgtcgtcctataatgcatctc

SEQ ID NO: 34449 - DNA, 272 bp, Zea mays
tgaaaatgccgatcaataggatcgccctggggagccaccaggaggtgtaccacccgggcgccctcaaggcggcgttcgctgagttcatctccaccctcatcttcgtcttcgccgagccagggctccggcatggccttcagcaagctgaccggcggcggcccgacgaccccggcgggcctgatcgcggcggcggtggcgcacgcgttcgcgctgttcgtggcggtgtctgtgggcgcgaacatctccggcgggcacgtgaaccctgccgtgac

SEQ ID NO: 34450 - DNA, 271 bp, Zea mays
gagctagctggtgcacaccggcatggcggccacggcgtactccgtggcgctcctcggcggcgcgcgccttcccgccgctccgcgctccgccctcctccctcggcgcacgtctgccagcttcgcttccaagatgcaccgaggctctccctgctccgtgcgaaggccgcttccgaggacacatcggcctccggcgacgagttgatcgaggacctcaaagcgaagtgggacgccgttgaggacaagcccaccgtcctcttgtacggcggcggcg

SEQ ID NO: 34451 - DNA, 274 bp, Zea mays
gcgccctttgtcgtcgcgcacaagaaggtttcgctctcccgccccaagccgggcgtcgagcgcgtcgccgtctccctcgacctctacaaccagggatccgcgactgcctatgatgtgtcacttaatgacgactcttggccaacacaagcatttgagcttgtcactggagagaaatcgaagacattggaaaggcttgaccctggtgccactgctacacacacatatgtcctggagaccaaaacacagggcaggttccagggttcaccagctacta

SEQ ID NO: 34452 - DNA, 272 bp, Zea mays
gaaagaacttacctacctgtacatacagtatgatgaatttgacaatgctgccaccactattatgaaccactctccagatgcatgggatcatatgcagttcaaggatgtttgcgttaaagttgcgaatgttgagctatactacaaggcagttcacttctatttgcaggagcatcctgatctcatcaatgatatgctgaatgtgcttgcacttcgtttagatcataccagagttgtagacataatgcgcaaggctggtcaattgcatcttgtga

SEQ ID NO: 34453 - DNA, 276 bp, Zea mays
cgctcgcctccctggtacgcttcgtgccgccgccgcaacctcctcctccccgtcacagattgcagatcatttaacataaatggctgactcagaggacattcagcccctagtctgtgacaatggaactggaatggtcaaggctggctttgctggagatgatgctccccgtgctgttttcccaagtatagttggtcgtccacgccacactggtgtcatggttgggatgggacagaaggatgcttatgttggtgatgaggcccaatccaagaggggtat

SEQ ID NO: 34454 - DNA, 279 bp, Zea mays
cccacgcgtccggatcaagggggagctcgccctcgtgccccagtccccagacaagtcgctcgcgcgccacaagttcgtcgatgactgcgaggccgccctcaacgagcagatcaacgtggagtacaacgcctcgtatgcataccactccctcttcgcctatttcgaccgcgacaacgtggctctcaaaggatttgccaagttcttcaaggaatccagcgacgaggagagggagcacgctgaaaagctcatggagtaccagaacaaacgtggaggcagggt

SEQ ID NO: 34455 - DNA, 269 bp, Zea mays
cgccccggcaaggggaagatgcgcaccgccgctacatcaaccgcaagggacccctcattgtctacggcgctgagggctctaagatcgtcaaggccttccgcaacctccctggcgttgatgttgccaatgtcgagcgcctgaacctgctcgacctcgcccctggtggccaccttggtcggttcgtcatctggaccgagtgcgcattcaagaagctggatgaggtgtacggtgccttcgacacgccatcggcgaagaagaagggtttcttg

SEQ ID NO: 34456 - DNA, 269 bp, Zea mays
ggcgctcgtattgcatagtggggctggaaacaagaatgccttcaaagcacttattgctgcagaatacagtgggatcaaggttgagttgaccaaggattttgagatgggtgtctccaacaagacccctgagtttcttaagatgaacccccttgggaaggttcctgttctggagactcctgatggccctgtttttgagagtaatgctatcgcacgctatgttgctcgcttgaaggatgacaaccctctttttgggtcttcccgtattgaac

SEQ ID NO: 34457 - DNA, 268 bp, Zea mays
cccatataggcagccatcggctacacagcctcgcctccgtaagcagagtgtgtcgttgcggaggcaggaagagagacgacggcggccatggcgacctccttccaggggacgaccaccaagtgcaccgcctgcgacaagactgtgtaccttgtggacaagctcaccgccgacaaccgcatctaccacaaggcctgcttccgctgccaccactgcaagggcaccctcaagctcgccaactacaactccttcgagggagtgctctactgca

SEQ ID NO: 34458 - DNA, 266 bp, Zea mays
gcgagcagcagtaggcagcggcgcgggcgaggagcagaccagcacccagcagccctcgtcggggggcggcagctgcagcttcaccagccgccgcctttccccgtctcctctgcctctgcctctccccctaacccccttccatttctccaccccaccccgctcccgcttccgcttcctcgccacttagttcgttccgcacccgcagccgcggctgcgttcgcattgggggcacgcaatggagcagtacgagaaggtggagaagatcg

SEQ ID NO: 34459 - DNA, 271 bp, Zea mays
cccacacgtccgcccacgcgtccggaaaaaagaaaaggaggagacggtgaaggagaaaaaggaaaagaaggacatgaagcaagagggaaagaaggcgaagaagcaagaggaaaagaaggcgaagaaggacaagaaggaagaggaaaaaaaggtgatggaggacaagaaagaagaggaaaagaaggcgaagaagaagagcgaggggagtggaatcctgtctaacaagctcttctcggagctccccctctctgagctcactgccaaggccatc

SEQ ID NO: 34460 - DNA, 287 bp, Zea mays
ccgttcttcgcttactccggcaatgccggtgatatctccctcgactacgcgctggtcctccccaacgttcggcgtgctctacgccgggtgcggcctctagtactacagcctcttcgacgcgcactgtgacgccttgttcgccgcggtcagcaggctcggggagggcgacaacgccgtgcgcgtcgtggtctccgagacctggtggccgtccaagggcgacgccaacgaggcgggcgcttcggcggccaacgccgcggcgtacaacggcaacctgtcgcgccgcgtgc

SEQ ID NO: 34461 - DNA, 290 bp, Zea mays
ccaaggtagcaggctgcgctcttctttcaatgcaagagatgcacaggctgatgaccttggctcgctcctggaatgggaatctcaataccttggagcgctcagcctcccacaaagcagccgatcccagccccgtctttctactggtctgactattcgtccaacagcagttgctccatcctacctcgaagagatgtatgcttcagacatggctatgtcgccaaggttcaccaatgaccaaggtcactcagtcttctcaccagcacacaaatcagctcttctaaacaagtttc

SEQ ID NO: 34462 - DNA, 284 bp, Zea mays
agctgttcactatcacattggataatgattgctcttcccatgatatttacagtgcaaatcttagggatcacctctccaataagaacaacgtcatgcttaagggacagctctttgttgtgaggtgctatgcacatatcctgaatgtagttgctcaagatgtaattgcttcgattcatggtgtgatttacagcatccgtgagagtatcaagttcataaaagcttctccaagtcgtgaggagaagtttgctgagattgctctgcagctggagatcccagtacaagac

SEQ ID NO: 34463 - DNA, 195 bp, Zea mays
gggactttgaactgtctctatatagacgactaataggttataatgatgagattcttgacttgaagtttatcggggaggaggaacaataccttgccgtggctaccaacttggagcaggtccgtgtttacgatgttgcgtcgatgtcatgttctaatgtactcgctggccacactgaaatagttgtttgcattgaca

SEQ ID NO: 34464 - DNA, 295 bp, Zea mays
cggacgcgtgggcggacgcgtgggcggacgcgtgggcggacgcgtgggcggacgcgtgggcgcgctcggcacttccccacccagaaaggaaaacgtaccaccactcaaaccaccctccgactccgcctgcgccacagctgccgattcgaaagccctcgtcctgacccctcgcaaaaccctagctccaaccaccatgaagggcaaggccaacgcctccaagaaggatgaggccaggctccgggccggcggcggcggcgctggaaagcgcaagaaggccgccgcgagcggcaagccc

SEQ ID NO: 34465 - DNA, 292 bp, Zea mays
cccacgcgtccgatcagcacatcgatgccatcgagcggctctgccatgagcgcgccctcactgccttcggtctcgaccctgcctgctggggcgtcaacgtgcagccgtactcgtgcacgtctgccaatttggctgtctacactggtcttcttcaacccaaggaccgcatcatggggctggagccaccgtcgggcggccatgttagccatggttactacacgcccagtggcaagaaggtgtcaggtgcctctattttcttcgagagcatgtcgtacaaggtgaacccacagac

SEQ ID NO: 34466 - DNA, 294 bp, Zea mays
aaaaccgcatcctctcatcagcttccttccacattcgtctcgagatctcgccccgtcgccatggacgcgatcgacagcgtggtggatcccctccgcgacttcgccaaggacagcgtccgcctcgtcaagcgctgccacaagcccgaccgcaaggagttcaccaaggtggcggcgcggacggcgatcgggttcgtcgtcatgggcttcgtcggcttcttcgttaagctcatcttcatccccatcaacaacatcatcgtcggttccggctaggcttacaggagtacagggcgacta

SEQ ID NO: 34467 - DNA, 294 bp, Zea mays
ggcaaaagtgctgctgacgagcaggtatgccccatatgtctaaccaatccaaaggacatggcttttcagtgtggtcatctgacatgtaaggaatgtggcccaacactatcaacgtgcccattgtgccgcgctctaatcaccatgcgtgtgaggctctactcctaagtcggttggtgtctggagggatgggaccaaacagaaaggagcaagaactttggggcgcaaggactgcgctacgatcttgagatatggtccatatggatgtcatgataacgatgcatgtacagaaacctt

SEQ ID NO: 34468 - DNA, 150 bp, Zea mays
gggttggcttctcctccccctccggttcgggttcgggttcgtgaggttctccggagttcggtttcgtgggtgagcggatcgagatggcggcgtcggatgttgagtaccgctgcttcgtcggcagcctcgcctgggacacggacgaccact

SEQ ID NO: 34469 - DNA, 282 bp, Zea mays
gtcctgtccttccacccggcggcttaaaccctagttctcactcccatcgccgcttcagctccgccgctgcagatggagttctggggtctcgaggtcaagcctggttccactgttaagtgtgagcctggatatggctttgtgctgcacctttcccaggctgctcttggggaatcgaagaagagtgataatgccttgatgtatgtcaaaattgatgatcagaaacttgccattggaaccctctctgttgacaagaaccacacattcaatttgatctgattttcg

SEQ ID NO: 34470 - DNA, 284 bp, Zea mays
cttcgccacgtggtgggcgctgaacgtgatcttcaacatctacaacaagaaggtcctcaacgcgttcccgtacccgtggctcacgtcgacgctctccctggccgccggctccgccatcatgctcgcgtcctgggccaccaggatcgccgaggcgccccagacggacctcgatttctggaaggcgctcactcccgttgcgatcgcgcacacgatcgggcacgtggcggcgacggtgagcatggccaaggtggccgtgtcgttcacgcacatcatcaagagcgggg

SEQ ID NO: 34471 - DNA, 284 bp, Zea mays
attcggtgatcagtaccgggcaactgatgcagttatcaaggggccagggaagcttaaattagtttttgagggaaaagaagagcaagttgagctggaggtgttcaacttcactggtgcaggaggagttgccttatcaatgtacaacactgacgagtccatccatgcctttgctgacgcttctatggccactgcttatgaaaagaaatggccattgtatcttagcaccaaaaacactattttgaagaaatatgatggcaggttcaaggacattttccaggaggtgt

SEQ ID NO: 34472 - DNA, 283 bp, Zea mays
ggacgcgtggcgggtgtgctggatgtgagggattatccaatgtttgatgaggatggggatggtatgatagaccaggaggaaggtgcagaagaagaacttcaaattgagctaaatgaggatgaaccagcattcttgcaggggcagagcagattttcaatagacatgtcacctgtaaagatctttaagaatcctgagggttcattgagccgagcagcagccctacagactgctctcataaaggaacgtcgtgagttttgagaacaggagcagagagccatgttag

SEQ ID NO: 34473 - DNA, 277 bp, Zea mays
cgctcaagcacgacggggagcgcgagttcatgttctacaggaacccgagcgcggacatgctgctgacggaggcggagctggacctgggcctggtgcggcgcgccagggtgttccactacggctccatctcgctcatctccgagccgtgccgctcggcgcacatggccgccatgcgcgcagcaaggccgcgggcgtgctctgctcctacgaccccaacgtgcgcctcccgctctggccgtcgcccgacgccgcacgcgagggcatcctcagcatctgg

SEQ ID NO: 34474 - DNA, 285 bp, Zea mays
gctagcatccgcagttcccccgcgcccgagacgcaaccccgcgccaggagtaagtttgttcttttatcgatattatcgatatggcgagggaggagaatgtctacatggccaagctggctgagcaggccgaaaggtatgaagagatggttgagtatatggagaaggtggctaagactgtagatgtggaagagctcactgttgaggagcgtaacctcttgtcggtcgcatacaagaatgtgattggggctcgccgtgcttcatggcgcattgtctcttctattgaac

SEQ ID NO: 34475 - DNA, 286 bp, Zea mays
cggacgcgtgggcggacgcgtgggtgctggtttatctcttgcagaggttgccgcagaagcaaaacatgcatatgaggttgttggtacgatgggagttgcactttctgtttgcacattgcctgggcaaataacttctgatcgtctaggtccaaggcaaatggagcttggccttggaattcatggagaacctggagttgctgttgttgaactccagccagttgacgtagtggtagaacatgtccttaaacagatattgtcacaggaaactcagtatcttcctgtcaca

SEQ ID NO: 34476 - DNA, 286 bp, Zea mays
ggcgggtgttgtctcgcgaggtgtagcgagccaagttcaggagagtttcgagaagctgaaatggctcctaaagctgctcctgccaagaagggtgatgccaagacccaggccttgaaggttgccaaggctgtgaagtctgggtcagtaaagaagaccaagaagatccgcacgtccgtgacatttcaccgccccaagaccctgaagaaggctagggaccccaagtacccaagaatcagcactaccggaaggaacaagcttgatcagtaccaaattctcaagtatccct

SEQ ID NO: 34477 - DNA, 287 bp, Zea mays
cggacgcgtgggcactggctaagtatgtgaaagctgtctaccacacacgtgtgtctgttggaatgcggtttcggatgctttttgagacagaggaatcaagcgtcagacgatacatgggtacgatcacatgcataagtgatctggactcagagcgttggccaaattcacactggcgttctgtgaaggttggttgggatgagtctacagctggtgataaacagccaagagtttcactctgggagattgaaccactgatggcctttccgatgtacccaactgcctttcca

SEQ ID NO: 34478 - DNA, 289 bp, Zea mays
atcgactaccaccataacatgtacgcctcgcaccagaaggtgaaccccaaggaggtcatcgtcggatggttctcgactggatttggtgtttctggggggagtacgctcatccacgagttctattcaagggaagtacaaaaccccatccatcttacagtcgacactggcttcactaggggggaggcttccatcaaagcctacatctcatccaatctgtccctcagagatagtcaactcgctgcacaatttcaggaaatccctctggatctgaagatgattgaggcggaaa

SEQ ID NO: 34479 - DNA, 290 bp, Zea mays
atctcctcgcatttcttcccatccgatccccccttcgcaaccaaaaccccaactcgccccgcatcgatggcgcccaaggccgagaagaaacccgcggcgaagaagccggcggaggaggagcccgcggccgagaaggcgcccgccgggaagaagccgaagcgtagaagcgggtccccgctggcaagtccgctgccaaggaaggcggcgagggcaagaggggcaataagaagggcaagaagagcgtggagacctacaagatctacatcttcaaggtgctgaagcaggtgcac

SEQ ID NO: 34480 - DNA, 270 bp, Zea mays
ggctgcttcagctccgacatcctggcggccgtcgaccgcgccgtggcggacggcgtcgacgtgctctccatctcgctcggcggcggctcgtccccctacttccgcgacagcctggccatcgcgtcgttcggtgccatgcagatgggcgtgttcgtcgcctgctcgggcggcaacggcggcccggaccccataagcctcaccaacctgtcgccgtggataaccacggtgggcgcgacaccatggaccgggacttccggacaggtgacgctc

SEQ ID NO: 34481 - DNA, 274 bp, Zea mays
cgacaagggtgtgtcttctgccgccaaggtggtgaggaaggcttacccgcaagagaatgtcggggtgtttgttcaacgaggccgcggtggacctctctccgtggttgagtacagcgaaatggacgcagctatgactactgagatcaatcagtcgacagggcgactccgttactgctggagcaacatctgcctgcacatgttcactctggacttcttgaaccaagtggcgaacagcctcgagaaggacagtgtataccatctagctgagaagaag

SEQ ID NO: 34482 - DNA, 273 bp, Zea mays
gttcggtccatgacattcaatcctgacggaagaactctgttatgtgggttgcacgaaagcttaaaggttttctcctgggagccaataagatgccatgatactgtggatgtgggatggtctagacttgctgatttgaatgtccacgagggaaaacttcttggttgttctttcaatcaaagttgtgttggaatatgggttgttgatctgacgcgtcttgagtcatatgcaacaggtacttcaacaaaattaaatggccattctgaattgaagact

SEQ ID NO: 34483 - DNA, 280 bp, Zea mays
caaatggtcctttatgcccaaggtttcagatggacgcccttcttatcttgtcgttaatgctgatgagagtgagcctggaacttgcaaagatagagaaatcatgcgccatgacccccacaagcttctggaaggatgccttattgctggagttggaatgagggcatcagctgcttacatctacattagaggtgaatacgtgaatgagcgtctcaaccttgagaaagctcggcaggaagcgtatgcagctggacttctgggtaagaatgcttgtggctctggt

SEQ ID NO: 34484 - DNA, 278 bp, Zea mays
gcgacccgtccttccaccgcgagctcctccatggcacacggcggggcacccgctgctgaacctctccgattttctggacgaggcgcactctggatcgtgggatcactctgcctttgtgcgcacctatgcgctctaccttgaccagcgcctcgagttcttcctccatgagcgcaacaggggttaaatgccggcagcagcagcagcagtgctaatggcccatcaccacgtgaccgtgatcgctggggttcgcctgatccctatggccgccgctctccctc

SEQ ID NO: 34485 - DNA, 275 bp, Zea mays
gccagcggagaagaagccggcggccgaggagaaggcggagaagacgaccgcaggaagaagcccaaggccgagaagcggctgcccgcgtccaagtcctccggcaaggagggcggcgagaagaaggggaagaagaaggccaagaagagcgtggagacctacaagatctacatcttcaaggtgctgaagcaggtgcaccccgacatcggcatatcctccaaggccatgtccatcatgaactccttcatcaacgacatctttgagaagctggccggcga

SEQ ID NO: 34486 - DNA, 281 bp, Zea mays
ggcttctcctccccctccggttcgggttcgggttcgtgaggttctccggggttcggcttcgtgggtgggcggatcgagatggcggcgtcggatgttgagtaccgctgcttcgtcggcggcctcgcctgggccacggacgaccactccctccacaacgccttcagcatctacggcgaggtcctcgagtccaagatcatcctcgatcgggagacgtagaggtcccgcggcttcggcttcgtcaccttctccacggaggaggcgatgcggaacgccatcgaggg

SEQ ID NO: 34487 - DNA, 260 bp, Zea mays
cggacgcgtgggcgcggagtagtcgacgcgccgtcactgaatcctcagatcacggctagccgtaatcacgccaatctgctgactcccggcgagcagtgtaacattttccttcagccatgggcaaggagaagactcacatcaacattgtggtcattggacatgtcgactctggcaagtcgaccaccactggccacctgatctacaagctcggcggtattgacaagcgtgtgattgagaggttcgagaaagagccgcggaga

SEQ ID NO: 34488 - DNA, 278 bp, Zea mays
aatcgggtcggtcttgccgtgcgtgcgtggctgcgcgagcgactcgactgcaccccccgctcctcccagtccccacacactgcgcgccgccgccgggtcctcctagggtttcgccgcgatgtcgctccggccgagcgagcgggagcagatgcggaagggcaactacaagcagacggtggacgcggaggagagccgccgccgccgcgagggccagatggtggacatccgcaaggccaagcgcgaggaaagcctccagaagaagcgccgcgatgggtttc

SEQ ID NO: 34489 - DNA, 281 bp, Zea mays
gagaacctatccagaggagatgatccaaactgggatatccaccattgatgtcatgaattccattgctcgtggacaaaagattccactgttttctgctgctgggctccctcacaatgaaattgctgctcagatttgtcgtcaggctggtcttgtgaagacattggagaaaggaaagcatgctgagggtggtgaagatgacaactttgctattgtgtttgctgctatgggagtgaacatggaaacagctcaattcttcaaacgtgattttgaagagaatggtt

SEQ ID NO: 34490 - DNA, 279 bp, Zea mays
cccacgcgtccggagcaagctcgatgcgcacctgagcttttcatccaccttgtcccagacaaggccacgaacacgctctccatcatcgacagcggcatcggcatgaccaagtccgaccttgtcaacaacctcggtaccatcgccaggtccgggaccaaggagttcatggaagcccttgctgccggcgctgatgtgtccatgattggccagttcggcgtcggtttctactctgcctacctcgtcgccgatagagttgtcgtgaccaccaagcacaacgat

SEQ ID NO: 34491 - DNA, 278 bp, Zea mays
aacgaaggctctccgatctatgactcagagaacggtcttaactcaagaagaaatggaggaggttgtcctaaaaagatgctggcttgcacgctattggggcttagcagttcaatatggtgtgtatcccgaaattgcggtatcaaagcatgaacattggtcatcattggctcctcttcctcttgaggttgttctttccgccggtcaaaaagctaaggaggaacctcgaaaacaaggtgacaatgttcaagggagaaataaacttgcacgagaaatgagtg

SEQ ID NO: 34492 - DNA, 274 bp, Zea mays
cccacgcgtccgcacgtcgatcggcgtccgcggcgcgactccgtctgcgtcgtcacccagaagaaagtcccggacaagttgctggatcagacgagcgtgacacacttgttcccgatcaccaagtacgtcggattgcttgccactggcctcacagctgatgcaaggtcattggtttcccaagcaaggaacgaagcagctgagtttcgtttcaaatggggctatgagatgccagttgatgtgttagcaaaatggattgctgacaaagctcaagttt

SEQ ID NO: 34493 - DNA, 275 bp, Zea mays
cagtagtataggtcaggctgcatttgatcaagcacaggcatttaaacaaagtgtttctgttggtgctgtgattattacaaaaatggatggtcacgcaaaaggtggcggcgcccttagcgcggtcgcagcaacaaaaagtcctgttatattcattggaactggagagcacattgatgattttgaagtttttgatgtgaagccatttgttagtcgcctgttaggtatgggagattggtcaggctttatggacaagattcatgaagtgatacctacag

SEQ ID NO: 34494 - DNA, 270 bp, Zea mays
gcggccgcccttttttttttttttttttttttttttttttttttttttttttttggagcaagcaagcagataaaataatgaaatactcgtcacatatgccatggctggcatatcaagcggtgcaggtgaaacaaagtctttgtggtagcatacagcatgctacgcacgaaggtactactacataccgcataacttgagcgaatacaacaagcaaaccataggcaagccccggaatgaaaggaaacaagggtacaaatgtggcggcccaaa

SEQ ID NO: 34495 - DNA, 275 bp, Zea mays
actggggcgaggcgggcggccccgacctcatcgtcgacgacggcggcgacgccacgctgctcatccacgagggtgtcaaggccgaggaggattacgagaagaccggcaagatccccgacccggagtccaccgacaacgctgagttcaagatcgtgctcaccatcatccgcgacgggctcaaggctgaccccaagaagtaccgcaagatgaaggagaggcttgtcggcgtctctgaggagaccaccacgggtgtcaagaggctctaccagatgcag

SEQ ID NO: 34496 - DNA, 269 bp, Zea mays
gtctttgagccctcaagcatgatggccaagtgtgacccaaggcatgggaagtacatggcttgctgcttgatgtaccgtggtgatgttgttcccaaggatgtcaatgctgcagtcgcaaccatcaagaccaagagaactgtccagtttgtggactggtgccccaccggattcaagtgtggcatcaactaccagccaccgtctgttgtccctggaggcgacctggcaaaggtccagcgtgccgtgtgtatgatcagcaacaacactgccgt

SEQ ID NO: 34497 - DNA, 268 bp, Zea mays
ctcgcatccgcagcctttcgagctctactctaccccctcgatctcgaagcgcacagcagcagtcaggcggccatggacgcgagcgcaccggagccggcgggaaggcgaagaagggcgcggccgggcgcaaggccggcgggccgaggaagaagtcggtgacgaggtccgtcaaggccgggctgcagtttcccgtcggccgcatcgggcggtacctgaagaagggccggtacgcgcacgcgtcggcacgagcgcccccgtctacctggcc

SEQ ID NO: 34498 - DNA, 270 bp, Zea mays
gcagccgacaactctctaccgtccgagaccccaagcaccagcgcggcggcggcggcggcggcgaccatggctgtcgggaagaacaagaggatctccaagggaaagaagggtggcaagaaaaagaccgtcgaccctttctctaagaaggattggtatgacatcaaggcaccgtcggtgttcagtgtgcgcaacatcgggaagactctcgtatccaggacacagggtaccaggattgcttctgagggtctgaagcacagagtctttgaggtt

SEQ ID NO: 34499 - DNA, 274 bp, Zea mays
  unsure (1)..(274): unsure at all n locations
cggacggtggncgtgacgcgtgggttcgaagtcgacggcacccgtcttctctccgcactcgaaacgccatccttgactacctccgatctggtacgagatggccggcaagatgaaggagttagacggcgccagcctgccaagatcttcattggcgggctctccaaggatacaagcatgagtacattcaaagaacattttgggaagtatggggatataattgatgctgtcataatgaaggaccgctacacacaaaagcccagaggctttggcttta

SEQ ID NO: 34500 - DNA, 269 bp, Zea mays
ggctccgactacgagatcgtgcccatcaacttcgccaccgccgagcacaagagccccgagcacctcgtccgcaacccgtttggtcaggttccagctctgcaggatggtgacttgtacctcttcgaatcacgagcaatctgcaagtacgctgctcgcaaaaacaagccagagctgttgagggaaggaaacctcgaggaggcagcaatggtggatgtttggatcgaggtggaggctaaccagtacaccgctgcactgaatcccatcctctt

SEQ ID NO: 34501 - DNA, 265 bp, Zea mays
ccaccggcccgcgcggcgccggcgcggggcccatctgcgcgtccatgtccatgtcctcctccaacccgccctacgacctgacgtccttccggttcagccccatcaaggagtccatcgtgtcccgcgagatgacccgtcgctacatgacggacatgatcacctacgccgacaccgacgtcgtcatcgtgggcgccggctccgcggggctgtcctgcgcgtacgagctctccaaggaccccgccgtgagcatcgccatcgtggagca

SEQ ID NO: 34502 - DNA, 263 bp, Zea mays
agctaataaggtaataaggggcgacgaaaatggctccaacgaccgccaccaaggacgacagtggctacggcgacgagcgccggcgcgagctgcaggcgttcgacgacacgaagctgggggtgaaaggcctggtggactccggcgtcaagtccatcccgtccatcttccaccacccgccggaagccctgagcgacataatttctccggcgcctctgccgccgtcgtcgtcgccctccgccgccgccatcccggtggtggacctc

SEQ ID NO: 34503 - DNA, 265 bp, Zea mays
gcaacggatccgtgaaccccaacaagacaatccaaggggaacagcagcggaacggcatccagagcccgtcctaccggtgcctggccgcaggcatcatcaactggcaagcggacgtcgagaggtgcatagagtgggaagcccacagccgccgcgccactgggctgacgctcgccttcctcagtgccgcagcgaaggagctcggctgccctctcccgtcatgacaaggccattcctggatctgacatcggcttccaattgacggtca

SEQ ID NO: 34504 - DNA, 263 bp, Zea mays
gaaggcttggcccgcagtaccgtaacccgaagccagcctggtcggtcttcagggaagcgagctttgggcacggcgagctaaagatcgtgaattccacccatgcccactggacctggcacagaaacgacgacgaagagccggtgagaaccgatgacgtgtggataaactctcttgctggttcagggtgcatccaggagggcagccgtgaccgtgagttgaggaagatcctgatgtctccttgatgcttagtagtatagcttggg

SEQ ID NO: 34505 - DNA, 265 bp, Zea mays
cccacgcgtccgcccacgcgtccgggcacgttatgaagagattgtgaaggaagtctcatcctacctcaagaaagttgggtacaaccctgataagattgcctttgttcccatttctggttttgagggcgacaacatgattgagaggtccaccaaccttgactggtacaaaggcccaaccctgcttgaggctcttgaccagatcaccgagcccaagaggccttcagacaagcccctgcgtctgcccctccaggatgtgtacaagatt

SEQ ID NO: 34506 - DNA, 267 bp, Zea mays
cggacgcgtggcgagacgcgtgggcggacgcgtgggcggacgcgtgggcggacgcgtggggcactaacagcacacgcagtacattgcttgctctacgaactttttgcaggtcccgaccgcgggccgagcagtcacttgtccgatgggctactccgcagccgcacgacatcgacgcgctggagcagatggtcgaccccgcgctgcgagggctgtacccgtccaaatccctctccggcccacccgcttcgccgatgccatcgctctatg

SEQ ID NO: 34507 - DNA, 267 bp, Zea mays
cccacgcgtccgaccgcgcaccatggcggaacagactgagaaggctttcctcaagcagcctaaggtgttcctcagctcaaagaaatctggcaagggtaagaagccaggcaagggtggcaatcgattttggaagagcattggccttggtttcaagactcccagggaagcaattgaagggacctacattgacaagaaatgtccattcactggaaccgtttctatcagaggcagaattattgctggaacatgccacagtgctaagatgaa

SEQ ID NO: 34508 - DNA, 267 bp, Zea mays
caaaatggtattgctctgcgtgctcgtctccttcctcctgatgcccttggcctccctagccctgacgcaggacttctgcgtcgccgacctgacctgcagcgacacgccggctgggtacccgtgcaagtccagcgtcaccgccaacgacttctacttccacggcctggccggccagggcaaaataaacccactcatcaaggacgccgtcaccccggccttcgtgggccagttcccgggcgtcaacgggcttggcatctctgcggccag

SEQ ID NO: 34509 - DNA, 278 bp, Zea mays
gttcttgagaagtcctgccgcactgtcatgagcaagtcacctaacaagcacaaccgtctgtacatggaagcgcgccccctggaggagggtcttgctgaggcaattgatgatggccgcattggcccacgtgatgatcctaaggtgcgctcccagatcctctctcaagagtttgggtgggacaaggatcttgccaagaagatttggtgcttcggacctgagaccaccggcccaaacatggttgttgatatgtgcaagggagtgcagtatctcaatgaaat

SEQ ID NO: 34510 - DNA, 269 bp, Zea mays
cccacgcgtccgcgcaatcttcctggctgcgaagtttcttaaagtcaagcttccatcagatggcgagaaggtctggtggcaagagtttgatgtaactccgcggcagttggaagaggttagcaaccagatgttggaactctatgagcagaaccgtgttcaaccaccaccatcacaaggtaatgatactgaaggcagttctgtaactgctgtgaatcaacgtgctctgggtaaagttccaggagtagttgatgaacctcctgcccatgaac

SEQ ID NO: 34511 - DNA, 277 bp, Zea mays
cccacgcgtccgcacaggctgaccccaccaacagcaagcgaaaatctcccgataccctctagtctccgcggcgaagatgtcggggcgcggcaagggcgggaagggcctgggcaagggcggacgaacgccaccggaaggtgctccgcgacaacatccaggggatcacgaagccggcgatccggcggctggcgcgcaggggcggcgtgaagcgcatctccgggctcatctacgaggagacccgcggcgtcctcaagatcttcctggagaacgtgatccg

SEQ ID NO: 34512 - DNA, 265 bp, Zea mays
gtgctgcaaagatggccggttggctcccagatccaagtgaaaagaagtttccgaaaacaagccatgttggatttggtcttgttcttggttcagatggcaagcggttccgaacccgcagtactgaggttgttcgattggtagagctacttgatgaggctaaatctcggagcaaatcagaactactacaacggctcactgaaaatggcaaaattgttgactggacggatgaggaattagagcaaacttcagaggctgttggatatgg

SEQ ID NO: 34513 - DNA, 249 bp, Zea mays
gcaaggtgcttgtgaacattgagcagcagtcccctgatattgctcagggtgtgcacggccacttcaccaagcgccccgaggagattggagctggtgaccaggggcacatgtttgggtatgcgactgacgagacccctgagctgatgcccctcagccatgtccttgccaccaagcttggtgctcgtctcacggaggttcgcaagaatggaacctgcccctggctcaggcccgatgggaagaccaggtgac

SEQ ID NO: 34514 - DNA, 276 bp, Zea mays
gtacgagaagaccggcaagatccccgacccggagtccaccgacaacgctgagttcaagatcgtgctcaccatcatccgcgacgggctcaaggctgaccccaagaagtaccgcaagatgaaggagaggcttgtcggcgtctctgaggagaccaccacgggtgtcaagaggctctaccagatgcaggagaccggcgccctcctcttccctgccattaacgtcaacgattccgtcaccaagagcaagtttgacaacctgtatggttgccgccactcact

SEQ ID NO: 34515 - DNA, 271 bp, Zea mays
cccacgcgtccggatgacaaggatgtgatgaactggatggacaagaaggggatgggagtggcaagtcgaagcaaagcaggagtgagaagaagagccgcaaggccatgctgaagcttggcatgaagcccatcactggtgtcagccgggtcactgtgaagaaaagcaagaatatgctttttgtcatctcgaagccagatgtgttcaagagcccaaactcggacacctatgtcatattcggcgaggcgaagatcgaggacctcagctcccagct

SEQ ID NO: 34516 - DNA, 257 bp, Zea mays
attccacctccgttcaccccgtccatttgatttgcgttcactgcgttgcgtttccttggaggggattgttctctcctctcctttggattggaggtccctccttcttctcctctctctctcagaggaaggcctgaggattcaggaagaggacagcaatgggggaaggtgcaggtgaccgtgtcctgagccgcctccacagcgtcagggagcgcattggcgattcattttttgccaaccccattaaccttgtcgcggtt

SEQ ID NO: 34517 - DNA, 262 bp, Zea mays
gtcccccttagagagcttgggttccatggtgtcccatataaagcttctgctttcattattccaacttctacatgtttggttgagctgattgagacccccttccttgtggtgagcctgagcgagatagagattgttaacctggagagggtgggctttgggacaaagaacttcgacatggctatcgtgttcaaggatttcaagaaagacgttctccgcattgactccatcccttcagcatcgcttgacgcgataagggatggct

SEQ ID NO: 34518 - DNA, 273 bp, Zea mays
  unsure (1)..(273): unsure at all n locations
gaaacctctcaaaccctagccgcctcctgcaagtttcagagctcaggaatctgcgccatggcgagtgagacggagaccttcgcatttcaggctgagatcaaccagctgctctcactcatcatcaacaccttctactccaacaaggagatcttcctccgcgagcttatctccaactcttccgatgcgctggacaagatcaggttcgagagtctcactgacaagagcaagctcgatgcgcagctngagcttttcatccaccttgtcccagacaag

SEQ ID NO: 34519 - DNA, 263 bp, Zea mays
ggacctggcgacaagctcaaggctgagcgtgagagaggtatcaccattgatatcgctatcgtggaagtttgagaccaccaagtactactgcacggtcattgatgcccctggacaccgtgacttcatcaagaacatgatcactggtacctcccaggctgactgtgctgtccttatcattgactccaccactggtggttttgaggctggtatctccaaggatggccagacccgtgaacatgctctccttgcgttcacccttggag

SEQ ID NO: 34520 - DNA, 272 bp, Zea mays
ccttttacaaactcaactgaagatcaaaaagcagcgcaaagggccagggacttccatattggttggtttcttgatccattaataaatgggcaatatccaacgataatgcaagacattgtgaaagaccggctaccaagtttcacacctgaacaggccaagctagtcaagggctcatcagattatttcgggatcaatcaatatactacatactacattgcagatcaacaaactcctccgcacggaccaccgagctactcgtccgactggggcgt

SEQ ID NO: 34521 - DNA, 263 bp, Zea mays
ctgcactggacttctgttggctcgccgtgtgctaaagatccgtggtttggataaggagtatgagggcaatgttgaggccactggtgaggacttctctgttgagccagctgatgagaggaggccattccgtgctctcttggatgttggccttatcaggactacaacagggaaccgtgtctttggtgccctcaagggagctttggatgggggcctggatattcctcacagcgagaagaggtttgctggattcaagaaggatgaca

SEQ ID NO: 34522 - DNA, 252 bp, Zea mays
ccgggaaagagcttacgctgctggggttatgggcgagcccgttcgtgctccgggcgcgcatcggctcagcctcaaaggcctcacctacgcttactccgaggagaacctcgacgacaagagcgagtttctcctcagctccaaccccgtgctcaagaaggtgcccgtgctcatccaccacggcaagcccgtctgcgagtcccagatcatcgtgcagtacgtcgacgaggctttcccggcggcggaactaatttc

SEQ ID NO: 34523 - DNA, 264 bp, Zea mays
cggacgctggccgtcgtctgctccgggctgctgttctgcgcctccacaaggctttggcctctgagtgtaagttttaagcttcacctccagccatgggtaaggagaagtcccacatcaacattgtggttattggccatgtcgactctggcaagtcaaccaccaccggccacctgatctacaagcttggaggcattgacaagcgtgtgattgagaggttcgagaaggaagccgctgaaatgaacaaacggtccttcatgtacgctt

SEQ ID NO: 34524 - DNA, 260 bp, Zea mays
gtccagaatactgccgaagggaacgctcgaaggaggtattaatcaggccggcatcaagtactacaaaaagctcatcaacttattgatagagaacggaatagagccatttgtaacaatttttcattgggacgtccctcaagcactggaagacaagtacggtggctttttaggcgacaggattgtaaaggattacacagacttcgctaaggtgtgctttgagaacttcggtgacaaggtgaagaattggttgacctttaacg

SEQ ID NO: 34525 - DNA, 303 bp, Zea mays
agtacgctgcagtacggtccgaattccgggtcaccaccgtccgggacctggcgctcaagtccaaggcggacggggagaccgtgtaccgggtgagcttcgagtggagccgagtcgcagggcatcccgggcgccgtcctggtcaggaacctgcagcacgccgagttcttcctcaagacgctcaccctcgagggcgtccccggcaagggcaccgtcgtcttcgtcgccaactcgtgggtctacccgcacaagctctactcgcaggaacgcatcttcttcgccaacgacacctatctgccgagcaaa

SEQ ID NO: 34526 - DNA, 278 bp, Zea mays
tgcaggattatcgatctgattgcggcatgatccgcttcatcctgctgcagaaccggcaggggaagactcgactggccaagtattacgtcccgctcgaggactcggaaaagcacaaggttgaatacgaggtacaccggctcgtggtcaatcgggaccctaagttcaccaacttcgtcgagtttcgcacacacaaagttatctataggagatatgctggactgtttttttcaatatgtgtggacataactgataatgaattggcatacttggaatgcatt

SEQ ID NO: 34527 - DNA, 278 bp, Zea mays
cgtgtgcttctggagcttgtcaccggaaggaagcccgtagcgagttcggcgacggcgtcgacatcgtccagtgggcgaagatgacgacgaactcaaacaaggaacaggtgatgaaggtcctggacccaaggctctcgactgtcccgctgcacgaggtgacgcacgtcttctacgtcgcgttgctgtgcaccgaggagcaaagcgtgcagcgcccgacgatgagggaggtggtgcagatcctgagcgagcttccaaggccgccacctaccaagcaggga

SEQ ID NO: 34528 - DNA, 281 bp, Zea mays
tctcatcccactgactccagccacccacccgcccgctgcctccgccggatctcgtcggactcggatccgcccgaccacgaccaccccgcgccgccgccgcgcagcagcagcagatcagagaagatggccggactcgacaccttcctcttcacctcggagtccgtgaacgagggacaccctgacaagctctgcgaccaggtctcagatgctgttctggacgcttgccttgctgaggaccctgacagcaaggttgcttgcgagacctgcaccaagaccaacat

SEQ ID NO: 34529 - DNA, 277 bp, Zea mays
atatatgcaggattcaactcaactctgcgtcaaggatgcataactcatcatgaatatattcaggttggcaaaggtagggatgttggacttaatcagattgcactatttgaaggaaaagttgctggtggaaatggtgaacaagttcttagccgagacatatatagactcggacaactttttgactttttcaggatgttatctttctacgtgacaactgttggattctacttctgtactatgctaaccgtgctgaccgtgtacatatttctctatggga

SEQ ID NO: 34530 - DNA, 278 bp, Zea mays
cccacgcgtccgaaacaggcaatacgaacattttaataaggttgcaaaggtggtagatgagctagtagaggagcagggtgggaaacgtcttgttcctgttggccttggagacgatgatcagtgcattgaggatgatttcactgcatggaaagaactagtgtggccagaattagatcaattgctccgcgacgaggatgacacaactggtgcatcgactccatatactgctgctattcctgaatacagagttgttttcattgacaaatctgacctgtcat

SEQ ID NO: 34531 - DNA, 279 bp, Zea mays
cttcgtacaaggtgatgcgtgaccaaaatggtcttagcaaaggctctggatttgttgctttctcaactcgtgaggaagcatctcaggctttaactgaaatgaatggcaaaatgatatctggaaaaccattgtatgttgcatttgcacagcgcaaagaagatagaaaagcgatgttgcaggcacagttttctcagatgcgccctgctgtaccaatgacacccactctagccccacgccttccaatgtactctccgatggctcctcagcaactcttctatg

SEQ ID NO: 34532 - DNA, 274 bp, Zea mays
ccatacctggaacaacaaaaatcgagaacttcaaccagaacgtgggggcgctttctgtgaagttgacaccagatgagatggccgaactcgagtcctgtgctgctgcaggtgaaatcttgggtgaccgttatcctcaaatggccaacacctggaaggactctgagaccccgccattgtcttcttggaaatctgagtagccaatctggtgtctcttcaattctgccaccgtcacattggtgtatctccaaattgtcggactgcagaagatactcag

SEQ ID NO: 34533 - DNA, 272 bp, Zea mays
cgctttggtcagtctcctattttcattgcatccacctttatgacacaaggtggcataccaccttcaacaaacccagcttctctactaaaggaagctatccatgtcatcagttgtggatatgaggacaaaactgaatggggaaaagagattggctggatctatggttcagtaacggaggatattctgactgggtttaaaatgcatgcaaggggctggcaatcaatctactgcatgccaccacgaccttgtttcaagggttctgcaccaatcaa

SEQ ID NO: 34534 - DNA, 274 bp, Zea mays
caagccgaccccgccgacgtacactccaagccccaagcctcccacacacccgacgcccaagccgaccccaccgacgtacaccccttccccaaagcctccgacacctaagccgaccccgccgacgtacacgccttcccccaagcctccgacacccaagccgaccccaccgacgtacactccaagccccaagccaccggctaccaagcctcccacgcccaagccgaccccaccgacgtacactcccacaccgaagccgccggccaccaagccgccc

SEQ ID NO: 34535 - DNA, 272 bp, Zea mays
gccaaccctaggcagttcaaggtgccggactggttcctcaacaggaagaaggattacaaggatggaaggttctcacaggtcgtgtccaacgccctcgacatgaagctcagggacgacctcgagaggctcaagaagatcaggaaccaccgtggtctgcgtcactactggggcctccgtgttcgtggccagcacaccaagaccactggcaggcgtggaaaaactgttggtgtctccaagaagcgataagctacatatctatcgacaaatctcag

SEQ ID NO: 34536 - DNA, 274 bp, Zea mays
agagtctggcgtgccgtcatcgatgatctacttactgtgaggggaatgagcaaggcgcaaaatgctcttctttctggatgctcagccggaggtctagcagcaatactacactgtgacagattccatgatctgtttccagcgaaaacaaaggtcaagtgtttttctgatgctggatattttttcgatgggaaggatatctccgggaacttttacgctaggtcaatctataagagcgttgtgaatctacatggatcagccaaaaatttaccagctt

SEQ ID NO: 34537 - DNA, 268 bp, Zea mays
cccacgcgtccggtcaaatgtctgtgcagtttttctcctacgccactctgaagagcatggacgaggagcttgcagaagagtttgacttggatcacccagacaggaggtggctctggccacaaactggagaggtcttctggcagggtctctatgagagggagcgtacatgcggcacatgagaaggagcggcggaagcagcagagcagagagaagatccagagaatcaagagtagagctcggcaaaagacgttggggaagtatataaagc

SEQ ID NO: 34538 - DNA, 272 bp, Zea mays
cgagtggtcaataaaccccgcctcccttctgtcatcccgtacgtctcgacctcgcagccgcaaacgcgaaaccctagcctcgagctctatctccggccacagctggtcaggttagcgacgaaggatgagcaggcgctggagccgcacgatctacgtcgggaacctccccggcgacatccgggagagggaggtggaggatctgttctacaagtatggtaaaattgttgacattgacctgaaggtccccccaagaccacctggttatgcttttg

SEQ ID NO: 34539 - DNA, 270 bp, Zea mays
ctcatcgcggcgcccggccgtggggcgatgtcttccgcgcgccggccttctccaagccgccgtcgctcggggaggcgatcgcccggatgcgccgcaacaccgcctacttccgcgccaactacgcgctggccgtgctcgccgtcgtggcggcctcgctgctctggcaccccggcacgctcttcgtgctcctcttcctctgcgccgcctggttcttcctctacttcgcgcggcccgcgcagggcgggcagccgctcatggtcctggggatgg

SEQ ID NO: 34540 - DNA, 267 bp, Zea mays
cccacgcgtccgctggccatctactaccccaacgacggcgtgctgcaggccgacgtggagctgcaggcgtggtggaaggaggcgcgcgaggtcgggcatgccgacctcaaggacgagcactggtggcccaagatgcagacggtgccggagctcgtgaaggcctgcaccaccatcatctggatcgcgtcggcgctacacgccgccgtcaacttcgggcagtacccgtactgcgggtaccacccgaaccggccgtccgtgagccggcgg

SEQ ID NO: 34541 - DNA, 271 bp, Zea mays
atctcaaatcctcatcgttctcctttccccaaaggccaaaaccgaccccgctccacgcctccactcccagccccagcggatcttctcgagcggcggccggcgatggcagcgagcaacatcgggatgatggacggagcctacttcgtcgggcgcaacgagatcctcgcgtggatcaacactacgctgcacctcggcctctccaaggtggaggaggcggcgtcaggcgcggttgcgtgccaactgatggacgcggcgcatcccggcgccgtgc

SEQ ID NO: 34542 - DNA, 267 bp, Zea mays
gtcaagctctaccgtttcttggtcaggaggaccaagagcaatttcaacgctgtcattctcaagaggcttttcatgagtaaaaccaaccgaccaccaatctccatgcgccgccttgtcaagtttatggaaggaaaggagaagaacattgctgtcattgttggcacagtcacagatgacaaaaggatccaggaggttccagcaatgaaggttactgccctgaggttcacggagacagcaagggccaggattgtcaatgctggtggcgag

SEQ ID NO: 34543 - DNA, 266 bp, Zea mays
ggtttctccagccaactgagggccgcaacctctggtcaggcgttcccccagtgtgtctttgaccattgggacatgatgggctcagatcctttggaggccggctcccaggctgctcagctggtgctggatatccgcaagaggaagggtctcaaggaacagatgacccctctttctgagtttgaggacaagctctaaaatttttggctgttggtgatactgtttcatctgccggtttaatcatcaattcgtctactgtaatagcagcg

SEQ ID NO: 34544 - DNA, 267 bp, Zea mays
cccacgcgtccggacggtattgagtcaaggtgcagaaataataccgtggaggaaaatctctcattatggaaagagatggttaatggaactgaaaggggcatgcagtgctgtgtacggggtaaacttgacatgcaggatcctaacaagtcactcagggatcctgtttactaccgctgtaatactgatccacaccatcgtgttggttcgaagtacaaggtctatccaacatatgactttgcgtgcccatttgtcgatgcattggagggg

SEQ ID NO: 34545 - DNA, 268 bp, Zea mays
ggctattgtcattattggatgaagagtctactttcccaaaggcatccgatttttcctttgctaacaagcttaagcggcaattaagtggtaactcttgcttcaaaagtgaaaaagaaggcacatttaagatttgccattatgcaggggaggttggtgacatatgatacagctgggttcctggagaagaacagagacccattgcactctgagtcaatccaactactctcatcatgtacatgtgaactttcaaaacattttgcctctgtca

SEQ ID NO: 34546 - DNA, 266 bp, Zea mays
cacacgcgtccgcggacgcgtggccgttcaccccgtccatttgatttgcgttcactgcgttgcgtttccttggacgggcttgttctctcctctcctttggattggaggtccctccttcttctcctctctctctcagaggaaggcctgaggatccaggaagaggacagcaatgggggaaggtgcaggtgaccgtgtcctgagccgcctccacagcgtcagggagcgcattggcgactcactctctgcccaccccaatgagcttgtcg

SEQ ID NO: 34547 - DNA, 278 bp, Zea mays
cggtgccaaccgcctcggtgtgcgcctctctccgttcgcggattatatggactgccacgactccaacccagaggcgctcgcgcttcatgtcatcgacgagacgctgaacccgctcggcgtgctttactgccacatggtagagccaaggatgcgggtgaacccagacgacggtattatgactctcgagcacatgctgctaccgttcaggagggcgtttcgcgggacgttcattgctaatggaggctacgaccgtgaggaaggcaatgacgccattgccc

SEQ ID NO: 34548 - DNA, 276 bp, Zea mays
gaatcattatgcattgggatgttgaaactgggaaatgtgagaagtatatatggccaagtgaagatgtgttggtttcacatcacgctaaaccgccagtatcagctaaaagaagcaagcaagtgctggctttagctgccagttctgatggtcgttacttggcgagcggtggcttggaccgtcacattcatttatgggatattaggtcacaggagcacatacaggcatttagcggccatcggggaccaatatcatgtcttgcttttgcgccagactctt

SEQ ID NO: 34549 - DNA, 273 bp, Zea mays
ggagatcgtactgttcctgttgaagttggaaagaattacgtgtgtagtgagtggaagcaggagcttatcacattttctcagttcctggatagaatgtcgtcaactgtctgtccatcaaacttgacatatctggctcagcatccattgtttgagcagataaaagagctcagtgaagacataattgttcccgaatactgttacgctggtggaggtgaactccaatcacttaatgcttggtttggtccagagggtacagtgacaccattgcaccat

SEQ ID NO: 34550 - DNA, 275 bp, Zea mays
caacgacgtgacggcgcgcgggcacaacatcttctgggaggaccccaggtacacgccggcgtgggtggagaacctcacgggcccggagctgcgcgccgcggtggcaggccgcgtccagagcctgctgtcgcggtacaagggcgacttcgtgcactgggacgtgagcaacgagatgctgcacttcggcttctacgaggaccggctgggcggcaacgcacggccgacttcttcagcacggccaggcgcgccgacccgctggccacgctcttcctcaa

SEQ ID NO: 34551 - DNA, 272 bp, Zea mays
ggttcacttctccaggaaagggttcgtactcatggcgccgccgcagccaaagtcgggcctcttcgttggcatcaacaagggtcatgtcgtcaccaagcgcgagctgcctccccgcccgtgccaccgcaaggggaaatcaacgaagagggtgtctatggtcaggggcctgatcagagaggttgctgggtttgctccttatgagaagcgtatcactgagcttctgaaggttggcaaggacaagcgtgccctgaagcttgctaagagaaagcttg

SEQ ID NO: 34552 - DNA, 274 bp, Zea mays
ggtcgtctacactgacaacgaaggcgacatgatgctggtcggcgacgaccctgagaatgagttctgtgacatggtccacaagatcttcatctacacaagggaggaagtggagaggatgaacccaggcgccctaaactcgaggctcgaagactgcctgtctgagtcgctgggaagagggctggcttccaaagagccccggagcggcccctcgacttcggctgtcgattccgagaactgctaacttgtccagtcagtgagcccttttgaaagtggt

SEQ ID NO: 34553 - DNA, 272 bp, Zea mays
aggaattgctcaatggatgttctcagctagagaatctgagattggcacttgatttctcaacttttgatgaccctaactttggtcgtgtatgggcatctgcttctgaaaggctatcatctcttgagattggttatattcctatgacaatgttacttgaacttctggtagcagttacagaaggacaacaatgcatggattatgttaagacaccagttttctttcctagccttcaaaagttatgcctggctgtggatttcataaccgaccatcta

SEQ ID NO: 34554 - DNA, 277 bp, Zea mays
ctcagatttgtgccagaagcaagaggctgttaaagaagtgcttggatctttagcaaaggctgcgaacaagcgcgacttgagaagtttgagataccagtcaaaatcaagctgataccagagccatggacccccgagtcgggactcgtcactgctgccctcaaactcaagagggaggtgatcaggaagacgtacgagaacgatctggctgagttgtacgcatgatggttctactctttttgatacgtttagtgtggaaaatgtgtagagtgtcaatgtc

SEQ ID NO: 34555 - DNA, 269 bp, Zea mays
ctcctctggatcgcctcaaagtgatcatgcaagtacaaacaacacgtacttcagtcatgcatgcaattaaagatatctggactaaaggtggcatgctgggattttttagagggaatggattgaatgttgtaaaagttgctccagaaagtgcaatcagattttatgcctatgaaatgttaaaagaatatattatgaagagaaaaggagaaaataagagtgaagttggtgcttctgaacgtctcattgctggtggtttagcaggtgcagtg

SEQ ID NO: 34556 - DNA, 268 bp, Zea mays
cttgaaggaccgtttgttcatttcattgactccaccactggtggttttgaggccggtatctctaaggatggccagacccgtgagcatgctctccttgctttcacccttggggtcaagcagatgatttgctgctgcaacaagatggatgcgaccactcccaagtattccaaggcccgttacgatgagattgtgaaggaagtttcatcctacctcaagaaggttggatacaaccctgacaagattgcctttgtccctatctctggttttg

SEQ ID NO: 34557 - DNA, 268 bp, Zea mays
tgcaactggactttgctcgcataccctctccatccttgtgaatgattgtcctggtgttctcaacattgtaacaggagtctttgctcgcaggggctacaatatacagagccttgctgttggctcagctgagaaggaaggcatttcacgtattacaacagttgttcctggtactgttgaatccattgggaagttagttcagcagctttacaagcttattgatgtgcatgaagttcatgacattacccactcaccttttgctgaaagggag

SEQ ID NO: 34558 - DNA, 269 bp, Zea mays
gagatcgctgccgactccctctataaggccaagctcatccgcgggttctgccacctctacgacggccaggaggccgtcgccgtaggcatggaggccgccatcacccgctccgattccatcatcaccgcctaccgcgaccactgtacctacctcgcccgcggaggggacctcgtctccgccttctccgagctgatgggccgcgacggcggctgctcccgcgggaagggcggatccatgcatttctataagaaggatgccaatttctacgg

SEQ ID NO: 34559 - DNA, 266 bp, Zea mays
tgcatctaagtttcttaatgagaaaattacaaaagcagtggttacagtaccagcatacttcaatgattcacaaaggacagcaactaaagatgctggccgcattgcaggactggaagttctccgaattataaatgaaccaactgctgcatcattggcctatgggttcgagaagaaaaataatgaaacaattctagtgtttgatttgggaggtggtacctttgatgtctctgtattggaagttggagatggtgtgtttgaggtgcttt

SEQ ID NO: 34560 - DNA, 266 bp, Zea mays
tgttgtgttgaggatgagatctgctgtcgcaagcaagcagtttggccaggaggatatgctgtgccctcttgtggctgatgcctgcattcaagtttgccccaaaaatcctgcaaactttaatgttgacaatgttagagtggctaagctacttggaggtggtttgcacaattcttctgtggtccgtgggatggttctgaaaaatgatgctgttggtagcatcaaaagggcggagaaggcaaagattgtcgtatttgctggtggtgtcg

SEQ ID NO: 34561 - DNA, 266 bp, Zea mays
gaacgagttccagaccaacctggttccttacccgaggatccacttcatgctctcctcctacgcaccggtgatctcttctgcgaaggccttccacgagcagctgtctgtggcggagatcaccagcagcgcgttcgagccggcttccatgatggtcaagtgcgacccacggcacggcaagtacatggcttgctgcctgatgtaccgcggcgacgtggtgcccaaggacgtgaacgccgcggtggccaccatcaagacgaagcgcacca

SEQ ID NO: 34562 - DNA, 256 bp, Zea mays
  unsure (1)..(256): unsure at all n locations
acggnctccgtcgtcgcgtgccatcctagggtttctttccccgtcggcgcctccccagattannnnnnnnnnnnnnnnnnnnnnngttgtcttgatggcgcccgctgtagaagccgtgaaggagacaggcaccttccagaaggttcctgccttgaacgaaaggatactgtcatccatgtccaggaggtctgttgctgcacacccttggcatgatctggagataggtcctggtgctccaaccatattcaactgcgtc

SEQ ID NO: 34563 - DNA, 271 bp, Zea mays
tgtgttcagagaaccaatcatctgcaaaaacatcccacggcttgttccagggtggacaaagcccatttgcattgggaggcatgcattcggcgatcagtaccgggcaactgatgcagttatcaaggggccggggaagcttaaattagtttttgagggaaaagaagagcaagttgagctggaggtgttcaacttcactggtgccggaggagttgccttatcaatgtacaacactgacgagtccatccatgcctttgctgacgcttctatggcc

SEQ ID NO: 34564 - DNA, 261 bp, Zea mays
gacgacatcctctccaagaacgagtacctcgccggcgacgacttcaccctggccgacctctcccacctgcccaactcccactacatcgtcaactcctccgacaggggcaggaagctcttcaccgccaggaagcacgtcgccaggtggtacgacaagatctccacccgcgactcgtggaggcaggtcatcaagatgcagagggagcaccccggcgcgttcgagtgatcgctcggcggtctacgcggtgatgcatgcatgcat

SEQ ID NO: 34565 - DNA, 259 bp, Zea mays
tgaaagaagctatacatgtcattagttgtggttatgaagacaagacagactggggaaaagagattggctggatctatggatcagttacagaagatattctaactggtttcaagatgcattgtcatggttggcggtcaatttactgcatacctaaacgggttgcattcaaaggttctgcacctctgaatctttcagatcgtcttcaccaggtgcttcggtgggctcttgggtctattgagatcttcttcagcaatcattg

SEQ ID NO: 34566 - DNA, 258 bp, Zea mays
cttatctacaagcttggaggcattgacaagcgtgtgatcgagaggtttgagaaggaggctgctgaaatgaacaagcggtccttcaagtacgcgtgggtgctcgacaagctcaaggctgagcgtgagagaggtatcaccattgatattgctctgtggaagtttgagaccaccaagtactactgcacggtcattgatgcccctggacaccgtgacttcatcaagaacatgatcactggtacctcccaggctgactgtgct

SEQ ID NO: 34567 - DNA, 259 bp, Zea mays
aacctcctgctcactgatgcacaccgctgttgaccttgtaaatgagactaagctggatgatgagattaagtcatggcttgcatttgctgcccaaaaggttgttgaggttaatgcccttgccaaggctttggcaggccaaaaggatgaggtctactttgcagccaatgctgctgctcaggcctcaaggagatcatcgcccagggtgacaaacgaggaggtccagaaggctgcagctgctttgaggggatctgaccaccgc

SEQ ID NO: 34568 - DNA, 257 bp, Zea mays
ctgaatggataccatgggggtacctccagaacatttgcatgtggacaagttgatgattctatcaaacattttctcaatgcagctgaagaatgcttggagaaaggcatttctatctgcagggatggtgtgaactacagaaagattggcaagaaaataagcaagcttgcctatttttatggctattatgtggtggaacgctttgttggccatgggattggaactatgtatcattctgagccacttatcctacatcatgc

SEQ ID NO: 34569 - DNA, 258 bp, Zea mays
agcttagctccgtggcgtacggcgcgacgtggcagttcgacacggaggcgctgcccaacgacctcgtcaagcgcgggctggccgtgcgcggggaggacggggagctggagctcaccatcaaggactacccctacgcccacgacgggctcctggtctgggactccatcaagcagtgggcgtccgagtacgtcaacgtctactacaagtccgacgaggccgtggccgccgaccccgagctgagggcgttctgggacgagg

SEQ ID NO: 34570 - DNA, 259 bp, Zea mays
gtggaacccatatttaagcttgcaggtttcaagatggaagtggtaaaaactacacatgctgggcatgcaaaatctcttgtatcaactattgattttagtacctgtcctgatggtattgtatgtgtgggtggtgatgggattgtaaatgaggtcctcaatggtcttctatgcagagatgatcaaaatatgtctgcctctgtaccaataggtataatacctgctgggtctgataactcacttatttggacagtcttgggtg

SEQ ID NO: 34571 - DNA, 264 bp, Zea mays
gtggatatgatagagggaaaatgtgaggttagaaagaagaacgatcttgcaagttcagaccttccagtgatgtttgaacatgtatttttctgtgaactcatatatgaccgtgccagtggagctctcaagcagttgcctccaaatgttaggtttatgtctatggtgcaaaggacaagtgcgttgaaaaagaacaaaggaaagcagatctgtgagcctgatcaaatagattcaggtaaatggttggatgtgcctaaagagaaccgt

SEQ ID NO: 34572 - DNA, 243 bp, Zea mays
ctcctacaaccgcctctccggcgagctcccggaccgggtctgcgcgccgccggagatgaactacatctccgtccggagcaacgcgctctctggggaaatatccaacaagctcgcctcctgcggcggcattgacctctacgacgtcggcagcaacaacttctccggagctgcgccctttgcgctccttggctcggtaaacatcacctacttcaatgtctcctccaacgcctttgaaggcgaaat

SEQ ID NO: 34573 - DNA, 81 bp, Zea mays
ggcggtgtcgctgttgcggcagctgcacctgctgctggcggactgctcctgcagctgaggcaaagaaagaagacaaggtgg

SEQ ID NO: 34574 - DNA, 244 bp, Zea mays
cccacgcgtccgggttttttgattttagccgccgccgctgctcatctcacatccctcgagaagacgcctgctcctcgccgatcgatacgatggccgtcttctccgacctccacaccgccgacggcctcaagtccctcgaggctcacctcgccggcaaaacctatgtgtctggtgactccattactaaggatgacattaaggtcttcgccgcggtgccgtcgaagcctggcgctgagtttcctaa

SEQ ID NO: 34575 - DNA, 245 bp, Zea mays
cctcactcccgttccatttccccatctcccagatccaattcgcgagttctccctcctctgccgccatggcgctctctgtggagaagacctcgtctggacgggagtacaaggtcaaggatctctcgcaggcggacttcggccgcctcgagattgagctggccgaggtcgaaatgcccggcctcatggcgtgccgcgccgagttcggcccgtccaagcccttcgccggcgctaggatctcggggtct

SEQ ID NO: 34576 - DNA, 244 bp, Zea mays
gagcgtcagagcccgatcccgatccagcgaggcggcgaccctccctcctccccttgcttcgctcgtccagccctgaccacccgcatccccgtcagtcatggcagcggcagcaggcggaggcgcggtgcgtgcgctgtcccagaaggagcaggacatacagatgatgctcgccgccgacgtccaccttggcaccaagaactgcgatttccagatggagcgctatgcctttaagcgccgcaccgac

SEQ ID NO: 34577 - DNA, 245 bp, Zea mays
cgcgtcgcagtgattccagtcgacggcaaagaaggacctcctgatgtttgtgtcattgaacttgggggcactataggggatatcgagtcaatgcctttcattgaagcattaggtcaattttcataccgtgttggacctggaaacttctgtctcgttcatgtcagtcttgttccggttataaatgtagtcggtgaacagaaaactaagcctacacaacatagtgttcgagggcttagaggacttgg

SEQ ID NO: 34578 - DNA, 247 bp, Zea mays
gcggaaggtgtcaagtaattctgaggagagcatccacttttgcaagttcccttccacaactggcgagggaaatggtggttgtgcatccagacaatgacttccttgaagacatcactggcaaactaaaggagtatgtcatggaggaaatcaatgttaagaatgtcactccatgtaatgaccccttgatgtatgcttctctgcgagccgagcctaatttcagcgtgctaggaaaaagacttggaaaaga

SEQ ID NO: 34579 - DNA, 252 bp, Zea mays
cgttgcggaggcaggaagacagacgacggcggccatggcgacctccttccaggggacgaccaccaagtgcaccgcctgcgacaagactgtgtaccttgtggacaagctcaccgccgacaaccgcatctaccacaaggcctgcttccgctgccaccactgcaagggcaccctcaagctcgccaactacaactccttcgagggagtgctctactgcaggcctcacttccgacagctgttcaagaggacagggag

SEQ ID NO: 34580 - DNA, 251 bp, Zea mays
cttggaatggatattggtttcatgggtccaaactactccatctcaactgcctgtgctacctcgaactactgtttctatgctgcagcaaaccatatccgtagaggcgaacggagtataatgatagctggaggcactgaagctgcaattattccaattggtgttggtggctttgttgcatgtagagcactgtcacagaggaatgatgaccctaaaacagcatccaggccttgggacaaggatcgtgatggttt

SEQ ID NO: 34581 - DNA, 255 bp, Zea mays
gtcccccaaggagcaggtgttcgagatgcccaccggcggcgccgccatcatgcgggagggccccaacctcttgaagctggcgcgcaaggagcagtgcctggcgctcggcaccaggttgcgctccaagtacaagatcacctaccagttctaccgcgtcttccccaacggcgaggtgcagtacctccaccccaaggacggcgtctacccggagaaggtcaaccccggcagggagggcgtcggccagaagttccgcag

SEQ ID NO: 34582 - DNA, 240 bp, Zea mays
caactcgccgtctgccttctgcgcctccatttcggcctctgtcccttgcaagttcaatctcacctccaaccatgggtaaagagaagtcccacatcaacattgtggttattggccatgtcgactctggcaagtcgaccaccacaggacaccttatctacaagcttggaggcattgacaagcgtgtgatcgagaggttcgagaaggaggctgctgaaatgaacaagcggtccttcaagtacg

SEQ ID NO: 34583 - DNA, 236 bp, Zea mays
cgccgcgccgtcgcttcggtggccgtgtccgcccccaggtccggcgccgccgcgtcgttcctggagcgccgcaggtccgagcgcgctctccacttcgtcgagtaccagggcctcggcaatgacttcgttgtggtggacaacagggattcgtcggtgccgaaggtgacgccggacgaggccgcgaactgtgcgaccgaaacttcggcattggtgccgacggcgtcatcttcgtcatg

SEQ ID NO: 34584 - DNA, 239 bp, Zea mays
caggagacatttaaagattttcctacatcggctctgccgttggttgaaactctgcttgcaattgatccagctgagcgacaaactgcctcagctgcattacacagtgattttttttcaaccgagccttatgcttgtaacccttcaagtctgccaacatatccaccaagcaaggagatggatgccaagttaagagacgaggaggctagaagactacgagcgtctgcaaaggccaagggaga

SEQ ID NO: 34585 - DNA, 237 bp, Zea mays
cagaatccaaagccttcgtggtctccaatcatccctgagaaaggcagaggagtatctactgagtgttcctcaagacactccctactcggagttcaaccataggttccaagagcttggcttggagaagggttggggtgacactgcgaacgtgtactcgacacactccacttgcttctcgaccttctggaggcccctgatcctgccaacttggagaagttccttggaactataccaatg

SEQ ID NO: 34586 - DNA, 243 bp, Zea mays
gtccctcagccgcgtcgcaccgcatcgcattctacgattcgaagctctctctgctcgcagccatggcgaagaattacccaaccgtgagcgccgagtacagcgaggccgtcgagaaggccaggcgcaagctccgcgccctcatcgccgagaacagctgcgcgcccctcatgctccgcctcgcgtggcactccgcggggacgttcgacgtgtcgtcgaggaccggcggtcccttcggtactatga

SEQ ID NO: 34587 - DNA, 249 bp, Zea mays
cacgaattcaccaaccaaactccactgtctccaactctccatcgcgtctgctacgcctctcctgcaggacgaccaatggcttccaggaagttcttcgtgggtggcaactggaaatgcaacggtactggcgaggacgtgaagaagatcgtcaccgtgctcaaccaagccgaggtgccctctgaagacgtcgtcgaggtggtggtgagtccgcctttcgtttttctgcagcaggtcaaggggctgctgcgg

SEQ ID NO: 34588 - DNA, 250 bp, Zea mays
accaaatggatttctcagcctaaggagccatatctggacagataccgataacaaccgtgcagggatgctcccttttgtctttgacaactcatttgggttagcatttcttttgaactccccactcccccaccttgagtgccagtaatttgattgattgcttcattctctttaaagatgttttcaatgtgaaagcatcctaattatagtttcttttgggggtgcaggtttgagcaatatgtggattatgcat

SEQ ID NO: 34589 - DNA, 234 bp, Zea mays
cttcgacattcggtgccacttctactgtcggccttatggctgctccaacagggaagaatgtgcgccttcagaggagggtgaacttcagagtaagagcagctaaggagctgtacttcaacaaggatggctcagctatcaagaagctccagactggagtcaataagcttgcagacctagtcggagttacactcggaccaaagggaaggaatgttgttttggagagcaagtatggtt

SEQ ID NO: 34590 - DNA, 235 bp, Zea mays
aggttctgcaatcactggacctatcggcaaggagtgtgctgacctttggcctaggatcgccagtgcagcaaatgccatcgtttgagagcttgttggaatgtgtttagacttgagtatgatcatctcaattgtgtgttgcaggtgttgtaagggtgctattggacttgatggctccttttatgtttggtcactcaattctgtagtgaacagaaatttctggttgcctcaagtttgc

SEQ ID NO: 34591 - DNA, 225 bp, Zea mays
atcagggccatcccgttcaagagcaggtcttaagctgccgcgggtgtgctgagacatgtggggaatgtattgtctgcccacgcctagtttctctgctgaatcttccatctctcttcccttcaagactgctcactgctgcactgctctgttatctgaacccagaacttcgtgtactcctgtaccgagctgtgtgtatgtttttttttcttccatcgtgtttgttgc

SEQ ID NO: 34592 - DNA, 240 bp, Zea mays
acagcagcccggagaacggccaggtccgacaagatgcagatcttcgtgaagacgctgacagggaagaccatcaccctcgaggtcgagagcagcgacaccatcgacaatgtcaaggccaagatccaggacaaggaagggatcccgccggaccagcagcggctgatctttgccgggaagcagctggaggatggccgcacccttgcggactataacatccaaaaggagtctacgctccacctc

SEQ ID NO: 34593 - DNA, 238 bp, Zea mays
ctccaggtctccagcgaacaggctcaggcgcaacgcaacaacacaaggcggcggttatggcctctgctgctgcgacggctacgatggggacggggaaggtggtttgcgtcaccggcgcatcagggtacatcgcgtcctggattgtcaggctcctactcgaccgcggctacaccgtccgcgccaccgtgcgagacaccgctgacccaaagaaaacattgcacctgactgcgttggatgg

SEQ ID NO: 34594 - DNA, 240 bp, Zea mays
ggtggaatttaccctcaaggttattggtggcgaaatgactgctattccaggaatttctgatgcaattgaggggacaatacgtgatactattgaggatacactgacatggccgaatcgcataattgttcccattgtacctggagactatagtgacttggagttgaaacctactggggtattagaagtaaaactggtggaagctagggacctaaagaacaaggatcttgtgggaaagtcgga

SEQ ID NO: 34595 - DNA, 237 bp, Zea mays
ctgcaccacttctcgctccggattccggattccctctgctctttccctaacgaaggtagccatggcggggagaggtaaggcgatcggctcaggcgccgccaagaaggccacgtccaggagctccaaggctggcctccagttccccgtgggaaggatcgccaggttcctcaaggccggcaagtatgccgagagagtcggcgccggcggccctgtctagctcgctgccgtgctcgagta

SEQ ID NO: 34596 - DNA, 273 bp, Zea mays
cccacgcgtccgcccacgcgtccggggagttgcggatcggtctccggggcagcgtggaacggctgggcccctcggatcgccggagatgctgccctacgcgacggcggcggaggcggaggcggcgcttggccggcccatgacgcccgccgaggcgctgtggttccggtacaccgcgggggtgtccgactaccacctctactgctgcaacatcctcttcctcttcgtcgtcttcacggtggccccgcttcccatcgcgctcctcgagctccgggg

SEQ ID NO: 34597 - DNA, 271 bp, Zea mays
cccacgcgtccggcgagatcctcccccacaggttcccattccttttggttgatagagtaattgaatacaaggctggagaatatgcagtggggatcaagaatgttacaataaatgataatttcttcccaggacattttcctgaacgccccataatgcccggtgtcctcatggtcgaggctatggcccaggttgggggtctggtgatgctgcaacctgaagttggtggatctcgagacaacttctttttcgccgggattgacaaagttaggtt

SEQ ID NO: 34598 - DNA, 272 bp, Zea mays
aatctccccagcaatccctagcagaagccttccatcctcactcgctcgatggcccgcacgaagcagacggcgaggaagtccaccggcggcaaggcgccgaggaagcagctggcgactaaggcggcccgcaagtctgcccctgcgaccggcggagttaagaagccccaccgcttccgccccggcaccgtcgcgctccgggagatccgcaagtaccagaagagcacggagctgctgatccgcaagctgccgttccagcgcctggtgcgggagat

SEQ ID NO: 34599 - DNA, 272 bp, Zea mays
cccacgcgtccgcccacgcgtccgggaggattacagtacactacatcttcaaactggcagaccgatgtggtcacctgggtttgcttttactatattgaaaaggttcatgccagaagataaacttgcagatgtaaagggtgccaccctcaccgctgatggaacaggagttgtatttgatgttcctgcagcagatgttgaagattacattcaagcttcggagagtgccgcacaggtgacaattgatgaagtcaagcaactgccacccttgcaag

SEQ ID NO: 34600 - DNA, 129 bp, Zea mays
aagtaatctatgatggcaatgtttgcctggtcatgaagtattattactttcgttgaaaccgtgatgctattaagacttaatttttttatggaacatcgaatgtaaggcatacatggttatgagttttgt

SEQ ID NO: 34601 - DNA, 272 bp, Zea mays
ggattacatcaatttactatcatgtcactcttgggaaataatgactgtctttgctattgacacggtagacttagctggtgttgaatggtcaccatatgatagtgctattgttgtttgggattcacttcttgaatataaggttctgatatattcgccagacggaaggtgcttgttcaagtatctagcttatgaaagtgggttgggtgtgaaaactgttgcttggtcaccatgtggacagtttttagcagtgggaagctatgatcaagcagtac

SEQ ID NO: 34602 - DNA, 273 bp, Zea mays
ctcgagaaggaatatgaggaggctgagaaggcgcgcaagcgacgaattgccatgggtggtggtggtgagagtgatgatgaggcagcagatgacgaggatgaggaggaggcgctgccctttgcctgcttcatttgtcgggagccattcgttgatccagtggtcaccaaatgcaagcactacttttgtgaacattgcgctttgaagcaccactcgaagaacaagaagtgctacgtctgcaacaaaccgacgctgggcatcttcaacgctgcacag

SEQ ID NO: 34603 - DNA, 273 bp, Zea mays
ccaagaccaatgagaactacaggctgctgtacgataccaagggccgcttccgccttcacccaatcagggatgaggatgctaagttcaagctttgcaaggttaggtctgttcagtttgggcagaagggcatcccttatctgaacacgtatgacggccgcaccatccgctaccctgaccccctcatcaaggccaacgacaccatcaagatcgatctggagaccaacaagattgtggacttcatcaagtttgatgttggcaacgtcgtcatggtga

SEQ ID NO: 34604 - DNA, 273 bp, Zea mays
  unsure (1)..(273): unsure at all n locations
ggtgccggcgatggcaacccgctactggatcgtctctctccccgtgcagtctcccggcgccaccgcgacctcgctttggtcgcgcctgcaggatggcatctcccgccactccttcgacaccccgctgtaccggttcaacgtcccggacctccgcgtcggcaccctcgactccctcctcgcgctcagcgatgacctcgtcaagtcaaacgtgttcgtcgagggcgtttcgcacaagatccggnagcagatcgaagacctcgagcgcgccggagg

SEQ ID NO: 34605 - DNA, 265 bp, Zea mays
ggaggtggtactactgggccaacccggtgtcgtggacgctctacgggctcctgacctctcagttcggcgacctggaccagcccctgcttatggccgacggcgtcacctccaccaccgtggtggctttcctggaggagcacttcgggttccgccacgacttcctcggcgccgtcgcggcaatggtggccggcttctgcgtcctcttcgccgtcgtcttcgccctggccatcaagtacctcaacttccagcggcgatgagagagcaa

SEQ ID NO: 34606 - DNA, 266 bp, Zea mays
cccacgcgtccgggggcacggtgatggggtcgtccccggcgccgtccgtggccttcttctcgtcgcgcgggcccaacagggcgagcccgggcatcctgaagccggacatcacggggcccggcatgaacatcctggcggcgtgggcgcccagcgagatgcacccggagttcgcggacgacgtgagcctgcccttcttcgtggagtccgggacgtccatgtcgacgccgcacctgagcggcatcgcggccgtcatcaagagcctgcac

SEQ ID NO: 34607 - DNA, 258 bp, Zea mays
gataaccagacacaggttggagttaaggtgcttcagggtgagagggagatggctacagataataagctccttggcgagttccagcttgaaggcattccaccggccccaagaggcatgccccagatcgaggttacctttgacattgatgccaatggcattgtaaaggtgtcagctagggacaaagccacaggcaaagaacaagaaatcaccatcaattcttctggtggtttgtcagaggtcgaaattgagaagatggtg

SEQ ID NO: 34608 - DNA, 257 bp, Zea mays
ggacaagaggacatccagggcagcatgacagctgcttttggttctggtgctcttttctccatagtgagcggaatgggaactcctaatccagttttaaatgcaattacaactggtgttgcttttgcagtatttcaaggtggctttttcatgattgggcagaaattctcaaagccatcaagtgaagatacatactactctctgacaagaagcatgctgcacaaactgggtcttgaaaaatatgaaaagaatttcaggaa

SEQ ID NO: 34609 - DNA, 256 bp, Zea mays
accaaatggatttctcagcctaaggagccatatctggacagataccgataacaaccgtgcagggatgctcccttttgtctttgacaactcatttgggttagcatttcttttgaactccccactcccccaccttgagtgccagtaatttgattgattgcttcattctctttaaagatgttttcaatgtgaaagcatcctaattatagtttcttttgggggtgcaggtttgagcaatatgtggattatgcattagatg

SEQ ID NO: 34610 - DNA, 259 bp, Zea mays
cttatcattcagcatttccggaggcatatagcgtgaatctccatcttcaattgctagactccggttaacaagtgtagcacagccaaaatccccgagcttataaataccatttctgacatatatgttatcaggcttcacatcaaggtgtgctatgccacgttcgtgcatgaaatccaagcctttgcagatctgatacaacagttctagggcttccccacgcttcactggctggttccgattcatagatagagagcggtcg

SEQ ID NO: 34611 - DNA, 261 bp, Zea mays
ccacgacgcaagggagagtgacggaagcgacgcgcgcgagcgaggagggccaaggggaagaggggaagcaccgcaccaggacccttgttcgccgccgccgcctctgatctccgcgaggttgtcaggattcaatatgtcgaccagcacattcgctacttcctgcacgctgttgggcaatgttagaacaacgcaggcctcccagacagcggtgaagagcccttcgtctctaagcttcttcagccaagttacgaaggttccaag

SEQ ID NO: 34612 - DNA, 261 bp, Zea mays
attgctacattcgccgagaaggacttgcagccttggattgctagagacgacgaacaaggccagaagatgtggagagtcaaccaacgtatagtgaagcttatagcggactcatgaggaaccatgacagccctgaagccttggtgatactcgctagtgcttctgaccttctacttcgtgctactgatggaatgcttgttgacggtgaagcttgtactttgccacagcttgagcttctcgaagtaaccgctcgagcagtccatc

SEQ ID NO: 34613 - DNA, 262 bp, Zea mays
ctttcgagaaatggtttgtgaagtacaaggttgacttggtgtttgcagggcacgttcatgcttatgagagatcataccgcatttctaatgtcaactacaacataacgtcgggaaatcggtatccagtgccggacaaatctgctcccgtttacataacggtcggtgatggaggcaaccaggaaggacttgcttcaaggttttataacccccagccggattactcagcgttcagggaggccagctatggtcactcagttttaca

SEQ ID NO: 34614 - DNA, 266 bp, Zea mays
ctcaacacagcacaggcagctcgagagagagagagagagaaagatgtcgtggttcgggcaccaccaccacaaccagccggctcccccggcgtcgggccccaaccaggtgttcaagatcttctgccgcgccaacgagaactactgcctggccgtccgcgacggcgccgtcgtgctggccccggtcaaccccaaggacgaccaccagcactggtacaaggacatgcgcttcagcacccgggtcaaggacgaggaaggcatgccggcgt

SEQ ID NO: 34615 - DNA, 271 bp, Zea mays
ctggttccttgcagagtatgcctacacgatgcaggtgacggtgcccggcaatgtgtacagctacggcgtggtcctgctggagatcctgacatccaagctacccgtggacgacgtgttcggcgagggcgtggacctcgtcaagtgggtgcacaccgcaccagcaaggggtgagacgccagagcagatcatggacccccggctgagcaccgtgtcgttcgcgtggcgcaggcagatgctcgccgtgctcaaggtcgcgatgctgtgcacggag

SEQ ID NO: 34616 - DNA, 272 bp, Zea mays
agtgcagcaccggctaagacaactgcgaatcaggcacctcctactcagacagtgcctgttgttccacctcaaacgtcagcagccccagctgcaccagcacctattgtacctgtcagtgcactggctgcaactgctacagcctcagcagctcctgctgttgctgtatccaccgaggcagatagttatggtcaggctgcctcaaacctagttgctggcagcaacttggaaggaacaattcaatccattcttgaaatgggtggcgggatatggga

SEQ ID NO: 34617 - DNA, 275 bp, Zea mays
caaaagttcaatcacctttcgaagaggctgcaaaaataattaaacaagcatattcggttcttccgatatatgataaaattgtcccagcgatactcgaagtaggagtttggaagcttccagagacatgcaaattttccataggtgtccctgttggccctatgttagcaaaagcaacaaaatctgtctcagagatcatcgacaagtttcagggtcttgaatacacttgcgagtacaagtatgatggtgaaagggctcagatacattgcatggaggat

SEQ ID NO: 34618 - DNA, 274 bp, Zea mays
atattttctaatcaagataaaactggagcagaatttgctagatgcttactctggagatggatggaatgggcaaagccgagagaaaataaagccagagaaggaactgcaacgtgccaggaaacaaatcataaaatgcaaaattgctatacgtgatatcatccgccaacttgatttgtatacttctactgggagtgttgatgacccactaatgcctacagatcagtccaccaatcccgaacataccatgtgctcaacatgcaagtctcatgaatca

SEQ ID NO: 34619 - DNA, 275 bp, Zea mays
gaccacgcgtccgcggacgcgtgggggccggttaccgagtgccactcctgctcagatctagcgtcggaaatggctgccgcactggccgcagcttccatagtgttcaaggacagcaagacctactccgacaagctcgtcaagggcgccaaggccctgtacaagttcggcaggctgcagcgtgggcgatacagccccaacggatctgaccaggccatcttctacaactccaccagctactgggacgagttcgtgtggggcggtgcgtggatgtactt

SEQ ID NO: 34620 - DNA, 268 bp, Zea mays
ggaagcagcagccgcacctggtactggcgcacaagctgttcctcctgtcgcactccgacgtcgacgacctcgccaaggtcgacctacgcgctgacgtgttcgcggcagtcaaatccgatgacatggcagctctgtacgagtcgttggcggcggacggcgtactggagacggacgcggcgctgctggccgagatgcgcgccaggatcgacgaggagatccggaagctcgacgagaagattgctgatgcagaggagaacttgggtgagag

SEQ ID NO: 34621 - DNA, 268 bp, Zea mays
agggaggctaggctacccaccaaggttctgtggatgaggaggatgcgtgtgctgaggcgccttctccgcaagtatcgtgaggccaagaagattgacaagcacatgtatcatgacatgtacatgaaggtcaaaggtaacgccttcaagaacaagagggtgcttatggagagtatccacaagtccaaggctgagaaggccagagagaagacactttctgaccagtttgaggccaagcgcgccaagagcaaggcgagccgtgagaggaaga

SEQ ID NO: 34622 - DNA, 271 bp, Zea mays
cagatgatttgctgttgcaacaagatggatgccaccacacccaagtactccaaggcccgttatgatgagattgtgaaggaagtctcttcctacctgaagaaggttggatacaaccctgacaagatccacttcgttcccatctctggtttcgaaggtgacaacatgattgagaggtccaccaaccttgactggtacaagggcccaaccctacttgaggctttggacttgatcaatgagccgaagaggccttcagacaagcccctgcgtctcc

SEQ ID NO: 34623 - DNA, 265 bp, Zea mays
ctcagacacggtccgcggacgcgtggcgaccgtgggaacgccaaagacattgcctttgaccagaaatccagggcagcgctgcaggccggcgtcgagaagctcgcaaacgccgtcggtgtcaccctcgggccacgagggaggaatgtggtgctcgatgagtacggcaaccccaaagttgtgaatgatggagtcactattgcccgtgctattgagctgtatgatccaatggaaaatgctggtgcagcattgattcgtgaggttgcta

SEQ ID NO: 34624 - DNA, 249 bp, Zea mays
cagcttcggggtcgtgcttcttgagatgatgtctgggcgcaggtcaatggacaagaatcggcccaacggtgagcacaacctggtggaatgtgcactgcccctcctaggggataggcagcggttctacaagctggttgaccctcggctggatggcaacttctctgtgaagggcgcgcagaatgcggcgcactatcgcgcgcctgcctcagccgggactccaaggcgctgcccctgatgagccaggtggtg

SEQ ID NO: 34625 - DNA, 269 bp, Zea mays
cggacgctgggtttggtgcttatggagctgatcatgctattagagctagaaaggttgaggattacctgaagggcaaaacagtgagctcgtctgtcatacttgaagctgttcggttgcttaaagggtctattaaaccatcagaaggctcaacacatcctgagtatagaattagcttggctgtcagtttcttgtttaccttcctatcctcccttgccaacagcttgaatgaatctgcaaaggttaatggtaccaacgagcactcaccagag

SEQ ID NO: 34626 - DNA, 261 bp, Zea mays
ctgggaagaatatctgaacaataagtgggacaggaatattgttgtagcagaaactgtgagcttttctgagctgaagcttcagccagagacagaacagcgcccgcacaaggtcagcttttttgttgataagaagaatgcccaggaagtgataaaatctgttgccgagagattggacaaatgtgggctagatgccaaaataatatatagtggtggccaggaccttgatatattacctcaaggagctggaaagggccaagcact

SEQ ID NO: 34627 - DNA, 262 bp, Zea mays
gccctagaaacatcagactatcttaaagatgattgccttttagtgaactgcactgttggcgttgttcaatcacatactgaaggaccaaagatatacacaattccagtaccgcggtccaacatggctctacatattggtcagctattgacaagtggaaagaggacagacattgcattcgaagttgatggagagatgtttcctgcccacaaggtgattctttcagcccggtctcctgtttttagggcacaactttttggcccaa

SEQ ID NO: 34628 - DNA, 264 bp, Zea mays
cggacgcgtgggcggacgcgtgggttcaaagatatctatgttgtatttgagctgatggatacagacctccaacaagtcatcaaggcaaatgatgatttaacccgagagcatcatcagttctttctctatcagatgctccgtgcactgaaatacattcataccgctaatgtttatcatcgtgatttgaagccaaagaatatattggctaatgctaactgtaaacttaaaatatgtgattttggattggcaagagtggcattcaat

SEQ ID NO: 34629 - DNA, 264 bp, Zea mays
ctgttaaaacctggttggtctcagacagtagtttcactaaaagtggacaccacatcactttcttatgtaggttaacataggaccaggacacagagatgacctggggcgatggccgcggcaaggtagtggacggcgggcgcgggctggacctgacgctggaccgcacgtccggctccgggttccagtccaagagcgagtacctgttcggcaagatcgacatgcagatcaagctggtgccaggcaactccgtggcacggtcaccac

SEQ ID NO: 34630 - DNA, 268 bp, Zea mays
ccctagtcccctgctccattctcagccgccgccaatcccttcccgtgctccgcaaccgctgagtgagaagaagagatggccggcaagggcgatggcccggctatcggcatcgatctcggcacgacgtactcttgcgtcggcgtgtggcagcacgaccgcgtcgagatcattgccaacgaccagggtaaccgcaccacgccctcgtacgtcgccttcaccgactccgagcgcctcatcggagatgcggccaagaaccaggtcgccatga

SEQ ID NO: 34631 - DNA, 286 bp, Zea mays
atccgcaacgccaagctggttcttcttggagatgtgggcgctggcaaatctagcttggttcttcggtttgttaagggacagtttgttgaattccaggaatcaacaattggagcagccttcttttcccagaccttagcggtcaatgatgagactgttaagtttgaaatctgggatactgccgggcaggagaggtatcatagcttggctcccatgtactataggggtgcagctgctgccattgttgtctatgacatcacaaatccggcctccttcacccgtgccaaga

SEQ ID NO: 34632 - DNA, 282 bp, Zea mays
cggacgcgtgggcggacgcgtgggcggacgcgtgggcggacgcgtggggtaagttttcctgccatgcacaggaagacacaattttcgagaatctggtacaagcacgatacaatgtttttcacacccaaggcttatatcaagatggattttcactgtccactatctcaaagctcacctgagtcggcagttcttactgatgtattcacaaggttgcttatggattatttgaatgattatgcttatgacgcccaagttgctggcctctattatgttgttaagcca

SEQ ID NO: 34633 - DNA, 286 bp, Zea mays
cttctttaaatccagtacatttgaagttgatgttttgtatgtcgacccaaacggcttacaaattccacaaaaaataagcacatacacaattggccctttccaaacctccaaaggagagaaggccaaactgaaagtgaaagtgcgtctcaacatccatgggaccgttacagttgattcagcaataatgctggaggatgatgtggaagttccagtttcatctgcaaatgaagctccaaatgatactatgaagatggacacagatgatgcaccaagtgatcctgctgtt

SEQ ID NO: 34634 - DNA, 284 bp, Zea mays
agacgatgaggacttcgaggccgacttcgaggactttgaagccgactccggtgattcggatttggagctcggggaaggggctgacgacgacgtcatcgagatcaagcccttcgccgccaagagtactttctccagagatggcttaagcaccatgactactgctggttatgatgcccctgcagcaaggttggccaaaaggaagaggaagaatcaatacaggggtatccgccagcgcccttggggtaagtgggctgctgagatcagagatccccagaagggcgttc

SEQ ID NO: 34635 - DNA, 288 bp, Zea mays
atttcgcccagcatcgggaggctcgacaagctgcagagactagctctgcaccagaacagcttgcacggcccaatccctgcagagatcaagaactgcaccgagctcagggcaatttacctgagagccaactacctgcatagaggcatcccttcagagattggcgagctcgtgcacctcaccatcttggacctgtcaagcaatctgctgaggggcacaataccggcctcgatcggaagcctcactcacctgcgctttctgaacctgtctactaacttcttctccggagag

SEQ ID NO: 34636 - DNA, 262 bp, Zea mays
gtctttccgttacccggcggcttaaaccctagttcccattccatcttcgtttccgctccgccgccgtcgatggagttctggggtctcgaggtcaaacctggatccactgtcaagtgtgagcctggacatggctttatcctgcacgtttcccaggctgcccttggggaatcaaagaaaagtgacagtgccttaatgtatgtcaaagttgatgacaagaagcttgccattggaacgctctctatcgacaaatagccacagatac

SEQ ID NO: 34637 - DNA, 285 bp, Zea mays
cgagccgcgagtggaactgtggaagcgtcgagcttttttcttctttgtcttgctgcgcaagaagaagggaaacgagaggagggcggcgatggcgaagaggctgctcccgtcgctgaaccgggtgctggtggagaagctggtgcagcccaagaagaccgccggcggcatcctcctcccggaaacatccaagcagctgaatgctgctaaagtggtggctgttggccctggtgagcgcgacaaggcaggcaatctgatcccagttgctctgaaggaaggcgacactgt

SEQ ID NO: 34638 - DNA, 287 bp, Zea mays
ctaatgaatcctttgattctcgtgttggagcatttaggcgtcagttggagaagatcattcttgacaaacatgaggacaccatgagcaagatgggtgccatattagcatctggtatcctcgatgctggtggtaggaatgttacaatcaagctcctctcaagaaacaagcatgacaaactcacggctgtgattggtcttgccgttttcagtcagttctggtactggtatcctctcttgtatttcatcagcctggccttctcgccaacagccttcattgggctcaactct

SEQ ID NO: 34639 - DNA, 279 bp, Zea mays
cccacgcgtccgcatggatcggaatgggggttaccgaggttcacaaactcttctaagatctgtattatcagagaaacaagagctgtgcttctctgttgtctcattgctctggcagaagctcatagcttctcctgaaatgcagatgtctgcagaaagtacatcagctcaccaaggatggaggaaggttgttgatgcactttgtgatgtcgtttcagcctcaccaaccaaggcatcagctgctatcgttctccaggccgagaaggacttgcagccttggat

SEQ ID NO: 34640 - DNA, 268 bp, Zea mays
gatatgtttgggcagataaaatcaaaacttcctggagctcctaggttcctcttgtgccttctccctgagaggaaaaattgtgaaatctatggtccttggaagagaaagtgcctggccgagtttggtattgtcacacagtgtctagctccattaagagtcaatgatccgtacctgcttaatttgctgatgaagatcaatgcaaagcttggtggtctgaactcgttgctgcaagttgaagcatcttcgtcaataccacatgtgtcgcaag

SEQ ID NO: 34641 - DNA, 273 bp, Zea mays
ctataaagatttttgaagttggtgatgttgtgatgctggactcgtcacgtgatgttggtgcctctaataatcgcaggcttgcagctttgtactgcaatagggtttctggatttgaggaaattatgggattggtggatagtattgtcaaagttgtcagagctccacatgttaactttggcgagaattactatgtacctacagatgaacctgagttcttcccgaaaagacaatgtaaaattgtgacaagtgatggcaagcaagttggctacttag

SEQ ID NO: 34642 - DNA, 275 bp, Zea mays
ggagatgatcttctcgttaccaaccccaccagggtcgccaaggccatcaatgagaagacctgcaatgctctcctcttgaaggtgaaccaaatcgggtctgtgaccgagagtatcgaagctgtcaggatgtccaagcgcgccggatggggagtgatggcaagccacaggagtggcgagacagaggacaccttcattgctgacctctcagttggcctgtctacgggccaaatcaagacgggagccccttgccggtctgagcgcctggccaaatacaa

SEQ ID NO: 34643 - DNA, 281 bp, Zea mays
ctcctaaggccccatccattgttattgttgatggccatgagtttgaggaatatgaggagccgccggtacttggaaggaagacttattttgtagcagataaatcaggttcgaaccatcaatgggcccaatgtgaagattgttccaaatggaggaaacttccaatagatgctctgttgccctccaaatggacctgctctgacaacaaatgggatccagagaggtgttcttgcgaatctgcacaggaaataagtatagaggagcttgcagaattcattcctata

SEQ ID NO: 34644 - DNA, 271 bp, Zea mays
atcatattatacaaagaatggaaaagatcccctagtctatccctacattctgttcttaagcatccaattactcccagcaattctttatttgtctaaagaagttggagaggatggataccatgttgatgctgtgcatatttcaattgctttagctgaccatagtgttctccctgacggtattgggtcaggccagaaaattggcgtcatggatgcctgtgcagaggctgcaagcataatacgacagtatggctctatatacttgcgtaatggt

SEQ ID NO: 34645 - DNA, 270 bp, Zea mays
ggcggatgtacgccgagtggatggcggcgcacggccggacctacaacgccgtcgggaggaggagcgcaggttcgaggtgttcagggacaacctccgctacgtcgacgcccacaacgccgccgccgacgcgggcgtccactccttccgcctcgggctcaaccgcttcgccgacctcaccaacgacgagtaccgcgccacctacctcggcgtcaggagcaggccgcagagggagaggaggctcggtgacaggtacctggccggcgacaacga

SEQ ID NO: 34646 - DNA, 271 bp, Zea mays
cccactgcaaaaccaactgttgtgatgattgaggactatgaatttgaagaatatgatgaaccccctgtctttgcaaagagatcaatttttaccatccgtgcaacaggggaacaagaccagtggattcaatgtgacgagtgctcaaaatggcgccggttgcctcttaatgttattgttgcatccaaatggacatgcaccgacaactcatgggacccaaaatgctgctcctgctctgcgcctgaagagttgaccccaaaagagttgcaaagtg

SEQ ID NO: 34647 - DNA, 255 bp, Zea mays
cccacgcgtccgggaactgggacataaggaaggctactaaaatgctgaagaaaaccttaaaatggcgttcagaatataagccagatgaaatccgttgggatgacatatctgatgaagcggtaactggaaaaacttaccgaactgattactttgacaagatcgggcggagtatccttgtcatgagacctggatgccagaataccaagaatgccaatgggcaagtcaagtacttggtgtactgtatggagaatgcaa

SEQ ID NO: 34648 - DNA, 271 bp, Zea mays
gtcggatctgagacgagacgagttaccatctcatcccaactccggaacgaacaagttaccatctcatcccaactccgcctcgaccggatctcgtcggactcggatccgcccgaccaccccgcgccgccgcagatcaaagaagatggcagctgtcgacacattcctcttcacctcggagtctgtgaacgagggacaccctgacaagctctgtgaccaggtctcagatgccgttcttgacgcttgccttgctgaggaccctgacagcaacgtt

SEQ ID NO: 34649 - DNA, 270 bp, Zea mays
ggttgtcaagatccaagaggagcttgacattgatgtgcttgtgcatggagagccagagagaaatgacatggttgagtacttcggtgagcaattatctggttttgcgttcactgccaacggatgggtgcaatcctatggatcacgctgtgtgaagccacccattatctatggtgatgtcagccggccgaaccccatgactgttttctggtccaagatggcacagagcatgacccctcgtcccatgaagggaatgttgactggtccggtcac

SEQ ID NO: 34650 - DNA, 272 bp, Zea mays
ctggtacaaaggcccgaccctgcttgaggctcttgaccagatcaccgagcccaagagaccttcggacaagcccctgcgtctccccctgcaggatgtgtacaagattggtggtattggaactgtaccggttggtcgtgtggagactggtgtcatcaagcctggtatggttgtcaccttcggtccaactggcctgactactgaggtgaagtctgttgagatgcaccacgaggctcttcaggaggccttcctggtgacaatgttggcttcaacgt

SEQ ID NO: 34651 - DNA, 269 bp, Zea mays
ctcccggcggcggcggcggcggcgcacagcggcagcagcatccgaagatggtgaagttcctcaagcccggcaaggccgttatcctcctccagggccgcttcgccggcaggaaggcagttatcgtgcgcgtgttcgaggagggcacccgcgaccgcccctatggccactgcctcgtcgcaggcctcgccaagtacccaaagaaggtgatccgcaaggactccgccaagaagactgcgaagaagtcgcgcgtcaagtgcttcatcaagctc

SEQ ID NO: 34652 - DNA, 266 bp, Zea mays
gaaagccatggattacttggttcaaggtttctagcgtgccagcagttcttgggcttttagtgactccttatttgatttacaaaatattcccccctgaaataaaggacactcctgaagccccagcattagctgccgagaagctaaagaacatgggtccagtaacaaaaaatgaatgggtcatgattgggacgatgcttcttgcagtctcactatggatttttggggaaactattggcgtatccagcgttgttgctgcaatgattgga

SEQ ID NO: 34653 - DNA, 262 bp, Zea mays
gatcaaacccgtggatggttctatactctgatggttctctcaacagcactgtttgggaagcctgcatttaagaatcttatatgcaatgggcttgtcttggctgaggatggtaagaaaatgagcaagagtaaaaagaactatcctccacccaaggatctcattgatgagtttggagcggatgctctgcgactatatttggtaaactccccagttgtacgtgcagagtctctacgattcaaacgtactggtgtctttgctgttg

SEQ ID NO: 34654 - DNA, 261 bp, Zea mays
gcttgtttatctatcctctgaagattgtcatcaagacctgtggcactaccaagctcctgctcaccattccaagaatccttgagcttgctgaagagctgtctatgccacttgctgctgtgaagtactcccgtgggacgttcatctttcctggcgcacagccagccccccacaggagcttctctgaggaagttgctgcacttaaccgctactttggcggcctgaaatctggtggtaatgcttatgtgattggagatccagcaa

SEQ ID NO: 34655 - DNA, 261 bp, Zea mays
cccacgcgtccggagcttcagggtcgtatcacgaaagctgaggctgcattgcgggataaggaggaggaaaatgtaatgctcaaacagcaattggaacagtatgagaggaaatggtcggaatatgaggccaaaatgaaatctatggaagaggcatggaagaggcagctctcttctctgcagctgagccttgttgtcgctaagaagagcctagctgctgatgatgcggtcactagagccgctcggactgattgtactcctaca

SEQ ID NO: 34656 - DNA, 264 bp, Zea mays
ctttgtgtgaaatcagtgccagtgccgtatgtttcaccggacgagcgataccttgtgggtaggattggacctaaagaatatcggatgtaccgttgcatcgttagatatggttacaaagatgtgcagcgggacgatgacaattttgagaacatgttagttatgaacattgcaaagtttattatgatggaagccgaggatgcatcttcttcagcaagttatgatgtctctaatgaaggaaggatggcggtcataacaaccactgat

SEQ ID NO: 34657 - DNA, 258 bp, Zea mays
  unsure (1)..(258): unsure at all n locations
ggaggatactgaggaaaaggctcccagaaatggagcgacttttaagctgaatgaagatgctgctcgtgggccaactgaatccagtcaatcaggacctatgctatctgttgagacaattgagaagatgatggaagatccagctgtgcagaagatggtttatccctacttgcctgaagagatgaggaacccagattcgttcaagtggatgctgcagaatccaatgtaccggcaacaactacaggatatgctanagaacat

SEQ ID NO: 34658 - DNA, 257 bp, Zea mays
ctcttccgaatgcttccgccaatgctggcacaggaaaccttgatgttttgcgcaataacgtacaattccaaaacctgcttggtttggtgcaggctaatcctcagattttgcagccattgcttcaagaattgggtaaacaaaatccccaggttatgcagctaatccaggaaaaccaagcagagttcatgcggatgatcaatgaaccacttgagggagacgaagagaatgaaatgatgctggaccagatggcggatgca

SEQ ID NO: 34659 - DNA, 255 bp, Zea mays
ggcacctggtcttcccgctgctggagttcctccaggagcggcactctactcggagccggagatcctggaggccaagatccgcctcctcagcggcaccaacatggtcgactacgccatggacagccacaagtccctccacggcaccgatgacgttcccgaggacatggtcaagcgccgctccgaggtcgtctccaggctcaggtcgctcgacgaggccgcagccccgctcgtcgccttcctccagaacccgcagct

SEQ ID NO: 34660 - DNA, 259 bp, Zea mays
gttgggcgcagagaatccccaagcaaacaaacagggtagagggagaggagaggagaggagaggagaggttgggtctgggacaccatggctccgatgaagctgtacggggcggtgatgtcgtggaacgtgacgaggtgcgcaacggcgctggaggaggctggctccgactacgagatcgtgcccatcaacttcgccaccgccgagcacaagagccccgagcacctcgtccgcagaccgtttggtcaggttccagctctgc

SEQ ID NO: 34661 - DNA, 260 bp, Zea mays
  unsure (1)..(260): unsure at all n locations
gaaaggagacgaacagaagggcatcggtgccctctcacacaccggccaagtctgcatccacaggtcacaaggctcaagcatcacatggtgccaagcgggcaagcgggcagacggcgggtgcaccacagcgcacgngtaagccatcacctgcagccagctctggcggaccagcttatgacgaacaaataactgagctgaagctccttgtcgatagcctggagaaggagagagatttctacttctccaagctgcgggacatt

SEQ ID NO: 34662 - DNA, 259 bp, Zea mays
cccccgacgacctcgacgccgtgcgctccatcgccatcgaggtcggcaacccggcgccaggacccgccggggaggaggacgccgtccacgtgccggtcatctgcggcctctcgcggtgcaaacggagggacatcgacgccgcgtgggaggccgtgcgccacgcgcgccggccccggatccacaccttcatcgccaccagcgacattcacatgcagcataagctcaggaagacgcccgaccaggtggtcgccattgccag

SEQ ID NO: 34663 - DNA, 257 bp, Zea mays
ctacttgtatctgtgccttagcacagctgtgcttgttgaaagtggcaagttcctcctatgtgcgaaacggacctcccgcccaacctgtacagaatatacaatatttatgaattctgaaaatttatctaggtcaagcaaaatgtacattggaaagctgaggtcgaatctcctcggcacaaagtttgcaatatatgatacccagcccccatgcaatgcagcagaacccgggaaaacaagccgtcggttctactcccgga

SEQ ID NO: 34664 - DNA, 252 bp, Zea mays
cgccgggacccccggcgtcgcggccgacgtctcccacatcaactcccccgccctggtgaaagggttcatgggggacgaccagctcggggaggcgctcgagggctccgacgtcgtcatcatccccgccggggtgcccaggaagcccggcatgactagggacgacctcttcaacatcaacgccggcatcgttaaggggctctgcactgccatcgccaagcactgccccaacgctcttgtcaatatgatcagcaa

SEQ ID NO: 34665 - DNA, 253 bp, Zea mays
cacagacaagtggtttccaaagccaagtgtgtgtactagcaaccagctagctcgggcggcagcaggcagccatcatgtcggaggagaagcaccaccacttcttcaaccaccacaagaaggacgaggagcagcccgccggcgagtacgggtactccgagaccgaggtggtcaccgccaccggcgagggcgagtacgagaggtacaagaaggaggagaaggagcacaagcacaagcagcacctcggcgaggccgg

SEQ ID NO: 34666 - DNA, 250 bp, Zea mays
ctagctaaaatggtcagccgctgtgtgaaactccagcgtctctgggtactggattgcatttcagataagggtttgcaagtggtggcctccagttgcaaggacctacaagaactcagggtgtttccatcagaattttatgttcctggtgcttctgcagtgacagaggagggacttgttgcaatatcgtcaggctgcccaaaactgacctctttgctgtatgtctgtcaccagatgaccaatgaagcgctaa

SEQ ID NO: 34667 - DNA, 249 bp, Zea mays
cagtgcttagcattggaaaaagtagcagagtcacttgagcttccatgtaagtactgctctttaggttgcccagagatcttcccgtactacagcaagataaagcatgaagcacagtgcagcttcaggccatataactgcccctatgctggctctgaatgtgctgtggctggtgatattccattccttgttgcacatttgagggatgatcacaaagttgatatgcacagtggctgcacgttcaaccataga

SEQ ID NO: 34668 - DNA, 227 bp, Zea mays
ctcactgatcagtggtatataacttatggcgaggctgaatggaagcagaaggcagtcaaatgtttggaccgcatgaatacattctcaactgaaacccgcaatggttttgaacatacgctgggctggctgaaccagtgggcttgttcacgttcatttggactcggtactcgaattccatgggatgagcagttccttgtagaatctctttctgattctactctatacat

SEQ ID NO: 34669 - DNA, 255 bp, Zea mays
ccgacacgcatcgactcccgccgccgccgcttccgcttccgctccgtcgctcgcctcacgcctccggcgccacctccaccatggccccgaagaaggagaaggccccgccgccatcgtccaagccggccaagcccggaggcgggaagcagaagaagaagaagtggagcaagggtaagcagaaggagaaggtcaacaacgctgtgctcttcgaccaggccacctacgataagctgctctccgaggtgcccaagtaca

SEQ ID NO: 34670 - DNA, 249 bp, Zea mays
aacattatctggtcatgcttggtaccactgtgatcataccaactgcacttgttccacaaatgggaggaaacaatgaggacaaagcagtggttatccagacattgctgttcgttgcaggtatcaacaccctcctgcagagtttctttggtatcatgttgcctgcagtgatcggcgggtcatacacctttgttctgcctaccatttcgatcatccttgctggacgttatgctaatgaacctaatccacata

SEQ ID NO: 34671 - DNA, 253 bp, Zea mays
cggacgcgtggacggcgaggagctcctccgctccatcacggacgagatctccggcgacttcgagagggccgtgatcctgtggacgctggacccagcggagcgcgacgcggtgctggccaacgaggcggcgcggaagtggaagcccgggaaccgtgtgctcgtcgagatcgcctgcacgcgcacctccgcgcagatcttcgcgaccaggcaggcttatcacgagcggttcaagcgctcgcttgaggaagacatc

SEQ ID NO: 34672 - DNA, 258 bp, Zea mays
cctacaccgagcagccaagcgaggaagcgaagacccatttccccgagcgcaagagtaccatggcggcggcggcagtttatggcggcctcaaggggaagcttggcgtcgaggatgcccccgagctgcagctgaatcgcatccgcatcaccctctcatccaagaacgtcaagaacctggagaaagtttgtgcggatttggtaaagggagccaaggataagcatctgagggttaaggggcctgtcaggatccctactaagg

SEQ ID NO: 34673 - DNA, 287 bp, Zea mays
ctttccccaactcgatctcgcacctagggtttcgtctcgccgctctcgtcctccgcgaagatgccgaagaacaagggtaagggaggcaagaaccggaagcgaggaaagaacgaggctgacgacgacaagcgcgagcacgtcttcaaggaagacgggcaggagtacgcgcaggtgacccggatgctcggcaacgggcggtgcgatgccatctgcgtcgatagcacgcgccgcctctgccatatccggggtaagatgcacaagaaggtctggatcgcggctggggacat

SEQ ID NO: 34674 - DNA, 282 bp, Zea mays
catcaagttttcatcttggcagtgttgggagcttgggatttcctggtagccctcagcttcatggcctggagctaaataacatattttctcacactggtgggaatcgcatggatccaaccgtgtcttcggctcagatcagcgcaccatctcctcaacagagaggtcctatgttccatggaaggaatcctatggttccccttccatcatttgattcacctggtgagcggataagaagcatgagaaatgactcaggtgctaaccagtctgataataaacggcagt

SEQ ID NO: 34675 - DNA, 285 bp, Zea mays
gagttgtcaacgacgacgtctgccggcagtgctcctgctcctcctcctcctccttcccggccgccgcgcgagcttggtgggttagtgtctcttcttcgcggagacctgtgagaggagccatcatcatggccgccgttgagactgttgtcctcaaggttgctatgtcatgcgagggttgcgcgggggcggtcagaagagtgctctccaagatggaaggagttgaaaccttcgacatagacctcaaggagcagaaggtgacagtcaaaggcaatgtcaagcctgagg

SEQ ID NO: 34676 - DNA, 285 bp, Zea mays
cgccattaaaccccactcgcgcgcgcggcggccggcggcgagccctcacccatccgagcaagccgaggaggaagcgagcgcgcgaaagtatcaggaggaggcatgggtaccctggggcgcgcgatcttcacggtgggcaagtggatccggggcacggggcaggccatggaccgcctcggatccaccatccagggcggcctccgcgtcgaggaacaggtttcaaggcatcgtacaatcatgaatatttttgagaaagagccaacgatccatagagatgtgtttgtt

SEQ ID NO: 34677 - DNA, 281 bp, Zea mays
accggatattccagtagtgcaggtatctgaggaccttgttgtgaatgtttcacgggcattacggaatgacatcaacagagcgcttcacttgttccgtgagatcgcaatggggcatgatctgaagaagtttttgggtgtgatcgtgggtctgtgggttctctccggagttggaagcagctgtgacttcctcacgttgacatacattgccgtcctgatgctccacacggtgccaatcttgtacgacaagtaccaggacaaggtggaccatgtcgctggaaggg

SEQ ID NO: 34678 - DNA, 281 bp, Zea mays
cccacacgtccgcccacgcgtccgactatgccctcctctaattgatcaaaacccttagatctattcctctatttagtttctggatacaactttgatgccatgtaacacggcccatgaaagtgtaacagctaattgcatccttttcccataaaagtgtaagggcatgtacaacctagaacccacttcacggttctccaagcgcaagacacacctaagacacagtttcatacagtgggttgtatcttagattaaatgctttaataaatgcattgtgtttacgt

SEQ ID NO: 34679 - DNA, 280 bp, Zea mays
gttgtgtccttgaagctgagggatccatctactatttgtcggctgaccatcgcttcgacgctaatgaagaggaggtgggacgtgtaaccgaatgtggaggtgaagttggaaggctaaatgtcgtcggtggtgctgagattggtccccttagatgttggccaggtggtttatgcctctcaagatcgattggtgatcaggatgtaggtgaatttattattccggttccttatgtgaagcaaattaagctgtctaatgctggaggccgtcttattatttcaag

SEQ ID NO: 34680 - DNA, 281 bp, Zea mays
cggacgcgtgggcggacgcgtgggcggacgcgtgggggagaactggagaatagtagatttcttctctcaacacccagagagactacacatgttaaccttcctctttgacgatgttggcatcccactcaactacaggcacatggagggctttggtgtcaatacctacaccttgatcaacagggatggaaagcctcaccttgtgaaattccattggaagcctacttgtggtgtgaaatgcttgctcgacaatgaagctgtgactgttggaggcactgccacag

SEQ ID NO: 34681 - DNA, 269 bp, Zea mays
ctgctcttgaaatagcttacaaacaggcaaaaaagcgaggaataagagttcgtggggttctcatatctaacccttccaacccaacaggaggcattgtgccaaaagaaatactgcatgaccttctacagtttgctgcagagaagaacatacacttaatttctgatgaaatatttgctggttcaacatatggaagtgacaagtttgttagcgtggcagatgttgtggatgaactagaggactttgataaaggcagagttcatatcgtatat

SEQ ID NO: 34682 - DNA, 281 bp, Zea mays
ggacgctgggctggtgctgttcttggcttctcgaagagcacattcacctacgaagagttgttgagggatactgatggattctcggatgctaatctccttggacaaggtggttttggctatgttcacagaggattgctgcctaatggcaaagagattgctgtaaaacaactgaaactgggaagtggccagggcgagcgtgagttccaggctgaggttgagattatcagccgagtacatcacaaacaccttgtgtctttggttggctattgcatttctggagg

SEQ ID NO: 34683 - DNA, 279 bp, Zea mays
gattgcctatccccctcccaaccaaagaccgatggcgcccaaggccgataagaagcccgcggcgaagaagccggctgatgaggagcccgcggccgataagacgaccgccgggaagaagctcaaggcggagaagcgggtccccgtgggcaagtccgccggcaaggagggcggcgagggcaatcgtggcaagaagaatggcaagaagagcgtggagacgtacaagatctacatcttcaaggtgctgaagcaggtgcacccggacatcagcatctcctccaa

SEQ ID NO: 34684 - DNA, 274 bp, Zea mays
gcgaagaacatctcgtggcggccttttcatatttcgacaaagatggtagtggctatatcacagtggatgaactacagcaagcttgcaaagagcataacatgccggatgcttttcttgatgatgtcatcaacgaagctgatcaggataacgatggccgcattgactatggagagtttgttgccatgatgaccaagggcaatatgggagtcggtcgacggacaatgagaaacagcttgaatatcagcatgagggacgcacctggtgcattctgaaa

SEQ ID NO: 34685 - DNA, 273 bp, Zea mays
cggacgcgtggggcgctgtcggagcaggagctcatcgactgcgacacggacggcaacaacggctgcaacggacgcctcatggactacgccttctcctacatcgcacacaacggcggcctccacacggaggaggcctacccgtacctcatggaggaaggcacctgccagcgcacagcagcagcgagaagaagtggtcgggatcgtcggaggacgccaacgacgatgccgcggtggtcaccatctccgggtacgaggacgtgccgaggaacaacg

SEQ ID NO: 34686 - DNA, 271 bp, Zea mays
gcaacctttgtgccatcattatgtttccgcctatgcttgcagtgttccgaacaaacggtgaagccactttgttgaggtgatcagcaatctttctgaagaccaaatttccatctgacagcacttcaatagctttagagatggacacaactgatccaagctcaattcctttgtcgtttttattgatgactgaaagctctgggattcctttgatgtcaatgtacttgtcgtagagatcctgatccgtgtacactccagacccagtgtttgaagc

SEQ ID NO: 34687 - DNA, 276 bp, Zea mays
cgccgagttctacctcccctggaagtgcgagcccgagcgccacgcctacgagaagtgccagtacgagctcgtcatggagcggatgctccagatgcagaagatccgcgaggcgcaggagaccaaggtcaagggcggcgcctccattggcctcatcccggccaccgccaagctcgcctgatacgggtcccagcccgatccgcttgatttaggtctgtttgttggctatagcagcgtccagaggcgttgcgccgtgcaaggatcctcaatgtttgttgt

SEQ ID NO: 34688 - DNA, 274 bp, Zea mays
ggctctcagggcgcccctcgggaggaaagcgagaggggggccaaacgacgcgagagcactcgtcttccagataaccaccgcggtggcctcgtaccgccgcctcctcaactcgctcggcacgcccaaggacaccatcacgcttcgtgataacctgcataagactagtcagaacatccttcaattagcaaaggatgcgaaagataagctccaaaaggctgctgaagcagacaagagcactgatacaagtgcagacaagaggatagctgatattaag

SEQ ID NO: 34689 - DNA, 264 bp, Zea mays
atccgaccagctgggcaggagagtcgtcactgacagccccgtgtacgacggccgtggcgccgacgcccgcctcgtggctcgcatacagggagtcacggtcctggtcggtaacgcagacgccttgttcaccatggtgttcgaaaccgacaggctaaagggctccacgctcgtcatcaacggaatggtcacggatgggtcagacgaatgggcgatctacggcggaaccggggtgttcgccatggccaccggtgtcatgaagagaag

SEQ ID NO: 34690 - DNA, 271 bp, Zea mays
ggatgccaaggagtttgataatgagactccatacactattatgtttggtccagataagtgtggatcaaccaacaaggttcatttcatccttaagcacaagaatcctaagactggaaagtatgttgagcatcatctcaaattcccaccatctgtcccatatgacaagctctctcatgtctacacggctatcttgaagccagacaatgaggtcaaaattttggtagatggggaagaaaagaagaaggcgaacttcctttctgctgatgatttt

SEQ ID NO: 34691 - DNA, 272 bp, Zea mays
cggacgcgtggtggagattgccaaagaggcaggtgcactgctctcttatgacccaaacctgaggacggcactatggccatcccgtgaggaggcccgcacccagatcttgagcatctgggaccaggcagacattgtcaaggtcagcgaagtcgagctcgagttcttgacaggcatcgactcggtggaggacgatgttgtcatgaagctgtggcggcctaccatgaagctgctcctagtgactcttggagatcaagggtgcaagtactatgcca

SEQ ID NO: 34692 - DNA, 273 bp, Zea mays
cctttattggccgtgcttcaaccaagaacaagggcagaatggctcgttacctggcaaacaaatgctcgattgcttcacgcattgactgctactcggaggctagtacctctgtctttgggcaaaagttgcgcgacaagtcgaggagagactggaattctatgacaagggtgttgcgcctcgtaaaaatcttgatgtgatgaaagctgctattgacagtatggtcaatgacaccttaatggatgatgatggtaaggcagataatgagaaggcgga

SEQ ID NO: 34693 - DNA, 265 bp, Zea mays
cctccgctgcgctcgtcttctcatgcatgggggcggcgtacgggacagccaagagtggcgtcggcgtggcgtccatgggtgtcatgcgcccagagctcgtcatgaagtccatcgtgcccgtggtcatggctggtgtgctcggtatctacggcctcatcatcgccgtcatcatcagcactgggatcaaccccaaggccaagccatactacctctttgacggctatgcccacctgtcgtctggccttgcctgtggtcttgctgggct

SEQ ID NO: 34694 - DNA, 266 bp, Zea mays
cccacgcgtccggagttcgccatcggggacgcgctcgccgtcgtcaccaccgacaacttcatggaccacgtccccaccgtccaggtcaagcgcatcgccgaggacatcgacgaccagacggaggagtctgcactcgtcatcaccggcatcaagggaaggatcaacagggccgtttgggggccgctcaacaggaccatcatcactgccggagaggatgccagcggtcgcatttgggattcagagactggacaacttctgaaagagtc

SEQ ID NO: 34695 - DNA, 265 bp, Zea mays
ctctcactcctctcggacccccggtggccggtgcagagctgcgcgaccgagaaccgaatctgtgagccatgtcgaccaacaagggcagcgcggccaagggcggcggagggaagaagaaggaggtgaagaaggagacgaagctcgggatggcctataagaaggacgacaacttcggggagtggtactccgaggttgttgttaacagtgaaatgattgagtactatgacatttctggttgttatatattgaggccatgggcgatgga

SEQ ID NO: 34696 - DNA, 263 bp, Zea mays
gaaatctgagaaggaaaatgcagagatcagattgtctgaccctctgcaataccaatcaattgttgatgctgagtggaacattatttatgacaaactggataaatgtgtgaaaagtggagcaaagatagttctgtctcggctagctattggtgatcttggaacacagtattttgcagatcgagacattttctgtgctggccgtgtcactgaagaagatttgcaacgtgttgctgcagcaactggtggaactgttcaaacttctg

SEQ ID NO: 34697 - DNA, 267 bp, Zea mays
acccgatcaagctgtgggagcgctacgtcgagtggctctaccagcacaaggagctcggcatcttcgtcgacgtcagccggatggggttcacggaggagttcctgcggcagatggagccgcggatgcagcaggccttcgtcgacatgcgggagctcgagaagggcgccatcgccaaccccgacgagggtcgcatggtgggccactactggctccgcgacccggccctcgctcccaactccttcctccggaacaagatcgagaccgcac

SEQ ID NO: 34698 - DNA, 269 bp, Zea mays
ctcatctccaaataaacttgttgggtctcatgtcagcgcttccccattattttctgctatggggggtggaatcatgtgcgcaaaagcatcgatgctgctgcagaatgtgccacctgctctacttgtgcgatttttgagggagcatcggtctgaatgggctgatcctggcatcgatgcttattctgtcgcctctttgagggccaacccatacactgttccaggtttaagggctggtgggtttatgggcaaccaggttatactgccccttg

SEQ ID NO: 34699 - DNA, 268 bp, Zea mays
gtcatcaagcctgtcatccctgagcagtaccttgacgagaagaccatcttccaccttaacccatctggccgctttgttattggtggacctcacggcgatgctggcctcactggccgcaagatcatcattgacacctacggtggctggggagcccatggtggtggcgctttctccggcaaggacccaaccaaggttgaccgcagcggagcctatgtcgcaaggcaggctgccaagagcatcgtcgccagcggccttgctcgccgcgcca

SEQ ID NO: 34700 - DNA, 270 bp, Zea mays
gagacctgcatgcagatggatgaagtgctggcagcagtagctgagaccataaagaactttgcggtcatctaccttgttgacatcacagaggtccctgatttcaacaccatgtatgagctgtacgacccttcgacagtgatgttcttcttccggaacaagcacatcatgattgatctcgggactggaaacaacaacaagatcaactgggccctgaaggacaagcaagagttcatcgacattgtggagaccgtatacaggggcgcccggaaa

SEQ ID NO: 34701 - DNA, 264 bp, Zea mays
catcgcgtgccctcgccgcagccatcttccatggcggaccagctcacggacgagcagatcgcggagttcaaggaggccttcagcctcttcgataaggatggcgacggctgcatcactaccaaggagcttggaactgtgatgcgctcccttggccagaaccccactgaagcagagctgcaggacatgatcaacgaggttgatgctgatggcaatgggaccattgacttcccagagttcctgaacctgatggcaaggaagatgaag

SEQ ID NO: 34702 - DNA, 263 bp, Zea mays
gtagtcttctcgcggttgcaggccacaaacaactgctcctcctgcattccccatccgtccgctgcattcctgctctctcgctctcctcgctctcagaccacagttgccgccgccgccgccctaagccagggtgctgaggctttcgttggcctcttcgccggcagcgagcacccaccagcagttctgtagaaatggctgatggtgaggacatccagcctcttgtctgcgacaatggaaccggaatggtcaaggctggttttgcc

SEQ ID NO: 34703 - DNA, 258 bp, Zea mays
cccacgcgtccgaaaagctgaatctgagaggtgggtttcctgcattaggatcttggatccaaggagtagggacacaacctgtctgctggaattgcaggacaatgaggctgctgtcagtatctgcactgtgaatttccatgataaggagcatggaactctactggctattggcactgccaagggtttgcagttctggccaaggaggacccttgctggtggattcatccacgtatataagtttgtggatgaagggaggtc

SEQ ID NO: 34704 - DNA, 267 bp, Zea mays
atttaacatcctcaacaagaagatcttcgactacttcccctatccatattttgtgtcagtgagccatctttttattggagtactatactgccttattggctggagcttcggcatcccaaagcgcgcgccaatcaactcaacacttctgaagcagcttgttccagttgcggtttgccatgccattggccatgtaacaagcactgtgtcatttgctgctgtagctgtgtcatttgcccacactattaaagttttacaaattacaacaca

SEQ ID NO: 34705 - DNA, 265 bp, Zea mays
ctggaaaatgaaatacgaattttacgtaacacatttgctgagaagtctaaggattgtgttagtcttttgaaagagttggaaacgcataaaaggttaaaagaaaatggtaccatcccttcattcgatctggagggtctccaatgcttaggatcaatgctacgtatagttggtctgagtggtactcacatggatctgtcaaatatttcaatccagtggttccgtatacatccaaaagaaagcaacaaagagattatttcaggtgcca

SEQ ID NO: 34706 - DNA, 265 bp, Zea mays
cgctcatctccgagccgtgccgctcggcgcacatggccgccatgcgcgcaccaaggcggcgggcgtgctctgctcctacgaccccaacgtgcgcctcccgctctggccgtcgcccgacgccgcacgcgagggcatcctcagcatctggaaggaggccgacttcatcaaggtcagcgacgacgaggtggccttcctcacgcgcggggacgccaacgacgagaagaacgtgctgtccctgtggtttgacgggctcaagctgctcgtc

SEQ ID NO: 34707 - DNA, 265 bp, Zea mays
cgccactctggaatgcaggtgtcaacagctgttttagagccatacaacagtgtcctctcgacccactccttgctcgagcacactgatgttgcagtcctcctggacaacgaggctatctatgacatatgcaggaggtcccttgacatcgaaaggccaacctataccaacttgaacaggctgatctcacagatcatatcatcacttaccacctccctgaggtttgatggggctatcaatgtggatgttactgagttccagaccaacc

SEQ ID NO: 34708 - DNA, 286 bp, Zea mays
gtcatcatgaacgacaacttcgacacggtggtgacggccacccggtggggccgctgcgtcttcaacaacatccagaagttcatccagttccagctcaccgtcaacgtcgccgcgctcatcatcaacttcgtgtcggcgatgacctctggcaagatgccgctcacgaccgtgcagctgctgtgggtgaacctgatcatggacaccatgggcgccctggcgctggcgacggacacgcctaccaaggcgctcatgcgcgcccgcccatcggccgcactgcaccgctcat

SEQ ID NO: 34709 - DNA, 278 bp, Zea mays
ggcgaaagtaccttatggtgatagggatcaacaccgcattcagcagccgcaagaggagagactccatacgttacacctggatgccccaaggtgaaaagaggaaaaagcttgaagaagagaaggggatcattattcggttcgtcattggccacagtgctatatcaggtggaattgttgatagagcaatcgaagcagaggacaggaagcatggggatttcatgaggatagatcatgttgaagggtacttgcattgtcaggcaaaccaagcctactttgct

SEQ ID NO: 34710 - DNA, 251 bp, Zea mays
agagacttgaggatctgttcacgggacgtccttacgacatgcttgatgccgctctctctgataccatctcaaggttccccatagacatgcagccattcagggagatgattgaagggatgaggagtgatcttaggaagacaaggtataacaacttcgacgagctctacatggactgctactatgttgctgggactgtcggggtaatgagcgtacctgtgatgggcatcgcaaccgagtctaaagcaacaact

SEQ ID NO: 34711 - DNA, 286 bp, Zea mays
gggcattccaactgttgaaagggttgttattgatgaagttaaagtcaacaacgcgacagaaagataccaattgttggttgaaggaacaaacctcctggcagtcatgggtaccccaggagttgatgctaggaagacgaaaagtaatcacatcatggaaacgaaccaaacacttggaattgaagctgctaggagatctattattgatgagattcaatacacaatgaaaagtcatggcatgaacattgatcggagacatatgatgctcttggcagatttaatgacatac

SEQ ID NO: 34712 - DNA, 282 bp, Zea mays
cggacgcgtggaaaataaggtctaacttccttggcacaagatttttaatttatgatacacaaccgccctataatggggctgtagttcctcctgccggaaggacaagcaggaggttcaactccacaaaagtctctccaaagctgccttcagtcagttacaacatcgcacaggtatcgtatgagttaaatgtccttggcacgagaggtcctaggcggatgcgttgcatcatgcactccatacctgcatcatcagtggagccaggtggcacagtgcctggacagc

SEQ ID NO: 34713 - DNA, 276 bp, Zea mays
gcttggtcttgtgctcgtccgatgagcatcgccctcgctgccgtcctcctgctgtgcggcggcgcgtggctgcagcaggcggcggaggcgcgcccccaccacatggacgacgacagcagcatcgacatggaccgcggcacgacgacttcttctccatcgtggggtactcgccggaggacctgacgcagcacgaccggctcgtcaggctgttcgaggagtgggtggccaagtaccgcacagcgtacggcagcttcgaggagaagctgcgccggttcg

SEQ ID NO: 34714 - DNA, 285 bp, Zea mays
cccacgcgtccgaaccgatccggcgccctccagcatggcgggggcgagggcgaaggcggcgggaccctggctctggcgctcgtgctcgcgctcgcgggggccaactcggtgggcgacgcgctctcggcgctgcgccgtagcctcatggaccccggcggcgttctgcagagctgggaccccacgctcgtcaacccctgcacctgggtccacggcacctgcgaccgcgacaaccgcgtcacccgcctagatcttggtaatttgaacttatctggtcatctggtgcct

SEQ ID NO: 34715 - DNA, 279 bp, Zea mays
attacacttctgttcaacctagcataaggggaaggaatgtatacatgcagttctcatctcaccaagagcttaccactgaccagaggtctcatggaaggaattctgatcaggggtccgaacccaaccgaatacttttagttactatccaccacatgatctatcctataacagtggagattctacatcaagtattcaaagcttatggatttgtggagaagattgtcacatttcaaaagtcagctgggtttcaagctcttattcagtatcactcgcgccaag

SEQ ID NO: 34716 - DNA, 272 bp, Zea mays
gcggcgtggtggggcacgacggcaagccgcactgccaggtggacatggggttcctgggcacggcggggcgtgacccgctcttctactcgcaccacgcgaacgtggaccggatgtggcacatctggtccactaggctgggcggtaagggcttcgacgacccggagtggctggacaccagcttcgtgttctacgacgactaccggagcccgcggctggtgcggatgaagttccgcgacgtcctggacgcgaccaggctcgggtacacgtacgac

SEQ ID NO: 34717 - DNA, 280 bp, Zea mays
gtttgcacggccaggaagccctggatcgctgttggcatgcgcaacgtggactacaagcgtgcgaggcatttcgaggtcgacctttcttccttcaggaacatccttgagatcgacaaagagaggatggttgccaaggtcgagccccttgtcaacatgggtcagataaccagagctacctgcccaatgaaccttgcccttgcggtcgtcgccgagctcgacgacctcactgttggtgggctgatcaacggttacggcatcgaggggagctctcacctctatg

SEQ ID NO: 34718 - DNA, 279 bp, Zea mays
gcatagatctgaatgggctgattacaatattgatgcgtatttggcttcatcattgaagaccagtgcgtgctcacttcctgggttgcgacccatgagattttctgaggggcagatgatcatgccacttgctcacacagttgagaacgaggagattcttgaagttgtccgccttgaaggtcagcctcttactcatgatgaagctcttctttcaagggacatccaccttctccagctttgcactggaatagatgagaaatctgtgggttcctccttccagct

SEQ ID NO: 34719 - DNA, 279 bp, Zea mays
gtctctgtctgtcgctctcgctctcagacgactgggccgccgccgcttggtgctgaggctttcgttggtctcttcggcggcgacgagcacccaccagttctgtagaaatggctgatggtgaggacatccagcctcttgtctgcgacaatggcaccggaatggtcaaggctggttttgctggggacgatgcaccaagggcggttttccctagcattgttggccgtcctcgccacactggtgtcatggtagggatgggacagaaggatgcatatgttggcg

SEQ ID NO: 34720 - DNA, 279 bp, Zea mays
ctcttcaaggaatcgttctccaatatctacactgccaacagccttcagaagccttggtacctggtccttggtaaccatgactacacgggaaacgcgctcgcgcactcgaccctgccattcgcaaagtggatagccggtacaccgccattgccaagtccttcattgtcaactcaggggttgcggattttttcctcgtcgacacaacgccgttcattgtccactactggaacaacaccaagttcgattggagaggcgtcgctcctcgagacacctacatcg

SEQ ID NO: 34721 - DNA, 270 bp, Zea mays
ccaaaccctacataggcagcgcgcagcccccccgcatcgtcgccaaagatgcagatctttgtgaagactctgacggggaagaccatcactttggaggtggagtcctcggacaccatcgacaatgtgaaggccaagatccaggacaaggagggcatccccccggaccagcagcggctcatcttcgccggcaagcagctcgaggacggtcgcaccctcgccgactacaacatccagaaggagtccacactccacctggtgctccgcctccgc

SEQ ID NO: 34722 - DNA, 273 bp, Zea mays
ccaagattaacaagggtaccgtggaaattatcacccctgtggagctgatcaagaagggtgaaaaggtgggctcgtccgagtctgccctgctcgccaagctgggtatccgccccttctcgtacggcctccaggtcaccagtgtctacgaggatgggtccgtgttcagccctgaggtgctcgacctttctgaggaggacctgattgagaagtttgccactggtgtctccatggttgcctccctgtcactggcgatctcgtacccgacccttgctg

SEQ ID NO: 34723 - DNA, 199 bp, Zea mays
aatctttattgtcgaaggtgattctgcgggcggtagtgcaaagcaaggacgggatagaagattccaggctattttgcctctaagaggtaaaattctcaacattgaaagaagggatgaagcagccatgtacaaaaatgaagagatccaaaaccttattcttgcacttggattccgagtgaagggtgaggattttaagaag

SEQ ID NO: 34724 - DNA, 270 bp, Zea mays
agcttatgccttccacccccagatgggctgttgccaatggagctggagttatattaagtgtctgtgatgaggaggtagctcgttatgagacagcaaatttaacagcagcagctgttcctgcgcttctgcgacctccagcaacaacacccttggacgagcatttggtggctggcctgccccctcttgaaccatatgctcggttgttccatagatactatgcaattgctacaccaagtgctacacagaggttgctttttggtcttctggaag

SEQ ID NO: 34725 - DNA, 271 bp, Zea mays
acaagtcgtccgcggacgctggtgcagaaatttcaatatctgttgcggtgcctcaaactatgggcaagaaaaagaggaattcattgccatctacttggcttcttcgctggaattcatttggctatccttgctgcatatgtttgccgcagacatccgaatgctagtataaatactctgttgtctttgttcttcgacatttttgttcactggccttggcctcttccagtgagtttgcttgatccgcctgttccttgtcggggtcctgatgggt

SEQ ID NO: 34726 - DNA, 267 bp, Zea mays
cccacgcgtccgaggagaggttgggtctgggacaccatggctccgatgaagctgtacggggcggtgatgtcgtggaacgtgacgaggtgcgcaacggcgctggaggaggctggctccgactacgagatcgtgcccatcaacttcgccaccgccgagcacaagagccccgagcacctcgtccgcaacccgtttggtcaggttccagctctgcaggatggtgacttgtacctcttcgaatcacgagcaatctgcaagtacgctgctcgc

SEQ ID NO: 34727 - DNA, 276 bp, Zea mays
ggttctttgttgaagaatgtgaccatatccagggtatccagtttcttgtggatgattctggaggctttgccaatgtagctgcacagtttttggagagtattgttgatgattacacaaatacccctgtaatgctgtattgtgtgcggaatccagactcctatgggtcttccagaaatcagcgtgaaaccatcataagatctttgcatgatgctgtatcgttgtcaaaactttcatactactgcaatctgatggtaccaataggactgccttctctaa

SEQ ID NO: 34728 - DNA, 275 bp, Zea mays
gtttccccaccagagatagatagaacatctggggagtacttggtgaagaatggcatccgcacctttgcttgcagtgagacagtgaaatttggccatgtcacatttttctggaacggcaaccgctcgggatactttgatgaaactaaggaagagtatgtagaagttcctagtgacagtggtattacattcaatgttgcacccaagatgaaggcgcttcaaattgctgagaaagctagggacgctctcctaagtggaaagtttgaccaggtacgtgt

SEQ ID NO: 34729 - DNA, 269 bp, Zea mays
aactcaacaaacaaagactgcataaaaatgcttgttggaaacaaagttgacaaggatgatgaaagaatggtcacaaaagaggaaggtcttgcttttgctgaagaatatggatgtctgtttcttgagagcagtgcaaaaacacgagaaaacgttgagaaatgttttgaggaacttgcattgaagattcttgaggtgcctagtctcctagaggaagggtcttcttcggttgtcaagaggaacatcctgaaacagaagcaggaaagtgatgc

SEQ ID NO: 34730 - DNA, 274 bp, Zea mays
ccgacagaaagagggacgaatggcgagctctcagtgctgcgataacccgccggccctgaacccggcctgcggggagggcaaggtcgtcgacagcttcggcgggctcaaggcctacgtcgccggccccgaggactccaaggccgccgtcgtcctcgtcgccgacgtcttcggattcgaagcgccgattatgaggaagatagccgacaaggttgcttcgtcagggtactttgttgtggtaccagatttgtttcatggggatccttatgcacctgag

SEQ ID NO: 34731 - DNA, 264 bp, Zea mays
gactcactcagtcactagcaagtgcctcgtcacatggcagcggcacgctagcggcgtggtggtggtctctgtcgctcctggctaccatcgtcggcggaggcagcgcctcaccgtcaccggtgcccggctgctacacgcgcatcttcagcttcggcgactcgctgaccgacacgggcaactacgtccacctgacggcgagcagccacagcccctacggcgcgccgccgtacgggaggacgttcttcggcaaacctaccggccgcg

SEQ ID NO: 34732 - DNA, 274 bp, Zea mays
cttatacccagaaggcctaaaggatatccttatgatcatgaagaacaaatatggaaacccacctatctacatcactgagaacggaatcggggatgttgatacaaaggagaaacctctacccatggaggctgccttaaatgactacaaaaggctagattacatccagcgccacatctcaactctcaaggagtcaatagacttgggagcaaatgtgcatggctacttcgcttggtctctgctggataactttgaatggtacgccggctacaccgaa

SEQ ID NO: 34733 - DNA, 271 bp, Zea mays
gcttcagctccgacatcctggcggccgtcgaccgcgcagtggcggacggcgtcgacgtgctctccatctcgctcggcggcggctcgtccccctacttccgcgacacctggccatcgcgtcgttcggtgccatgcagatgggcgtgttcgtcgcctgctcgggcggcaacggcggcccggaccccataagcctcaccaacctgtcgccgtggataaccacggtgggcgcgacaccatggaccgggacttcccggccacggtgacgctcggca

SEQ ID NO: 34734 - DNA, 275 bp, Zea mays
cgtgctgcttcaccgaatcgagtcagatcctgtccgaatccgagctaagggatggcaaccggtagtgaagcctcgaaggcagctgaggctgtggttgactggcataaacacgacagcaagaggatgctccatgcggtttaccgtgttggggatctggaccgcacaatcaagtactacacggaatgctttgggatgaaactgctgaggaaaagggatgttcctgatgagaagtacaccaatgccttccttggctttgggccagagaacaccaactt

SEQ ID NO: 34735 - DNA, 279 bp, Zea mays
  unsure (1)..(279): unsure at all n locations
ggttgatgttgtttgtggacctgatgcatatagggatttgcctaggttgcgtcaggaagtcgattacggccacaatggcatgaacacacttctatcactcgaggaaacttatgctgatatcaccccagtaaggatctctgacaattcaattacggcatttgtgtcaatcatgagaggttgcaataatatgtgctcattctgcatagttcccttcactagaggtagggaaaggtctcgcccagtgtcttctattgtccgtngagttggtgagctatggaa

SEQ ID NO: 34736 - DNA, 271 bp, Zea mays
gatgagattcacaagatatgcaatgtcatcggtagtccagatgagcaatcttggcctcaaggattgtctcttgcagaagcaatgaagtatcagttcccacagaccaaaggcagtcaattgtctgaggtgatgacaacagctagtagcgaggcaattgacctcatctcatcactatgctcatgggatcctagcaagagaccaaaggccacagaagtcctccagcataccttcttccagggttgtacatgtgttccgcttcctgtccgtcgga

SEQ ID NO: 34737 - DNA, 266 bp, Zea mays
cccacgcgtccgcggtgcaggtgctggtgtgggcaatggcaggagcaactgtgttcggtggtttttatgctttcttcatccaccaggaaaaaaccgcccagctggaacccccaaaaccataacgagggtgcccgtcctgctagccggtgtgcttgctgtgcgatcgtttggcatgtgcttgttgaggggttgctaggggattggagaggattgaagggattaaatctcctcctattcaattttgaataggaggggatttaatcccc

SEQ ID NO: 34738 - DNA, 260 bp, Zea mays
cgcgccgcgaggacctagtcgagcaggtgaggcacgcggccgggacggtgggcttcttctggctggtgaaccacggcgtggcggaggagctgatgggcggcatgctccgcggggtgcgccagttcaacgagggccccgtggaggcgaacaggcgctctactcgagggacctcgctcgcaacctgcgcttcgcctccaacttcgacctcttcaaggctgctgcggccgactggcgcgacacgctcttctgcgaggtggctc

SEQ ID NO: 34739 - DNA, 264 bp, Zea mays
cctcccaaagtcccaaaggccgccgccgcccgccagcccaccatggccgcgcagtccttcctcctcgccgccactgccgccgccaggtcccccgcggtcttcgccgctccctattcctccgcacgccctttccactcggtccacttcgtcgccggcccgtggggcgccgccgccgccaaggcgctcgtcgtcgcggacgccactaagaaggccgtagccgtcctcaagggcgcgtctgaggtcgagggcgtggtcacgctcacg

SEQ ID NO: 34740 - DNA, 265 bp, Zea mays
  unsure (1)..(265): unsure at all n locations
cgaacaaaccacacaccccacctaccccggccggaccggcaggcagcacagcatggacctcgccctcctagagaaggccctgctgggcctgttcgccgcggctgtggtggccatcgccgtggccaagctgaccggcaagcggtaccgcctcccaccggggcccccgggcgcccccgtggtgggaaactggctgcaggtgggcgacgacctgaaccaccgcaacctgatggccatggcgaacggnttcggcgacatcttcctgctg

SEQ ID NO: 34741 - DNA, 265 bp, Zea mays
agttcattcactttctagtatccaaaccagaaaggaacaagaaattgaagaaatgtcatttagatctgcccatgctggatctgatataagccaacttcaatctctggtccgtgagctgagggaaaatacacaggagcttaagctatttgtggagttgtataagcatgagtccactgattccagacagctgatggaatcgagagatagggaactcgctgaatgggctcgagttcacattctcaaatattctcttagtgaaagtaaa

SEQ ID NO: 34742 - DNA, 267 bp, Zea mays
acaaaagctctaagtcgaacagggccagtggaaggagcctataagcctaagaaactctctctagaggacgaactgaaggctttgcagcagaaggttgacataaacagctacgactacaagcccatcccaagacccagtgagaaataagtgaagatgaagaccgtttgctagtgcgtcgagtggatgtttgtttcttgatactttcgtcgtctcatcttgtcacaagttttgtatgaatgtacggagctgattcaagtttgaaattag

SEQ ID NO: 34743 - DNA, 265 bp, Zea mays
gtccatcgtgtcccgcgagatgacccggcgctacatgacggacatgatcacccacgccgacaccgacgtggtgatcgtgggcgccgggtccgcgggcctgtcctgcgcgtacgagctgtccaaggaccccaccgtgagcgtggccatcgtggagcagtccgtgtccccgggcggcggcgcgtggctgggcgggcagctgttctcggccatggtggtgcgcaggccggcgcacctgttcctggacgagctgggcgtgggctacgac

SEQ ID NO: 34744 - DNA, 265 bp, Zea mays
ggcagattgagaagacaattcagtatcttattggctctggaatggatcctaggactgagaataatccttatcttggtttcatctacacctccttccaagagcgggcgaccttcatctcacacgggaacactgctcgtcacgccaaggactttggcgacttaaagcttgcacaaatctgcggcatcatcgcctcagatgagaagcgacatgaaactgcgtacaccaagatcgtggagaagctgtttgagatcgaccctgatggtac

SEQ ID NO: 34745 - DNA, 263 bp, Zea mays
ggagcgacgaatagttactcagctgatgacatgcatggatgaattccaccagaatattggtggtgatggttctgatgccgattcatctgaaaagaaaccaggttatgttattgtcattggagctacaaataggcctgatgctgtggatcaagctcttcgaaggccaggaagatttgatcgagagatatatcttggggttccagatgtgaattcaaggaaacagatactgatgatgcttgctcggaagcttcgacttgaagggc

SEQ ID NO: 34746 - DNA, 275 bp, Zea mays
gccctccctcccgatcttaaccacccgccacccggcttcctctcccccttcttcctccctcaaaccagacgctcgcccccctttcctccacctatcttcttcagacgaccagcaggaggtacgagcaagaccacctaggaggcctctctctctctctccccagccacccccgtagcgagagggagggcggaagaggatgagcgcgtccaggttcataaagtgcgtcacggtcggggacggcgccgtcggcaagacctgcatgctcatctcctaca

SEQ ID NO: 34747 - DNA, 88 bp, Zea mays
ccgcaagcctctggacagtctgaggaagacatgctgcagtgcttcattgattccaagtacaagaatgggcgccccacgaccgagggtg

SEQ ID NO: 34748 - DNA, 271 bp, Zea mays
ggttgagtatatggagaaggtggctaagactgtagatgtggaagagctcactgttgaggagcgtaaccttctgtctgttgcatacaagaatgtgattggggctcgccgcgcttcatggcgcattgtttcttccattgaacaaaaggaggagtcccgtaagaacgaagagcatgtgaaccttatcaaggaatatcgtggcaagatcgaggctgaactgagcaatatctgtgatggaatcttgaagctgcttgactcccacctagtgccttct

SEQ ID NO: 34749 - DNA, 267 bp, Zea mays
cccaagcatattgagactactcttaccagggctaaatttgaagagctatgctcagatctccttgacaggctgaggacccctgtggacaatgcccttagagatgcaaagttgcaattcaaagatattgatgaggttattcttgttggtggctcaactagaataccagctgttcaggagcttgtcaagaaaatgacaggaaaggaccccaatgtgacagtcaaccctgatgaggttgttgcacttggagcagctgtgcaggctggagta

SEQ ID NO: 34750 - DNA, 159 bp, Zea mays
cccacgcgtccggacccttattgctagagctgtagctaatgagacaggtgctttcttctttttgatcaatggaccagaaatcatgtcaaagctagcaggagaaagtggaagcaatctcagaaaggcatttgaaggagctgagaaaaatgcaccttcaat

SEQ ID NO: 34751 - DNA, 264 bp, Zea mays
ctccaaacacttgcgccgccactgcctcacaggtaaggccgccatggtctccggttcgggcgtgtgcgcgaagcagtcgtggtggacgcgcgccaccacatgctgggccgtctctcctcgatcatagccaaggagctgctcaatgggcagaaggtggtcgtcgtccgctgcgaggagatctgcatgtcgggcggcctcgtccgtcagaagatgaagtacctccgcttcctccgcaagcggatgaacaccaagccgtcccacggg

SEQ ID NO: 34752 - DNA, 257 bp, Zea mays
aagtacacttcactgaagcctctgggagatagggtgcttgtgaagcttggtgccgcagaggagaagacagttggtggcattttgcttccatctactgcccagactaaaccacaaggaggtgaggttgttgctgttggagcaggaaggaccatcggggacaagaaaatagctgtggatatagagactggagcacaagtagtatactcaaagtatgctgggactgaggttgaattcaatgactcaaagcatcttattct

SEQ ID NO: 34753 - DNA, 258 bp, Zea mays
cggacgcgtggagggatatcactggcaaccccagggctctccggaggctgaggaccgcttgtgagagggcgaagaggactctgtcttccactgcccagaccacgattgagattgactcgctgtatgagggcatcgacttctactccaccatcacccgtgccaggtttgaggagctcaacatggacctgttcaggaagtgcatggagcctgttgagaagtgcctgagggatgccaagatggacaagagcaccgtccatg

SEQ ID NO: 34754 - DNA, 258 bp, Zea mays
atcacatctcaagatcctgacagagagtgatgaaactccagccgattgtgcaactgctgttgtcaacaaagacttgtctgtgtaccttcagctccaaggagatttaaatgaagatgctgagcgtgaaaagctaaggaagaaaaaagatgaaattcaaaagctacaaaatgcactggcacagaaaatggacgcctctgggtatcgcgagaaggctccacagagcgtgcaggaggaggacatgagaaagctcaccgcttt

SEQ ID NO: 34755 - DNA, 258 bp, Zea mays
cgtcggttcacttctccaggtaaggaaagggttcgtactcatggcgccgccgcagccaaagtcgggcctcttcgttggcatcaacaagggtcatgtcgtcaccaatcgcgagctgcctccccgcccgtgccaccgcaaggggaaatcaacgaagagggtgtctatggtcaggggcctgatcagagaggttgctgggtttgctccttatgagaagcgtatcactgagcttctgaaggttggcaaggacaagcgtgccct

SEQ ID NO: 34756 - DNA, 242 bp, Zea mays
cccacgcgtccgctccttctgtcccaactgagcggtaaggacattaccgagctcattgctgctggcagggagaagtttgcttcagtcccatgtggcggtggcggtgtggctgttgcggcagctggccctgctgctggcggcgctcctgcagctgaggcgaagatagaagagaaggtggatgaggaggaagaaagtgatgacgacatggggcttcagcctctgcgactaagcctgtgcaatag

SEQ ID NO: 34757 - DNA, 286 bp, Zea mays
gtgacacaatcgcctaatctctctatattaactgagtacctcccaagggggagcctatatcgtctgttgcataggccaaatagtcgaattgatgaagtacggaggctaaaaatggcattcgatgtggcaaaagggatgaactacctgcactctagccatcctaccattgttcaccgtgacctgaaatcccccaatcttttagtggataaaaattgggttgttaaggtgtctgactttggcatgtccaggttgaaacatcatacttttctttcctctaagtcaactg

SEQ ID NO: 34758 - DNA, 273 bp, Zea mays
gccggttgtgacgaagcaaaacaagaaataatggagtttgtgcatttccttaaaaaccctaagaagtatgaagatttgggagctaaaatacccaaaggtgctctacttgtaggccctcctgggacagggaagactttgctcgccaaagctacagcaggagagtctggtgtgccatttttgtctatttctggttcagatttcatggaaatgtttgttggtgttggaccgtccagggtacggaacttgttcaaagaagctaggcagtgtgctcct

SEQ ID NO: 34759 - DNA, 276 bp, Zea mays
ggcatggacgcatataggttctctatctcttggcctagaatactgcctaacggaacggtcgaaggaggtattaaccaggatggcatcgattactacaaaaggctcatcaacttgttgctagagaatggcatagagccatatgtaacaattttccactgggatgtccctcaagcactagaagagaagtacggcggattcttagataagactcataagaggattgtaaatgattacaaaaacttcgctaaggtgtgcttcgacaactttggtgacaag

SEQ ID NO: 34760 - DNA, 271 bp, Zea mays
cagaaccgcacaccaacaatcgtcattgtctggtccatccttcttgcatctatcttctccttgctgtgggtgaagatcgatcctttcatctccccgacacagaaagctgctgccttggggcaatgtggcgtcaactgctgatcgagacagtgactcttatttgaagaggctcaatcaagatctgccccctcgtgtaaatacctgaggaggctagatgggaattccttttgttgtaggtgaggatggatttgcatctaagttatgcctctgt

SEQ ID NO: 34761 - DNA, 264 bp, Zea mays
ggacctggcgcggaggcggcgcggttcatggccgtggcggacggttcggaactcggtggcagccgtctcgattcttcgttgctgtgctcctcgtcctgctcacagatggcggacggcgtggaagagagcagaaggcctgtcgttgggcatcaactacgggcagatcgcggacaacctgccgtcgccggcgagggtgtcgtacctagtccggtcgatgcaggtgagcaaggtgaagctgtacgacgcggacccgtacgtgctgag

SEQ ID NO: 34762 - DNA, 277 bp, Zea mays
gcaagccggatggcatcctcgtgcagacggtgacgagagacgacatatgtctgttcatctcggagcacaacccgggacagataaagacgtgggatacggatggtgacaaaatcaaactcattgcagaggatcacagcaggcggggcaccttgatgtgcccccctgagaagacaatccaagaagtcgtctttgccagcttcggcaacccagagggcatgtgcggcaacttcactgtaggcacttgccacactcccaatgcaaagcagatcgttgagaa

SEQ ID NO: 34763 - DNA, 277 bp, Zea mays
gcaaccggtccaacactttcacgctcaggcgctcagctctagcaatggctgcctccaccatggcgatctcctccacggcgatggccggtacccccatcaaggtgggctccttcggcgagggccgcatcaccatgcgcaagaccgtgggcaagcccaaggtggcggcgtccggcagcccctggtacggccccgaccgcgtcaagtacctcggccccttctccggcgagcccccgagctacctcaccggcgagttccccggcgactacggctgggacac

SEQ ID NO: 34764 - DNA, 270 bp, Zea mays
cggacgctgggttctgaggctcgcgaaccccgacgatggccgccaccgcggtgtcggtcgacgagaagctcgacaagcttcgcgccgaggtcgccaaactcaaccagatcagcgagaacgagaagtccgggttcatcagcctcgtgtcacgttacctcagtggggaggcggacagatcgagtggagcaagatccagaccccgaccgatgaggtggtggtgccgtacgatatcctcgcgtcacctactgaagatctcgaggagacgaagaa

SEQ ID NO: 34765 - DNA, 183 bp, Zea mays
cggacgcgtggcggacgcgtgggcggacgcgtgggctcctccctgcgcctgagcgctcatctgtggagcgcggtggttgtgcttgtgcatgcctgtgcgcttgccttcaaggcagcggtccagtggaggttgcgacggtggcggtgctgttgtggcgcggcgtttcagaggttcacaacggag

SEQ ID NO: 34766 - DNA, 271 bp, Zea mays
gggcctgttgcacatgaagtactgtgtattccgaaagcagattcattccatcatgaatatagctctatggcctgcacaattgagttcgttgatgatgtacagtcagcaattaaccatatacatcgttatggaagtgcacatacagattgtattatcaccacagatgataaagtagcagaaacttttctgcgtcaagttgatagtgctgctgtatttcataatgcgagtacacgattctctgatggggctcgttttggattgggtgccgagg

SEQ ID NO: 34767 - DNA, 264 bp, Zea mays
cggacgcgtggcggacgcgttggcggacgcgtgggggaaatgagaaggcacaagaagttggtgcaatggctcttttcaatcttgcagtcaacaacaacagaaacaaggggctcctgttatctgctggagtcaccgatctacttgagcagatgatatcgaatccacggctatctggtcctgccacagcactctacctgaatatttcctgccttcctgacgcgaagccgtcatcggttcgaaccaggccgtgcgttcctagtcgac

SEQ ID NO: 34768 - DNA, 265 bp, Zea mays
ctaaggcttcatgtactggtgatggaattcatagggaaaagaggctgggctgctcctcgtctcaaggacgctgctttgtcagatgacaagttgcatgaaagttactttgagataattacaacaatgcggactctttaccaaacgtgcaaactggtccatggtgatttgagtgaatacaatattctatattttgagggtcacttgtatattattgatgtttcacaatccgtcgatcttgatcacccttcagctttggattttctga

SEQ ID NO: 34769 - DNA, 266 bp, Zea mays
atctgcgacagccacggtaacctcgtgctaactgggccatcattggccacctcggcatacagtccaattgctttcttcctctacctccatgatggcagcccgcaagccggagaagccaccgaggacgacgaggacatcgggacgatactctgcgactgcatcggcgacgacttctccaactacaacagggccatagtcgagactgtccaaacgggctatagctccgctgaagtgatctatgccgtcctgagcaacggcgtccaagg

SEQ ID NO: 34770 - DNA, 263 bp, Zea mays
gcacacgcgtccgcggacgcgtggggcaggactcccagaggcggccgtggcggcggtggcaggggtggccgcggcggtggcatgaagggcgggagcaaggccgtcgtggtggcgcacaagcacgccggtgtcttcatctccaagtccaaggaggatgcgctctgcaccaagaacatggtcccgggagagtccgtgtacggagagaagcgtgtctccgttcagaatgaggatggaacaaaagtcgaatacagggtgtggaaccc

SEQ ID NO: 34771 - DNA, 269 bp, Zea mays
tggaaaacctgtccagcctgaagagcaaagttcaacatgtgcgcacactgattgctccaaatcatacgtgtacccacatgttgaactttgctctaagggaagtacttggtgatcatgttgaccagaagggttcaattgttctaccagagaagctaagatttgatttctctcatggaaaacctgtccagcctgaagatctgaggaaaatcgagttcatagtgaaccagcaaataaaggacgagctgggtgtgtatgcacttgaaataaaa

SEQ ID NO: 34772 - DNA, 262 bp, Zea mays
gtcgaaccaagcaccctgcacttcacaagttcgaaccagaagctaacctacaaggtgacgatgacaaccaaggctgcccagaagacaccggagttcggagcgctgtcttggagcgacggcgtccacatcgtccggagcccccttgtcctcacatggctgccaccgatgtgagcttcgtttatttaccgtgcgtttagagcaagcaatggagcaggaacctctgggcctgggtaatcagccagagatcgttgtgtcgcacggc

SEQ ID NO: 34773 - DNA, 268 bp, Zea mays
cattgcgaggggctctcaataaaagcagctcaaagggcacttgaaatggccaaagtaaaagctgaagatgttgaccttgttctcctttgtacatctactccagatgatttgtttggaggtgccactcaggtgctgacggacgtggggtgcacaaaggcttttggatttgatattacagctgcttgcagtgggtttatagttggcttaatcacagctactcgttttatcaaaggtggaggttttcagaatatcctagtagttggtgctg

SEQ ID NO: 34774 - DNA, 265 bp, Zea mays
cccacgcgtccgcgtagagggactcaggccgaatgcacggggccctggtcttgttacctttgggcctgatagagttatggagttctgcaacaacaatgacctgcagttgattgtgcgagcacatgagtgtgtgatggatggctttgagcgattcgcccaaggtcacttgatcactcttttctcggcaacgaattactgtggaacggcaaacaacgcaggtgcaattttagttctcggaagggatctggtggttgttccgaaactc

SEQ ID NO: 34775 - DNA, 179 bp, Zea mays
ggctgatgaaatagaagcgctgtacaagaaggtccatgctgccatccgtgccgatccttccattgttaagtcaaccaagcagccaccaaaggagcataagaggtacaaccccaagaagctgacatatgggcagaggtaggtcagcctcattgaaaggctcaaccaactcaactcctccg

SEQ ID NO: 34776 - DNA, 262 bp, Zea mays
cacaccgggcacaccccccgagctcagcttagctccactccagctccaatcacagtcgtgaccagagcgcgagagctagctagagggccgtgaaaatgccgatcaataggatcgccctggggagccaccaggaggtgtaccacccgggcgccctcaaggcggcgttcgctgagttcatctccaccctcatcttcgtcttcgccggccagggctccggcatggccttcagcaagctgaccggcggcggcccgacgaccccggc

SEQ ID NO: 34777 - DNA, 261 bp, Zea mays
tctcacgatccactcgagcaccaagccgagggaaggtgaggagcgatggcgcgcggcgtggtgtcggcgaagggcggcgcggtcgcgggcaagaagaaggggtcggtttccttcacgatcgactgcaccaagccagtggaggacaagatcatggaggtcgcctcgctcgagaagttcctgcaggagcgcatcaaggtcgccggcggcaaggctggcaacctcggcgactccgtcaccatctctcgcgagaagaccaaggtc

SEQ ID NO: 34778 - DNA, 291 bp, Zea mays
cctatctccaacctgtgaacggtgaaccccgatcgaatgacgccgacgggaacctcctcctcccggctcccccattcgtccccatctctgatgtgcgccgcctccagctccccccgcgcgtccgccaccagcctcgtccctgctggaagggcgtggagtggggctccatacagacccggatggtctcttctttcgttgctgtagggagcagaacacgccgcagaaacgttatatgtgcttccctgtttggagttggagctcccgaagcactggtcattggagtagtcgctt

SEQ ID NO: 34779 - DNA, 288 bp, Zea mays
attcatggatttttcagattaccaggctttacaaggagaaggactttttggaaactgaatttatagttgggcccataccagtagatgatggaaatggaaaagaagtagcaactgaaattgttacaaacatggttacaaacaaaacattctacactgattccagtggacgtgatttcatcaaaaggataagagattatcgatcggagtggaagattgaagtgcaccagcctattgctggaaactattatcctgttaatcttggcatctatgtggaggatggcagcaaag

SEQ ID NO: 34780 - DNA, 287 bp, Zea mays
cggacgcgtggtcggaatcaacggcttcggaaggatcggcaggctcgtggccagggtcgccctccagaacgaggatgtcgagctcgtcgccgtcaacgaccccttcatcaccacggactacatgacctacatgttcaagtacgacaccgtccacggccactggaagcacagcgacatcacactcaaggactccaagacccttctcttcggtgacaagccggtcaccgtctttggcatcaggaaccctgaggaaatcccgtggggtgaggcttgcgctgagtatgtcg

SEQ ID NO: 34781 - DNA, 279 bp, Zea mays
  unsure (1)..(279): unsure at all n locations
atctacttccctcccacgtacaaatactctttcaactcagaccggtacgccggcgagggcaggcaccctaaggagaagcggaggacgccagcatggtgcgaccgcatcctctggcacggcaacggcctgagccagctgtgctacgtccgcggcgagtcccgcttctccgaccaccggccggtgtatggcatcttcctggcggaggtcggcgtcgtgcgccacgagaggaggaacaacgccgggtaattcggatctaaggtcgaggtggangagctgttg

SEQ ID NO: 34782 - DNA, 277 bp, Zea mays
cccacgcgtccgcgagatgttcctcgagaacggtggcaagctcccaggaccgccggaaccgtcggcgcatccgcattcgacgccgccgcggccacggcaccatcacagcatgtctatggatgggtccacgtctttgtttggttccgccgccgccgggacgcctgggaggtcgggcgctgatgccaagaaggctatttccgacgctaagctcgccagactcgcgcttgttgaccccaaacgtgccaagaggattttgggcaaccgccagtccactgct

SEQ ID NO: 34783 - DNA, 279 bp, Zea mays
gtgaagtgggcgggcgtgacggtgttcgagtggttcaggaacgggcagttctggatgacggccagctgctccgcgtacctggccgcggtgtgccaggtgctggtgaaggtggtgttcaggcgggacatctcgttcaagctgacgtcgaagcagcccgcgggggacgagaagaaggacccctacgcagacctgtacgtggtgcgctggacctggctcatggtgacgcccatcatcatcatcctcgtcaacatcatcggctccgccgtggccttcgccaag

SEQ ID NO: 34784 - DNA, 277 bp, Zea mays
  unsure (1)..(277): unsure at all n locations
aataaactaggagaggcagaatcactatctaaagctctgtcagaagatttggcttcagtaaatgaaatggttcagaagggacaagaagaactcgaagccacctctattgagctggcatctattgctgaagctcgtgacaacttgaagaaagaattgctggatgcgtacaagaatttggagtcaaccacacatgagcttgtcgaggaaagaaaaattgtgacagccttaaacaaggaacttgaagcgttacgnagacagttgcaggttgattctgaag

SEQ ID NO: 34785 - DNA, 275 bp, Zea mays
agagcctcattcatctccattcgaaacaccctcgcacccacactctcccttcgtccccagcctaaatccccgcaaagatggctcgcacgaagcagacggcgcgcaagtccacgggcggcaaggccccgaggaagcagctggcgaccaaggcggcgcgcaagtcggcccctgcgaccggcggcgtgaagaagccgcaccgcttccgcccgggcaccgtggcgctgcgcgagatccgcaagtaccagaagagcacggagctgctcatccgcaagctg

SEQ ID NO: 34786 - DNA, 274 bp, Zea mays
cccgcctccactcccccctcccaggtgctgcccaggtaagtcggcggcggcgatgacaacgcgcttcaagaagaaccgcaagaagcgcggccacgtgtccgccgggcacggccgcatcggcaagcacaggaagcacccgggaggtcgcggtaacgccggtggcatgcaccaccaccgtatcctcttcgacaagtaccatccgggctacttcggcaaggttggcatgcgttacttccataagctccgcaacaagttctactgccccgcggtcaac

SEQ ID NO: 34787 - DNA, 275 bp, Zea mays
ggcacgcaggtgccgaccagcaatggcgagacagcgacgacgacgacgacgacgcccgtcgcgttcgacgccgacaccggcatgaagaagccagaagacatcgtcagggagttgaacgagcacccgcgtcgggagttcacgacggaggacgagacggacagcgacgacatgggcgacgagtacaccgacgacggcgaggaaggcgaagacgacggcaaaatgcagtacaggatacagttccagaggccgaacccgggcggcaccaacaccgcgcc

SEQ ID NO: 34788 - DNA, 275 bp, Zea mays
gcacgatatgccagtgtaaatacccatcttggagtagagcaaagcagaagagatgatctggaatctcttggttatgtgctgatgtatttcttaagaggaagtcttccttggcaaggcctgaaagctggcacaaagaagcaaaagtatgatataatcagtgaaaagaaaatgcttacaccagttgaggtcctctgtaaatcgcatccatcagagttcactgcatactttcattactgtagatcactacgatttgaagataaaccagattactccta

SEQ ID NO: 34789 - DNA, 272 bp, Zea mays
ccagggcgtccatcccagcagccatggcgatggcgtacaagatggcgacggaggggatgaacgtgaaggaggagtgccagcgctggttcatggagatgaagtggaagaaggtgcaccgcttcgtggtgtacaagatcgacgagcggtcgcgcgccgtgctggtggacaaggtgggcggccccggggaagggtacgaggagctcgtggccgcgctgcccggcgacgactgccgctacgccgtcttcgacttcgacttcgtcaccgtcgacaac

SEQ ID NO: 34790 - DNA, 272 bp, Zea mays
atcgcgcacacaagatgacggtcgtcgccaccgacgcgtcctacaccaagcccttcaccacctcggtgctcatgctcgcgccgggccagaccaccgacgtcctcgtcaccatggaccagccgcccacccgctactacgtcgccgcgcgcgcctacgtctccggccagaacgtgtccttcgacaacaccaccaccacggccgtcctcgagtacgactgcggctgcgcctccgacttcggccccaagatacagccggcgttccccgcggcgctc

SEQ ID NO: 34791 - DNA, 257 bp, Zea mays
cccacgcgtccggagactggcaaacaagttaagaagatggctgagcactcatcattcgtcaactcatgctgcccagcgcggaagtggccacctcttgtggttagcggttcagacgatggtacagcaaagctgtgggacttgcgtcagagaggtgcaatacaaactctccccgacaaatatcagatcacagctgttagcttctcagaggcagcagataaggtattcactggtggcctggacaacgatgtcaagtggtg

SEQ ID NO: 34792 - DNA, 267 bp, Zea mays
cggacgcgtgggcggacgcgtgggcgagcggccgctcgcgatctagaactagcccacgcgtccgagactccaaacccgtcgccttactatccatcccttcctcgccacgggggtcgcctgagatcacataaacaatggtgaaggctgttgctgtgcttggtagcagcgatggtgtcaagggcaccatctttttcacccaagtgggagatggccctaccactgtcaccggaagtgtctctggcctcaagcctggcctccatgggtttc

SEQ ID NO: 34793 - DNA, 268 bp, Zea mays
cggacgcgtgggcggacgcgtggggaaatttggaaggtaatgctggagcagttcaaggccgaggccctgcggatgcaggccctgtagatgcaggcttatgatgtctactccgagaggacgatggaggtcttgctggaagcatcagagaagctgaagatacaggcagacaaagcacagaaggacctgagcgtggtagctaccgaaattggtcaggagggacaggaatatctgatgatggcagctcggaactccccagactcgatcaagg

SEQ ID NO: 34794 - DNA, 266 bp, Zea mays
cccacgcgtccggtggacctaaggcttttgtgagcgagtacgctgtctggagaagtgacgcgggtagaggcagtcttcttgcttcgttggctgaagctgctttcctcactggtctggagaagaacagtgatatcgttcagatggcaagttacgctccactcttcgtgaacgacaatgaccaaacgtggaacccggacgctatcgtcttcaactcctggcagcactatggaactcctagctactggatgcagacgattttccgcgag

SEQ ID NO: 34795 - DNA, 262 bp, Zea mays
aagaatcctcccggtccactactcggacaactacttttcgctgacgccgggggagaacatggccgtcgacatctcgttcgaagctccccaggggtccagtcccagagttgtcctcagaggctggaaccatcatctggaccacgccgtgatgatctgagatccgtgtaataaaataagcacgtaccgaataaagtgcagacatcagatcgtgttcgtgcctgctgttggattataattaggcttgtcctaattttattttatt

SEQ ID NO: 34796 - DNA, 264 bp, Zea mays
gaaaatgccgtgggaaattttggagtctaaaatagggaattggattcatttcatgcgaattgctgttaaacttctttttgctggggagcgccaactttgcgaccaagtttttgagtgcagtcaatcgttgagggataagtgctttgctgcaataacaaagaacagtttggctacactactcagttttggagaggctattgctatgagtaaacgatcaccagagaaactctttgttctgttagacatgtacgagataatgtgcga

SEQ ID NO: 34797 - DNA, 267 bp, Zea mays
cgaactcctcctcgcgattccaatccacgcacgccatctccgactccgcgtccgcctcgcgcaggacatatattcagtgatggaacacaaggaggccggctgccagcagccggagggcccaatcctatgcatcaataactgtggtttctttggaagcgctgccaccatgaacatgtgctccaagtgccacaaggagatgataatgaagcaggagcaggcccagttggctgcctcctccatcgatagcattgtcaatggcggtgataa

SEQ ID NO: 34798 - DNA, 271 bp, Zea mays
tgaacagctggaacgtgagcaggctgccaaggtcactggcatgcttttggagatggatcagacggaggttcttcacctgctggagtcgccagatgctctgaaagccaaggttgctgaagccatggaggtcctccgctctgcccagcatctccagcagagcaatgtttctactgagcagcagctggctaatctatcattgaatgatggcgtcgtctccagctgaacgttaatgtttctgatgtttcggaagtgctgccagtttttgcttgaa

SEQ ID NO: 34799 - DNA, 267 bp, Zea mays
tgcagaatttgttaacagcgaacaggtaccaatgtcaagatagctgccattccttcaagcgtcgtggttctgacttcagagacctttgactcaattgtccttgatgaaaccaaagatgtccttgttgagttttatgccccatggtgtggtcactgcaagcatcttgctccgatttatgagaagctggcttcagttttcaagcaggacgacggtgttgtgattgccaatattgatgctgacaagcacactgacttggctgaaaaatat

SEQ ID NO: 34800 - DNA, 269 bp, Zea mays
agagaatatcggtcatcctgcagaacatgacttccctcatgacttctttcgtggttggatttatcattgaatggagagtggcaatacttattctggccactttccctctgcttgtgcttgccaactttgctcagcaactttcaatgaagggcttcgctggtgacactgcaaaggcacatgccaagagcagtatggttgctggtgaaggggtgagcaatatccgcaccgtggcggccttcaacgctcaaagcaagatcttgtcactcttc

SEQ ID NO: 34801 - DNA, 269 bp, Zea mays
gggacggcgggccccgggaggctcagaaggagtctccgagcggcatcggcgcacactcgaggatccgtctccaggacctcctgtggaaaacggtgccttcagaagcccctcacaggaagaacagagtgctctgtataattttctctatccaagcaaagacttacttccagatgataaggagatgagtatatttgatcatctggaggagcttcgcgagaggattttcatctcagttttggctgttggggctgcgatactaggctgttttg

SEQ ID NO: 34802 - DNA, 270 bp, Zea mays
aatcattctagaagatgacatggagattgccccggattttttcgactacttcgaggctgcagctaaactacttgataatgacaagacgattatggctgtttcgtcttggaatgacaatgggcagaagcagtttgttaacgacccaaaagctctttaccgctcagatttctttcctgggcttggatggatgttaacaaagtccacttggattgaattgtcaccaaagtggcctaaagcttattgggatgattgggtgaggctaaaggaggt

SEQ ID NO: 34803 - DNA, 261 bp, Zea mays
gaagcattcagctgatgctcgggcattttcgttcatcaagattcttaacctcatgcaagacatgagctatcctccacaaatgttatttgtggaaaacgtattggatttgaggtgtctgatacacatgaccagttgctggaggtcctttcaagtctcaattttaacacgcaagaattcatcctaagccccttacagtttggtgttccatattctagacctcgctacttctgtttggcgaaacgtgaacctgtgcggtttcga

SEQ ID NO: 34804 - DNA, 257 bp, Zea mays
tcaagtaccccatcttcctcaccatgtgccacatgtccgcatgcgccctgctctcctacgccgccatcgcctggctgcgcgtcgtgcccatgcagctcgtgcgctcccgcgtccagctcgccaagatcgccgcgctcagcctcgtcttctgcggctccgtcgtctccgggaacgtctcgctgcgctacctccccgtctccttcaaccaggccgtcggcgccaccacgcccttctttaccgccgtcttcgcgtacatc

SEQ ID NO: 34805 - DNA, 264 bp, Zea mays
cggttctgacaccgtcacctttatgttcgagtcgcccaagcaagataagattgcggatttcgagatgaaactgatggatattgatagcgagcacctcggaatcccggattccgagtaccaggccatcgtccgcatgccttcttctgagtttatgaggatctgcaaggaccttagcagcatcggagacactgtcgttatctcggtaaccaaggagggcgtgaagttctccacatctggagaaattgggagtgcgaacattgtttg

SEQ ID NO: 34806 - DNA, 264 bp, Zea mays
gggagagattagagggagcgccctgcccaagcaaagagaaaccgcggcgcgagaagagggaggaagggcagacgggcgagcaggatgagagagatcatcagcatccacatcggccaggccgggatccaggtcggcaacgcctgctgggagctctactgcctcgagcacggcatcgagcccgatggcaccatgcccagtgataccacggttggcgtcgcacatgatgccttcaacacgttcttcagcgagaccggttctggcaag

SEQ ID NO: 34807 - DNA, 261 bp, Zea mays
atctttaaggatgatgttgttattcagtttgtgaatcctaaagtgcaagcttcaattggtgctaatacatgggtggtcagtggaactccacagacaaagaagctgcaagatctgcttccgtccattatcaaccagctcggccctgacaacctagacaacctgcggaggcttgcggacaattccagaagcaggcccctggtgcttcaggtgcagaggctggcgccagcgctggtgctgctcaggacgatgacgatgacgttc

SEQ ID NO: 34808 - DNA, 258 bp, Zea mays
cggctttcagaaaaagcagctgagatgctgcagaacaaatatatcgagattagacagaaaatgaggcagcaagctcacgagacagggagggccgcagctatacccatcacggtgaggcagctagaagccatcatccgtttgagtgaatctcttgcaaagatgagattgacaagtgtggctacaccggagcatgtcgaagaggcattcagactgttcaatgtctccaccgttgatgctgcaagatccggaatcaatgag

SEQ ID NO: 34809 - DNA, 260 bp, Zea mays
gcactaagccaaataaagatgttgacttccatatcgacagttgatgatctaaattaccctgaaaagacagagacctattatgtagtcaacgttccatacatattttctgcttgttggaaggttgtgaagcccttattgcaggagaggacaaaaaagaaggtcaaagttttgactggctgcgggagagatgaacttctgaagatcatggactactcatcactcccccatttctgccgccgggaggcctccggatcatcgaa

SEQ ID NO: 34810 - DNA, 259 bp, Zea mays
cccacgcgtccggttcgcatgactgatactcgtgcagatgaagccgagcgtggcatcacaatcaaatctactggtatctctctttattatgagatgactgatgagtcactgaagaactacaagggtgagagggatggtaaccaatacttgatcaaccttattgactcacccgggcacgtcgatttttcttcggaagtcacagctgctcttcgcatcaccgatggtgctctggttgtggttgattgtattgaaggtgtct

SEQ ID NO: 34811 - DNA, 259 bp, Zea mays
acaagtttcgcttctcgtcgcgacgactgggcgagaccgccgccgccgccgccgcctgagttctttagaaatggctgatggtgaggacatccagcctcttgtctgcgacaatggcactggaatggtcaaggctggttttgctggcgacgatgcaccaagggctgttttccctagtattgttggccgtcctcgccacactggtgttatggtagggatgggacagaaggatgcgtatgttggcgacgaggcacagtccaag

SEQ ID NO: 34812 - DNA, 277 bp, Zea mays
tgacaaaattgcaatgcctgttgatgtgaatgatcgtggggcaatgctaggccttgtgaagagctccattggtacaaaattcactggccagtttggtgatcttattgctgaccttgctattgatgctacaacaacagcaggcgttgaccttggtcagggtatgcgtgaagttgatatcaagaaatacattaaagttgaaaaggttcctggtggtcagttagaggattctagagtccttaaaggagttatgatcaataaggatgttgtggctcctgga

SEQ ID NO: 34813 - DNA, 276 bp, Zea mays
gaaatattcttcccgtcgaaagacggagagaggaaaagggacaagggcaaggcaagagagaggcgtcgtcgtttgatctgctgccggagtgcgaagaggaagaggaagaggagcgccggagttgtaaagatgttcctggtggactggttctatggggtgctggcatcgcttgggctgtggcagaaggaggctaagatcctcttccttggcctcgacaacgccggcaagaccaccctcctccacatgctgaaggacgagcggctcgtacagcaccag

SEQ ID NO: 34814 - DNA, 275 bp, Zea mays
ctccctgatcctcctttggcttcgcggttcatggcgatgtggagggccgccgctagcagctggtcgaccgggcgctcggctcaagggccgcgcacacgtctacaggcagcaaaaagatagtcggggtgttctacaaggccggggagtatgccgacaagaaccccaacttcgtcggctgcgtcgagggtgcactcggcatccgcggctggctcgagtcgcagggccatcagtacattgtcaccgatgacaaggaaggccccaactgtgaactggag

SEQ ID NO: 34815 - DNA, 275 bp, Zea mays
cttcaaatatgaggagaactccaaaaaagcagtacaatgcttgaacaatatggtgactgatgcactgattcatgctgaagagtgccttcagtacatgtcagccttgaaggatcatgccattttccgtttttgtgcaataccccagataatggcaattggaacatgtgctctttgctacaataacgtgcatgtctttagaggagttgtgaagatgagacgtggtctcacggcacgaataattgacgagacaaactcaatgacagatgtctatactg

SEQ ID NO: 34816 - DNA, 272 bp, Zea mays
catgctttatgcctgtagtattctctacaaaactcgccttcctctagtcctgacattcaacaaggttgatgttgccaagcatgagtttgccattgaatggatgcaggactttgaggcatttcagacagctgtggaatctgacaaatcatactccgctacatatacccgaagcctctctctggttcttgacgaattctacaataatttgcgctctgttggagtatctgcgatttctggttctggagtcaatacattttttgaagctatagaaa

SEQ ID NO: 34817 - DNA, 248 bp, Zea mays
catccgttccccttcccttccctcctctcgcgcgccggctccacgcagatccaggagatatgcctcgctatgatgaccgctatggaggcacgcgcttgtatgttggcagattggccactcgtactcgttcccgcgatttagaacatctgtttggcagatatggaagaatacgagaagtggagttgaagcgtgactatgcatttattgtacgctaagtttacctccctcagttcaattcagtatccaat

SEQ ID NO: 34818 - DNA, 233 bp, Zea mays
gacgaggagctggtcgattactacctgaggaacaaggtggcgtccaacaagatcgaccttgacgtcataaaagacgtcgatctgtacaaaattgagccctgggatctccaagagaagtgcaagatcgggacggaggagcagaacgagtggtacttcttcagccacaaggaccagaagtaaccgacgggcaccggaccaaccgggggaccacgccggattctggaaagcgacgg

SEQ ID NO: 34819 - DNA, 270 bp, Zea mays
gggacccggcctcttctccgacatcggtgggaaggaaggatctactcattaaggactacacctacgaccagaagctgtccatctccaccgccagcgcctctggagtggatacctgaccaggacaagagatagagtctagttcggtcctttaagcgaatcagaatccgttcgtcggagaggccatgggctcggcgcaggatccgttctacatcgtccgggaggagatccaggagtcgattgataaattgcaaagtaccttccaccgctggg

SEQ ID NO: 34820 - DNA, 267 bp, Zea mays
gatttttgtcggaggcgttgcttgggagacaactgaagaatcattctccaagcattttgagaagtatggggcaataactgattctgtaattatgaaggacaagcatactaagatgcctcgtggatttggatttgttacattttctgatccatctgttatagacaaggttttggaggatgatcacgttatagatggcagaacggttgaagttaagaggactgtcccgagggaagagatgatcaccaaagacggccctaagacaagaaa

SEQ ID NO: 34821 - DNA, 264 bp, Zea mays
cttcgtatctttttagcgagtacttgtgtagtacgccagacaagaaattatctgaaggcgtctaccttggaaggaataagcggaaatattcaaataatgatgaaccttcagattctttgaaggcaatggatggtatcaatgttgtgaatggtcttgaatgcaagatatcctgcaagacctcgaaagtttcatatgtccttgatactgaagatttcttgttccggcttcggaagagaagggaaattttgcggggcgggaatgtgc

SEQ ID NO: 34822 - DNA, 251 bp, Zea mays
caggacgtgcccaatggcgtccagggggagcatgtggtggcagggtggccgagatggctcacagaggtggcggcagaggcggttcgtgggtggcaacctcggagggctgagtctttcgagaagctggacaagataggacaatgtacatatagcagcgtttataaagcacgtgatcttgagaatggaaaaattgtcgctctgaagaaagttcggtttgccaatatggaccctgagagtgtccgatttatggc

SEQ ID NO: 34823 - DNA, 262 bp, Zea mays
gccattgggagaagaagctgagatcaaaggtactgcacggtgggggatcggtgagctcagacaggttgatggtgcctgagtatgtgtttgcactgtccgagaagcccgtgataacctttgcagggcattcagaggatgtgcttgatctcagctggtccaaatctcagtatttgctttcatcatcaatggataaaaccgtacggttgtggcacatgtcaagcacttattgtttgaaaaccttctcacacactgactatgtgac

SEQ ID NO: 34824 - DNA, 257 bp, Zea mays
tttccccttccctccctccctctccccgcgggccgccagaggcaatttcgccctcgattcgaccccgattcgtccgcccgcgaccgggattccctccgccaagcgcggatctgaacgctgcgctccgtgtcgccgctcgaatccgccatgaagggggccaaatccaagggcgccgccaaggccgatgccaagctggcggtgaagagcaagggggcggagaagcccgccaagggcaggaaagggaaggccggcaagga

SEQ ID NO: 34825 - DNA, 315 bp, Zea mays
ggcagctatggttctgaaagtgatcaagagattgccaaatccatgctttctgactgcaggacaaaagtagggattaacgatcatcgagtgcttgatgttattgcctctgcactttctaatttcattgagatgggcaaggatgtaatagtgaaggagctgactgagttgttcacgcctgaagagatgcctctgtttgggtcgaattcagcacttgactgggccaacttcaatgcacaagcattttctgatgaatccctttcttttgatgaggaatgttcaagaacctcttcagtagattgtggcttgcacgagtca

SEQ ID NO: 34826 - DNA, 313 bp, Zea mays
ggggagcagcgagatcgtgcgcgcctccgagatctccacgaagttgtggtaacatggggctcaccttcacgaagctcttcagccggctcttctccaagaaagagatgaggatccttatggttggtctcgatgcagctggtaagaccaccatcctctacaagctcaagctcggagaaatcgtgaccaccatccctacaatcgggtttaatgtggagactgttgaatacaagaacattagcttcactgtctgggatgttggaggtcaggacaagatcaggccattgtggaggcactatttccagaacacccaagg

SEQ ID NO: 34827 - DNA, 310 bp, Zea mays
acagcctccttccctcgatctattcctcatcttgtcctccctttgctaaaaataacgaggcagaggcatcttcgttttgacgtgcgcttcctcttcctcgctcgctctcggtcgcagtgatggctgatgtcgacgaggaccgttgcttcattgggaacctgtcctggtcaacgactgatgaaagcctcaaggatgcgttcagcaaattcggcaacctcactgaggcaaaggtggttcttgacaaattttcaggccgttctcgtggtttcggctttgtaacttttgatgagaagcaagccatggaagatgc

SEQ ID NO: 34828 - DNA, 314 bp, Zea mays
caactaattggaacccaaagtttgaaatcatttatcggagaagacaagctgaaggaatttattaacttcactcttcattacattgctgacttggatatcccaattaaaaggggtacattcatagagttccgaagtggaatgattaatgtatctcctataggaagaaactgtagccaagaagaacgggatgaatttgagaagtacgataaggtgcataacatccgacctaaaatggtgtcagtgcttcgtgaaaagtttgcacacatgaacttgacattttctatcggagggcagattagttttgatgtatttcc

SEQ ID NO: 34829 - DNA, 299 bp, Zea mays
ctactatggatcacatgtctttcattggtactttacacagggttttccatccatgatttggacattcttaccatttgcattgtgcggcattgtaaagtctcaggaatggaggctttcaggtctaattgcttgggtattaggggtttacagcattcttggacataaagaattcaggtttgttcttccagtgctacctttagcattgatgttctcaggttactgcttagcttccatgtcacggtccaagggcaaaaatcagcataggaaagatagtctttcaaggatgcaaccttttgtta

SEQ ID NO: 34830 - DNA, 311 bp, Zea mays
tccgtcgcatcccatcccactaccacccatctcgtcgtccgtcgattcgatccggttcttccaacccatgggcagtgatggcgacgaagagtagcgtgtgcaccctcggcgaggcggatcttaatgggaagaaggtgttcgtgcgcgccgacctcaacgtcccgctcgacgatgcccagaagatcaccgacgacacccgcatccgcgcctccgtccccagcatcaagttcctcctcgacaagggcggcaatgtcatcctcagcagccacctgggtcgtccaaaaggtgtcacccaaagtacagcttggagc

SEQ ID NO: 34831 - DNA, 308 bp, Zea mays
gtcaagctatgcaacaaatgctttaaatcaggccacatcgccgttgactgcaccaacgaacgggcctgcaacaactgccgtcagccagggcacatagctctggagtgcaagaacgatccggtctgcaacctgtgcaatgtctccggccacgtcgcacgcgtctgcccaaagacgactctggcttcagtgatacagggcggcccgttccgagatatcctgtgccgcatctgcggtcagccggggcacatcagccgcaactgcatggcgaccatcatctgcgacacatgccgtgggacggcggacatgtc

SEQ ID NO: 34832 - DNA, 300 bp, Zea mays
gagtaactcctgctagaattgcttgtcttgatttgaaccttcagaagacaaaaatgcaacttggtgtccaagttcttgtaactgatccaagggaacttgagaagattcgtcagagagaatctgacataacaaaggagcgaattgagaaaattctcaaggctggagctaatgttgtgttgaccaccaagggaattgacgatatgtccttgaagtacttgtgttgaggctggtgcgattgcagtaaggcgtgtgcgcaatgaagatttgcgacatgtggccagagccactggtgcaactatg

SEQ ID NO: 34833 - DNA, 305 bp, Zea mays
atggaatcgagcaatgcattgttgaagctcacaacaatctccaccctgggaaaatctatgtgaacaaaggtgacctccttgatgccggtgtgaatcgcagcccaagtgcagatcgaaataaccccgctgaagagagaggcaagtataagtacaatgttgataaagaaatgaccctcatcaagtttgtacatgacgagtctggtccgattgggagtttcaattggtttgcaactcatggaacatctatgagtcgtacaaatgctttgataagtggtgataacaaaggagcagccgcgcgtttcatg

SEQ ID NO: 34834 - DNA, 308 bp, Zea mays
gcccccaactacccccagcctcggaaggaaccttccagaagcgcaagactctaaggccgtcgccttcccattcttcctcgccgcgggggtcgcctgagatcacataaacaatggtgaaggctgttgctgtgcttggtagcagcgatggtgtcaagggcaccatctttttcacccaagagggagatggccctaccgctgtcaccggaagtgtctctggcctcaagcctggcctccatgggttccatgtacatgcacttggtgacaccaccaatggatgcatgtcaactggaccacactacaatcctgcg

SEQ ID NO: 34835 - DNA, 307 bp, Zea mays
gcaagttgccccgccgcgcagaggaagaagagagcagaggaggatggctcgtacgaagcagaccgcccgcaagtccacgggaggcaaggccccccgcaagcagctcgccaccaaggcggcgaggaagtcggcgccgacgaccggcggcgtgaagaagccccacaggtacaggcccggaaccgtggcgctgcgcgagatccgcaagtaccagaagagcacggagctgctgatccgcaagctggccttccagcgcctggtgcgcgagatcgcgcaggacttcaagacagaccttcggttccagagccac

SEQ ID NO: 34836 - DNA, 306 bp, Zea mays
gtcaagctatgcaacaaatgctttaaatcaggccacatcgccgttgactgcaccaacgaacgggcctgcaacaactgccgtcagccagggcacatagctcgggagtgcaagaacgatccggtctgcaacctgtgcaatgtctccggccacgtcgcacgcgtctgcccaaagacgactctggcttcagtgatacagggcggcccgttccgagatatcctgtgccgcatctgcggtcagccggggcacatcaggcgcaactgcattggcgacaacatctgcgacacattgccgttggaggggcacatg

SEQ ID NO: 34837 - DNA, 271 bp, Zea mays
agcaggtcggcgcctacgcgcgccgagaaggccaaggactccgtcggcatccgccccggcaagggtaagatgcgcaaccgccgctacattaaccgcaaggcccgctcgtcgtctacggcacagaaggctccaaggtcgtcaaggccttccgcaacctccccggcgtggacgtcgccaacgtcgagcgcctcaacctgctcgacctcgcccccggtggccacctcgggcgctttgtgatctggaccgagagcgcgttcaagaagctcgagga

SEQ ID NO: 34838 - DNA, 259 bp, Zea mays
ggacgtggcgagacgcgtgtggatctgccacctcgccgtctcgcacgttccttagcccaactccccagcgcctctccgcgccgcgatccagatccaggttgttcagcatgggtctggtgaaggaaggcgtcgacatggaggagggaaccctagagatcggcatggagtacaggactgtatctggtgtggccgggcctctggttatcttggataaagtaaagggcccaaagtaccaagaaactgtacacatccgacttgg

SEQ ID NO: 34839 - DNA, 271 bp, Zea mays
gccaaggattttgttgtttctggaacagcatcagaatctttgtatggtgcttgtgaatccatgtacaagccggacatgcaacctgatgaactcttcgaggctatatcccaagccctgaattcatcagtagaccgtgactgccttagcggatggggtggctatgtgttgattgtgacaccgactgaagtgagggagcatgtgattaagagcaggatggactagataatggccactagaattattatctggtttccaaggcttaagaccaatg

SEQ ID NO: 34840 - DNA, 269 bp, Zea mays
tcattcggcgccgcggcaccccctgctcgtcactcgcgatggcccggatcaaggtgcacgagctgcgcggaaagagcaagacggatctgcaagcgcactcaaggagcttaaatcggagctctccctcctacgcgtcgccaaggtcaccggcggggctcccaacaagctctccaaaatcaagattgtgcgcacctccatcgctcgcgtgctcaccgttatctcgcagaagcagaagtcggcgctgcgtgaggcgtacaagaagaagaagc

SEQ ID NO: 34841 - DNA, 266 bp, Zea mays
atcagattccctgagcgtggaagaagtgggagaactgtgttgacgataaacaatcttcaattcggatttgagaataagactttgttcaacaatgctaatctgatagtagagagaggtgaaaagatagctattattgggcccaatggttgtgggaagagcacactgcttaaacttatgttggggatggagaagccacaaggtggtgaggtgcttcttggggagcataatgtgttgccgaactattttgagcagaatcaggcagaagc

SEQ ID NO: 34842 - DNA, 261 bp, Zea mays
  unsure (1)..(261): unsure at all n locations
cggacgtggtgcagtnggatcgcggacgtgatcaccattgataactcgcggtccgaagcgaagctgctctccgtgttccgcgagggcgtcaagtacggcgcgggcatcggccccggtgtctacgacatccactcccccaggatcccgtcggctgaggatatcgccgaccgcatcgacaagatgctggcggtgctggacaccaacatcctctgtgtgaaccccgactgcggcctcaagacccgcaagtacacggaggtcgag

SEQ ID NO: 34843 - DNA, 268 bp, Zea mays
agcgccgagcctgccgagcgctgaaccgccgagcgccgcctgcgtgacggcatcacgagcatcaacaacaccgcctgcggtggcaacaacgccgcgtcggctatggcgccgccaccggccaaacctgcactgcacgagccgccgcagctgcccaggagcgcactgcagcgaacaagacttcagagaagcggcagagagttccttccgcatacaaccgtttcatcaaagatgagatccagcgcatcaaggccagcaatcccgacatcac

SEQ ID NO: 34844 - DNA, 263 bp, Zea mays
cccatctgaaaactttctacaaggcggtggcaagcctccgtctcttagtgtgcagtctgctggtcacaccttgcatgtctttgtcaacggacaacttcaaggttcttcgtatggtaccagggaggatcgaagaattaaatataatggcaatgttaaccttcgagctggtactaacaaaatcgcactactgagtgttgcttgcggattgccgaatgttggagtgcattatgagacgtggaaaccggcgtcggtggtcctgtcgt

SEQ ID NO: 34845 - DNA, 266 bp, Zea mays
cctccctctacctctctccctagggtttctaccacgcgcccgcttccgactagcagcgctacgtgcgcctaattccgaccgaggggacaacgagggttttgggacggacggagggagatttgaaggaggcagcggagggccggagaccagaccatgaggccggtgttctgcggcaacttcgaccacgacacccgccagtacgacctcgagcgcctcttctccaagtacgggcccatcagccggatcgacatgaagttaggctatgc

SEQ ID NO: 34846 - DNA, 267 bp, Zea mays
ggctaatttttctcttcaagtggatacccggggagaaggatgaacggcctgttgtcagagatcctaacccaaaccttttctttgcgcaccaagtcatcactaatgcatgtgctactcaagctattctctcagttctcatgaatcgccctgaaattgacattggcccagaattatctcaattgaaggaattcacaggagcttttacaccagatctgaagggcttggctattagcaacagcgaatctatccggacagctcataacagct

SEQ ID NO: 34847 - DNA, 267 bp, Zea mays
gcaaaaaagtcagcaactttgtaatgggtggctggtggagtggcagctcaacattgtccttgaataagaactttgtacagcaggttgaggagaagttttcaaaagatacagatataatgctagtgtgccagaaaggacttagatcacttgccgcctgtgaacagctgtacaatgctggttttgaaaatttgttctgggtacaaggaggccttgaagctgccgaagaggaggattttgaaagggaaggttcccagcctttcaagcttg

SEQ ID NO: 34848 - DNA, 286 bp, Zea mays
caagtctggagggaactctattgctatggatgcgaatgctacagcgcagttgcgcaaactggggcttgccagcacggacgatagcccaaagtttctgtggcccaaggaacatgaaagcgtggtgaaggctatctatactggctcagaatacattactacagctactggtgatggggactttggtcttgtgctggaaagtacaagtttctatgctgaacaaggaggccagatatttgacactgggagcattgaggggtcatttggaactttcaatgtgaacaacgtc

SEQ ID NO: 34849 - DNA, 259 bp, Zea mays
cagtgccaaaacatggaaggaggtctgttttgcttgtgttgacgccgaggagttccgtcttgcacaaatttgtggtctcaatattattattcaggttgatgacttggaagaagtcagtgagtactaccagaatagaggatgcttcagtgaacttattgctctcatggagagtggtcttggacttgaacgtgcacacatgggcatcttcacagaattgggagttctgtatgctagataccgctctgagaagcttatggag

SEQ ID NO: 34850 - DNA, 257 bp, Zea mays
cgcatgttcatggagcaggcgacaggaagtcaccagagacgattctggatcatgatcgtattatttggctcggggacctgaactaccggatagctctttcgtatcgctcagtgaaggctttagttgagatgcacagctggaaacagttgctggagaaggaccagcttcgcatagagcagagatttggtcgggtctttgcaggctggaaagaaggaaggatttactttcctcccacctacaagtactcatacaactcc

SEQ ID NO: 34851 - DNA, 262 bp, Zea mays
gagagattggagggaggcccctgcccaaggcaagagaaaccgcggcgcgcggagacggaggaagggcagacgcagacgggcgaacaagatgagggagatcatcagcatccacatcggccaggccgggatccaggtcggcaacgcctgctgggagctctactgcctcgagcacggcatcgagcacgatggcaccatgcccagtgattcctcggttggcgtcgcacatgatgccttcaacacgttcttcagcgagactggttcc

SEQ ID NO: 34852 - DNA, 261 bp, Zea mays
cccacgcgtccggtcaagggctgggagaggctttacccttgaggagttgaaggctgcgggcattccaaaaaggcttgctccaaccattggcatttctgtggatcaccgccgcaagaacaaatcccttgaggggctgcaggccaatgtccagaggcttaagacatacaaggccaagctggttatcttcccaaggcgtgctcgcaaggtcaaggctggtgactctactctggaggagcttaccactgctacccaggtacaggg

SEQ ID NO: 34853 - DNA, 257 bp, Zea mays
ggaccgtggtgccgaactgctcgcggagaggcagaagcttggcccgttcgtcccagtgaagccgcatagtgtacgcttgctgaatcaagagttcaccagcttatagctggcttggaggatcccagggcagctcctctggacttattgtcaagaaaacaatgaaggtcgatatcccagtagacagatatccaacattcaatttcgttggccgcatccttggtccaagaggaaattccttgaagcgggtggaggcaaat

SEQ ID NO: 34854 - DNA, 264 bp, Zea mays
cccacgcgtccgcaaagactgatgagtttgtcatccacagtccaactctgacctccagcaaatggtggcctggtggcttggggaaagcttccactcatgcagtggtgtatgctcggctgataactgaaggaaaggactatggtatacatggtttcattgtgcaactgcgaacttgagaggatcactcccctcttcctggtattactctgggtgatattggtggaaaatttggcagtggtgcatataacagtatggacaatggtg

SEQ ID NO: 34855 - DNA, 291 bp, Zea mays
cccacgcgtccgagcgtgtctttggtgaaggttttgtgagcactggtggaatcgagacaacaaaggaatttgtgggcatgctcgatcttaaaccgggccagaaagtacttgatgtcggatgtggaattggaggcggcgacttttacatggctgcaaactatgatgtccatgttcttggtattgatctttcggtgaacatggtttcatttgcaattgaacgtgccattggacgcaagtgctctgttgaatttgaagttgctgattgcaccacaaaggattacccagaaaata

SEQ ID NO: 34856 - DNA, 287 bp, Zea mays
gccttgggaaagttgcagtgtcatttacgcacaccatcaaggctatggagcctttcttttctgttattctttctgcaattttccttggcgagttacctactatttgggtagtatcatctcttcttccaattgttggtggtgttgcattggcatctcttactgaggcatcctttaactgggctggcttttggagtgcaatggcttcaaatgttacctttcaatcccgaaatgtattgagcaagaagctcatggttaagaaagaggaatccttggacaaccttaatctc

SEQ ID NO: 34857 - DNA, 285 bp, Zea mays
cggacgcgtggcggacgcgtgggccgccgccgaatccgagactctgatctcgggttcaccgcagcgcacagagcacccacgactcccgtcccgatccgcgctctcctctacgacgcttcagtcatggcaggaatggcacccgagggttctcagtttgatgctaagcactatgattctaaaatgcaggagctgctgagcactggtgagactgaggagttcttcacttcatatgatgaagtttttgaaagttttgatgacatgggccttcaagagaatcttttgaga

SEQ ID NO: 34858 - DNA, 286 bp, Zea mays
cagtgaactccaaaagatgtccaaggaggttgaggacagtgagcttgctgatgttgctgcagttagtgcgggaaataactatgaaattgggaatatgatagctgaggctatgaaaaaggttgggcggcagggagtggtcacacttgaagaaggaaagagtgctgaaaataacctctattctgttgagggaatgcagtttgaccgtggctatatttctccctactttgtgactgacagtgaaaaaatgacagtcgagtatgagaactgcaagcttctccttgtggac

SEQ ID NO: 34859 - DNA, 286 bp, Zea mays
catcgggaagactctcgtatccaggacacagggtaccaggattgcttctgagggtctgaagcacagagtctttgaggtttgcctagctgatcttcagggcgacgaggatcaagcttacaggaaaatcaggctccgtgctgaagatgtgcagggcaggaatgtgctcacaaacttttggggcatggattttaccactgataaactcagatccctagtgaagaagtggcagacattaatcgaagcccatgttgatgtcaagacaaccgacaactacatgttgcgtttg

SEQ ID NO: 34860 - DNA, 288 bp, Zea mays
cccacgcgtccggagaatctggtgcacataataactggttttgcggaaacaggccaagctcttgtatcatcagtagacagaataatatttgtgggatcaccaggtgttggaaaaatgatcatgaaaagggcgtcggagactctaatacctgtaactctggagcttggtggcaaagaatcatttattgtgtgtgaagatgtagatttacccagtgttgttcaagttgctactagagctgctctgcaatctagtgggcagaattgcgctggtgctgaaagattttatgtt

SEQ ID NO: 34861 - DNA, 285 bp, Zea mays
agggtattgaaggttatgaggatgaaaggtcagtgcttatgtcccagaggaaattggagaaacgctttggtcagtctcctattttcattgcatccacctttatgacacaaggtggcataccaccttcaacaaacccagcttctctactaaaggaagctatccatgtcatcggttgtggatatgaggacaaaactgaatggggaaaagagattggctggatctatggttcagtaacagaggatactctgactgggtttaaaatgcagcaaggggctggcaatcaat

SEQ ID NO: 34862 - DNA, 274 bp, Zea mays
ccctcgcacactcgctatacactgctctgctgcagcaagagggaagaggctagcgcctccctagctctcgttgtcagcaatggccaccaccgccgcgtccagcctcctcaagtcctccttcgcgggctcccggctcccttcggccacgcgcaccaccgccccgtcgtccgtggccgtggccaccccgcgcgccggcggcagccccatccgcgcgtccatctcctcctccgccagcccgccctacgacctgacgtccttccggttcagccccatc

SEQ ID NO: 34863 - DNA, 231 bp, Zea mays
gcctcgggctcagcaacaacctgctggggtggatcctcctgggggttttcggcctcatctggtccctctacaccatctacacctctgacctcgacgaggacgaggagtccggtggcctctcgctctagatccacctcctctcctgttaatgatctgaatgtaaacatggtggtggtcatcggtgtaaatttagacatggctatttgcatctaagatccatcctctcctgtt

SEQ ID NO: 34864 - DNA, 280 bp, Zea mays
aaaggattaaatataccattgagaccttcaccaagggcatccctgatgcacggacttacttgaatactcttcaacagctcagaataaagagtggtcttatagatcatcttggaattgagcctttgatgatggaagctcttgagaagattgagaaggacattaagaaaccacttttgaggagcgacaagaagaacatggccaccctcttggcagagtttgacaagattaacaaaaagcttggctttcggaaggaggatcttcccaagatcgaggaagagct

SEQ ID NO: 34865 - DNA, 284 bp, Zea mays
caaaattcttgccgcaaaatatgcacgcgagaacaatgttccttatcttggcatttgcttgggaatgcaaattgcagtgattgagtttgcccgttcggtgatgaaactacgaggtgccaatagcacggaattcgatccagctacaacatcaccctgtgtcatcttcatgccagagggctcaaaaacccagatgggagctacaatgaggcttggatcgaggagaacctatttccatgtcagtggctgcaaatctgcaaagctgtatgccaatgccagctctgtag

SEQ ID NO: 34866 - DNA, 276 bp, Zea mays
cgcaagcaaatcctcctatctccaagcctccaatctgtgaacggtgaaccccaatcgaatgacgccgacggcgagcctcctcctcccggctcccccattcgtctctatctccgatgtgcgccgcctccagctccccccgcgcggcggccaccggcctcgcccctgctggaagggcttggagtgcggctccgtacagacgcggatggtctcttctttcgttgggagcagaacacgccgcagaaacgttatatgtgcttccctgttcggagttggagc

SEQ ID NO: 34867 - DNA, 278 bp, Zea mays
cgcagagtcttcttgtgctgcccttgttgttgcgtctatttcatctttcggaatcgaccatgatttcactgggatgtgctacccactccttgttagctctgttggtatcattgtctgcttgatcaccaccctttttgctactgatttctttgaagtcaaggctgtgaaagaaattgagcctgcacttaagaagcagctcatcatctccaccgtcctgatgacttttggtattgctctaatcagctggttggcgcttccagctaagttcaccatctaca

SEQ ID NO: 34868 - DNA, 276 bp, Zea mays
cccacgcgtccgcttgaagaagctcgtcagcttgggcataattatataggatctgaacacttactccttgggctacttcgtgagggtgaaggtgttgctgctcgtgtgcttgaaagccttggtgctgatccaaacaacatccgtacccaggtcataagaatggttggggaaagcacagaagctgttggggctggagttggtggaggaagcagtggccagaagatgcccacacttgaagaatacggtactaatttgacgaaattagcggaagatggc

SEQ ID NO: 34869 - DNA, 269 bp, Zea mays
tgggatccttactttaaggattgcatcggggccattgacggcacacatgttcgagcctctgttcctaaggaaatggaggctacattccgtggtaggaagagtcaccctactcaaaatgtaatggcagcagtagattttgatctaaggttcacttttgtaatggccggatgggaggggacagcccatgatgccctcattttaagagatgctttagaacgagaaaatggtcttcgtgtccctgaaggcaaattctacctagttgatgcggg

SEQ ID NO: 34870 - DNA, 277 bp, Zea mays
cggacgcgtggaactttcttctccgtcacctgactcacacctccactcacctccggtccaccaacctcgtgccggccatggcggctgcggcggcgcagaagctcctcgaggcgagcacgaagatcatcggcgtcgggcgcaactacatcgcccacgccgaggagctcggcaacccgatccccaaggagcccgtactattcctgaagccgacctcgtcgttcctccacgctggcgtggccaccgccgccgtcgagatcccggagccgctcgaatcgct

SEQ ID NO: 34871 - DNA, 276 bp, Zea mays
aatgaaatggctgtaagaatagaagataaagatgagaggatatcaagcctggcgaaactcttctttcacgagttgtcaaagaaaggaagcaacccaatttataatcttcttccggatatcttgggtagactatgcaatcaacacctcaaagaagaaacattttgcaatattatgcagttcttaatcaactcaattaagaaggacaaacaaatggaagctcttgtggataagctgtgcaataggtttgctggagtaaatgatgtcagacagtgggag

SEQ ID NO: 34872 - DNA, 263 bp, Zea mays
attctccaaacaatggatggaaggaggaggaaaatgcatttcaaagaagacgtaagtgggacaagaggatgctagaatttgttcaacacgtggataaacccttaatctggtgtggggacttgaatgtcagtcatgaagaaatcgacgtcagccatcctgatttctttagcagcgctaagctgaatggatacaccccacccaataaagaggactgtggacagccaggattcaccccagcagagagacggcgttttggcaacata

SEQ ID NO: 34873 - DNA, 293 bp, Zea mays
cggacgctgggcacagccacagcatcacgtccactcattagcaaggtagcccgtgctgcacctgcctgccagccgcagctgtcctgcctttgccttcccatagcatagccatggacatttggaagtccaaggtgttgcccaagatcaagctcgtcttcgtcaagagcgccggcaagaaggccgccgccgccgccgagctcgtcaagtccttcgacgagtccaaggaggggatcgatggcgagttccagaagaagaaggctgatctccagcccaaggtcgtcgagatctacgag

SEQ ID NO: 34874 - DNA, 292 bp, Zea mays
cccggggtcgtcgacccctccacgccgctgctcaaggacgagctcgacatcgtaatcccgacgatccgcaacctcgacttcctggagatgtggcggcccttcttccagccctaccacctcatcatcgtgcaggacggcgacccgaccaagaccatcaaggtgcccgagggcttcgactacgagctctacaaccgcaacgacatcaaccgcatcctcgggcccaaggcctcctgcatctcattcaaggactccgcctgccgctgcttcggctacatggtctccaagaagaagt

SEQ ID NO: 34875 - DNA, 286 bp, Zea mays
  unsure (1)..(286): unsure at all n locations
acgacgtgatcgtgcttggcacgggctcaaggagtgcatcctcagtggtctcctttccgtcgacggcctcaaggttttgcatatggacagaaacgactactatggaggagattccacctcgctcaaccttaatcagctctggaagaggtttagaggggaagacaagcccccagcacatctaggtgcaagcagagactacaatgtggacatggtgccaaagtttatgatggcaaatgggacattggttcgaaccctcatccacactgatgtgancaagtacttgtca

SEQ ID NO: 34876 - DNA, 297 bp, Zea mays
caaaaccagaccaccaaacaagtgccagcgccctctcgcagtcgccgcaatggagagcaccttcatcatgatcaagcctgacggcgtccagaggggcctcattggtgagatcatcagccgttttgagaagaagggcttctacctcaaggccttgaagcttgtcaacgtggagaggtcgtttgccgagaagcactacgccgatctcgcctccaagcccttcttccagggcctcgtggactacatcatctctggccctgtggtggccatggtctgggagggcaagagcgtcgtcacaac

SEQ ID NO: 34877 - DNA, 280 bp, Zea mays
ggacgcgtggtgctagtgacggttgctctagatccgttcatcctggtggttttgtgaggtcgaaagccgcgatcgatattagcagatgctggacaagctgtgggacgacgtggtggccgggcctcgcccggagacgggcctcgagaagctccgcaaggccaccaccgctcgcccgctcgtcatcaacaaagacgcggacggcggcagctacaagcgggcgcagtcgacgccgtcgaccccgacgacgccggtgacgccgtcgtcgtcgacgacgccgcgc

SEQ ID NO: 34878 - DNA, 287 bp, Zea mays
cggacctcggcggacgcgtgggctcgagcgtctgtgccgacgtgtccgaggaccatccgaacgtcaacaagtggcagatcgagagctacggcgagcgcgagcaacgcagggccaaggtgcacctgaggtgcgcgcacgggcagtccatctccgcgatcagattcgcgagcttcgggacgcctgtgggcacctgcggcaacttccagcagggaggctgccactcggctagctctcacgctgtgctagagaagagatgcattgggctccagagatgcgtcgtcgccatc

SEQ ID NO: 34879 - DNA, 287 bp, Zea mays
gccaataagcagggaggttcagcttgtttctttccacactgtgtccaaagggtactggggagagtgtggacaacgtggtggatacttcgaaatgacaaatcttcctccaaagacagtagatgagatctacaaggttgcatcaatagtactgagtccgaatgttcccgggcaaatctttatgggagtgatggttaaccctcctaaacctggagatatctcatacccgaagttcactgccgaaagcaagtccatcctcgaatctttgaggaggagagcgcgcatgatga

SEQ ID NO: 34880 - DNA, 286 bp, Zea mays
caacacattgccaaggagggccaggaagaagttgcagaagattggcttgataaattcagcccttgggagattcccaggcatgatgtggtgttccctgtcagattttttggccatgttgagattttgcctgatggctctcggaaattggtcggaggagaagtcctgaaggctttagcatatgatgtgccaatccctggatacaagacaaaaaatgcaatcagtcttcgtctttgggaagcaaaagctactgctgaagatttcaacttatttcaattcaatgatggtc

SEQ ID NO: 34881 - DNA, 288 bp, Zea mays
ggtgaagtcatgaaagaagatgtccagaggatccatgacaaggtgaaccgaatcttgaacgaagagtttgctaagagcaaagactacgttcccaacaagagggattggctctcagcttactggactggctttaagtcaccagagcaaatatcacgtgttcgcaacactggggtgaagcctgaaatactgaaacgtgtaggtcaggcaattactacactgcctgaaaacttcaaaccacacagagcagtgaagaagatttttgagctgcgtgcagctatgatagagagt

SEQ ID NO: 34882 - DNA, 287 bp, Zea mays
aaaagttgaagcctttggaagttacatacaagttcaatgattttgtttcccctttgctgacaagtagtgattttgatgcaaagccaatggttatgctcttaggtcaatattctactggtaaaacaacttttatcaagcatctgctaagaacaagttatccaggtgcccatatcggaccagagccaacaacagacagatttgtagttgtcatgtcaggatctgatgaaaggactattcctgggaatactattgctgttcaagctgacatgccttttagcggtcttaca

SEQ ID NO: 34883 - DNA, 288 bp, Zea mays
cctcagcaactcttctatggacaagcgccacctgctatgataccccctcagccaggatttggtttccagcaacaacttgttccaggcatgaggcctgggggtcctcatatgccaaattattttgttccagttgtccaacaccaacagggccaacagggtccacgcccaggtattaggcgtggagctggagcccagggtcagcaacctgtgccaccatttcagcagcagattgttccaagaggacggatgtaccgttacccaactggtcgcaacatgcctgaagctccg

SEQ ID NO: 34884 - DNA, 290 bp, Zea mays
cagagttcggcgacgactaccaggtatttgtcactgatctgtggactgaccacactccatggccattcaatcaactgcctaggagctatagttttttggtgaaacatggacccttgtggaagatgacatactatggtactgcaccgcgtgtagtccatcagcctcattttgctgcaacatccacatccatagcaagagaagtggcaaaaggtctaatgaagtaccaaccagatgtaattatcagtgtacaccctttaatggcacatgtccccctccgaattctaagatcg

SEQ ID NO: 34885 - DNA, 287 bp, Zea mays
cccacgcgtccgatataatataccatctgtttgatcaatttacagcatacattaagaacctcaaggaagagaagaagaaagaaagcgctgaagaagctgtgttcccttgtgttcttaagattatgccaaactgtgtcttcaacaagaaggacccaatcgttttgggtgttgatgtccttgaaggaatagccaaggtgggaactcctctctgcatacccagtaaagaatttattgatattgggaagattgcctcagttgaaatcaaccacaagcaagttgatatggct

SEQ ID NO: 34886 - DNA, 274 bp, Zea mays
  unsure (1)..(274): unsure at all n locations
gcgagcgagagcagcacacacgcagctagctaggagcagcagcagagcagcggcgatggcggcctccatgatctcctcgtcagctctggcggtggcgcctcagggcctgccgcccctcggccgccgcgcctcctccttcgccgtcgtctgctccaagaagaagatcaagaccgacaagccctacgggattgggggtggcctgaccgtcgacgtcgacgccaacgggagaaagggcaanggcaatggcgtaccagttcgtcgacgggtacggcgc

SEQ ID NO: 34887 - DNA, 279 bp, Zea mays
cacgacgccgagagatcacccgccccccgcatcgagtcggccccgtttgggattgtgaggtaaagcgtgatggcagcgccgccggcgagggctcgagccgactacgactacctaatcaaactgctcctcatcggagacagcggcgttggaaaaagttgcctcctgttacggttttcagatggatcattcaccactagcttcattaccactattggcattgacttcaagataagaactgttgagttggatggcaaaaggattaagttgcagatctgggat

SEQ ID NO: 34888 - DNA, 279 bp, Zea mays
cacaacccagtcgctcaaaaccctagagctctcgcctgctcgcctccgccgccggagcgagctccccatcttcatccgtcaaccatggcgacccagatcagcaagaagaagaagttcgtcagcgacggtgttttctacgccgagctcaatgagatgctgacgcgggagctggcggaggatggctactctggcgtggaggtgcgcgtcacgccgatgcgcacggagatcatcatccgcgccacgcgcacgcagaacgtgctcggcgagaagggccgcaga

SEQ ID NO: 34889 - DNA, 280 bp, Zea mays
ggagaagcttccggagcggccgggcgaggcggactgcgcctactacctccgcacgggcgcctgcggctacggggaacgctgccgctacaaccacccccgggatcggccagccccggttaatggcgttgggaagaccacaggtatggagtacccagagcgccctggacagccactctgtgagtactatgcaaagaatggcacatgcaaatttggttccaattgcaagtttgatcatcccagggaaagtggttttgtacctgtcgctttaaacaacagtgga

SEQ ID NO: 34890 - DNA, 281 bp, Zea mays
gtgtgaccaatgaagaagtccagaaggctgctgctgctctcaagggctctgaccaccgccgtgggaccaacgttagtgctagattggatgcccagcagaagaagcttaacctccccatccttcccaccactacaatcggttcgttcccacaaaccgttgagctcaggagggtccgccgtgagtacaaggcaaaaaagatctctgaggaggaatacgtcactgccatcaaggaggaaatcaacaaggtcgttaagcttcaagaagagcttgacattgatgtg

SEQ ID NO: 34891 - DNA, 272 bp, Zea mays
  unsure (1)..(272): unsure at all n locations
cgcactcccatcctctcgctcgccaggagaagcagccgccgttgctgctgccgcgtccacagaatggggggtttcgtgaagactcataagaccaatgcgtatttcaaacgtttccaagtgaaattcaagagaaggcgggctggcaagacagactacagggccaggataaggctgattaaccaagacaaaaacaagtacaacacacccaaatacagatttgttgtgcgatttaccaacaaggacatcactgcccanatcatatctgctagtat

SEQ ID NO: 34892 - DNA, 270 bp, Zea mays
gatctcggcgctagagtcagacatagaagagcgatctcaagaactgaagaataaggatgatgccatcatgaacctggagaaagccattgaagagaagtcaaaggctattacctctatgctggacgagattgcttccctccaggcaaaagggtctgtagctgccgaggagcaggctaacaaggccaatgccaaggttgttgagcttgagaagcaggttgacaagataaaaaaggatattgaagcacaaagtagccagaaagcagcactaga

SEQ ID NO: 34893 - DNA, 266 bp, Zea mays
  unsure (1)..(266): unsure at all n locations
agtttctggataaaggtgaaatcataatcagtactcctgaaaagtgggatgcattgtctcgccggtggaaacagcgaaagcacatccaacaggtcagcttattcatagttgatgaacttcatctacttggatctgataagggacatgttttggaagtcattgtatctaggatgaggcgtatttccagtcatattggcagtaacatacggatcgtagcactttcagcatcacttgctaatgctanagatcttggtgaatggattggt

SEQ ID NO: 34894 - DNA, 268 bp, Zea mays
cgagggcgtgtcgacgctggtggacgtgggctgcggcgtgggctccacgctgcacgccatcacttctcgtcacccgcacatctcctgtgtcaacttcgacctgccgcacgtcatctcctaagcgccgccgttccccggcgagcgccacgtttgcggggacatgttcgcgtccgtgcccgccggcgacgccatcctcatgaagtggatcctccacgactggagcgacgcgcactgcgccacgctgctcaagaactgctacgacgcgctg

SEQ ID NO: 34895 - DNA, 268 bp, Zea mays
gcagccgcagccgcagccgctgcttttcgttcgtcttcatcctacgcgagggcgaaacccacaaaccctctccctcccgtactccggcctacacatccaggggcgatgacgctgggtagctccggcgccggatcgagcgtcgtcgttccccgaaacttcaggctattagaggagctcgagcgtggagagaagggcattggtgatggaacagtgagctatggaatggatgatgccgatgacatctacatgcggtcatggactggtacca

SEQ ID NO: 34896 - DNA, 265 bp, Zea mays
aacacgcgtccgggacgcgtggcgccgccgaggagctgccggagagcgtcgactggagggagaagggcgccgtcgcgaccgtcaagaaccaggggcaatgcggaagttgctgggctttctctgcagtaagctcagtggaaagcgttaaccagatcgtcaccggtgagatggtgacactgtctgaacaggagctcgtagagtgctcgactgacggagggaacagcggctgcaacggcgggctcatggacgccgctttcgatttcat

SEQ ID NO: 34897 - DNA, 260 bp, Zea mays
agacgctgtgcgggcaggcgtacggcgcgcacaagcacggcatgctgggggtgtacctgcagcggtcgacggtgctgctgatggccaccgccgtgccgctggccgtggtgtacgccttctcggcgcgcatcctggtgctcctgggcgagtcggagcgcatctccagggccgccgccgtgttcgtgtacgggctcatcccgcagatcttcgcgtactggccaacttccccatccagaagttcctgcaggcgcagagcatcg

SEQ ID NO: 34898 - DNA, 262 bp, Zea mays
cggacgcgtgggatgtattgaatgaagttgagagaaacctgcaggatgccatgtccgttgcaaggaacaatttgaaaaatccaaaactccttcctggaggtggcgctacagagctgactgtatcagcaacactgaagcaaaagagttcttcagttgaaggtgtggaaaagtggccctatgaagctgctgctctagcatttgaggcaattccaaggactttggcccaaaattgcggtttgaatgttattaggataatgacaca

SEQ ID NO: 34899 - DNA, 263 bp, Zea mays
gaaatagttcagaacaaattcccgtcactgaaagcatttctgatcaagtataaagacaaagaagaagacttggtgacgataacctcgtctgaggagctaagctgggcaagcaatctggcagattcgcaagtgccaatccgattatatgttgtagaggttaatcatgttcaagagcttggtgtggatggggtcaggagacgtccttcctttgccacgttagagagaaatcgtgatatcatgttggatattgggaccattgggca

SEQ ID NO: 34900 - DNA, 262 bp, Zea mays
gcggaccatggtccctgtgtatctggtgctcataactctatagttactgctagggctggaaaggaccttgtttccagcttggtgtctggattattgacaattggccccgtttttgccgacaattgatgatgcagcccgatacttcaaagatgcatgtgataggggcctcacaccatacgagtttgttgaaggcatgaaaaagaagggaatccgtgtgcctgggattggtcacaggattaagagcagagacaacagggataag

SEQ ID NO: 34901 - DNA, 263 bp, Zea mays
acccacgcgtccgcggacggtgggcgaggaagctgcaagagcttatgatgctgaagcgcgcaggattcgtggcaagaaggccaaggttaactgtcctgatgcaccagcagttggtcagaagtgccgttctagttcagcttctgctaaagcactcaagtcatgtgttgaacagaagccaattgtcaaaacagatatgaacatccttgccaacacaaatgcacccttctaccaatctgttaactacgcatccaacaatccatttg

SEQ ID NO: 34902 - DNA, 263 bp, Zea mays
tttctcgtttagaacctctaaaatttcccccactcgccagtcgcagcagcacctgtagcagccatggacgccagcggagccggtagcaaggggaagaagggggcggccgggcgcaaggcaggcggccccaggaagaagtcggtgacgcggtccgtcaaggccgggctgcagttccccgtcggccggatcgggcgctacctcaagaagggccggtacgcgcagtcgtgggcactggcgcccccgtctacctcgccgacgttctg

SEQ ID NO: 34903 - DNA, 258 bp, Zea mays
cccacgcgtccgcgctgatgagatccacctcccagctcctccgccgccggagctactcctccgcatccgggcagcccgagcggaaggtggccatcctcggggcggcggggggcatcgggcagccgctgtcgctgctcatgaagctcaacccactcgtctcctccctctcgctctacgatatcgccggcaccccaggtgtcgcggccgacgtctcccacatcaactcccccgccctggtgaagggtttcatgggtgatg

SEQ ID NO: 34904 - DNA, 256 bp, Zea mays
ctgatgggcttgatgtcacattggcgttctttggcgatggtacctgtaataatggccagttctttgagtgtctgaacatggcacagctttggaagcttcctattgtgtttgttgtggagaataacctgtgggcaattggaatgtcacacattagggctacatcggacccagagatttggaagaaggggccagcatttggaatgcctggggtgcatgttgatggtatggatgtcctgaaggtcagggaggttgctaa

SEQ ID NO: 34905 - DNA, 255 bp, Zea mays
caaatattggtcggtttttccttaaagatggatgtatcatctggaccattttcattggtggctgaagaggactcagatgaattgagaaaagatggcgctgaagaaattttggaagatattactgaccttgtcaatgaaaccatctttgatgatggttcatataacatttcatttacaaaggaaggtatactctctgcaattgatgatgggaagtctgagggaggtccatctggacgacattgggtgcttgatccg

SEQ ID NO: 34906 - DNA, 259 bp, Zea mays
ctcctcgcatttccttgcaaccgattgccttcccccctcccaacccaagaccgatggcgcccaaggccgagaagaagcccgcggcgaagaagccggcggaggaggagcccgcggcggagaagacgaccgccgggaagaagcccaaggcggagaagcggatccccgctggcaagtccgccggcaaggagggcgccgagggcaagcgtggcaagaagaagggcaagaagagcgtggagacgtacaagatctacatcttcaa

SEQ ID NO: 34907 - DNA, 133 bp, Zea mays
gcaacagcatggacacgaagttctgctactacaacaactacaacatcaagcagccaaggcatttctgcaagagctgtcagaggtactggaccgcaggcggaagcatgagaaacatccccgttggtgctgggag

SEQ ID NO: 34908 - DNA, 283 bp, Zea mays
cggacgctggtccaggactcacctccccaaccgtttgcctccgtctcgcgtgacttcattcccaacggccggcggcgacctccacgtggtgccattcgccggcaacgagcacccgcccaccaggatccaggtttgtgctgcgagagcgcctatccattcaccatgattaatttcgtgctcctgatcagccgccagggcaaggtgaggctcaccaagtggtattctccttacacccagaaagagaggaccaaggtcattcgcgaactcagtggactcattctta

SEQ ID NO: 34909 - DNA, 282 bp, Zea mays
cttgggatttgcagatatggaaccctagatgaagctttggatctatgcgagaaaatgataaaacacaactgtttacctgatatccatacctacaccattcttctcagtggtttttgcaggaaaggtaagattttgcctgcgttagtcatcttgcagatgatgttggagaaaggagtagtccctgatactgttgcgtatacctgcttgctgaatgggttgatcaatgaaggccaagtgaaagctgcttcttacgttttccatgagatcatatgcaaggaaggc

SEQ ID NO: 34910 - DNA, 222 bp, Zea mays
cccacgcgtccgaaaataccttcatattcaacacatttgttctctgccaggtgttcaacgagttcaattcacgtaaaccagatgagctgaatatattcaagggcatttcagggaaccatctttttattggcatcatagtaataacagttatactccaggcgcttatcgttgagttcctcggcaagtttgcctcaacagtaaggctaatttggcagctgtagt

SEQ ID NO: 34911 - DNA, 268 bp, Zea mays
cggacgcgtggcggacgcgtgggcggacgcgtgggcgcaggtgctcgaggtggagatcgaggacatgggcgcgcgcctcaacgcgtatacctcccgcgagcagaccaccttttttgccgacgtgcaggcgcgccacgttccggcggcactcgacgtcctcagcgacatcctacagcacccgcgattccccgaaagggctatccagcgggagcgcggcgtcatcctccgtgagatggaggaagtgcaaggtatgatggaagaggtgata

SEQ ID NO: 34912 - DNA, 280 bp, Zea mays
cccacgcgtccgccgttcgcctcttctcctccctcctgccgggtccttaataaagagcagcagcgcaagaggttggtagagcgagcgagaagaaggcaatggcggcggagagcttcctgttcacctcggagtccgtgaacgaggggcacccagacaagctgtgcgaccaggtgtcggacgcggtgctggacgcctgcctggcgcaggaccccgacagcaaggtggcctgcgagacctgcaccaagacgaacatggtgatggtgttcggcgagatcaccac

SEQ ID NO: 34913 - DNA, 278 bp, Zea mays
cccacgcgtccgaggagatccatgcacatgttttaaggtgtggtattgaatatgaaggttatttgcccaatgcccttatcgacttgtatgtaaaatgtggccagacaggctatgcttgggcacagttctgtgcacatggtgcaaaggatgttgtgtcgtggaatatcatgattgcaggttttgttgctcatggtcatggggataccgctttatcgttcttcaatcaaatggtgaaaataggagaatgcccagatgaagttacatttgttgctctgcta

SEQ ID NO: 34914 - DNA, 276 bp, Zea mays
atcccatgaagtataacagtatattttcaggactaaatgttcttgtgaaagaagagggaccttcgtcactttggagaggctggggagggaaattttttggctatggtgttcagggtggctgcaggtttggcctctatgagtatttcaagaagaggtactctgacgtgcttgtagacagtaacaagagcaccatatacttccttagcagtgcctctgctcaaatcatagctgatgttggcctgtggccgtttgaatcggtgaaagtccgtgttcaga

SEQ ID NO: 34915 - DNA, 280 bp, Zea mays
ccccctcccaacccaagaccgatggcgcccaaggccgagaagaagcccgcggcgaagaagccggcggaggaggagcccgcggcggagaagacgaccgccgggaagaagcccaaggcggagaagcggatccccgctggcaagtccgccggcaaggagggcggcgagggcaagcgtggcaagaagaagggcaagaagagcgtggagacgtacaagatctacatcttcaaggtgctgaagcaggtgcacccggacatcggcatctcctccaaggccatgtcca

SEQ ID NO: 34916 - DNA, 220 bp, Zea mays
cacaagcgaggcatctcgtggaggagcgagagggaacacatcttcgggaagcaggtgttcccgaggaatttccagaaaggagctctgatcggaggaggcacgcttgatccaagaatacctctgagtgagcaagaagacctgatcgtgtggatgcggaccgcggctctgccgacgttccggaagctgtacggcaggatcgaggcggacctccgcgccggcg

SEQ ID NO: 34917 - DNA, 276 bp, Zea mays
aatagatctcctcgccgcctcacccgtctcctcctccgcagcttccccgcgatcccgaccatggagggcgacggtaccaaccttgatgcggcgatagagtcgctcctgaatgtcgagaagcagatgaggctggccggagatgtcgccggcactcggaaggccgtcatcgacatcgtcgagctctgctacaaggccggcgcgtggaagacgctaaacgaccagatcgttctcctatctaagaggagaggccagcttaagcaggctattactgctatg

SEQ ID NO: 34918 - DNA, 212 bp, Zea mays
cagtgctgacaagcgacgcaaaccgaggaagcagagggtgggctttgatgatgttcagggcatagatgaagccaaggaagagcttgttgagatagtgagctgtctgcatggttcactgaattataagaagcttggagcaaaattgcccaggggtgttctgcttgttggccctcctggaactgggaagactctgctagcaagggcagttgcag

SEQ ID NO: 34919 - DNA, 272 bp, Zea mays
ggttgtttctcttggggcagctgtgcagggcggggttttggcaggagatgtgaaagatgtcgttcttctggatgttactccattatctcttggtttggagacattgggtggagtgatgacaaagattatccccaggaataccacactgccaacctcaaaatcggaggtattctcaacagctgcagatggacagacgagcgttgagattaatgttctccagggagaaagagagtttgttagggacaacaagtcccttggaagcttccggttgg

SEQ ID NO: 34920 - DNA, 270 bp, Zea mays
cgtttgcctcttctccctcttgccggtcccgaataaagagcagcagcgcaagaggtcggtagagcgagaagaaggcaatggcggccgagagcttccttttcacctcggagtccgtgaacgaggggcaccccgacaagctgtgcgaccaggtgtcggacgccgtgcttgacgcatgcctcgcgcaggaccccgacagcaaagtggcctgcgagacctgcaccaagaccaacatggtgatggtgttcggcgagatcacgaccaaggcggacg

SEQ ID NO: 34921 - DNA, 255 bp, Zea mays
ctcgattcgaccccgattcgtccgcccgcgaccgggattccctccgccaagcgcggatctgaacgctgcgctccgtgtcgccgctcgaatccgccatgaagggggccaaatccaagggcgccgccaaggccgatgccaagctggcggtgaagagcaagggggcggagaagcccgccaagggcaggaaagggaaggccggcaaggaccccaacaagcctaagagggctcccagcgctttcttcgtgttcatggagg

SEQ ID NO: 34922 - DNA, 271 bp, Zea mays
actgtccagacggtacttgaacaaccctttgacgattgacttggttggcgatcaagatgaaaagcttgctgaaggaatcaaactctatgctatcccactcacagcaacatcaaagcgtaccgttcttagtgatctaatcacggtttatgcaaagggtgggaaaaccatagttttcactcgtacaaagaaagatgcagatgaggtatcattggcactgacaaacagtattgcttctgaggcacttcatggtgatatttcacagcatcagcgt

SEQ ID NO: 34923 - DNA, 232 bp, Zea mays
cctccttgttgttaacgtcgcctccaaatgtgggttcacggagaccaattacacgcagctgacggagctttatcagaagtacagggacaaagacttcgagatattggcattcccttgcaatcagttcttgcgacaggagccaggtactgatcagcagatacaagactttgcttgcaccagatttaaagctgaatacccagtttttcagaaggtgcgcgtaaacggaccagat

SEQ ID NO: 34924 - DNA, 275 bp, Zea mays
gtggatcctccgaatggaatcgggaaccaaggaaagcattactactctatgtggcagaccttatttgagatagacaccaaatatgtgccgatcaagcccattggtcgaggagcttatgggatagtttgttcatccattaatcgtgaaacaaatgagaaagtagcaataaagaagatacacaacgttttcgacaaccgtgtggatgcactacggaccttgcgggagctgaaactccttcgccatctccggcatgagaatgtcattgctttgaagga

SEQ ID NO: 34925 - DNA, 255 bp, Zea mays
gttcccttggttgtcaaatgggctgacactgaaaaggaaaggcaggctcgaaaagcacaaaaagctcaattccagtcttctaacatgttgaatgcaaatgctatgcagcagaattcagtgtttggaggtttacatatgggttatgtgccgcagtacaatggatttggctaccagccacaaggaacctacgggcttatgcaataccctcctctatctcctgtgcaaaatcaagctgccttccagaatatggttcag

SEQ ID NO: 34926 - DNA, 260 bp, Zea mays
cccgcaacctatcgacccaatctcgtccgacccggcgcgtcgtcccctccagatctccgtcgccctctccaggtagcagaaactgttctgctgcagtctgacaaagtggagggcttaggagcttctgcttcttttatgtctgaacaatctttgctttatttgggattgttgggagagtactctcgtgcaacgaggaaaaggcacaaggttccgtcccactgcatgcgtcaagagcctgtctggttttcttgttctgattt

SEQ ID NO: 34927 - DNA, 264 bp, Zea mays
agcagtagcaagagggatagagcaaggtcacacacacacacacaccactaggctaggttagccttttaatcgtcgtcgagaagcaagaagggcgcgcacgcaagcaggcaagcaagaagagagccgatcgaccgagagctagcacgcgatggcgatgtcttccaagatgatggtggcggcagctctgctggccttggccctggccgtgtcgaccgccgaggcgaggaacatcaagaccacgacgacggagaagaaggacgacgc

SEQ ID NO: 34928 - DNA, 266 bp, Zea mays
ggaccgtggcagaaaacccagccgccgccgcatcggcctcccaggtaagcaggagcgtccaccccagccgccgccatgaagcgcaacccccgcgtcacgagctcccgccggaagtgccgcaagcgcacttcacggccccgtcctccgtccgccgcgtgctcatgtccgcggcgctatcgacggagctccgccacaagtacaatgtgcgttccatcccgatccgcaaggacgacgaggtgcaggtcgtgcgcggcacctacaagggc

SEQ ID NO: 34929 - DNA, 267 bp, Zea mays
cgagcactcgccgccactcaccagcaaattcccaagccgccccttcccccatctctttcgcgccccatttgatcgattcctgatggcgcccaaggccgagaagaagcccgcggagaagaagccggcggaggagaaggccgagaagaagccaagggcggagaagcgcgtgccgagcaaggagggcggcgagaagaagggaaagaagaaggcgaagaagagcgtcgagacgtacaagatctacatcttcaaggtgctcaagcaggtgca

SEQ ID NO: 34930 - DNA, 268 bp, Zea mays
cgaccactccctcccggaagagctaacgaggtgacaccccaccgcgcccatgggtgacagccagtactccttctccctcaccaccttcagtccgtcggggaagctcgtgcagattgagcacgcgctcacggctgtcggatccgggcagacctcgctcgggatcaaagctgccaatggtgtagtcattgccactgagaagaagctgccttctattttagtggatgaaacatctgtgcaaaagattcaggcactaacacctaatattgga

SEQ ID NO: 34931 - DNA, 270 bp, Zea mays
cgacttgtcaaatataagagagctatgcgatcaagtgctggcactttctgagtacagagcccagctgtatgactatttaaaaagcaggatgaacactattgcaccaaatctgacagccctagtgggtgaattagttggtgctcgccttattgcacatggtggaagtttgctaaatttagccaagcagcctggtagcacaattcagatacttggtgcagagaaggctttattcagagctctaaagacaaagcattctactcctaagtatgg

SEQ ID NO: 34932 - DNA, 269 bp, Zea mays
cagaagcactttgatacatatgacaccagcggtcctcaaaatataagcccaaggattggactcccaaagataaggaaggaatggattgataggagggaaaagctgggtagtcctcggtacacacaaatgtattatgctaaacagggaattgtaacagaggagatgttatactgtgccagccgtgagaaccttagtcctgaatttgttcggacagaagttgcccgtggacgagccataattccttccaacaagaggcacctggaattgga

SEQ ID NO: 34933 - DNA, 273 bp, Zea mays
cactatcccaaaaccgtagcgccctcgcctgctcgccgccgccgtcgttgcgagctccccatcttcctccgtcaaccatggcgacccagatcagcaagaagaagaagttcgtcagcgacggcgtgttctacgccgagctcaatgagatgctgacgcgggagctcgcggaggacggctactccggcgtggaggtgcgcgtcacaccgatgcgcacggagatcatcatccgcgccacgcgcacgcagaacgtgctcggcgagaagggccgcagat

SEQ ID NO: 34934 - DNA, 260 bp, Zea mays
gtggtcgctggacctgcggtcactctcggttggtgcagccaagacagcgtttgatgactggatgcagactgtctcggagcgctgggcgcacagaaggacttgccagagtccttcagcgtgtacaccggatccagcacccacaagtttgcgcaggggctggcaagtgcttttgccgctcatctggaccaaatggcggtgccattccatgcgagcgaatctcaagccggcagcttcatcagttcaagagatgatctggtctc

SEQ ID NO: 34935 - DNA, 261 bp, Zea mays
ctccagcaaatgaaaatcttatggagcttctgatcatgattgatgcctgtaggagagcatctgctaagaatatcactgcagttatcccttattttggttatgcaagggctgacaggaagtcccagggcagggaatctatagctgcaaaacttgtagctaatatgattaccgaagctggtgccaaccgtgtccttgtttgtgatcttcattctagtcaagcaatgggatactttgacatcccagtagatcacgtttatggcc

SEQ ID NO: 34936 - DNA, 263 bp, Zea mays
attccatcttcgtttccgctccgccgccgtcgatggagttctggggtctcgaggtcaaacctggatccactgtcaagtgtgagcctggacatggctttatcctgcacgtttcccaggctgcccttggggaatcaaagaaaagtgacagtgccttaatgtatgtcaaagttgatgacaagaagcttgccattggaacgctctctatcgacaaatacccacagatacaattcgatttggttttcaataaagagtttgagctgtca

SEQ ID NO: 34937 - DNA, 264 bp, Zea mays
cccacgcgtccgaccagaagagcggcggcgcgggcggacaaggagcaggcggaggaggagttgtgccaagccacaatgggtatctcgcgtgactcgatgcacaagcgccgagccaccggtggaaagcagaaggcctggaggaagaagcgaaagtatgagcttggtcgccagccagccaacaccaagttgtcaagcaataagacagtgaggagggtccgtgttcgtggaggtaatgtgaaatggagggctcttcgccttgatact

SEQ ID NO: 34938 - DNA, 267 bp, Zea mays
atcacgtaatgcacgaactgtgaatgcattgatcagtactctcttccttgtcccatcgttcatgtagcctgcaatattgccaagaagaattgttgtgtttgtcctgataccaggttcttcgtccacctgtagcttagagagatattttaagagagatcctgagattgtacgttgagataattttggtgctaatacgagcatcgacttcaatgtcagttcacgaatagtaccatcagtatcagagaagcccgcaaatgcagattgata

SEQ ID NO: 34939 - DNA, 266 bp, Zea mays
caagccctcgcccgctcagtcacaaagcctcagatctcagtcgcctgcgccgccgcttcgttcgtgtggaggggagaagacaggaaatggcggcgactgagggcgtgctcttggggatgggcaaccccctcctcgacatctccgccgtcgtcgatgacgccttcctgacaaagtatgacatcaagctgaacaatgctattctcgctgaggagaagcacttgcctatgtatgacgagttggctagcaagagcaatgttgaatatatt

SEQ ID NO: 34940 - DNA, 263 bp, Zea mays
gagatgtacaatgagtggccattcttcagggtcacccttgatctgctcgagatggttttcgccaagggtgacccgggaatcgcggctgtgtatgacaaattgcttgtggctgatgatttgcaatccttcggcgagcaactgaggaagaactatgaggagacaaaggaactactcctccaggttgccggtcacaaggacgtacttgaaggtgatccttacctgacacagcggctgcggctgcgcgagtcctacatcaccaccct

SEQ ID NO: 34941 - DNA, 261 bp, Zea mays
accacgcgtccgcgacctggagacgatgggcaaggacgacgtgatcgagagcggcgctggcggcggcgaattcgatgccaaggactacacggaccctcccccggcgccgctgatcgacgcggcggagctggggtcctggtcgctgtaccgcgccgtgatcgccgagttcatcgccacgctgctgttcctgtacatcacggtggccaccgtgatcgggtacaagcaccagacggacgcgtcggcgtcgggcgccgacgcggc

SEQ ID NO: 34942 - DNA, 267 bp, Zea mays
ggccgatgaagcagaatcctgcttacaaaggcaagtggcatgcacctatgattgacaaccccaactacaagggaatctggaagcctcaggagatacccaaccctgagtactttgagcttgacaggcctgattttgatccaattgctgctattgggattgagatctggacaatgcaggatggcatcctgttcgacaatatcttgattactgatgatgagaaagttgccacctccattctcgagaagacctggaagcccaagtatgatg

SEQ ID NO: 34943 - DNA, 266 bp, Zea mays
cttctcgtcgcgacgactgggcgagaccgccgccgccgccgccgcctgagttctttagaaatggctgatggtgaggacatccagcctcttgtctgcgacaatggcactggaatggtcaaggctggttttgctggcgacgatgcaccaagggctgttttccctagtattgttggccgtcctcgccacactggtgttatggtagggatgggacagaaggatgcgtatgttggcgacgaggcacagtccaagagaggtattctcacgct

SEQ ID NO: 34944 - DNA, 262 bp, Zea mays
ccttttcttgtcctgatcttcaggagttgagggtatatccaagtgtgggtgcaccaagaggtactgtgacggaggaagggttggtagccctatcttcgtgtcggaagttacagcgtgtgctcttctcttgtgttcgaatgacaaacacggcgctgatgacaatagcaaggtactgcccacggctaacgtccttcagactatgcattcgcaagcccaggtcagcagacgccgtcacaggacagccactggacgaatgctttgg

SEQ ID NO: 34945 - DNA, 261 bp, Zea mays
ccatcttgccactggggataaaggaggacgtgtggttttatttgaaaggacagatgttcgggataatgccagccagagagaactggagagacaagatgttccagttactagacacccagagttccgctacaaaactgaatttcagagtcatgaacctgagtttgactacctcaaaagtttggaaatagaggaaaaggtcaacaggatcaagtggtgccagacagccaacaatgctctctcccttttgtctacaaatgataa

SEQ ID NO: 34946 - DNA, 256 bp, Zea mays
gtttcttgcaagttgatcttgtggtagttcccccaactgtcaccatgcagaacgaggagggtaagactgtggacctctatgtccccaggaagtgctcggccacaaacaggatcatcactgccaaggaccatgcctctgtccaaatcaacattggccacttggatgcgaatggcctgtatgatggtcacttcacaacgtttgctctctctgggtttgtccgtgctcagggcgacgcagacagctccttggacaggct

SEQ ID NO: 34947 - DNA, 254 bp, Zea mays
aaggagcaatttgtcagagcgcgaggtgatggagttcgttgggaaacaggtagcgccttacaagaaggttaggaaggtggcgtttgtggcggagattcccaagaacgcctccggcaagattctgaggaaggatctcatcaagctcgccacatccaaatccaaactatggaaattgtttttcgggtttacagtgctggaatacgcttgtcgtccacgagcggcgagccattctctacgctgccccggtagtttgg

SEQ ID NO: 34948 - DNA, 253 bp, Zea mays
cggacgcgtggtgagttccagttccttaaacttatttgacattgctaccgactgcaatacattaatgatggaatgaagggaggcaaacagatttgagtaactgtatttgttggcatctctttcaatcatattaagtggcatgttaccaacaaagttagagttaagttattatcctcacctgagcaatcaaggcactccattccactgtgttggacttagcttcgagactctcctggataggcttcagcctctc

SEQ ID NO: 34949 - DNA, 250 bp, Zea mays
caaacttaacgtaccctcttccgcgccgccatgtctgggaggaagaagacgcgggagcccaaggaggagaacgtgacgcttggccccgctgtccgcgagggagaacacgtctttggcgttgcgcacatcttcgcctccttcaacgacactttcatccatgtgacggatctgtctggaagggagacgctcgtccgcatcactggtggcatgaaggttaaagctgatcgtgatgagtcctcgccttatgctg

SEQ ID NO: 34950 - DNA, 256 bp, Zea mays
cacaacccagtcgctcaaaaccctagagctctcgcctgctcgcctccgccgccggagcgagctccccatcttcatccgtcaaccatggcgacccagatcagcaagaagaagaagttcgtcagcgacggtgttttctacgccgagctcaatgagatgctgacgcgggagctggcggaggatggctactctggcgtggaggtgcgcgtcacgccgatgcgcacggagatcatcatccgcgccacgcgcacgcagaacg

SEQ ID NO: 34951 - DNA, 255 bp, Zea mays
ctgttttccgccctcttgtcgagaaatatgctgtggatgagaaggctttctttgatgactacaaagaggcccacctcaagctctccgaactggggtttgctgatgcttaaatagaccctatcttggagtgatacattctgctgcctgtatggaatcatgtggtcttttgcatctggagtcaatgtgaacaagcagattgtcgtattgtctttctcgtaataaatttgtcgatgttgagcccttaggctgttgttg

SEQ ID NO: 34952 - DNA, 267 bp, Zea mays
caattatgaaccactctccagatgcatgggatcacatgcagttcaaggatgtctgtgttaaagttgcaaatgtcgagctatattacaaggcagttcacttttatttgcaagagcatcctgatctcatcaatgatatgctaaacgtgcttgcacttcgtttagatcacaccagagttgtagacataatgcgcaaggctggtcagttgcatcttgtgaaaccatatatggttgcagttcagagtaacaatgtatctgccgtgaatgaag

SEQ ID NO: 34953 - DNA, 267 bp, Zea mays
cccacgcgtccggcaggccatgactatccacataaccagcggccttggtgatatcctaatcttcatgactgggcaggaagaaattgaggctacctgctatgcgcttgctgaacgcatggaacagttaatatcgtcatccaccaagactatccccaagctagagattctgcccatctactcacagttgcctgctgacttgcaagccaagatttttcagaaggctgaagagggcgctcgcaagtgtattgttgctaccaatattgctga

SEQ ID NO: 34954 - DNA, 270 bp, Zea mays
aggagctgcacgccgagtcgcagaaggccttactccagatcgaggacaagatacgggacttcaaagacgagtgtgagaggttggaccagtgcagtcgcctttatgactcctcaatctcaaatgccaattttgagcttgatgcgagtcgcattgctcaggaacttggagggaccaccactgtaatggagagagagaaggcttccattcaagagttgatgaatgttgtcaatgaaatgatgtggaacacagaatttggtattaggtcatatc

SEQ ID NO: 34955 - DNA, 239 bp, Zea mays
cccacgcgtccgggacgcgtggagacgatgggcaaggacgacgtgatcgagagcggcgctggcggcggcgagttcgcagccaaggacaacacggaccctcccccggcgccgctgatcgacgcggcggagctggggtcctggtcgctgtaccgcgccgtgatcgccgagttcatcgccacgctgctgttcctgtacatcacggtggccaccgtgatcgggtacaagcaccagacggacgc

SEQ ID NO: 34956 - DNA, 256 bp, Zea mays
ggccgtggacgactccacggcgctcccagtcgcgtcctcgaggggtacctcatggccactctcttctacgagccctccacgcgcagcgactctccttcgaggccgctatgcggaggctcggcggggaggtgctcaccaccgagaacgcgcgcgagttctcttccgccgccaagggggagacactcgaagataccataagaaccgttgagggttattctgatattattgttctgagacattttgaaagtggagctgc

SEQ ID NO: 34957 - DNA, 264 bp, Zea mays
gggagaaactgctcctctcactagctcagagttcagtagccagatgaattcacagcaatctgtggctcttggcaatacggcaaatccaagggctaggtactgtaggaaatgcaaccagttgaagccacctcggtgccaccattgctctgtttgtggaagatgtgttcttaagatggatcatcattgtgtgtgggtggttaattgtgttggggcactgaactacaaatactttcttctgttcctgttttacaccttcctcgagac

SEQ ID NO: 34958 - DNA, 265 bp, Zea mays
gtggttgcccttgttattgaagcaatggcctgtgtcacagagcaggattataaaattgcagagaggattgaaaaagaaggaaaggcttgtgtcattgttgtgaacaaatgggatacaatcccaaacaagaaccacgagagtacaacacattatgaacaagatgtaagagaaaagcttcgcatacttgattgggcacctattgtctactgttctgcgacaaatggcaccagtgttgaaaagataatttctgctgctgctttggttg

SEQ ID NO: 34959 - DNA, 264 bp, Zea mays
ctctgctggataactttgaatggtacgccggctacaccgaacgttatggcattgtctacgtcgaccgcaaaaataactacacgcgctacatgaaggagtcagccaagtggttaaaagagttcaatactgcgaagaagcctagcaagaagattattacgccagcttaaaaacatgggacctcgtgatgtgggtacggtgccacccatgaaataaaaacctagtgtgtggtttgaaacctaaatttttctttttcttttttgcacc

SEQ ID NO: 34960 - DNA, 265 bp, Zea mays
cagagcaagcatcccccaaggcgaaccaacatcctctatcatacaacaacctacgaccagaagattttccaaacgatcggctctaccgcgcttaccacgccattcaaagcttcaagagcacgatcacttcggatcccaagaacatcaccggcacgtgggccggcaacgacatctgcggcgagaagagctacgtcggcttctactgtgcaacaccgaccagccgagctaaggagctcacagtgacggcagtagttctcaatggctt

SEQ ID NO: 34961 - DNA, 260 bp, Zea mays
ggacgcgtggctagttctagatcgcgagcggccgccctttttattttttttttttttgaaccttcacacttttattttagtcaggcagagtgttgtgccctttgcatcacggtattccattcagttacaggtgaattaataccgctgtgtaccggcaaccggatttacttaaagaagccaaatttgtatcgctgccaattccacaaacagaatttgcagacttttaatcaccagactgggaacaaacaatggatcgactg

SEQ ID NO: 34962 - DNA, 264 bp, Zea mays
cccacgcgtccgcaattatcaacaatttcggcacatcggggcacctggatggcagcttgggtggacatgggcaaaaaaggaggttatatggtcaatggttggggctcagaccactgaacagggtgactgctcaaagttcaagggcaacaccccccattgctgcaagaaagatccaacaattgttgatttacttccaggcactccatacaacatgcaaattgccaattgctgcaaggcaggagttataaatacctttaaccagga

SEQ ID NO: 34963 - DNA, 263 bp, Zea mays
cgtgtggagactggtgtcatcaagcctggaatggttgtcaccttcggtccaactggcctgaccactgaggtgaagtctgttgagatgcaccacgaggctctccaggaggcccttcctggtgacaacgttggcttcaatgtgaagaacgttgctgtgaaggatctcaaacgtgggtacgtggcctccaactctaaggatgaccctgccaaggaggctgctagcttcacctcccaagtcatcatcatgaaccaccctgggcagat

SEQ ID NO: 34964 - DNA, 262 bp, Zea mays
cactgatgtctccatcctgctcgacaacgaggccatctatgacatctgcaggcgctccctcgacattgagaggcccaactactccaacttgaatcgccttgtgtctcaggtgatctcatcgctgactgcttctctgaggttcgatggtgccctcaatgtggatgtgaacgagttccagaccaacctggttccttacccgaggatccacttcatgctctcctcctacgcaccggtgatctcttctgcgaaggccttccacgag

SEQ ID NO: 34965 - DNA, 264 bp, Zea mays
cccacgcgtccggacgcagtcggctgccgcagactggtagtagccggcgcgccgtcaccgtatcctcagatcagaggcgagcagaaaccacaccactctactgacgcccgacgagtgtaacattttccttcagccatgggtaaggagaagactcacatcaacattgtggtcattggccatgtcgactctggcaagtcgaccaccactggccacctgatctacaagcttggaggtattgacaagcgagtgattgagaggttcgag

SEQ ID NO: 34966 - DNA, 263 bp, Zea mays
agctgctgctgtacctgggtatctgcgtcgtctggtgccctctggtgtacctctatatggatgtcgtcgtctaataaacatctgtggtttgtgtgtcatgaatcgtggttgtggcttcgttggtttaatggacctgttgtgtcctctgtgtgttgtacccaaaactcttctgcagcagtatggctcgaatccttatgaagtttgatgtttgaacttaaacgaacgcaggggtttgtgtaaaaggtcagtcgctctaaaggcta

SEQ ID NO: 34967 - DNA, 261 bp, Zea mays
acggaaatcaacctgcgccgctgccttctccgttctcgccgtcgcctccgcctccgctgccgccgcgcaggtcagggtcatgtcgatcttcgagtacaacgggagcgccgtggtggcgatggtggggaagaactgcttcgcgatcgccagcgaccgccgcctcggcgtgcagctgcagacgatcgccaccgacttccgacgggtgttcaaggtccacgacaagctctacatcgggctctcggggctcgccaccgacgccca

SEQ ID NO: 34968 - DNA, 258 bp, Zea mays
tatgggccggcattcggatgtgtgatgatgagagagttcttgtctgaattggctaagatggttaataagaacaccactgcctatgagaattacaagaggatctttgtacctgagggccagccgctggaaagcgagccaaatgagccactgcgagtgaatgtgctcttcaagcacgtccagaagatgttgactggtgatagcgcggtgattgctgagactggtgactcctggttcaactgccagaagcttaagctgcca

SEQ ID NO: 34969 - DNA, 258 bp, Zea mays
gctcaacgctcgcccacgcccgccgcccccccaccgatccacgagaaaccttctcgcctccgcgggacgattcgccagggagagcaaaggtagcagaggcgccatggacgctgccaagtcggtgacgccgggcgccgtgtcctacatcctggcgcacccgtctacgggctccgatggcgccgtgtcggatctcgtcgttcaggtcctcgatctcaagtccatcggcatgggcagccggttcagtttcacggcaaccga

SEQ ID NO: 34970 - DNA, 233 bp, Zea mays
tgaatttattcctggcagacgtgattcgtcggtgtgcccccgtgaagggcgtctgccagatgctaagaaaggtgcaccacatctgagggacatcttttatcggatgggcttatcggacaaagatattgtagctctatcagggggacatactctgggaagggctcaccctgagaggtctggattcgatggtgcctggacaaaggagcctcttaagtttgataactcatactttc

SEQ ID NO: 34971 - DNA, 259 bp, Zea mays
ggcggcgcacatcgctaccaccgtccaaagatggtgaagttcctcaagcccggacaaggccgttatcctcctccagggccggttcgccggccggaaggcgtgatcgtgcgcgttttcgaggagggcacccgtgatcgtccctacgggcactgcctcgtcgcgggcctcgccaagtaccccaagaaggtgatccgcaaggactccgccaagaagacggccaagaagtcccgcgtcaagtgcttcatcaagctcgtcaact

SEQ ID NO: 34972 - DNA, 238 bp, Zea mays
caaaatgactcctcatgataagcaagtcatgatgttttcagcaacgctcagcaaggagatccgtcctgtatgcaagaaatttatgcaagatccgatggaaatatatgttgatgatgaggcaaagttgaccctccatggtcttgtacagcactataatataacttaagcgaaggctagagaagaaaccgggatactggaaatgaatcctctttggaaagcttcttggaatttcaaccca

SEQ ID NO: 34973 - DNA, 232 bp, Zea mays
aatcaaatataatggcaatgctagccttcgagctggtactaacaaaattgcactgctgagtgttgcctgtggattgccgaatgttggagtgcattatgagacgtggaacactggtgttggtggtcctgttgtgcttcatgggctggatgaaggttcacgagaccttacttggcagacttggtcctatcaggttggcctgaaaggcgaacagatgaatctgaactccatagaa

SEQ ID NO: 34974 - DNA, 257 bp, Zea mays
gttggcggcggtgccagcgatgatcctcatagcagagtcgatgctcttgcagttcaagtccggcaacttctcttgagctattgcacgcacttgatccactgttacctttcccaccttctgccgttgtggctcttttgaacctttttcgacacctgcagccttgagtagcaggactgaagctggaggcgtccgtgctggtgctcagccaacgcaaaccctcgcctttctgctgcttcctgcggagcagagcagcagcg

SEQ ID NO: 34975 - DNA, 262 bp, Zea mays
cccacgcgtccggcgccgcatgtggcgcgaccgcatgaagctgaagcggctcagggagctgcagcagagccgcggcaaggatcccatggctagcggtgggggcctagccgacggctcatccaagccaaggcagtcgcaggagcaggcccggcgcaagaagatgtcgcgcgcgcaggacggcatcctcaagtacatgctcaagatgatggaggtgtgccgcgcgcaggggtttgtgtacgggatcattccggagaagggcaag

SEQ ID NO: 34976 - DNA, 285 bp, Zea mays
cttgagcatgacattggtcaccacacatctggcgatcaccagaagcttttacttgcctatgtggggattccacgctacgaaggtcctgaggttgatcctaccattgtgacacatgatgcaaaggatttgtacaaagctggtgagaaaaggctcggtacggatgagaagacctttatccgcgttttcactgaacgcagctgggcacacttggcatctgtttcgtctgcttaccatcatatgtatgaccggaaattagagaaggttatcaagagcgaaacatctggg

SEQ ID NO: 34977 - DNA, 203 bp, Zea mays
ggacctggtgatcccagcatccgagagagctccacaggccaggtccccatcgcagcagcgcttgccccacctctcccccgcccggtagtagcctcgccgccgttgccgagatggggctcgtgtccttcgtcgggagggtgctcttcgtcgccgctttcctcctctccgcctaccaggagtttaatgaattcggtgctgatggt

SEQ ID NO: 34978 - DNA, 308 bp, Zea mays
agtagctgcagtacggtcggaattccgggtcgagcacgcaacgcacacgcgtccgcgacctgggagtggcgtgcggcgccggcgtgctcgtgatctcaacccaacgagtgccaccgctccggtcacccgtcgctccacgcaaccatgtcgaggaggaagaccagggagcccaaggaggagaacgtcacccttggacccactgtccgtgaaggagagtatgtctttggtgtcgctcacatctttgcatccttcaatgacaccttcattcatatcactgatttgtctgggagggaaactctggttcggat

SEQ ID NO: 34979 - DNA, 276 bp, Zea mays
ctccactaggatccccagggtgcagcaactgctccaggacttcttcaacggcaaggagctgtgcaagaacatcaaccccgatgaggctgtcgcctatggtgctgctgtccaggctgccatcctgagcggtgagggcaatgagaaggtgcaggacctgcttctgctggacgtcacccctctgtccctgggtctggagactgctggaggagttatgacagtgctgatcccgaggaacaccaccatccccaccaagaaggagcaggtattctccaccta

SEQ ID NO: 34980 - DNA, 278 bp, Zea mays
cactcgcattgcattgcattccttcagttcagtagtgtgctctgacagtgagatggcgagcgtgaaggttttcgggtcacccacctcggcggaggtcgcccgcgtgctcatgtgcctcttcgagaaggaggtggagttccagctgatccgcgtcgacgcctaccgcggcaccaagcgcatgccccagtacctcaagctgcagccgcaaggcgaggcgctcaccttcgaggacgagagcctcaccctctccgactccagggggatcctccgccacatct

SEQ ID NO: 34981 - DNA, 212 bp, Zea mays
gtggccagtcaccagtgttctctaaggctaggtacactgtccgttcctttggtatcaggcgtaatgagaagattgcctgctatgttactgtaaggggtgagaaggcaatgcagcttctggagagtggacttaaggtcaaggaatatgaactgctaaggaggaacttcagtgacacaaggtgctttggtttcggaatcaggagcacattgatc

SEQ ID NO: 34982 - DNA, 274 bp, Zea mays
atgctttcgtcctacgctccagtcatttctgctgagaaggcctaccacgagcagctgtccgtggctgaaatcaccaacagcgccttcgagccatcctccatgatggccaagtgcgacccccgccatggcaagtacatggcatgctgcctcatgtaccgtggtgatgtggttcccaaggacgtgaacgctgctgtggccacaatcaagaccaagcgcaccatccagttcgtggactggtgcccgactggcttcaagtgcggaatcaactaccagc

SEQ ID NO: 34983 - DNA, 177 bp, Zea mays
cacagacccgagcggaagaagccatgtccgggcgcggtaagggtggcaaggggctcggcaagggcggcgcgaagtcaccggaaggtgctgcgcgacaacatccagggcatcaccaagccggcgatccggcggctggcgaggaggggcggcgtcaagcgcatctcggggctcatctac

SEQ ID NO: 34984 - DNA, 276 bp, Zea mays
gcaggctaagaaggtgaacgagctggacccgctgctgaagcccaagcaggacagatacgcgctccgcacgtcgccgcagtggctgggcccccagatcgaggtcatccgcgccgccaccaagtccatcgagcgcgaggtcaactccgtcaacgacaacccggtcatcgacgtccaccgcggcaaggcgctgcacggcggcaacttccagggcacccccatcggcgtgtccatggacaacgcccgcctcgccatcgctaacatcggcaagctcatgtt

SEQ ID NO: 34985 - DNA, 208 bp, Zea mays
ctctctctctccgtatccggcggcggaagcggaagcgtaagcgcaaggaagtaggcggccaccatggtgaagggacgcacggggcagcgcgtcaggctctacgtccggggcaccatcctcggatacaagaggtccaagtcgaagcagtacgagaccacgtcgcttgtacagatcgaaggggtgaacaccaaggaggacgtcgcgtggt

SEQ ID NO: 34986 - DNA, 272 bp, Zea mays
cgcctccctttccccttccctccctccctctccccgcgggccgccagaggcaatttcgccctcgattcggccccgattcgtccgcccgcgaccgggattccctccgccaagcgcggatctgaacgctgcgctccgtgtcgccgctcgaatccgccatgaagggggccaaatccaagggcgccgccaaggccgatgccaagctggcggtgaagagcaagggggcggagaagcccgccaagggcaggaaagggaaggccggcaaggaccccaac

SEQ ID NO: 34987 - DNA, 262 bp, Zea mays
tgcagatgttgtcgacagatatgcatagaagagaacagaggagaactaatccgggcacagagtaaggccttgttcgtttgagtcggatcacacccggaatcgttccagctaatcaaagtttatataaattagagaaaaaatccggttaggaatcgttccgacccatcaatccagcacaaacgaacagagcctaaagaattctccactctcttgacttgacgaggctatgtaactagatgccatcagaggagaactgaagact

SEQ ID NO: 34988 - DNA, 258 bp, Zea mays
aaaaccaaagccagaacctgaaccaaaaccagagcctaagccagagcataaacctgagccaaagccagagcctaaacccaaaccgaaaccagagccaaagccagagccacaaccaaaaccagagcctaagccagagcctaaacccgaaccgaaaccggagccaaagccagagccccaacctaagccagagcctaagcctgagccgaaaccagaaccaaagccagagccacaaccaaagcctgagcctaaaccagaacc

SEQ ID NO: 34989 - DNA, 255 bp, Zea mays
attgccttctcattatctggtgttcggtgtcctggtaaaggcgagccatactcagatgaagctattgctttgatgaggagaaggatactacagcgtgatgtggagatagaggttgaagcagttgacagaacaggaacattcataggttcgttgtgggagtccaagaccaacatgggctctgtacttctggaagctgggctggcgaactgagttcttttggcttggataggatgtcagatgctcatgtcctaacaa

SEQ ID NO: 34990 - DNA, 257 bp, Zea mays
gaggatttgggaccgtttacaagggttacatagatgaaaatgtcagggttgggctgaagtcactgcctgttgcagtcaaggtgctcaacaaagatggacatcaagggcacagagaatggcttaccgaggttaactgcctggggcagttgaggcatccaaatttggtgaagttgatcggatattgctgcgaagatgaccatcggctgcttgtctacgagttcatgtttcgaggaagtctagaaaaccacttattccga

SEQ ID NO: 34991 - DNA, 257 bp, Zea mays
cttactcttattcagagagatatacagttgatgatgcactcgacatcgtacagtatgctgaaaaaagaggcgtgaatgtcttggctgagattgatgtacctggccatgctctttcatggggtgtcggatatccatcattgtggccatcagctacatgcaaagaaccgcttgatgtcagcaatgaatttacatttcaactgatcaatggaattctttcagatttcagcaagatttttaagttcaagtttgtccatttg

SEQ ID NO: 34992 - DNA, 259 bp, Zea mays
gggagagattggagggaggcccctgcccaaggcaagagaaaccgcggcggcggagagggaggaagggcagacgcagacgggcgaacaagatgagggagatcatcagcatccacatcggccaggccgggatccaggtcggcaacgcctgctgggagctctactgcctcgagcacggcatcgagcacgatggcaccatgcccagtgattcctcggttggcgtcgcacatgatgccttcaacacgttcttcagcgagactgg

SEQ ID NO: 34993 - DNA, 260 bp, Zea mays
ggttctccctcgctccagatctcccttcgcagccggccagggaccccttcacagcgcgggagatggctgatcaggaggccccagttgcagttgaggcaccaaccccagttcttggagagccaatggacttgatgactgcgctgcagctggtgatgaagaagtcaagtgctcatgatggacttgtgaagggtcttcgcgaggctgccaaggccattgagaagcatgctgctcagctttgcgttcttgctgaggactgtgac

SEQ ID NO: 34994 - DNA, 258 bp, Zea mays
cgccactcgccactctcacgtctcgcccatcccgccactgctgctctccagagtccaggcgacccaggctgcgcggtcgctcggtgttgttagtcccgaccgccgccggccatggcatccaacggcatcgccccaagagatgtatgtgttgttggcgttgcacgcacccctttgggtggtttccttggtgccttgtcttccttgcccgcaacaaagcttggttctatagcaattgaagctgctctgaaaagagcaaat

SEQ ID NO: 34995 - DNA, 259 bp, Zea mays
ctcgcggcgtcgccctctcatagccgcgcgcgcttcgccacatcagccagcgccgagcccaaggaagcagaccttcagtctaaaatcacaaacaaggtgtactttgacataagcattgggaaccctgtgggcaagaatgttgggaggatcgtcatcggcttgtacggggatgatgttccacagacaacagagaacttccgtgctctttgcactggagagaaagggtttggatacaagggatccagtttccatcgtgtca

SEQ ID NO: 34996 - DNA, 257 bp, Zea mays
gagtttacgacgagactgatgcaaggagggaaagagctaaaaactctcttgagagatatatgcattactatgagcgctgggcatccaatcagacatcgaggcagaaggcccaagcagatctgctaaaagcggaaaaggaccagattgcaaatttaactgacattttcgggataccagagacccagcttaagttcataatcgaagcttggtcacagattatagaatgcaggcgagtgttgaaatggacatatgcttat

SEQ ID NO: 34997 - DNA, 249 bp, Zea mays
gaggatacaaggaggtcggtttccttagagaggttgacgaatggtgaggacaggagtgacacctgccgagagacttctgcatctgtacgagacgaagtggcaacgcaacgtcgaccatgttttcgagcacttgctatactgacgttgtagatgtaccctagtacaaaaatctcatctttgattcattcaacgccttgagtgggagggcacaggaacacatcttttggttaagttgctgaccgggggaac

SEQ ID NO: 34998 - DNA, 254 bp, Zea mays
cccacgcgtccgacatgatttctgaaaagttgatggtacaaattaatcttaacgaaggcattgaagaggatatcccaccgagccaatatactaccaggtgtgaagagaaattaactatgactcaagctgccatctcaagggaagctggacctccaggttatggtcctggagaaaactttcttcaggtcagttcaaggattactagctgtgagcagagtgtgataatggctcctagcgctatcgcaagaggagtt

SEQ ID NO: 34999 - DNA, 183 bp, Zea mays
ggttttgagaagccatctgcaattcagcagagaggaattgttcccttctgcaagggtcttgatgtcattcagcaagcacaatctggtacaggaaagacagcaaccttctgttctgggatcttgcagcagctggactatggcctggttgaatgccaggccctggtccttgcttccaaccgtgag

SEQ ID NO: 35000 - DNA, 261 bp, Zea mays
cccacgcgtccggagctcatcctgacctacattaatcagctttgtgagcgtcttccttctcccatgggagaatcagccgtggactgtgccagtcttgggtccatgcccgacattgcgttcactattggaggcaagaagttcaagctgaaaccggagcagtacattctgaaggtcggtgaaggacaagctgcccagtgcatcagtggattcacagctattgacatcccaccacctcgtggccccctctggatcctgggcgat

SEQ ID NO: 35001 - DNA, 282 bp, Zea mays
gcaggacatcatcgtccagtccgcccgcccctatggccagcgtgctgtcctcaagttcgctcagtacactggcgctcatgccatcgctgggaggcacacccctggtaccttcactaaccagctccagacctccttcagcgagcctcggctgctcatccttaccgacccaaggactgaccatcagccaattaaggagtctgctctggggaaaatccccaccattgccttctgtgatactgactctcccatgcggtatgtcgatatcggcatcccagcgaacaa

SEQ ID NO: 35002 - DNA, 293 bp, Zea mays
ctccttcaatggcagtgcctggctgctgatgccagcgggggtgtgacggtgaaactctgcgacggggctggatcgtcttgcgagcgctgggtgttccgcaacgacggcaccatcttcaacaccggcaccgggatggtcttggacgccaggccatctgcgggggctaatgctactgctagccaagtcatcgtgtcgcccgccactgggagtcccacccagcagtgggcgctcatgctgtgatctcatctatggctcatgagtcatgactgtgggggagggccgtactgcactgc

SEQ ID NO: 35003 - DNA, 196 bp, Zea mays
gccacgcgtccgcggacgcgtggattccatgtgagggcatcagctcgggttgacaaattctcaaagagtgacatcatcgtgtccccttcgattctgtctgcaaactttgcgaagcttggtgatcaggtaaaagctgtggaggtggcaggatgcgactggattcatgtcgatgtcatggacgggcgctttgtgccaa

SEQ ID NO: 35004 - DNA, 277 bp, Zea mays
agtttacattctgttatgatgcactccatggtgttgcgggagcttatgccaaacacatctttgtggaagagcttggtgctgatgaaagctcactgttgaattgtgtcccgaaagaggactttggaggtggtcatccggatcctaaccttacctatgcaaaagagttggttgaacgcatgggtcttggaaagtcatcctcaaatgttgagcctcctgaatttggtgctgcagctgatggagatgctgaccgcaacatgaatcttggtaaaagattctt

SEQ ID NO: 35005 - DNA, 113 bp, Zea mays
acccctgtcccgctaggattcccccgaaaccctcccccaaaaccccagagcggagaagagcgcaagatgttcggcttcgggcaccacggccaccacggccagaacccgccggg

SEQ ID NO: 35006 - DNA, 289 bp, Zea mays
tgactatggaacataaaggggagatgaaggttgtggtcaggacagttatttcactcaccaaggaggaggagaaagaactcaaggaaaccttgcaggatatccttggggaaaacaaaactattttggttgaacagaagattgactacgacatcatgggaggattagtgattgaattcgggcagaaggtgcttgatatctcaatcaggaacaaggcgaagcaaatgggaggcgttcttgaggcaaccacttgacttctgacagcctctgcattccgatgatgcttctttga

SEQ ID NO: 35007 - DNA, 236 bp, Zea mays
ctgtggagtacggcaagaaatccaagctgggcttcactgtgtacccatctccccaggtgtcacctctgttgtggagccttacaacagcgtgctctccactcactcactgctggagcacactgatgtctccatcctgctcgacaacgaggccatctatgacatctgcaggcgctccctcgacattgagaggcgcaactactccaacttggatcggctgttgtctcaggtggtctcat

SEQ ID NO: 35008 - DNA, 223 bp, Zea mays
cacacgttcacggtagcgagagcatatcgtcgtcggcggtgaagatggtgtcgctgaagctgcagaagcggctcgccgctagcgtcctcaagtgtgggaaaggcaaagtctggcttgaccccaatgaagtcagcgagatctccatggctaactcccgccagaacatccggaagttggttaaggatgggtttatcatcaggaagcctcagaaggttcactctag

SEQ ID NO: 35009 - DNA, 258 bp, Zea mays
ggcagctggggcttcatggattcagtttgatgagcccactcttgtcctcgaccttgattctgacaaattggctgcattctctgctgcatacgcagaacttgaatctgtactttctggattgaatgtgcttgttgagacttactttgctgatgttcctgctgagtcctacaagaccctaacatctctgagcagtgtgactgcttatggttttgatcttgtccgtggaacccaaactcttgggcttgtcacgagtgctgg

SEQ ID NO: 35010 - DNA, 261 bp, Zea mays
ctcctcacctatcatcgccgctgcgccgtctcctccgctcccgtcgtccggaaagatggcgtcccacattgttggataccctcgcatgggccccaagagggagctcaagtttgcacttgagtctttctgggatgggaagagcaccgctgaggatctggagaaggttgctaccgacctcagggccagtatctggaagcagatggctgatgctgggatcaagtacatccccagcaacactttctcgtactatgaccaggtcct

SEQ ID NO: 35011 - DNA, 254 bp, Zea mays
agctggttatcatcttgctggttcttggtttcttaagtcggatgatgtaaaggcactacaaaggacaatatcttttgagacaggcatgcaaagtagccttcttgctcttgctttagtagatgacgaaaaagtagaagttgttcgagctacggtttaagatggtgtgacgagtggctgatttcgcgaacctgcagataagacgagcggctaaaaacactatcggatattgctttctatgtgttttaaaatataag

SEQ ID NO: 35012 - DNA, 252 bp, Zea mays
cattcccatgacgggccacgccagcctgctgctgctgctgctgccggcgctcgccgccgtccttctctgctgccccctcgcgcaatgcgggcagcagaactacacctccatgttcagcttcggcgactcgctcaccgacaccggcaacctgctcgtgtccagcccgctctccaaccacatcgtcggccgctacccctacggcatcacctacttccaccgccccaccggccgctgctccgacggccgcctcgt

SEQ ID NO: 35013 - DNA, 248 bp, Zea mays
aagagggttctggtggtgaccaacacgaccgtcgcgccgctttacctggacaaggtgacatgggcactcacccacaacaacctgaatgtatcagtggaaagcgtgatcctgcccgacggtgaaaagtacaaaaatatggacacgctgatgaaggtgtttgacaaggcagtcgagtcccgttttgaccgccggtgcacatttgtagcactgggtggtggtgtcattggggacatgtgtggttttgcagc

SEQ ID NO: 35014 - DNA, 249 bp, Zea mays
gaagttagcggcctcaaagctcgtccccgcatcgatttctcgtctatttttggcacggtgaatccaatcgttgaagatgtccgtgtgagaggtgatgcagcagttaagcactacacagaaaagtttgacaaggtcatgcttgatgatgttgtcgtctgtgttagcgatcttccagatgcagagcttgatccagctgtgaaggaagccttcgatgttgcatatgacaatatatatgccttccatgtttca

SEQ ID NO: 35015 - DNA, 243 bp, Zea mays
tcgaccgccgtcactgaatcctcagatcacggctagccgtaatcacgccactctgctcactcccggcgagcagtgtaacattttccttcagccatgggccaggaaaagactcacatcaacattgcggtcattcgacaactcgactctggccagtcgagcatcagtggccaactgatctcatagcttcgaggtattgacaagcgtgtgattgagaagttcgagaaagaggccgcggagatgaac

SEQ ID NO: 35016 - DNA, 228 bp, Zea mays
cccacgcgtccgctccttttgctcggaacgcacacaccgcccgtccccgatctccgatcccctcgtcgatccaaagatgcagatcttcgtcaagaccctcactggaaagactatcaccctcgaggtggagtcttctgacaccattgacaacgtcaaggccaagatccaggacaaggagggcatccccccggaccagcagcggctcatctttgctggcaagcagctcga

SEQ ID NO: 35017 - DNA, 257 bp, Zea mays
cgcgaggcaaggccatcgtccgccatgacgctctccctctccacctctttcctccccatccccgccgccgcgaggaccaccgcccgcaccctacgctccgtcgtcccctcccaggggatgcgctgctcgatgcgcaagaaggggctgcacccggagatctacgaggacgcgaaggtgtactgcaacggcgagctggtgctggtgacggggggcaccaagccggagtacacggtggacgtgtggtccggaaaccaccc

SEQ ID NO: 35018 - DNA, 255 bp, Zea mays
ccctgacatcgagaccggctgcccgaccccggtccggcgatccctctgcacccctttctttgcgctgccagccccaatctctcgcatccctgtcaaccatggcggcgtcacaggcggaggcgcggtgcgcgcgctgtcccagaaggagcaggacatacagatgatgctcgcggccgacgtccacctcggcaccaagaactgcgatttccagatggagcggtatgtctttaagcgtcgcaccgacggcatctacat

SEQ ID NO: 35019 - DNA, 248 bp, Zea mays
acgactgcttcgttgccaaggacccatcaggcaaggatatcaatgctcttgagcagcacatcaagaacctcctcagcccgtccacaccgttcttcttcaacaccctgtacgacccctaccgtgagggtgctgactttgtgcgtggataccccttcagcctcagggagggtgcccacactgctgtctcccacggcctgtggctgaacatccctgactatgatgcacccacccagctggtcaagcctaag

SEQ ID NO: 35020 - DNA, 245 bp, Zea mays
gaggtcaccggtgggcctgagattcccttccaccccggtagggaggacaagcctcaacccccacctgagggccgccttcctgacgccactaagggttctgaccacctgaggcaagtttttggcaagcagatgggcttgagcgatcaggacattgttgccctctctggtggccacaccttgggaaggtgccacaaagagcggtctggtttcgagggggcctggactacaaaccctttggtctttga

SEQ ID NO: 35021 - DNA, 243 bp, Zea mays
gggttttgctgctctccgaccccgagctccgaacgccgcagcatcaggcgcagcccccctcgcgtgtgaccgagatggcgctgccgaatcaggggaccgttgattaccccagcttcaagctcgtcatcgtcggcgatggtggaactggtaaaactacatttgtgaagaggcatctcactggagagtttgagaagaaatatgaaccaaccattggtgtggaagttcatccgttggatttcacca

SEQ ID NO: 35022 - DNA, 248 bp, Zea mays
gcggggctgcaattctcgaaacagggtgttgcaattactcaagaaaattctctgttggataacactgctagaatagagggatggttagctcggtttcctatgtttgattgggttggtggtaggacttcagaaatgtctgctgtgggtttacttccagctgcattgcagggtattgatatcaaggaaatgctagctggtgcagctttaatggatgaagaaacccggaacactgtggttaaagaaaatcc

SEQ ID NO: 35023 - DNA, 253 bp, Zea mays
ataaaatattgccagtcccgcagtcgagatggccctacgccgccagctcgccctcgccgtcctcgccctggcggcaaccacagccgcggccaactccggcttcgcggactccaacccgatccgtcccgtcaccgaccgcgcggcctccgcgctcgagtccaccatcttcgccgctgtcggccgcacccgcgacgcgcttcgcttcgcacgcttcgccatcaggtatggcaagagttacaagagcgcggcggag

SEQ ID NO: 35024 - DNA, 283 bp, Zea mays
gaaggcagtagctgctacagcttcaaaatcaagtcttggccatgaaaagagaagcaaggatgactctgatgattctgatgaggatgagtctgatgattctgatgaggatgattctgatgattctgatgaaggcgagggattatctcctgacgaaggcgatgatgattcaagtgatgaggatgataccagtgatgatgacgaggaagaaaccccaactcctaaaaagccagaggcaggcaagaagagaggtgctgaaaatgctctgagaaacgctctttctgat

SEQ ID NO: 35025 - DNA, 278 bp, Zea mays
gaagaggctaactggagcctcgactttgtgaatatccggcaaacagtggcggaggcacggtccaagggaatctctgttcgagcgatggtgatgataaatccaggaaatcccactggccaatgccttagtgaagcgaatataaaggaacttctgcaattttgctaccatgaaaacttagttctgctagcagatgaagtgtatcaacagaacatttatcaagatgaacggccatttataagcgcaagaaaggttatgttcgacatgggtccaccaataag

SEQ ID NO: 35026 - DNA, 276 bp, Zea mays
cccacgcgtccggtgctgatcaatatggaagccggttcatacaacagaagctagaaacagccagtactgaagaaaaggacatggttttttcagaaataatgcctcaagctctcacattgatgactgatgtatttggaaattatgttgtccaaaagttttttgagcatggaagcactacccagataaaggaattggctggtcagcttattggacgtgtccttgctcttagtcttcagatgtatgggttccggggttatacagaggctatagaagttg

SEQ ID NO: 35027 - DNA, 278 bp, Zea mays
aaattgtgaaatctatggtccttggaagagaaagtgcctggccgagtttggtattgtcacacagtgtctagctccattaagagtcaatgatccgtacctgcttaatttgctgatgaagatcaatgcaaagcttggtggtctgaactcgttgctgcaagttgaagcatcttcgtcaataccacatgtgtcgcaagtacccaccatcatcttaggtatggatgtttcacatggtcatccaggacaagatagaccttcggttgcagcggtggttagttctc

SEQ ID NO: 35028 - DNA, 266 bp, Zea mays
ctggaaaccctagccgccatatctcacgatccactcgagcaccaagccgagggaaggtgaggagcgatggcgcgcggcgttgtgtcggcgaagggcggcgcggtcgcgggcaagaagaaggggtcggtttccttcacgatcgactgcaccaagccagtggaggacaagatcatggaggtcgcctcgctcgagaagttcctgcaggagcgcatcaaggtcgccggcggcaaggctggcaacctcggcgactccgtcaccatctctcg

SEQ ID NO: 35029 - DNA, 231 bp, Zea mays
ggacgctggtgaagggcgggagcaaggccgtcgtggtggcgcacaagcacgccggtgtcttcaactccaagtccaaggaggatgcgctctgcaccaagaacatggtcccgggagagtccgtgtacggagagaagcgtgtctccgttcagaatgaggatggaacaaaagtcgaatacagggtgtggaaccccttccgttccaagctggctgctgctgtgcttggtggtgttg

SEQ ID NO: 35030 - DNA, 266 bp, Zea mays
ggacctggcggagctctccttcccggtctcctccgcccgttgccttcgtcccctccatctccggctgcgtcgccggcgagcccgacaccgcgaatcggatccgccgacaaggcgagagggaaaagatggggcttacgttcaccaagctgttcagccggctgttcgccaagaaggagatgcggatcctgatggtgggactcgacgccgccggaaagaccaccatcctctacaagctgaagctaggcgagatcgtcaccaccatcccc

SEQ ID NO: 35031 - DNA, 269 bp, Zea mays
cccacgcgtccgtgttcctcaagcagctcaactccggcctgctcctcgtctctggtccattcaagatcaatggagtaccgatccgtcgtgtcaaccagacctatgtcattgctacatcaaccaaggttgacatctctggtgttgatgtcgcgaagtttgatgacaagtactttgccagggagaaaaagcagaaggtgaagaagacggagggtgagctttttgagacagagaaggaggcgtccaagtctctgcctgatttcaaaaaggat

SEQ ID NO: 35032 - DNA, 263 bp, Zea mays
gccattatagacttggtgctgcgaaagactgctttggtgatttgtgggtttgttgctgtgtaaaaagatcctcatggcttccagaagaccatgaaggtttggatctatcatgtaattccttgttatctgccaattatgtatggactatggacatgtgttgcgctgttcaactcactacaaataagtaatcgatatattccctaaaaaaaaaagaaagaacgataaaagtgaaaggtggagagggtatgaaaaaaaaagggcgg

SEQ ID NO: 35033 - DNA, 268 bp, Zea mays
gagagaagagagtagaggataatttgaagaaccacgtggacctttgcaggatgcttgatattgtcgcattggaaaagggtgctgatgtggctggtggtaggggtttctatttaaaggacgaaggtgtcctccttaacctggcattgataaattttgggctagcttttctgagaaaacggggatttaaaccaatgcaaactccttttttcatgagaaaggaaactatggcgaaatgtgcccagttggcccagtttgatgaggagcttta

SEQ ID NO: 35034 - DNA, 269 bp, Zea mays
attttctcaagcacgtgattgtcttctcccaatgggcctcacatctgagaatgttgcacaccgttttggcataacacgactggagcaagatcaagctgctgttgagtcacatagaaaggctgctgccgcagcagctgctcggtaaattcaaagaggaaattgtgccagttcatacaaagattgttgatccaaaaactggtgaggaaaagaagatcgtaatctcagcagatgatggaatccgagtggatacttctcttgcagtcctgtca

SEQ ID NO: 35035 - DNA, 266 bp, Zea mays
cgtcatttaccagtatcgaagagttccttgagccacttgagctgtgctacaaatcactgtgtgactgcggcgacaaggccatcgcggacgggagcctcctggacctcctgcgccaggtgttcacgttcgggctctccctggtgaagctggacatccggcaggagtcggagcggcacaccgtcgtgatcgacgccatcaccacgcacctcggcatcgggtcgtaccgcgattggtccgaggacaagaggcaggagtggctgctgtcg

SEQ ID NO: 35036 - DNA, 190 bp, Zea mays
cggacgcgtggtgcggttggcttctcctccccctccggttcgggttcgggttcgtgtggctctccggggttcggtttcgtgggtgggcggatcgagatggcggcgtcggatgttgagtaccgctgcttcgtcggcggcctcgtctgggacacggacgaccactctctccacaatgtcttcagcacctatg

SEQ ID NO: 35037 - DNA, 263 bp, Zea mays
cccacgcgtccgcctcaaccaaattcaaggtcacagcggcgaacctctcggctatcatgtctggccgcggcaacggcggaaatggtctgggcaatggcggcgccaagcgccaccgcaaggtgctgcgcgacaacatccagggcatcaccaagccggcgattcgcaggttggcgatgaggggcggcgtcaagcgcatctccgggctcatctacgaggagacccgcggcgtgctcaagatcttcctcgagaacgtcatccgcgac

SEQ ID NO: 35038 - DNA, 258 bp, Zea mays
cccacgcgtccgcccacgcgtccgcggacgcgtggtgcggagccgaagaaatgactcgaatgtaaatcactctgacaacaaaaggctgtttacgcttgacattgagcgtatagtccggggcgaggactcccggactacactgatgataaagaatatcccaaacaagtacacatcaaagatgcttctggcagctattgatgaaagtcaccggggaacttatgattttatctacctgccaattgactttaagacatttca

SEQ ID NO: 35039 - DNA, 260 bp, Zea mays
gcgatctcgtggacccgcctccggatagcttcccggacgccggggaggacgacagcgacgatgacgtcgaggacatcgaggagctggagcgccgcatgtggcgcgaccgtatgaagctgaagcggctcagggaactgcagcagacccgcggcaaggactcgttggctagcggtgcgggactggctgatggctcgtccaagccaaggcagtcgcaggagcaggcccggcgcaagaagatgtcgcgcgcgcaggacggcatc

SEQ ID NO: 35040 - DNA, 285 bp, Zea mays
ggaatacgatacgccgctcgcctgaatcgagaccaccaccgctcccgctcatgcctcacctcgccgactagagtttttgccgccgcggatctcgccgtccccgccatggatacgtcgggctcctccgcagccgccggcgacgccccgaccaccggggagcaccggatggggaccaccattgtcggggtctgctacgagggtggcgtcgtcctcggcgctgattccagaaccagcactggaatgtatgtagccaaccgtgcttcagacaagattacccaattgaca

SEQ ID NO: 35041 - DNA, 281 bp, Zea mays
aaagaattgaatcgcactctgttgatgggcagcttgcatgctctgcgggcgccgacgccgctcgttgggagcactaggattggcttcagttcggggctccgcttttgctccaacagagtcctcagagggttaactcccattggcgcgatgaagtcgtataggctatcggagctcagcgacaccgaagttagcggcctcaaagctcgtccccgcatcgatttctcgtctatttttggcacggtgaatccaatcgttgaagatgtccgtgtgagaggtgatgc

SEQ ID NO: 35042 - DNA, 277 bp, Zea mays
gaataaagagcagcagcgcaagaggtcggtagagcgagaagaaggcaatggcggccgagagcttccttttcacctcggagtccgtgaacgaggggcaccccgacaagctgtgcgaccaggtgtcggacgccgtgcttgacgcatgcctcgcgcaggaccccgacagcaaggtggcctgcgagacctgcaccaagaccaacatggtgatggtgttcggcgagatcacgaccaaggcgaccgtggactacgagaagatcgtgcgcgacacctgccgcga

SEQ ID NO: 35043 - DNA, 279 bp, Zea mays
cagccaggccctcatcttcgtgacaaggtcccggagctggtcatttgtcgagcgcccagggtttctattggtctttgctttcttggttgcgcactcgattgccacactgattgctgtgtacgccgactgggcgttcacttcgatcaaaggcattgggtggggctgggctggcattgtgtggctgtacaacatcatcttctacttccctctcgatatcatcaagttcctcatcagatatgctcttagtgggaaagcgtgggatcttgtcattgagcagag

SEQ ID NO: 35044 - DNA, 279 bp, Zea mays
atcagcagtggccttcactattttgaagtttatggcatagattacaaagcaccatggcgtgggcctattttccgtgtgccaattactgtaataaagcctattgctctattgggagagccaccactattgtcaatttcaaaccttcgttttcaatctggtcatattgaaaggaggttcataaatgtaccttttggagcttcatgggcggaagttactatgcgaacatcagcttttgatactcctagaagattctttttggacactgttcagatctgtcca

SEQ ID NO: 35045 - DNA, 277 bp, Zea mays
ggaagcttggctggaagattacaacaaagatgacaatcgttataatgccgcgacgggggcccacttgacactcaaaagggctgagaaagctcgtattttggttaacaagatcccaggactggtagatgttttaaccacaaaaattgtagcctgggaggcagaaagaggaaaggaattcacatacgacggtgtccgccttatgtcaatgcttgaagagtacatgatcgttcgccaggagaaagagctacagaagaagaggcaaagggatcagaagaaa

SEQ ID NO: 35046 - DNA, 274 bp, Zea mays
gcggagctctccctcgacgccgccttcttcgacggcctctcgctacagggaggcgggggcgtggcggggcacaagaggagcggctctatggacggggccacctcgccgttcgagggcgagtccgcgccgacgtccgtgctgccggactacgccaagaaggccgtgcccgacgacaggctcgccgagctcgcgctcctcgaccccaagcgcgccaagaggatcctggcgaaccggcagtctgcggcgaggtccaaggagaggaagatcaagtaca

SEQ ID NO: 35047 - DNA, 278 bp, Zea mays
cccacgcgtccgcaattagggtgcttattcttactccaaccagagagttggctgctcagattcatagtatggttgagaagttaacccaattcactgatatcagatgttgtctcatcgttggaggtctttcaactaagattcaagaagttgctctaaggtcaatgcctgacatagttgtagcaacccctgggcgcaaaataatcatctgcgcaattctctttctgttgggcttgaagatctagctgttgtgatccttgatgatgctgatcgcttgcttg

SEQ ID NO: 35048 - DNA, 267 bp, Zea mays
cccaccgtccgggagattgtcgtgccggaggacgaccacggcctgtttgccatcgacattcttgatccttcctggtttgtagaacttctccatctgtctatggtgtatcacttccatgatatgattgatatgctcataaactgtggatatgagaaagggaccacactatttggatatggttatgattttcgccaaagcaacaggatagacaaagcgatggctggtttgagagcaaaacttgagacagctcataagacctctggaggg

SEQ ID NO: 35049 - DNA, 274 bp, Zea mays
gagataatattgaaacagctaaagctatagctctggagtgtggaatactagatgcaaatagtgttatttcagagccagttgtaatcgagggaaaagtgttccgtgagatgtctgaaagtgcaagaggagaggccgccgacaagataattgtgatggggagatcctcgccaaatgataaacttttgcttgtccaagctttaaaacgaaaaggccatgttgtagctgttactggtgatggcacaaatgatgccctgcattgcacgaggctgatata

SEQ ID NO: 35050 - DNA, 274 bp, Zea mays
cgagcccgacggccgtgaagcaggtgagctgcgtgtgggacgcgtacgaggccaccaagggcgcccacgggctgtgcatcctgaccgagtgggacgagttcaagaccctggactaccagaagatcttcgacaacatgcagaagcccgccttcgtcttcgacggccgcaacatcgtcgactccgagaagctgagggagatcggcttcatcgtctactccatcggcaagccgctcgacgcctggctcaaggacatgcccgcggtcgcctaatccaa

SEQ ID NO: 35051 - DNA, 274 bp, Zea mays
ccacaagtttcgtgggtagaggaggcactagatactgtgccagatcggggtctggtagtggcagttgggtgattacgacggagtgggatgggcctcctcgacaagctgtgggacgacaccgtcgcgggcccgcgcccggacaccggcctcggccgcctccgcaagcagcccgcgcgccccgccgccgttaagatcagtgatccggccggggacgctgcagcgctcgtgccgccctcgccggcttcgggtagcgaggagacgccggtgaaggtga

SEQ ID NO: 35052 - DNA, 272 bp, Zea mays
acctgagggtcatggacaactgcctcaaggtcaccacgggggttgaccacgtgttcaacctcgcggctgacatgggtgggatggggttcatccagtccaaccactccgtcatcatgtacaacaacaccatgatcagctttaacatgcttgaggctgctagaattaacggcgtcaagaggttcttctatgcatcaagtgcctgcatctaccctgagttcaagcagctggaaactgtagttagcttgaaggagtccgatgcttggcctgccgag

SEQ ID NO: 35053 - DNA, 271 bp, Zea mays
cacgaaggtggacgggcgcgggcggcgcatccggatgccggcaatctgcgcactacgggtgttccagctgacgagggagacggggcacaggacggacggcgagacaatcgagtggctgctgcagcaggcggagccgcggtgatcgggccacgggcaccgcaccatcccggccaacttcacctcgctcaacatttctctccgctcctcgggctcctccttctccatcccagcgcacctccgtgctgccggttcgcccggcccacgcttcagc

SEQ ID NO: 35054 - DNA, 279 bp, Zea mays
ctgaaagagagatggagttgaaggagaaatttgaaaagaatgttcaagaggtagctgagaagttccaaaacacaaacttgtatttgaagaacttagaggagaacattgatgatgagaaattgcgtgaactctttgctgagtatggcaatattacttcctgcaaggttatgcgggattcgaatggtgtcagcagaggttctggatttgttgctttcaaatcggctgagattccaaacgagctcctacaggagatgaatggcaaaatggttggaagcaagc

SEQ ID NO: 35055 - DNA, 267 bp, Zea mays
cccacgcgtccgataacactgccagaatagagggatggttagctcggtttcctatgtttgactgggttggtggtaggacttcagaaatgtcagctgttggtttacttccagctgcattgcagtgtattgatatcaaggaaatgctatttggtgcagctttaatggatgaggaaacccggaacactgtggttaaagcaaatccagcagcattgcttgcattatgttggtattgggcatcggaagggataggcaaaaaggatatggttg

SEQ ID NO: 35056 - DNA, 269 bp, Zea mays
cccacgcgtccggacaaataccaccttttgcgtctgtatgattacttctactatcgggaacatctgctgatagtctgtgaacttctgaaggcaaatctgtatgagtttcagaaattcaacagagaatcagggggtgaggtttacttcacaatgccaagactccagtcaatagctattcagtgtctggaggcgctgcagtttctgcatggtctcggtctaatccactgtgatttaaagccagaaaacatattggtaaagagctacagcag

SEQ ID NO: 35057 - DNA, 185 bp, Zea mays
cggacgcgtggtgtcataccacttgatatgaaaacagatggtgtatcctctggtaggacgctagatatggcatctagtcttgatgtgggttctgctgcaccccaagcctcaggggatgcacctccagatgactgtaatttgagatctgtgctgacaatcgcctttcaattcccttatgagatgca

SEQ ID NO: 35058 - DNA, 267 bp, Zea mays
cccaacccctacactcccggcggcggcgcaggagcagcagcaccagcacccgaggatggtgaagttcctcaagcccggcaaggccgtgatcctcctgcagggccggttcgccggcaggaaggcggtgatcgtgcgcgtgttcgaggagggcacccgcgaccgcccctacggccactgcctcgtcgccggcctcgccaagtaccccaagaaggtggtccgcatggactcggccaagaagacggcgaagaagtcgcacgtcaagtgctt

SEQ ID NO: 35059 - DNA, 249 bp, Zea mays
  unsure (1)..(249): unsure at all n locations
gaagcgagcacctatagtgtatgcatcggaagttaaccgctgttgcctgtggtatcattgggctccaaggctaaagcggttaacctccgaggcaaccaccatagaaggtcgaagcgagcacctcaggaagttgctgttccatttcccctgtattggcaacacaatttgagtactccaaataagcgcctgatccatgatcagagagcactattcatgtcattttgtatatgaacaatgttgcngcaagag

SEQ ID NO: 35060 - DNA, 181 bp, Zea mays
gtatattcagggattattcaacctagcaaaggacccttcagcagatgttcggaaactggtttgttcagcctgggttcagctcattgaagttcgcccatctattttggagtcacatcttaaaaatgttactgaattgattctgcaagctaataaagatccagatgatgaagtcgctctggaa

SEQ ID NO: 35061 - DNA, 219 bp, Zea mays
cggacgctgggcgcaggagccgggcaaccctaccaagtcggctaaggccatgggcagggatctgagggtccacttcaagaacacaagggagacagcctttgcgcttcgcaagttgtctttgaccaaggctaagcgataccttgaggatggtattgctcacaagcatgcaattctcttccggagatgactttgtgggggttggtcgcacgcgcaagctaa

SEQ ID NO: 35062 - DNA, 299 bp, Zea mays
gtccacggcggcggcggctgcgcggggcgggaccgactatgggacggacgacagcaagatctcccccgacgagatcctcttcgagggctgcgactacaaccactggctcatcaccatggacttcccggaccccaagccgtcgcgcgaagagatgatcgagacatacctccagactctcgccaaggtcgtcgggagttatgaggaggccaagaagaggatgtatgcttttagtacgacgacttatgttggttttcaggctgtaatgaccgaggaaatgtcagaacaatttcgcggtttgc

SEQ ID NO: 35063 - DNA, 297 bp, Zea mays
ggttcttgatgtttacgacgaaatactctccaagaacgagtacctggctggtgatgagttcaccctggccgacctgtctcaccttccgaactcgcactacatcgtaaacaccgagagaggaaggaagctcttcaccaacaagaagaatgtggcgaaatggtatgacaggctctcgaagcgcgagacatgggtgcaggtcgtcaagatgcagaaggaacatcctggtgcgttcaagtaatggcttgtcttggggagttgtgagtatggcttcatcgtccgtgttggtctggctcatca

SEQ ID NO: 35064 - DNA, 243 bp, Zea mays
cgcccacgcctccggctcttcttctcgaccggcaccagtccaccaccgcctgccaccgcgcggccccaaccaaccacaccgcagcgcacaatggcgggcaacggcgccatcgtggagagcgacccgctgaactggggcgcggcggcggcggagctggccgggagccaccgggacgaggtgaagcgcatggtggcgcaggcccggcagcccgtggtgaagatcgagggctccaccctccgcatc

SEQ ID NO: 35065 - DNA, 297 bp, Zea mays
ctctaccgcgcctaccttataatccagcgcttcaagaacaccatcattagcgaccccaagaacgtcactgccacctggattggtcatgatctctgcggagaaacgacctatgtggggttctactgcggatcgccggcaggaggagataagaagttgacagtcacaggtgtcattttgaatgggtataatctacatgcaccaacgttggaaggtttcgtcaatcagctccctgatctagctcttttccatgctgcttccaacaattttggtggcgatatacccaactaaccggcctag

SEQ ID NO: 35066 - DNA, 292 bp, Zea mays
agcacactccacaggtatttgtcatcgactatggccttgcgaagaagtatcgagatctccaaactcataagcacataccatacagggaaaacaaaaatctcacaggaacagcacgatatgccagtgtaaatacccatcttggagttggtgagtttgtggcttgtaaatacagatgtgctactgtatcatcagtatctgagcattaaatgaatctataggacaaagggcacagggaagacaaatattttcaacaaattaaaaaactctttaaaaacctgtaacgctatacttg

SEQ ID NO: 35067 - DNA, 285 bp, Zea mays
gttcgaatgggccgcaagggacgcaaggctacgggtttcgcgcgacgccgacgtcgacggcagcgaggatgagatggccgccgctcctgccgccgctgcgggcaggaagacctacgagatcttgggagttgagaagactgcttcacaacaagaaataaagaaggcatatcacaaattggctctgcacctccatccagataagaatcctggggatgaggaagcccaagagaagtgtcagcagctgacgaaggttatatccattcttggagatgcagagaaaagagc

SEQ ID NO: 35068 - DNA, 290 bp, Zea mays
caacgtggccaggggtggagtgatcgacgaagacgctctggtcagggcgcttgactccggcaaagttgctcaggcggctcttgatgtcttcaccgtggagcccccgcccaaggacagcaagctggtgttgcatgagaatgtcactgtaacaccccaccttggagctagtactgtcgaggctcaggaaggcgtcgctatcgagattgcgggagccgtggttggtgcgctgagaggggagctcgcagcaaccgctgtgaatgcgcccatggtcccagctgagaatctgtcag

SEQ ID NO: 35069 - DNA, 286 bp, Zea mays
cctatccactgcggcctggacgcgtgcgagagacttgaccaagcagcagcagcagggatggcgcctctgaagctgtacgggatgccgctgtcccccaacgtggtgcgcgtggccaccgtgctcaacgagaagggcctcgacttcgagatcgtccccgtcgacctcaccaccggcgcccacaagcagcccgacttcctcgccctcaaccctttcggccagatcccggctctcgtcgacggagacgaatcctcttcgagtcccgtgcgatcaaccggtacatcgccag

SEQ ID NO: 35070 - DNA, 255 bp, Zea mays
catgatgtcatgaatgctgccttctctggtcattatgtatgttatgttaaagatacacatggaaagtggttcaaggcagatgacagtcaggtgaaacctgtatctctggacaatgttatgtcaaagtgtgcttatatgctgctgtatgcaaggtgttcaccgagggcaccgagctctgttaggcacgctatttcggacccagcacgcccgaagaaagccaaacagaacgtggttcccaggagcacaacatggcga

SEQ ID NO: 35071 - DNA, 223 bp, Zea mays
cccacgcgtccggaaggctaccagtgtcggtgagaagaatgtcctcatctttgatcttggaggtggtacctttgatgtctccctcctcaccattgaggaaggaatctttgaggtcaaggccacagctggtgacacccatcttggtggtgaggactttgacaacaggatggtcaaccacttcgtccaggagttccagaggaagaaccagaaggatatcactggc

SEQ ID NO: 35072 - DNA, 280 bp, Zea mays
agcccgtgagatacagttccagaattgctgggggcttgaagatgataggccagccaaggcaggagagtaaaaatcctgttgttagaagggtgctcactattaacaactcgaggtctagaatcggtgataacctcatggggcgatctccagagtctagaagttgttacctgcaacaaaatcaaggatgaggaaataactcctacccttgcagagcttttctccaatctcaaagagctgaagtggcggcccgacaacaagtcacttcttgctgcaacctcgt

SEQ ID NO: 35073 - DNA, 271 bp, Zea mays
cccgcctccactcccccctcccaggcgctgcccaggtaagtcggcggcggcgatgacaacgcgcttcaagaagaaccgcaagaagcgcggccacgtgtccgccgggcacggccgcatcggcaagcacaggaagcacccgggaggtcgcggtaacgccggtggcatgcaccaccaccgtatcctcttcgacaagtaccgtccgggctacttcggcaaggttggcatgcgttacttccataagctccgcaacaagttctactgccccgcggtc

SEQ ID NO: 35074 - DNA, 260 bp, Zea mays
tgggaggacggggagctggagctcaccatcaaggactacccctacgcccacgacgggctcctggtctgggactccatcaagcagtgggcgtccgagtacgtcaacgtctactacaagtccgacgaggccgtggccgccgaccccgagctgagggcgttctgggacgaggtgcgcaacgtggggcacggcgacaagaaggacgagccgtggtggcccgtgctggacacccgcgacagcctggtggagacgctgaccaccat

SEQ ID NO: 35075 - DNA, 261 bp, Zea mays
ggaagacaattcagagaatattgggtgtgcagtactcaattccagactatgtccacatatctccagagtgccaaaatcttgtctctaggattttcgtcgccgacccagccaccaggatcaccatccctgagataaggaaccatccatggttcttgaagaacctgccagctgacctaatggatgacagcacgatgagcaagcagtacgaggagcctgagcaaccgatgcagagcatggatgagatcatgcagatcctggccg

SEQ ID NO: 35076 - DNA, 261 bp, Zea mays
cacagcgtatcatcgttttccatcgctcctactcctatcatccagaaaatctgagcggtattgatggcgcccaaggcggagaagaagccggcggcgaagaaggtggcggaggaggagccctcggagaaggcggctccggcggagaaggcccccgcggggaagaagcccaaggcggagaagcggctacctgcgggcaagtccgccggcaaggagggcggcgacaagaagggtaggaagaaggcgaagaagagcgtggagacc

SEQ ID NO: 35077 - DNA, 257 bp, Zea mays
ctgtgtgacatatatcaccatgcgatctctgatgagttttcagtggctcgtgacttgcttttaatgagtcatttgcaagatggtgttcagctcatggacatatcatcacagattttattcaatagagtcatggcccagttagggctgtgtgctttcagggctggtttgataaatgaagcccatggttgcttgactgagctctactttacagggagggtgaaagaattgcttgcacaaggtgtgcaacaaagcagata

SEQ ID NO: 35078 - DNA, 263 bp, Zea mays
caagcaaaaggcacgaccaccaccgccggccgggaagcaagctcaaaccctaatcgccgtccgccggcgacgccagcacgatggcccgctacgaccgcgccatcaccgttctctcccccgacggccacctcttccaggtggagtacgctctcgaggccgtccgcaagggcaacgccgccgtgggcgtccgcggcacggacaccgtcgtcctcggcgtcgagaagaagtccacacccaagctccaggactccaggtccgtgcgc

SEQ ID NO: 35079 - DNA, 262 bp, Zea mays
ctatggtttttgattttagccgccgccgctgctcatctcacatccctcgagaagacgcctgctcctcgccgatcgatacgatggccgtcttctccgacctccacaccgccgacggcctcaagtccctcgaggctcacctcgccggcaaaacctatgtgtctggtgactccattactaaggatgacattaaggtcttcgccgcggtgccgtcgaagcctggcgctgagtttcctaatgccgcccgctggtacgagaccgtctc

SEQ ID NO: 35080 - DNA, 258 bp, Zea mays
gtttgacgtatgaaaaccagtcagccatgaagagggaaaacacaaaatggcaagcagaaagggatgtttggtggcaggacgttgtcacaaaatttccaaccaaatgtgatgtggagtgggtggatgcagaggatccattgttccttttgtacacaagtggcagcacagggaagccaaagggtgtactgcatacttctgggggctacatggtgtacactgcaacaacatttaagtacgcatttgactacaagccaactg

SEQ ID NO: 35081 - DNA, 252 bp, Zea mays
cacgagcgtaaaccctcctagtccggcggtgatggccggcgtcggtggcagcggcggtggaggtggggacgacgcggagatgggcggttggacggggcttctccactcctccacgaagctcctcgagcaggcggcgccaaccccgcacttccctccccttcagaggaatctggaccagctcgaggcgctctccaccaagctcaaggccaagaccatccgctctgaggctccgtcacagtcgctctccgccac

SEQ ID NO: 35082 - DNA, 256 bp, Zea mays
agtctgttgagatgcaccacgaggcgcttcaggaggctcttccgggtgacaatgttggcttcaacgtgaagaacgttgctgtcaaggatctcaagcgtgggtttgtggcctccaactccaaggatgaccctgccaaggaggctgccagcttcacctcccaggtcatcatcatgaaccaccctgggcagattggcaacggctatgccccagtgctggactgccacacctcccacattgctgtcaagtttgctgagct

SEQ ID NO: 35083 - DNA, 256 bp, Zea mays
cttcatctgaaagatgaacacagcaagccattgtcttggaacaaccgtgtcaagattgcgcttggatctgcaagagcattagagtacctacatgagacttgttcaccctctgtggtccacaagaatttcaagtcatccaacattttattggatggtgagctgaccccccacctctctgattctgggtttgcaggccttcttgcaaaccaggaattccaggaatcagatgagaactcaggatacagggcacctgagg

SEQ ID NO: 35084 - DNA, 256 bp, Zea mays
ccaagctaggtgctcgtctcaccgaggtccgcaagaacggaacctgcccctggctcaggcctgatgggaagacccaggtgacagtcgagtaccgcaatgagggtggtgccatggtccccatccgtgtccacaccgtcctcatctccacccagcacgacgagacagtgaccaatgatgagatcgctgctgacctgaaggagcatgtcatcaagcctgtcatccctgagcagtaccttgacgagaagaccatcttcca

SEQ ID NO: 35085 - DNA, 259 bp, Zea mays
acaattttcaacaatgttggaggttacgagggattatttcttggtggcccaaggccaacctgggtttttgtttgtcgacagcgatttcgggtgcatccacagttatgcgacggtccaattgtagcctttactgttctccacaatgtcaattgttgccgtggccttatttatgtgacatctcagggttttctgaagatatgtcagttgccatctgcatataactatgacaactactggcctgttcaaaaggtccccttgc

SEQ ID NO: 35086 - DNA, 251 bp, Zea mays
ccgattgcctatccccctcccaaccaaagaccgatggcgcccaaggccgagaagaagcccgcggcgaagaagccggcggaggaggagcccgcggccgagaagacgaccgccgggaagaagcccaaggcggagaagcgggtccccgcgggcaagtccgccggcaaggagggcggcgagggcaagcgtggcaagaagaagggcaagaagagcgtggagacgtacaagatctacatcttcaaggtgctgaagca

SEQ ID NO: 35087 - DNA, 251 bp, Zea mays
ccttctctcacttacattgctgtgaacaaggatggagaaacattctccaatatttcaccgaacgccgtgaatgctgtcacgtggggtgttttccctggcaaggagattatccagcctacggttgtggatcatgcaagttttatggtttggaaggacgaagcatttgaaatctggactcgggggtggggttgcatgttccctgagggtgattcatcgagggagctactagagaaggttcggaagacctacta

SEQ ID NO: 35088 - DNA, 248 bp, Zea mays
acgacaaggagtgcactgtcagctctagcttgctgcagaacaagggcaagatggcaagaggtggtcggctactgatcctctccctggggcttgtgctcctctacttcgtctcaggaagtgttgctgctgctgctgcacagaaaacgtggtgcgttgccaagccgtcggcgtccaacgatatcctgtctctgaacctcaactacgcgtgctcccaggtgagctgcggcgtgatccagaagggcgggccg

SEQ ID NO: 35089 - DNA, 251 bp, Zea mays
gttgagtttactgtgaaagatggctacttttgtcctgccctggccaaagctgtcaaaaccatgaaaaaggcagagaaggtgctccttacagtaaagccacaatatggatttggtgagaagggtagaccagcagctggagaggaaggtgctgtgccgccaaatgcttcgctgctcattgaccttgagttgatttcatggaagactgtcacagaaattggggatgataagaaaatccttaagaaggttctcaa

SEQ ID NO: 35090 - DNA, 268 bp, Zea mays
aatgtctctgaggtggcttacgccgtgggcaaggacacgagaattggccccaagttcctgaacgccagtgttgggttcggtggctcatgcttccagaaggacatcctgaacctggtgtacatctgcgagtgcaacggcctgcccgaggtggccaactactggaagcaggtgatcaagatcaacgactaccagaagagccggttcgtgaaccgcgtcgtggcctccatgttcaacaccgtcgccggcaagaagatcgccgtcctcggct

SEQ ID NO: 35091 - DNA, 267 bp, Zea mays
cccacgcgtccgcagagatgcaagaagagttggaagggctaaaagacaccttgcaatccgaacgacaaagttccaaagaagtaaaaaatgagcttgataagctaaaatctctatgtgatgagaaagaatctgctttgcaggctgccctgatggaaaaaagtagacttgaaaccagattaacaagtagccagggccgtgagagagatactttgacaactgtaggcagcgtcaatagtgacattgagatgcttaccaagcttaaggagg

SEQ ID NO: 35092 - DNA, 266 bp, Zea mays
ggcagccgccctacggggagaccttcttcggccgccccaccggacgctgctccgacggccgcgtcatcgtcgacttcctggccgagcactttgggctgcccctgctgccggcttcgaaagccggcggcgacttgaagaagggggcgaacatggcgatcatcggcgccaccaccatggactttgacttcttcaagtccatcggcctcagcgacaagatctggaacaacgggccgctggacacccaaatccagtggttcaggcagctg

SEQ ID NO: 35093 - DNA, 268 bp, Zea mays
gacaccatggctccgatgaagctgtacggggcggtgatgtcgtggaacgtgacgaggtgcgcaacggcgctggaggaggctggctccgactacgagatcgtgcccatcaacttcgccaccgccgagcacaagagccccgagcacctcgtccgcaacccgtttggtcaggttccagctctgcaggatggtgacttgtacctcttcgaatcacgcgcaatctgcaagtacgctgctcgcaaaaacaagccagagctgttgagggaaggaa

SEQ ID NO: 35094 - DNA, 266 bp, Zea mays
gcaagctccgagccctcatcgccgagaagagctgcgccccgctcatgctccgcctcgcgtggcactccgcggggacgttcgacgtgtcgtcgaggaccggcggtccattcggcacgatgaagcatcagtcggaattggctcacggcgctaacgcggggctggacatcgcggtgcggctgctcgagcccatcaaggaggagttcccaatcctctcttacgccgatttctaccagctcgcgggagttgtggccgtggaggtcaccggt

SEQ ID NO: 35095 - DNA, 265 bp, Zea mays
cagacgcgtgggcgccacccagatcgagcagcagaagctcgaggagcagaagaccgaggcagaggaagttgtggtggaggatgaggaggaggaagatgaggacgatgacgatgatgacaaggatgatgatgaactcgatgaaggggatgccagtggcaagtcaaagcaaagcaggagtgagaagaagagccgcaaggccatgctgaagcttggcatgaagcccatcactggtgtcagccgcgtcactgtaaagaaaagcaagaat

SEQ ID NO: 35096 - DNA, 264 bp, Zea mays
agcgagccgacgccaacgaaggcgctctggctctcttgcttggacatggttcagtccaacaaagcccacaccccaacgatccacttgtacagctccaacgatgctgcggcggctgattttttcgacctgggcagactcaagaaggctacggccaaagccttggtggccttctaccccctcgccggacgcctcgtcgacagcgacgatggtaggaaggagatcagctgcaacggcgaaggtgcactctttgttgtcgctcgcgcg

SEQ ID NO: 35097 - DNA, 260 bp, Zea mays
cggaccgtggtccaggactcacctccccaaccgtttgcctccgtctcgcgtgacttcattcccagcgaccggcggcgacctccacgtggtgccattcgccggcaacgagcacccgcccaccaggatccaggtttgtgctgcgagagcgcctatccattcaccatgattaatttcgtgctcctgatcagccgccagggcaaggtgaggctcaccaagtggtattctccttacacccagaaagagaggaccaaggtcattcg

SEQ ID NO: 35098 - DNA, 259 bp, Zea mays
cacacaggcaaagatggcgagcgtgcacaaggccaccacccttgttctcatgttctgcctgctagcgctggggagagcggagtacctcaagtacaaggacccgaagcagcccgtcgctgttcgcatcaaggacctgctgggtcggatgactctcgctgaaaagatcggccagatgacgcagatcgagagggaaaacgccacggccgacgcgctggccaaatacttcataggtagcgtgctgagcggcggaggcagcgtg

SEQ ID NO: 35099 - DNA, 262 bp, Zea mays
ctccctttccccttccctccctccctctccccgcgggccgccagaggcaatttcgccctcgattcgaccccgattcgtccgcccgcgaccgggattccctccgccaagcgcggatctgaacgctgcgctccgtgtcgccgctcgaatccgccatgaagggggccaaatccaagggcgccgccaaggccgatgccaagctggcggtgaagagcaagggggcggagaagcccgccaagggcaggaaagggaaggccggcaagga

SEQ ID NO: 35100 - DNA, 261 bp, Zea mays
cccacgcgtccgggtacaatgtggctatcaagtgtgccaccattacaccagatgaagcaagggtaaatgagtttggcttgaaggctatgtggaagagcccaaatggcacaattaggaatattctgaatggcactgtgttcagagaaccaatcatctgcaaaaacatcccacggcttgttccagggtggacaaaacccatttgcatcgggaggcatgcattcggtgatcagtaccgggcaactgatgcagttatcaaggggc

SEQ ID NO: 35101 - DNA, 259 bp, Zea mays
cccggcttccccgcaagacccacaggggtctccgcaaagttgcttgtatcggtgcatggcatccggctagggtctcctatacggttgcccgtgctggtcagaatgggtaccaccaccgcactgagatgaacaagaaggtgtacaagatcggcaaggctggacaagagacccacgatgcctccacagagtttgacaggactgagaaggacatcactcccatgggtggcttcccccattatggtatcgtgaagggtgacta

SEQ ID NO: 35102 - DNA, 257 bp, Zea mays
gcttctgctgcggcggcggctaacgcgacgatagaagagcgggtgatggggccgtggtccccagaggaggacgcggtgctgagcaacctcgtggagaagttcggggcgcggaactggacgctgatcgcgcgtggcatcccgggccgctccggcaagtcctgccgcctgcgctggtgcaatcagctcgacccccaagtcaagcgcaagcctttcactgaagaggaggaccgcattataatggcagctcatgctgtcca

SEQ ID NO: 35103 - DNA, 257 bp, Zea mays
ggcggcaagtccgctgacggactcggcacttgcacctacgtcaaagctaggcacgtattgtgtgagaagcaggggaagatcaatgaagcttataagaagttgcaggatggatggctgaataatggggacaaagttcctcctgctgagtttgctaaggtagcacaagagtattctgaatgcccatcagggaagaaaggtggagatcttggttggttcccgcgtggcaagatggctggtcctttccaggaggttgcttt

SEQ ID NO: 35104 - DNA, 256 bp, Zea mays
cagatccttaattgtctgtctgatttggtctactggacggtttgtgcatgtatgcagacgcagcacaaagtcgaaatggacaagagggatggaaagttcagcccacagcctatggcagtgcccccggtgcaacaaatgacacgcatcgatcagcctatgccgcctcctgctggatatgcaccgcaaccagcatatgggcagccttatggtggctatccatctcctcctggccaaggttatccacctcctcctggcc

SEQ ID NO: 35105 - DNA, 256 bp, Zea mays
gtcaaaacttaagaaaagcgaacattcactagagaaagggagagagaaattgagcaggttgttgaatcagtcaacgaacttgcacagatcatgaaggatctttcagttcttgtgattgatcagggaaccatcatcgatcggatagactacaacatacagaacgttgcagcttcagttgaggaaggttacaaacaattgcaaaaggctgagaggacccagaagaaagggggcatggtgatgtgtgccactgtcctag

SEQ ID NO: 35106 - DNA, 255 bp, Zea mays
cgccaatccgtacatggtcgggctttattttacccgggtgaaattaggaaacccggcaaaggaattcttcgtccagattgacactgggagtgatatattgtgggtcacttgcagtccttgcactggttgcccgacatcaagtggactcaatatccagctagagtccttcaaccctgactcttcatcaacagcatccagaataacatgctctgatgacagatgtacagctggcttccaaacaggggaagcaatctg

SEQ ID NO: 35107 - DNA, 257 bp, Zea mays
ccgatggcccgcacgaagcagacggcgaggaagtccactggcggcaaggcgccaaggaagcagctggccaccaaggcggcgcgcaagtctgccccggcgaccggcggagtgaagaagccccaccgtttccgccccggcaccgtcgcgctccgggagatccgcaagtaccagaagagcacggagctgctgatccgcaagctgccgttccagcgcctggtgcgtgagatcgcccaggacttcaagaccgaccttcgctt

SEQ ID NO: 35108 - DNA, 255 bp, Zea mays
cctccccatcgcgtctgtccgctacccctccccgaccagatcgctacgagacgccgcgcgatcggacccaggccgacgccgacgacccctctcgccgccggggccatggcgtacggcgaccgcgtcaccaccttcgaggactccgagaaggagagcgagtacggctatgtccgcaaggtctctggacctgtggttgtggctgatggaatgggtggtgctgccatgtatgaacttgttcgtgtcggacatgataac

SEQ ID NO: 35109 - DNA, 259 bp, Zea mays
cccacgcgtccggccagtttgctatggcgaacggcatcatctccaagaagttacacgagcagagaatcgacgggaacgtcatagagcttagtgtccatgctttctgcccgctgctcaaagggaaaaggggcggtgctgtgacaaaggttgggccatggggcggaagcggagggtctccaatggagctgacagagacggagacgctccatgcgtctgtagagcatcaccgtcatcatcggcgtggccgtcaactccatct

SEQ ID NO: 35110 - DNA, 271 bp, Zea mays
catatctcctcgcatttccttgcaaccgattgccttcccccctcccaacccaagaccgatggcgcccaaggccgagaagaagcccgcggcgaagaagccggcggaggaggagcccgcggcggagaagacgaccgccgggaagaagcccaaggcggagaagcggatccccgctggcaagtccgccggcaaggagggcggcgagggcaagcgtggcaagaagaagggcaagaagagcgtggagacgtacaagatctacatcttcaaggtgctg

SEQ ID NO: 35111 - DNA, 280 bp, Zea mays
gccttctgcgcctccatttcggcctctgtcccttgcaagttcaatctcacctccaaccatgggtaaagagaagtcccacatcaacattgcagttattggccacgttgactctggcaagtcgaccaccacaggacacctgatctacaagcttggaggcattgacaagcgtgtgatcgagaggtttgagaaggaggctgctgaaatgaacaagcggtccttcaagtacgcatgggtgctcgacaagctcaaggctgagcgtgaaagaggtatcaccattgat

SEQ ID NO: 35112 - DNA, 268 bp, Zea mays
aacaaccccgcttctgccggccgttttgcaggaggcgttgcggccatggcggcttcgaagcccatcttgtatagcgcgtggatcagctcctgctccttccgagtccggatcgccctcaacctcaaaggtgtggattatgagtacagggctgtgacaaggaacgatctagattacgaaaagatcaatccaatcaagtatgttccagcattggttgatggggattttgttgtttctgactccctggcaatcatattgtatcttgaagata

SEQ ID NO: 35113 - DNA, 269 bp, Zea mays
tcagcctcggcacgcttgcggactgacaagaatgacaagtcagtcaaggatctcgtgatgctgctgttcgagactgctctcctgacctccggcttcagcctggatgaccccaacaccttcggcaaccggatccaccgcatgctcaaactcggtctgagcatcgatgaggacgagcctgttgaggcagaggctgagatgcctcagcttgaggacgacgctggtgaaagcaagatggaggaggtcgactaagtgtcgcatcgcatgcttgc

SEQ ID NO: 35114 - DNA, 270 bp, Zea mays
cgcaagtccaccggacgcaaggccccgcgcaagcagctcgccaccaaggcggcgaggaagtctgcgccgacgaccggcggcgtgaagaagccccacaggtacaggcccgggacggtggctctgcgcgagatccgcaagtaccagaagagcacggagctgctgatccggaagttgcccttccagcgcctggtccgtgagatcgctcaggacttcaagacggatctgcggttccagagccacgccgtcctggccctccaggaagccgccgag

SEQ ID NO: 35115 - DNA, 264 bp, Zea mays
tgctctcgtccctagaaatgaagcagctcctccgcggggcggcgaactgctactcatcgccaaaaccctagcgccgatccggtcgaggagcactacgtcatggcatggcgggcagccctagccaggcaagactcctgctccagaagcagctcaatgatcttgcgaagaagcccgtggatgggttctccgcagtgcttgtagacgatagcaacgtcttcgagtggcaagtcgacatcatccggccgcacgacactctatatgatg

SEQ ID NO: 35116 - DNA, 149 bp, Zea mays
ggtgcggtggtgatgttcttgaggcatgaataatgctacatgcatgtgatgtatccatgttttgtgtgtggtaaacctgttgtttgtataagctgtatgcatgggtctttaatttgtttttgaagcagggttcacgttattaatttgtc

SEQ ID NO: 35117 - DNA, 271 bp, Zea mays
cacaaaggaagtacttgtaaatgggatcagtgtacgggtcaaatactgtgatacttgcatgctgtaccgaccacctcgatgctcacactgttccatttgcaataactgtgtggaacggtttgatcatcactgtccatgggtcggccagtgcataggactgcgtaattatcggttcttctatatgtttgtattctcgacgacattgctctgcctctatgtatttgccttctgttgggtgtatgtgatcaagattagagctgctgagcaatcg

SEQ ID NO: 35118 - DNA, 271 bp, Zea mays
cgacggccaaccgcgccaccctgccgcggcagccatggtgcatgttaacttctaccgcaactatgggaagactttcaagaagccaaggcggccgtatgagaaggagcgcctagatgctgagctgaagctggttggtgagtatggcctgcggtgcaagcgcgagctgtggcgcgtgcagtatgccctgagccgtatcaggaatgcagccagggagctgctcaccctggatgagaagaaccacgccgtatctttgagggcgaggcgtcctccg

SEQ ID NO: 35119 - DNA, 266 bp, Zea mays
cccacgcgtccgcccacgcgtccgaggacatgcgccacagcaacagcgtcaaggacgaggaagggtacccggccttcgcgctcgtcaacagggtcaccggcgaggccatcaagcactcccagggcgagggccacccggtcaagctggtgccctacaaccccggctaccaggacgagtcggtgctgtggacggagagccgcgacgtcggccacggcttccgctgcgtccgcatggtcaacaacatctacctcaacttcgacgccttc

SEQ ID NO: 35120 - DNA, 266 bp, Zea mays
caagaagcagattttactatttgctgttgcaagcgagtccaccaaatttctgcccatctttaaggaagcagcaaaaccatttaagggaaagttattatttgtctttgtggaacgagacagtgaggaagttggtgaaccagttgccgactactttggtattactggacaagagaccacagttcttgcttacactggtaatgaagatgctaggaaattttttcttgatggtgaggtgtcacttgaagctataaaggacttcgctgaag

SEQ ID NO: 35121 - DNA, 265 bp, Zea mays
cggacgcgtggatccccaccaacaagaggtacaacgccgccaagatcttcagcagccctgaggtcgccgccgaggagccgtggtatggtattgagcaggagtacaccctcctccagaaggacaccaactggccccttgggtggcccatcggtggcttccccggccctcagggtccttactactgtggaatcggcgccgaaaagtcgttcggccgcgacatcgtggacgcccactacaaggcctgcttgtatgcgggcatcaacat

SEQ ID NO: 35122 - DNA, 264 bp, Zea mays
cggacgctggcgaggtggtcccgtgccccccgcggtatcgcccaggcctgtgacggccagcgcatctcgggaagatggagggagacgacttgtcatccttgtcgccatcaccggtcccgtacattttcggtggtgggttgaggggaaggaagccaccggctatggagaaggtggttgagaggaggcagcgccggatgatcaagaaccgggagtcggccgcgacgtcgcgccaaaggaaacaggtaaatacatttgtcggtgggt

SEQ ID NO: 35123 - DNA, 73 bp, Zea mays
cagaggtgggttgggttctcgtccccctccggttcgggttcgtgttcgtgaggttctcgggggttcggagttc

SEQ ID NO: 35124 - DNA, 269 bp, Zea mays
gcggcgaagaaggtgctcatgctctgcggcgactacatggaggactacgaggtcatggtcccgttccaagcgctgcaagctatggggtgtccgtggacgccgtctgccctagcaagaaggccggcgacatctgccgcaccgccgtccatcagctgaccggtcaccagacatactctgagacaaaaggccataatttcacactgaatgcttcatttgatgagattactgctagtgcatatgatggattggtaattcctggagggcgtgca

SEQ ID NO: 35125 - DNA, 267 bp, Zea mays
ggcatacagtatccatggtgagaatagatattttgatacaccaacaaatcctgccgctccagatcgagtaccaggaggatgttcaagtggatcagctgttgcagttgctggtggaatggtagattttgccctgggtattgactcgattggaggtgtaaggatacctggtgcttattgtggtgtcttagcattcaggccttcgcatgctgtggtttccaatagtggtgtcattcctgttgcacctagcctggacactataggttggtt

SEQ ID NO: 35126 - DNA, 237 bp, Zea mays
actctccgggacctggccgagggcatgtacacgggccagttcgtctactgcggtcgccgcgccaccctcagcatcggcaacgtgctgcccctccgcgggatccctgagggtgccgtcgtctgcaacgtcgagcaccacgtcggtgaccgcggtgtcttcgccagggcctctggggactacgccattgtgatcagccacaaccctgacaacggcacatcgaggattaagctgccctct

SEQ ID NO: 35127 - DNA, 269 bp, Zea mays
ggggaatcatatgctgggcattacattcctgcctttgcaagtcgtgtgcaccagggaaacaagaacaatgagggcattcacattaacttgaagggttttgctattggcaacggactaacagatccagcaatacagtacaaggcataccctgattacgcattggatatgggattaattacaaaaacacaatttaacaggatcaataaaatagttccaacttgtgaattcgcggtcaagctttgtggtacttctggaactgtatcttgcct

SEQ ID NO: 35128 - DNA, 267 bp, Zea mays
catcttttctcgtttagaacctctaaaatttcccccactcgccagtcgcagcagcacctgtagcagccatggacgccagcggaccggtagcaaggggaagaagggggcggccgggcgcaaggcaggcggccccaggaagaagtcggtgacgcggtccgtcaaggccgggctgcagttccccgtcggccggatcgggcgctacctcaagaagggccggtacgcgcacgcgtgggcactggcgcccccgtctacctcgccgaccgtctg

SEQ ID NO: 35129 - DNA, 268 bp, Zea mays
gagggatgagaatgagggccgtggtgatcacgtgcgccggcgggccggaggtgctggaggcgcgggaggtggaggaccatctcgcgctaggcgaaggagaggtgctcctcgaggtcgccgccgcgggcgtcaatcgcgcggacaccgtgcagcggatgggccggtacccgccgcctgccggcgcgtctccttacccgtggctcgagagctccggcaccatcctcgcgctcggcttcaacgtcgtctcccgctgggccgtgggcgataa

SEQ ID NO: 35130 - DNA, 266 bp, Zea mays
gtcgacgggcggcaaggcgccccgcaagcagctggcgaccaaggcggcgcgcaagtctgcgccggccaccggcggcgtgaagaagccccaccgcttccgccccggcaccgtcgcgctccgggagatccgcaagtaccagaagagcacggagctgctcatccgcaagttgcccttccagcgcctcgtccgtgagatcgcgcaggacttcaagaccgatctccgcttccagtcctccgccgtcgcggcgctgcaggaggccgccgagg

SEQ ID NO: 35131 - DNA, 259 bp, Zea mays
aagttcaactaccccatggcctggtccatgaccatgctcagctggagtgtcatcgagtacagggcgaagtatgaggccatcggtgagctcgaccatatcaaggagctgatcaaatggggaacagactacatcctcaaaaccttcaattcatctgctgacacgatagacaggatcgtcgctcaggtgggtgtaggtgacacctctaaaggcagcagtcagcctaatgaccattactgctggatgagaccagaggacatcg

SEQ ID NO: 35132 - DNA, 120 bp, Zea mays
cgctgctgctcgagacctacatccgcgaccacgtcgagaaggaccgcctgttccgcgccatcgacaccgtgcccgcggtccggcgcaaggctgactgggccatgcgctggatcgacggcg

SEQ ID NO: 35133 - DNA, 260 bp, Zea mays
ctcgaagggatatgccttctgtgtttaccaggatcttaatgtcactgacattgcctgtgctgcccttaatggcatcaagatgggggacaagactcttactgttaggagggcaaaccaaggagcttctcagcctaggccagagcaagaaagcatcctgctgcaggcacagcagcaggtgcaaatgcagaaactcgtataccaagtcggaggtgccctgccgacaaaagttgtctgcctgacacaggtagtgacagcagatg

SEQ ID NO: 35134 - DNA, 259 bp, Zea mays
ctctcgttccatttccccatctcccagatccaattcgcgagttctccctcctctgcggccatggcgctctctgtggagaagacctcgtctggacgggagtacaaggtcaaggatctctcgcaggcggacttcggccgcctcgagattgagctggccgaggtcgaaatgcccggcctcatggcgtgccgcgccgagttcggcccgtccaagcccttcgccggcgctaggatctcggggtctctccacatgaccatccaga

SEQ ID NO: 35135 - DNA, 261 bp, Zea mays
gaaccagctcaccggcccaatcccgtcatctttctcgtgcctaatcagcgtcgagcagctcaacctggccggaaaccgcctctacggtcaggtacccgacgcgctctgcaagcttgctgggcccgctggccgcctcgccaacctcacgctgtccggcaactacttcacatccgccgggccggcatgcgcggcgctgatcaaagacggagtgctggacgtgaagaacaactgcattccggggctcaccaaccagaggcgccc

SEQ ID NO: 35136 - DNA, 259 bp, Zea mays
cacacacagacaagtggtttccaaagccaagtgtgtgtactagcaaccagctagctcgggcggcagcaggcagccatcatgtcggaggagaagcaccaccacttcttcaaccaccacaagaaggacgaggagcagcccgccggcgagtacgggtactccgagaccgaggtggtcaccgccaccggcgagggcgagtacgataggtacaagaaggacgagaaggagcacaagcactagcagcacctcggcgatgccggcg

SEQ ID NO: 35137 - DNA, 257 bp, Zea mays
ctcgaagggatatgccttctgtgtttaccaggatcttaatgtcactgacattgcctgtgctgcccttaatggcatcaagatgggggacaagactcttactgttaggagggcaaaccaaggagcttctcagcctaggccagagcaagaaagcatcctgctgcaggcacagcagcaggtgcaaatgcagaaactcgtataccaagtcggaggtgccctgccgacaaaagtagtctgcctgacacaggtagtgacagcag

SEQ ID NO: 35138 - DNA, 255 bp, Zea mays
cggacgcgtggcaatctccccagcaatccctagcagaagccttccatcctcactcgctcgatggcccgcacgaagcagacggcgaggaagtccaccggcggcaaggcgccgaggaagcagctggcgactaaggcggcccgcaagtctgcccctgcgaccggcggagtgaagaagccccaccgcttccgccccggcaccgtcgcgctccgggagatccgcaagtaccagaagagcacggagctgctgatccgcaag

SEQ ID NO: 35139 - DNA, 257 bp, Zea mays
ctcctagctcctctactcgccagtcgccatgggcaagattaagatcggaatcaacggcttcggaaggatcggcaggctcgtggccagggtcgccctccagagcgaggatgtcgagctcgtcgccgtcaacgaccccttcatcaccacggactacatgacctacatgttcaagtacgacaccgtccacggccactggaagcacagcgacatcacactcaaggactccaagacccttctcttcggtgacaagccggtca

SEQ ID NO: 35140 - DNA, 256 bp, Zea mays
gctgcttgagctgaccggcggcgactccaccagcgaccggtcggggcttgacctggtggcggtgctggacgtgagcggcacatgcagggcgagaagatcgagaagatgaagaccgccatgaagttcgtggtgaagaagctcagctccatcgaccgcctctccatcgtcaccttcctggacaccgccaacaggatctgcccgctgcggcaggtgaccgaggactcccagccgcagctgctgaagctcatcgacgccc

SEQ ID NO: 35141 - DNA, 276 bp, Zea mays
gtacagtggggattatggtgaagctggtacgaaagagttcctgaaggactttcatcggcggaggcttcaggttcttgctgaagcaggcccggatttgattgcttttgaaacgatccccaacaaattggaagctcaggcatatgttgaactccttgaggaatgtaacatcaatatcccttcatggctttccttcaactcaaaagatggagtgcatgttgtgagtggtgattcgttaattgaatgcgctactattgctgacaagtgtgcaaaggttgg

SEQ ID NO: 35142 - DNA, 281 bp, Zea mays
gggcaagacattgcgcacgagttcaaccatacaaatggtctttctctcatttcaagggcccatcaacttgtaatggaaggatttaattggtgccaggataagaatgtagtcacagtcttcagtgcgcctaattattgttaccgctgtggtaacatggccgctattcttgaaatcggggaaaacatggaccagaacttccttcaattcgacccggcacctcggcaaattgagccagacacaactcggaaaaccccagactactttttgtaattgtggtggtg

SEQ ID NO: 35143 - DNA, 280 bp, Zea mays
cccgtcgcatcccatcccactaccacccatctcgtcgtccgccgattcgatccggggcgtccaacccaggggcagtgatggcgacgaagaggagcgtgggcaccctcggcgaggcggatctgaaggggaagaaggtgttcgtgcgcgccgacctcaacgtcccgctcgacgatgcccagaagatcaccgacgacacccgcatccgcgcctccgtccccaccatcaagttcctcctcgagaagggcgccaaggtcatcctcgccagccacctgggtcgtcc

SEQ ID NO: 35144 - DNA, 279 bp, Zea mays
ccgcgacgaaggagaggcatccctcccttccgcgtggtgtgctctctgttcctacgccgtttcctctcccgactctctcctcgccggcgacgccgcggagtaggtgcaacagaaactgctcgaggcggaggcggagctgcggctgcacagacatgggtgatcacgaggcgcgcggtgatgacttcgagaagaaggcggagaagaagctctcgggctggggcctcttcggctccaagtacgaggacgccgccgacctcttcgacaaggctgcgaactcct

SEQ ID NO: 35145 - DNA, 274 bp, Zea mays
ataaatctccgctgcgcgtggggatgttgtctgttcaccttggggagcagcggcgggccgtcggcgagaaatgcccggtggcgccttcctcctcaacggcagctgcggcggcatggcggactacggcggcggcctcaccgtccccgtcgttgtgacctgcctcatggcggcctccggtggcctcatcttcggctacgacattggcatctcaggaggtgtgtcggagatggaggatttcctgaacaagttcttccccgggttgctcaagacgacg

SEQ ID NO: 35146 - DNA, 273 bp, Zea mays
gatcaatcaatatactacatactacattgcagatcaacaaactcctccgcagggagggaccgagctactcgtccgactggggcgtccaatattactttcaaaggaatggcgtgcaaattggacagatggcgcactcaatttggctttacatcgtcccatcgggcatgtatggagtcgtgaactacctaaaggaaaagtaccataatccaatcatcatcatatcggaaaacggaatggatcagcctggagacctcacgcgcgaggagtacgtgc

SEQ ID NO: 35147 - DNA, 268 bp, Zea mays
cccacgcgtccgcccacgcgtccgctggttcctgactatgcgatgtcattcatcaagggcaaatcactcaagccattcgggcgcctgtggtgggacgagacggttcctacagttgtgaccagagcagagcctcataaccaggttatattgcatccgactcaagcaagagtcttgactatccgggagaacgcaaggttacagggcttccccgattactaccgattgtttggaccgatcaaggagaagtatattcaagtcgggaacgcag

SEQ ID NO: 35148 - DNA, 276 bp, Zea mays
cccacgcgtccgcccacgcgtccgaaaaattataatagctaatcttaccatggttccaatagtaggagaaatatacagggactgtgagatcaagtcaatagctccatatggtgcttttgttgaaattgctccagggcgtgagggtttatgtcatatcagtgagttaagttcgggctggttggccaaggctgaggatgcttttaaagttggagatcgcatagacgtcaagcttattgagataaacgataagggtcaacttcggctaagttctcgagc

SEQ ID NO: 35149 - DNA, 272 bp, Zea mays
ctggtggtgtccgtggtgctccacagagtgaagcataccaggagaggcgacgatgcgcaagtgggcgctctcctccgcgctcctcctcctctttctcctcaccacactccccgacccagctaagaagctacaagtgaatgccgaggagagcagcgatgacttggctaacccacccaaggtagaggagaagcttggtgctgtccctcatggcctgtccaccgactctgaggttgcccagagggaagccgagtctatctctaggaagactctca

SEQ ID NO: 35150 - DNA, 272 bp, Zea mays
ctgagtcacctcattggacatgaaggcgaggggtccatcttccatattataaaggaactaggatgggccatgaacttaatggctggagagtgcagtgacagtaatgagtattcctttttctcagtaagcatgaggctcactgatgctggccatgaacgcatggaggatattgttgggttgatcttcaaatatcttcatctattaaaagaagacggagtccatgagtggatatttaatgagcttgcggcgataaatgaaatggagttccatta

SEQ ID NO: 35151 - DNA, 271 bp, Zea mays
gtgggttggcttctcctccccctccggttcgggttcgggttcgtgaggttctccggggttcggtttcgtgggtgagcggatcgagatggcggcgtcggatgttgagtaccgctgcttcgtcggcggcctcgcctggtccacggacgaccactccctccacaacgccttcagcacctacggcgaggtcctcgagtccaagatcatcctcgatcgggatacgcagaggtcccgctgcttcggcttcgtcaccttctccacggaggaggcgatg

SEQ ID NO: 35152 - DNA, 273 bp, Zea mays
  unsure (1)..(273): unsure at all n locations
ccccaaaaggccaaaacccgtgcacaccggcgacggccngagaacctcccgccggccgccgccatgccgccgcctctacaggcccaccgcctactcatctcccaccgccgcctacccactccagctcgccgccggttcaccgccgcctcttccgtccaatccgctcccgccacaaccttggccccgggccccgccacatcctccatcctctccatccgcgagtcgctcctctcaggcgagaggaccgcggcggacatcacctccgagtacctc

SEQ ID NO: 35153 - DNA, 265 bp, Zea mays
gagaaatcgctgattatgtctcaaatgagcttggagaagagatttggcgagtccagtgtttttgtagcctctactctgatggaatatggtggtgttccacaatctgcaactccagagtctcttctgaaagaagctattcatgtcatcagctgtggctatgaggacaaaactgactggggaactgagattgggtggatatatggttctgttacagaagacattctcaccggattcaagatgcatgctcgaggctggcgatcaatct

SEQ ID NO: 35154 - DNA, 266 bp, Zea mays
cccacgcgtccgcccacgcgtccgtgctgggactgaggttgaattcgatgactcaaagcatcttattctcaaagaagacgatatcattggtattcttgagacagatgatgtgaaggacatgaagcctctcaatgaccgtgttctcatcaaggttgcagaagccgaagacaaaactcctgggggccttatcctcactgaaacaactaaagagaagccgtccataggaacggttgtagctgttggcccgggtcctctggacgaggaag

SEQ ID NO: 35155 - DNA, 269 bp, Zea mays
cagcaatcgtattccggaagcagcattgatggcaagatcttatcttccaagcaaagtccctgagattgtagcattgtggaaaaaggatctccagaaggtaaactcaaaagcagcagagtcgctggctgatcctaatgagtacccaaacttatttgaagactggcagattgctctcaacgtagaagctgctgttgcctctaaaaggtttttttgttcttttttcttcatctataactgtatccttttgtattgtctctgattacctcttg

SEQ ID NO: 35156 - DNA, 270 bp, Zea mays
cccacgcgtccgggagatagcaagcatgatgctgcctcagcgtacgtcgaggcagcaaattgctacaaaaagttttcacctcaggaagctgcgcaacgctaaaccagtctgttaatcttttcttggaaattggtaggttgaacatggctgcaagatacagcaaggacattggtgagatatatcagcaagaacaagatttagagaaggctacagattacctggaaagggcagctgacctttttgacagtgagggacagtcgtctcaatcaa

SEQ ID NO: 35157 - DNA, 265 bp, Zea mays
ctatgatccaaagatgaatgttgtttctaatgcaagttgcactaccaactgccttgctccacttgccaaggttgtccatgaggaatttggcatcgtggagggccttatgacaactgttcatgcaacaacagctacccagaagaccgtcgatggtccttcgatgaaggattggagaggaggacgtggtgctgcccaaaacataattcccagctccactggtgcagcaaaggctgttggaaaagtcctgcctgagctgaatggaaaa

SEQ ID NO: 35158 - DNA, 267 bp, Zea mays
gttcgctcagtacactggcgctcatgccatcgctgggaggcacacccctggtaccttcactaaccagctccagacctccttcagcgagcctcggctgctcatccttaccgacccaaggactgaccatcagccaattaaggagtctgctctggggaacatccccaccattgccttctgtgatactgactctcccatgcggtatgtcgatatcggcatcccagcgaacaacaaggggaggaacagcattggatgcctgttctggctttt

SEQ ID NO: 35159 - DNA, 268 bp, Zea mays
caaaggatgtgagatggggagccatcaggcgcatggctatccaacaagggagcttgggattaaagaacttcaagcttctcaaacaacttggttgtggggatattggcactgtttatttggctgagttagtgggctcagactgcatgttcgcattgaaggttatggacatcgagtacctcataagcagaaagaaaatgctcagagcacaaactgagagggagatactgcaaatgctcgaccaccattccttccaccctgtattctcatt

SEQ ID NO: 35160 - DNA, 276 bp, Zea mays
cccacgcgtccggaccagctccctggggtctcctactgcatcaccagccctcccccgtggcctgaagccgttcttcttgggttccaacattatctggtcatgcttggtaccactgtgatcataccaactgcacttgttccacaaatgggaggaaacaatgaggacaaagcagtggttatccagacattgctgttcgttgcaggtatcaacaccctcctgcagagtttctttggtaccatgttgcctgcagtgatcggcgggtcatacacctttgtt

SEQ ID NO: 35161 - DNA, 276 bp, Zea mays
atggcttcttaattatgaatccacagaaaatccactcaaggtcccgggcaaggagggcccatgaggccaagcagaaggggaggcactctggttacggtaagcgcaggggtaccagggaggctaggctccccaccaagatcctttggatgcgcaggatgcgtgtcctcaggcgtctgctgcgcaagtatcgtgaagcaaagaaaatcgacaaacacatgtaccacgatatgtatatgaaagtaaaaggagacatgtttaaaaataagagggtactcc

SEQ ID NO: 35162 - DNA, 276 bp, Zea mays
cggcaacttctgcattgaacagtgatttctttgcaacagagccttatgcgtgtgaaccatcaagtctgccccaatacccaccaagtaaagagatggatgctaaacgaagagacgaagaagctagacgcttaagggctgctggtggtagaggtaacggagatggaacaaggaagacaaggacacgggatcggcctagggctgttccagcgccagaggcaaacgccgaactgcaagcaaacattgataaaagaaggttgataactcatgcaaatgcta

SEQ ID NO: 35163 - DNA, 273 bp, Zea mays
aaccagcagtgccgttgggcgccaactacaggctcatagatatccctgtcagcaactgtctcaacagtaacgtctccaagatatatgtgctaacacagttcaactctgcttcgctcaaccgccacctctcgagggcctatggaaacaacattgccgggtacaagaatgagggattcgttgaggtccttgcagcacaacagagtccagagaatcccaactggtttcagggtactgcagatgccgtgcgtcaatatatgtggctatttgaggagc

SEQ ID NO: 35164 - DNA, 270 bp, Zea mays
ggacctggccgcccgcctcctccaggccgcgaagagtcagtggaggagttcgtgcgccgcaatcttggtgctgaggtcttcgagcgcctcattgagcctttctgctcaggtgtctatgctggtgatccttctaagctcagcatgaaggctgcatttgggaaggtttggcggttggaagaaactggaggtagtattattggtggaacatcaagacaattcaggagaggagcaagaatccaaaaccactgagggatgcccgccttccgaagc

SEQ ID NO: 35165 - DNA, 274 bp, Zea mays
aaaccagcgcaacccttccctgacagcggcggcgacatggtgctcgaggcgacgatgatctgcatagacaactcggagtggatgcggaacggcgactacgccccgtcgcggttccaggcgcaggccgatgccgtcaacctcatatgcggtgccaagacccagtcgaacccggagaacacagtaggcgtgatgacgatggccgggaagggcgtccgcgtgcttgtcactcccaccagcgacctcgggaagattctcgcctgtatgcacgggttgg

SEQ ID NO: 35166 - DNA, 276 bp, Zea mays
tgaagcgactagtcgaaggcggcggcggcgatggggagcgaccaggagacggagaagaagaagaccccggtggcactaatgcccatcgcgaacccctcgcaggaaagaagctctgcaagcggaccctcaagctcgtgcgacgagcctctgaggccaagtgcctcaagcgcggagtcaaagaggtagtcaagagcattcgccgcgggaacaaagggttgtgtgtgattgctggaaatatttctcctattgatgtgattacacacgttccaatactat

SEQ ID NO: 35167 - DNA, 274 bp, Zea mays
ggcggaaatgaagagaaggctcgggtggttcagaccatactgttcgttgctggcataaacaccctgttccagacgttattcgggacgcgccttccggtcgtgatgggcggctcgtacgtcttcgtcgggccgaccatctcgatcgtcttggctggacggtacagcaacgaagcagaccctcacgagggcgctctcctcgttgcgtcgacgattcagatcatacttgggttcagtggcctctggcgcaacgttgtcaaattactgagtccgctgg

SEQ ID NO: 35168 - DNA, 267 bp, Zea mays
ggggcttcatggattcagtttgatgagcccactcttgtcctcgaccttgattctgacaaattggctgcattctctgctgcatacgcagaacttgaatctgtactttctggattgaatgtgcttgttgagacttactttgctgatgttcctgctgagtcctacaagaccctaacatccctgagcagtgtgactgcttatggttttgatcttgtccgtggaacccaaactcttgggcttgtcacgagtgctggtttccctgctggaaag

SEQ ID NO: 35169 - DNA, 269 bp, Zea mays
cggacgcgtgggcggacgcgtggggccaaggtttaccatgctcgtaacacggcgacttcggaaagtgacgcgatcaaagagattgataaggagaaggttatgaaggttggtctcattgatcaaatccagcgagaaatttctgtgatgaagcttgttaggcatccaaacatcgtacagctctatgaggtcatggccaccaaaaccaaaatatactttgtgctggaacatgttaaaggtggagagctgttcaacaagattcagcgaggaag

SEQ ID NO: 35170 - DNA, 120 bp, Zea mays
gtcagttgctacctttctcttctgctgctcgcgctcggtttctgatcgcggccatgggaccccgcggcgtctccctagcgctcctcgcggcggcgctcctccaagccctcgccaccgcgt

SEQ ID NO: 35171 - DNA, 269 bp, Zea mays
gtctttccttagtgaacttagcgaagtagtgggtattggaagtgcatccatcaagcagggtttgagcaacttcgctgcagcgcatgcaataatgataaatgacaacggcagcacatacaagagccctaatctacgtaggtctttaaccacagaatctgaaaaatatggccggtatgatccaagtgaaattcaaagtgagagccgtgcctcatctgatgcttcaaagaacgtagcttctggttcttggggtccgacttccagttctgcac

SEQ ID NO: 35172 - DNA, 266 bp, Zea mays
cccacgcgtccggtaacttgcgtggttctcttcctgcgacggaagcaaacactgcccgagacatagacagcgggacgtcgagatggccgacggggaggacgccgccgccgcgcgccgccgggccgccatcacagactaccgcaagaagctgctcaactgcagggagctagagtcgcgcgtcggcaccgtgagagaaagccttaaaactgcaaagaaggattttaccaagactgaggacgacttaaagtctctgcagagtgtggggc

SEQ ID NO: 35173 - DNA, 271 bp, Zea mays
gcatcctcaagctgcttgagacccatcttgtgccgtcttccactgcccccgagtccaaggtcttctatctcaagatgaagggtgattactacagataccttgctgagttcaagactggagctgagagaaaggacgccgctgagaacacgatggtggcatacaaggctgcccaggacattgctctggctgagcttgctccaactcaccctattaggcttggactggcacttaacttctcagtgttctactatgagattctgaactcacctga

SEQ ID NO: 35174 - DNA, 262 bp, Zea mays
cacgcgtccgcccacgcgtccgtgattactggcacttcccaagctgactgcgctgttcttatcattgactccactactggtggttttgaggctggtatctccaaggatggacagacccgcgagcatgctctccttgctttcacgcttggagtgaagcagatgatttgctgttgcaacaagatggatgccaccacacccaagtactccaaggcccgttatgatgagattgtgaaggaagtctcttcctacctgaagaaggttg

SEQ ID NO: 35175 - DNA, 262 bp, Zea mays
ctcgaccttctggaggcccctgatcctgccaacttggagaagttccttggaactataccaatgatgtttaacgttgttatcctgtctcctcatggctacttcgcccagtccaatgtgcttggataccctgacactggcggtcaggttgtgtacattctggatcaggtccgtgctttggagaatgagatgcttctgaggattaagcagcaaggccttgatatcactccgaagatcctcattgttaccaggctgttgcctgatg

SEQ ID NO: 35176 - DNA, 264 bp, Zea mays
ggctctacttgtcccttagctctggtgtgcttgatgagaacgggaagttcctgctagcagcgaaaaggagccgcaggatggcgcacacggagtatgcaatttttatggactcgaggaatttctcccgatcgagcactggctacattgggaagctaaggtcaaatttccttggaactaaatttatcatctacgacacacaggctccgtacaatggcgggagagtttgcacacaggaacgtgcccccagccgtcggttgtcttcca

SEQ ID NO: 35177 - DNA, 253 bp, Zea mays
cgacgccttccacggcgacaagggccacggcggcgtgcacgacggcaccaccgtggtgctgtgggagtgggccaagggagacaaccagagctggaagatcctgccctggggcgacgaagcctacgccgcgggaggcagcagcgccgccaacgcgccccgcttcggcggcggcggcgagcccaccgtccgcatctactgcaaggccgacgaggggttcagcgccacggtccgcaacggcgccgtgtgcctcgcg

SEQ ID NO: 35178 - DNA, 256 bp, Zea mays
ggcttctcctccccctccggttcgggttcgggttcgtgaggttctccggggtacggtttcgtgggtgggcggatcgagatggcggcgtcggatgttgagtaccgctgcttcgtcggcggcctcgcctgggccacggacgaccactccctccacaacgccttcagcacctacggcgacgtcctcgagtccaagatcatcctcgatcgggagacgcagaggtcgcgcggcttcggcttcgtcaccttctccacggagg

SEQ ID NO: 35179 - DNA, 262 bp, Zea mays
aattctagggttttgctgctctccgaccccgagctccgaatgccgcagcatcaggcgcgccccccctcgcgtgtgaccgagatggcgctgccgaatcaggggaccgttgattaccccagcttcaagctcgtcatcgtcggcgatggtggaactggtaaaactacatttgtgaagaggcatctcactggagagtttgagaagaaatatgaaccaaccattggtgtggaagttcatccgttggatttcaccactaactgtggta

SEQ ID NO: 35180 - DNA, 265 bp, Zea mays
ccccaagaagcaccgcacagaaccctctgctcctctcaccctcacgctccaaggcggcggcgccatgcacggcggaggcgcggcctcgcccgatgccgccatatgcatctccccagaagctgggcccatcgtcggggtcgcccccgccgggatcagggtcgaaaactgctacgtgttcaagagccggctgcaggagtatgctcagagggttggcattccaaccccggagtaccacacgctgaaagaaggcccatctcatgaacct

SEQ ID NO: 35181 - DNA, 258 bp, Zea mays
ggacctgggcaaccgattgcctatccccctcccaaccaaagaccgatggcgcccaagcgccgagaagaagcccgcggcgaagaagccggcggaggaggagcccgcggccgagaagacgaccgccgggaagaagcccaaggcggagaagcgggtccccgcgggcaagtccgccggcaaggagggcggcgagggcaagcgtggcaagaagaagggcaagaagagcgtggagacgtacaagatctacatcttcaaggtgct

SEQ ID NO: 35182 - DNA, 259 bp, Zea mays
acaaccacagccaccgcgatggcgcagatcatcgatggcaaggccatcgccgccgacgtccgccgcgaggtcgccgccgatgtggccgcgctctcgtcagcccacggactcgtgccggggctggccgtggtcatcgtggggagcaggaaggactcgcagacgtacgtgaacatgaagcgcaaggcgtgcgccgaggtcggcatctgctccatcgacgtcgacctcccggaggacatctccgagaccgcgctcgtcgccg

SEQ ID NO: 35183 - DNA, 257 bp, Zea mays
ataaaaaacgggggaaatcggcttcctactccccgtccttatcgccagccgaaccgacattgttttctccccccttctcgccttctccttctcccccctagtctagaggcgtttgctccccaatcccttcggcccgcccgctcgacgtgatcccaccggcagccatggatccatacaagcaccgcccgtctagtgggagcaactccagcttctggaccaccaactccggcgcccccgtctggaacaacaactctgcc

SEQ ID NO: 35184 - DNA, 260 bp, Zea mays
cgactccaagacggtgtcgctgtgcgtgaagaggctggtctacaccaacgatcagggggaggtcgtcaaaggagtctgctcgaacttcctctgtgacttgaagccaggcgctgaggtgaagatcacagggccagtgggcaaggagatgctcatgcccaaagaccccaacgcaacaatcatcatgctcgcaacgggtaccggcatcgctccgttccgctccttcttgtggaagatgttcttcgaggagcacgaggactaca

SEQ ID NO: 35185 - DNA, 261 bp, Zea mays
caacatagtgttcgcggacttagaggacttggactcatgcctgatattttggcatgccgtagtacacagccacttgaagaacatgtgaaagtgaagctcgcacaattttgtcatgttccgatatcaaatatcattaatctccgtgatgtaacgaacatttggcacatccctttgttgctcagagaccagaaggcccatgaagctattttgagagtgttagacattcagtgtgtgggtaaagttgctcgagaaccccagttg

SEQ ID NO: 35186 - DNA, 255 bp, Zea mays
cactcactcacacagcaaatacccacagtccacactccacagcaagaaccgaagatgttcggaaacatcggaaagatcccgatcattggcgacctgacgggcagcaacaagaatgcgcacctcaagggcaacctggtgctcatgcgcaagaccgtgctcggcttcgacgtcaccagcatcgccggctccctcatggacggcctcggcgagttcctcggccgcggcgtcacctgccaactcgtcagctccaccgtc

SEQ ID NO: 35187 - DNA, 253 bp, Zea mays
cccacgcgtccgcccacgcgtccggctgaaaaagattttacatgacactgatcttgaaagcattgaacagtgctatatggagatgaacacagtagagttcaaccttgagcaagctctgaatacggttctgatgcaaggcattcctttgggcaaggaaaaacagatttcaattgaacgtaattggcctgtggaagtatcatgcatgtacctttatggggacaatttaaggcttcagcagatcctagcagactat

SEQ ID NO: 35188 - DNA, 253 bp, Zea mays
cattaatgtcgctaagctgtatggggttaagctaaccatgttccacggacgaggcggaactgtgggaagaggtgggggccctacccatcttgctatactgtcacaacctccagaaaccatccatggatcacttagggtaaccgttcaaggcgaagtcattgagcagtctttcggagaggagcatttgtgctttaggacactgcaacgtttcacggctgcgacccttgaacatggtatgcaccctccaatttcg

SEQ ID NO: 35189 - DNA, 254 bp, Zea mays
atgccattctgctcgccttactccctcacagaacccagtaaaatattgccagtcccgccgtcgacatggccccacgccgcctgctcgtcctcgccgtcctcgccctcgcggccaccgccgccgcggccaactccggcttcgcggactccaacccgatccgccctgtcaccgaccgcgcggcctccgcgctcgagtccacggtcttcgccgcgctcggccgcacccgcgacgcgcttcgcttcgcacgcttcgcc

SEQ ID NO: 35190 - DNA, 254 bp, Zea mays
caaaagaagtcattgatgaagatggttggttgcacactggagacataggtcagtggctacctggaggacgtttaaagatcattgataggaaaaagaacattttcaagttagctcaaggagaatacatagctccagagaagattgaaaatgtctatgccaaatgcaagttcattgcccaatgttttatatatggcgacagtttcaactcttccttagttggtattgttgcagttgaaccagaggttatgaaggct

SEQ ID NO: 35191 - DNA, 255 bp, Zea mays
cgacggagcacgacgcacgcagagccgcagagatccgtcacactgcaagttttgaaaactgaactgtaagatggcatcagcagagctttcccgtgaggaaaatgtgtacatggcgaactcgccgagcaggcagagaggtacgaggaaatggttgagttcatggagaaggtagcgaaaactgttgactcggaggagctcactgtggaggagcgcaacctcctgtctgttgcatacaagaacgtcattggagcccgc

SEQ ID NO: 35192 - DNA, 257 bp, Zea mays
catccatccccgttcgcctcttctcctccctcctgccgggtccttaataaagagcagcagcgcaagaggttggtagagcgagcgagaagaaggcaatggcggcggagagcttcctgttcacctcggagtccgtgaacgaggggcacccagacaagctgtgcgaccaggtgtcggacgcggtgctggacgcctgcctggcgcaggaccccgacagcaaggtggcctgcgagacctgcaccaagacgaacatggtgatg

SEQ ID NO: 35193 - DNA, 251 bp, Zea mays
cgctccgcctccactcctcgcgccgctgccgcatctcctctacaggtaagaaggagagaaagagggcgaaatggtgaagcacaacaacgtcatccccaacgggcacttcaagaagcactggcagaactatgtcaagacatggttcaaccagcccgcccgcaagcagaggcgccgcatcgcacgtcaaaagaaggctgtgaagatattcccacgaccaactgctggccctcttcgtcccattgttcaatgcc

SEQ ID NO: 35194 - DNA, 248 bp, Zea mays
cccacgcgtccggcttccaccaaactgcagtggggctgaaacattgaacatggcacgctcccttgcgtcggcccgtcatgccggtgagaggcttctgaggtgctggggcggtggaaccggatgggctgtggaggatgccaaggacaagataacaaagctcctggaggagtatgagagtggaggcgatgtaggggaggcatgcaactgcatccgtgagctgggtatgtctttcttcaaccatgaagttg

SEQ ID NO: 35195 - DNA, 269 bp, Zea mays
agcttctgaagatccacagctatctagcttctagaggagttcccttgagctcagctcaggttcagttctcgttactgagcatgggtgacgatcagatggagctgaaaagtgtgtgtgattcattgggcattcgcatcatcgcatatagcccgcttggattaggaatgctcactgggaagtatggtgcttctaacctcccaaaaggaccaaggtcagtgctgttccgacaaatccttcctgagctggagcctctgctgtcttgcctgaga

SEQ ID NO: 35196 - DNA, 266 bp, Zea mays
acaagttcctgctgaaggtgatcgtgaactcgggcatcggcgaggagacgtacggcccgcgcaacatgatcgagggcggggaggcccggccggaccgcctccgcgagggcatggaggagatggacgagaccttccacgccgtcctcgacgagctcttcgcccagtcggcggcgcccggcggcgtcggcatccgccccgccgacgtcgacgtgctcgtcgtcaacgtgtccatgttctcgccggcgccgtccctgtcggcgcgcgtc

SEQ ID NO: 35197 - DNA, 266 bp, Zea mays
ggatgatggaaactcgctgggccccaaagagatccacagctatttgacaagagtgatgtacaaccggcgcaacaagtttgatcctctctggaactcacttgtacttggtggggtgaaaaagggtccaaagggtgatgagaagtatcttgggatggttaacatgattggtacccacttcgaggaaaaccatgtcgctactggatttggaaatcatatggcaatcccgatactccgtgctgaatggcgcgatgatatgacttttgaag

SEQ ID NO: 35198 - DNA, 265 bp, Zea mays
cacgtctagcccagcagcaaatacaagagctacggttgctattgctataaaatattcaattgttgaacgacctgagaaaatagatgaaatcatgtactccaagatatctactttcttgatgttgattaaagacagcgataggcatgtgagaagagcagcagttctggctttgagcacagcagcgcacaacaagccaaatttgattaaaggtcttcttccagagatattacctcttctatacgaccaaactgttattaagcaagag

SEQ ID NO: 35199 - DNA, 127 bp, Zea mays
caccacctcgcctgcgatcttcgtagcctccgtcgcgtcgagcatcgatcatgtcggcctactgcggaaagtacaaggatgagctcatcaagaatgctgcctacattggcacccccggcaagggtat

SEQ ID NO: 35200 - DNA, 262 bp, Zea mays
tactctagggaggatgctgaagatgctgtcaaatacattagtggaacaatgcttgacgatcgtccaatccgtgttgatttcgattggggctttgaagaaggcagacagtggggccgtggacgaagtggtggacaagtcagagatgagtaccgtacagattatgatcctggaagaggtggttacggtaagatggttctgagggaactagaagcacagagagaattagttgactatggtggatcttttcaaccgaatgcaccac

SEQ ID NO: 35201 - DNA, 261 bp, Zea mays
aattgtagccacggtgtttggagctactgggtttcttgggcgctatcttgtgcaacaacttgccaagatggggtctcaagtgcttgtcccattcagaggttgtgaggattctcctcgtcacctgaagattatgggtgacttgggtcagattgtgcccatgaagtaccatccgagagatgttgattcaattaaggctgttatggccaagtcaaatgtggttattaacctcataggacgagagtatgaaacaaggaactacag

SEQ ID NO: 35202 - DNA, 266 bp, Zea mays
cggacgcgtggcaagattttcctcgatccaaaatcagtcgagaaggtgaacttcgtgtacgagaaggatgaggagagcatgaaggtcatgtacaaatacatcgatccggaagtccttcctgtagagtttggggggaagagcaatgtggtgtacaaccacgaggagtactccgagttaatgagacaagatgacatcaaaacagcaagcttttgggcggttgatgcgaaaactaaccatgctaaccctgccatcaatgggaccttggt

SEQ ID NO: 35203 - DNA, 266 bp, Zea mays
agacgatcccgttgggaggctcaaggtgtatgtctacgagttgccaaccaagtacaagaagatggtggctaaagactctaggtgtctcagccacatgtttgccgcggagatcttcatgcaccgcttcctactgtctagcgcgatccggactttaaatccagaagaagccgattggttctatactccggtatacaccacgtgtgatctcacaccatggggtcatcccttgcccttcaagtcaccacggataatgcggacgcgattca

SEQ ID NO: 35204 - DNA, 267 bp, Zea mays
cccacgcgtccggtgctgcccccattcctttctcctccagcaagtaaaccccgtttccacaacgtcaccgcaccgccgtcatgccgaccgtaagcgtgaaatggcagaaggagctctttccaggcatagagattgacactagccagcctccgattgttttcaagactcagttgtacacactaactggtgtgccacctgaacgccaaaaaattatggtgaagggaggaatattgaaggacgatgcagattggtctactttgggagtga

SEQ ID NO: 35205 - DNA, 262 bp, Zea mays
cccacgcgtccgagccagcccattaaccctcgttcctgtcgcgcaccacgacctccacttcacatctcccccggcggcggcgcggtcagttgaacaatggcggactccaaggccacctcggcggtcaccctccgcacccgcaagttcatgaccaaccgcctcctggcccgcaagcaattcgtgcttgaagtgatccaccccggccgcgccaacgtctccaaggcggagttgaaggagaggcttgccaaggcgtacgaggtga

SEQ ID NO: 35206 - DNA, 261 bp, Zea mays
tcgggttccaggccagcacagccgagggttccgcacagcgataagcgcgaaggcaagagatggagcatatcgccaggttcttcttcggagtttctgggaatgtcattgcgctcttcctcttcctgtcgcctgttgtcaccttctggagggtcatcaggaagcggtcgacggaggacttctccggcgtgccctacaacatgacgctgctcaactgcctcctatcggcttggtacggcctgccgttcgtgtccccgaacaaca

SEQ ID NO: 35207 - DNA, 262 bp, Zea mays
ctttcctgtataataaaacctcaaatcgtctctctcccgtcctcccctccaccgccgcagccgccgccgtacctcctcctcccgcgcagtagccaccgccaccgccggaaatgaagaccatcctggccacggagacgatggacatccccgagggggtcacggtcacggtggcggccaagctggtgacggtggaggggccgcgcggtaagctcacccgcaacttcaagcacctcaacctcgacttccagctgcaggacggcgg

SEQ ID NO: 35208 - DNA, 249 bp, Zea mays
ctcgtctgctcgcatttcctcccaatccatcccgcctccaaacccgaactccaagtcgccccgcatcgatggcgcccaaggccgagaagaagcccgcggcgaagaagccggcggaggaggagcccgctgccgagaaggcgccggccgggaagaagcccaaggcggagaagcgtgtcccagcaggcaagtccgccggcaaggagggcggcgagggatagaggggccggaagcagggcaggaacaccgtgg

SEQ ID NO: 35209 - DNA, 239 bp, Zea mays
gggcatcctagctcgtgcgtctctcacccggtacctgctcctcggcgcctccccaaccaagcctccgcaccttcctcccgacgcgcccctcatggcgaggaggcgctgctgatgcctcccggcgtcggatcggacgcggcggccacgacacctagccgcttgcagtggtgctcgccgagctctaggcgcctaatccgccgacgctgctcctcggatgctctccgagagattcacgcctc

SEQ ID NO: 35210 - DNA, 261 bp, Zea mays
cccacgcgtccggttaactcctgctgtagtcgggacctttcagagaaagtcattggagtttgctttgtagcacaagatttgaccaggcagaagatgattatggataagtatactaggatacaaggagactatgttgccatagtaaagaaccccactgagctcatccctcccatatttatgatcaatgatcttggttcctgcttagagtggaataaagctatgcagtagattaccggtatatagagggaagatgcgataaac

SEQ ID NO: 35211 - DNA, 264 bp, Zea mays
ggggtgtgggatgtgctttccaatgctgaagctgttagcatcatcagcaatgctccttcacaggcctcagcagctcgatttctggttgaatcggctcacagggcatggaggacacggtaccccacatcaaaaactgatgattgtgctgttgtttgcctctttctgaaaacagaagcagcaagtacatcctccagtgctgtaaccaaagatttggtgaagaacagagaaatgagcagcggtaagcattcattggctgttaaaaca

SEQ ID NO: 35212 - DNA, 262 bp, Zea mays
cggacgcgtgggcggacgcgtgggcggacgcgtgggctcagggtcgtgcaatatttgccagtggcagtccatttgaccctgaggagtacgatgagaaggtttttgtacctggacagtcgaacaacgcctacattttccctggattcggcctcggtcttgttatctctggagccatccgtgtccacgaggacatgcttcttgccgcctcggaagcactagctgctcaggccacacaggagaacttcgacaagggatcaatctt

SEQ ID NO: 35213 - DNA, 259 bp, Zea mays
aagttgccaatttccttgctcggttcaagtccatccccagcatagttgagcttgacagcttgaaggtttctggtgatgtctggtttggctctggaattacactcaagggcaaggtgacaattatcgccaagcctggagtgaagttggagattccagatggagacgtacttgagaacaaggatgtcaatggccctgaggatctttaagcaatgtttgtcatcaccagtttttcccaaggacatgtcacaggaactgccga

SEQ ID NO: 35214 - DNA, 257 bp, Zea mays
cggacacgtcgcaggggcgcgctcaggtggtgagcaatatcaacgcgtgcacggcggtgggcgacaccgtgcggaccacgctggggcctcgggggatggacaagctcatccacgacgacaagggcggagtcaccatctccaacgacggcgccaccatcatgcgcctcctcgacatcgtgcaccccgccgccaagatccttgtcgacatcgccaagtcgcaggactccgaggtcggcgatgggacaactactgtggtg

SEQ ID NO: 35215 - DNA, 255 bp, Zea mays
attggggagatcgaaggagcgattgggattgagaatgggaacacaggggaagcgaggaagtggtgcggtgttgtcaccagcagttatggcaggatcgccggtcaccaccgtctaagggaaactcatctacttgggagatttattctcgatgcttgttttcggcaaggtcttgaatcggtgtgcaatacatcaaaaggttgctgagggttcaaaagatgttggtgcttctcgaattattggcattgacatcaacaa

SEQ ID NO: 35216 - DNA, 255 bp, Zea mays
acataatacaattcttgagttgaagggaaatatcagagtattttgtagagttaggcctttgctgccaaatgattcaggagcagtatcatatccaaagaatggagaaaacttaggccgagccattgagttgttacataatgcacagggatattcatttacttttgataaagtatttgatcattcggcgtcacaagaacatgtgttcatagaaatatctcaacttgtccaaagtgccctagatggctataaggtctg

SEQ ID NO: 35217 - DNA, 225 bp, Zea mays
cccacgcgtccgcccacgcgtccggacgcatttgcaacttacccaagaacatatgatatggtgcatgctgatggctttctatcacttgagaagacccacaagcatagatgttctactcttgacatattcttggaagttgatcgcatcctacgaccagagggctgggtcataatccgtgacaccgcccctcttattgaagcggcaagatctgttgttactcaactc

SEQ ID NO: 35218 - DNA, 242 bp, Zea mays
gacaggagcagtgttgcatctgttgtcacagctgcagataagggaggtgcaacacatgttgacatagcatgtgacaaggacttagtaaagcttgccatggatcttaccaaccttccgatctgtagtctcatctgtagatccttcagcgttccattctgcagtacaagcaggagctaaaatggttgaaattggaaactatgattctttttatgagatgggcattgagttctcctctgagcaga

SEQ ID NO: 35219 - DNA, 259 bp, Zea mays
ggaagatttagtgaggatgaggcgagatttttcttccaacaactgatttcaggagttagttattgccactcaatgcaaatatgccatagagatttgaaactagaaaacactctcctggatgatagtatagcacctcggctaaagatatgtgattttggttactccaagtcctctgtgctgcactctcaaccaaaatcaactgtcgggacaccagcttacattgctcctgaggtccttgctagaaaggaatatgatggaa

SEQ ID NO: 35220 - DNA, 265 bp, Zea mays
  unsure (1)..(265): unsure at all n locations
ggacctggntttggcacaaaatgcatttaccccatatgataagttctgcccattctacaaaaccgtttggatgatgcgcaatattattcacttcaacacattggcaaatcaggctgtggagcgggcagctggtactgatggccaaaagataacatacggtgtcataaaacaccgtttgggcgatctattttatcgcctagtatctcaaaagttcgaggatcctgccgaaggtgaagaagctttggtcggcaaatttaagaaactg

SEQ ID NO: 35221 - DNA, 200 bp, Zea mays
cccacgcgtccggcgacctcagcatctctccgctgtacgtgtacaagagcaccttcgccgaggacatccagcactcggagacgaacgaggagatcttcggcgtgctctccttcgtcttctggacgctcaccctcatccctctcgtcaagtacgtctccgttgtcctgcgagctgacgacaatggcgagggaggaacgttt

SEQ ID NO: 35222 - DNA, 260 bp, Zea mays
cgtgcgttatcctttgagcagtttgggcgctgagcaagtccatctccgcgctaggtgcggcgacggcgagcagcagcagcttctggggcaaccggctcgccacctactccgcgccgcagcctggggtaaggtttatggtcaagatatgcccaattgaaatgagacttaagagatgggagcgaaagaagtgtaaaccaaacagtcttcctgtgctgcacaagatgcatgttaggatcggggacacggtacaggttattgca

SEQ ID NO: 35223 - DNA, 261 bp, Zea mays
cccgaccccgccgtcgcgatgaggccggcgctgctcaagtccacggccgagctcctccgccgcagccgcggctacgcctcctcggccaacccggagcggaaggtggccatcctgggcgctgcgggcggcatcgggcagccgctctccctcctcatgaagctcaacccgctcgtctcctccctctccctctatgatatcgccgggacccccggcgtcgcggccgacgtctcccacatcaactcccccgccctggtgaagggg

SEQ ID NO: 35224 - DNA, 228 bp, Zea mays
gggatgggagccctacaaagtaacatacacgagtgactatttccaagctttgtatgaacatgccgttgagttaatacagaaagggctagcatatgtggatcaccagactgcagaagaaatcaaggaatacagggaaaagaagatggatagtccatggaggggtaggccaattgaagagtctctgaaattatttgaagacatgaggcgtgggttgattgcagagggtgc

SEQ ID NO: 35225 - DNA, 186 bp, Zea mays
tccacagcgacacccgaccccgccgtcgcgatgaggccggcgctgctcaagtccacggccgagctcctccgccgcagccgcggctacgcctcctcggccaacccggagcggaaggtggccatcctgggcgctgcgggcggcatcgggcagccgctctccctcctcatgaagctcaacccgctcgtc

SEQ ID NO: 35226 - DNA, 256 bp, Zea mays
aacagttgcctgacgactatcttgagaaagtaaagcaagttcatcagtctggcggttatggctccaaaggatatggttatgattggaaacgggatgaagcggagaagaatcttctccgtactcatacaactgctgtttccacgagaatgttatacaagcttgctcaggagaaaccttttactccaaagaggtattactccattgatcgtgttttccgcaatgaagctgttgaccggactcatcttgctgaattcca

SEQ ID NO: 35227 - DNA, 260 bp, Zea mays
agctcgaggacgggcgcacacttgccgactacaacatccagaaggagagcaccctccaccttgttctccgcctcaggggaggcatgcagatcttcgtcaagaccctcactggaaagactatcaccctcgaggtggagtcttctgacaccatcgacaacgtcaaggccaagatccaggacaaggagggcatccctccagaccagcagcggctcatttttgccggcaagcagctcgaggacgggcgcacgctggccgactac

SEQ ID NO: 35228 - DNA, 255 bp, Zea mays
cacaagtttcgtgggtagaggaggcactagatactgtgccagatcggggtctggtagtggcagttgggtgattacgacggagtgggatgggcctcctcgacaagctgtgggacgacaccgtcgcgggcccgcgcccggacaccggcctcggccgcctccgcaagcagcccgcgcgccacgccgccgttaagatcagtgatccggccggggacgctgcagcgctcgtgccgccctcgccggcttcgggtagcgagg

SEQ ID NO: 35229 - DNA, 255 bp, Zea mays
cccagacagcttaactctgacctgcgcaacttgcagtcaacctgatcccgttccctcggctccacttcttcatggttggctttgcgccactcacctcgcgtggctcgcagcagtaccgtgcgctcaccgtccctgagctaacccagcagatgtgggatgccaagaacatgatgtgtgctgctgacccacgccatggtcgctatctcacagcctctgccatgttccgtggcaagatgagcactaaggaggttgatg

SEQ ID NO: 35230 - DNA, 257 bp, Zea mays
cccacgcgtccgcccacgcgtccgcgcagtggacaaaagtgctggacattattgaatactaccttgattcaaaaggccatgctgtttgccgaatcgatggtaatgtgaaactggaagaaaggaggaggcagatagcagaattcaatgacgtgaatagcagcatgcgtatcttcctcctgagcacaagggctggtgggcttggcatcaaccttactgctgctgacacctgtatcctctacgacagcgactggaaccct

SEQ ID NO: 35231 - DNA, 253 bp, Zea mays
ggacctggtcctaccaggcaccactcgcatcgtgtgctcagtcagatccccgtcccgcatttactaaggccaggttagttggcattgaagacgatgactgcttctgcagctgctggtgtgcagatggtggctgcacgcccttgcatttcggcctcgccaggaattcttaccgcacgggtttctaggactgattgcatgctcagtaccactgctacattccccaaaatcagctgctcctggcctctaaggttta

SEQ ID NO: 35232 - DNA, 258 bp, Zea mays
aattgacatcccctcgcctaccccagctctacccgcgacgaagcatcaccaggaaggatgacgtgctcaatggatctcccggccaagggcgggttcagcttcgacctgtgccgccgcaacagtatgctggagaagaacgggctcaaactcccgggattcaggaagaccggaacaaccatcgtcggcctcgtctttcaggatggggttgttcttggggcagacacaagagcaactgaggggcctatagttgctgataag

SEQ ID NO: 35233 - DNA, 255 bp, Zea mays
atcagatggggacttcggtgcaggtgacgcctctcagcggggcgtacggggagggccccctgtgctacctactcgccgtcgatggtttccgcttcctcctcgactgcggatggaccgacctctgcgatacctcgcaacttcaacccctcgcaaaggttgcaccaactgtagatgctgttcttttgtcacatcctgacatgatgcatctaggagctttgccttacgctatgaaacaccttgggctgtctgcaccag

SEQ ID NO: 35234 - DNA, 256 bp, Zea mays
cggcatcacgcgaacagaggagaaagaaaatggcgcactcggtggagacgtacgcgtgctcgccggcgacggaacgcggccgtggaatcctcctggccggggaccccaagacggacacgatcgcctactgcaccggccgcagcgtcatcattcgccgcctcgatgcgcccctcgacacttgggtctaccccgaccacgcctaccccaccaccgtcgcccgcttctcccccaacggcgagtgggtcgcctccgccga

SEQ ID NO: 35235 - DNA, 253 bp, Zea mays
gaataaagagcaacattgaactcatggtagcaacaaatggtggaaatagggtggtggtgatcccacactccatgggggtcctctattttttgcattttatgaaatgggtcgaagcacctcctcccatggggggtggcggtggtccagactggtgtgagaagcatattaaagctgtaatgaatattggaggacctttcttaggagttcctaaggctgttgctggccttttctcatctgaagccaaagatgttgc

SEQ ID NO: 35236 - DNA, 252 bp, Zea mays
cggacgcgtgggaaggcctgaaaagcaaaaccgtagaagatcactacttcactagctagggttttactccgtgacgaatggtctatataaaaggtcagaaccgaaaccttaaccttattcggcgactatggcggcggcaccggcaggcggcggccctcgggcattgtcccagcgggagcaagacatccagatgatgctcgccgccgatgtccacctcggcaccaagaactgcgacttccaggtggagcgcta

SEQ ID NO: 35237 - DNA, 261 bp, Zea mays
atataccaccgtccgggacctggcggacgcgtgggtgtaaacgacttctgaagatgggagggatggttgcttctggatcttgtggggaatatgtatcacgggacttaccttggtgaggatgtagctgttaaagttataagagctgagcatttgaataagaatgtttggaacgagtttacgcaagaagtatatatactaagagaagttcaacataaaaatgttgtgcgattcattggtgcatgcacaaaaccaccccaattt

SEQ ID NO: 35238 - DNA, 248 bp, Zea mays
cgctcgccagggacccgacgtgctgggacaaggccgaggagttcttcccggagcgcttcctggaacaaggccgcgacgccgaggtcgacatgtacggcaaggacatccggttcgtgccgttcggggcggggcgcaggatctgcgcgggggccacgttcgccatcgccaccgtcgagatcatgctcgcgaacctcatctaccatttcgactgggagatgcccgccgagatggagcgcaccggggccaag

SEQ ID NO: 35239 - DNA, 249 bp, Zea mays
gtctgctctttgcaagggcgatcagaggtccgctgacgttaaggacatgctgcgcaagtatatgtcacttgtacagcttctagaaagtgtcgacctcggtggaatgaaaaacgaggagaagcttgctttctggatcaacgtgcataacgcgatgatgatgcatgcccatatagagtacgggatcccacagagcaacagcaaaaggatactgcttaccaaggtatcctacatcgttagtggccagagagt

SEQ ID NO: 35240 - DNA, 250 bp, Zea mays
gagatacacaaggaactacccggcctaaagaagtagagtctttgaaaggctcaagagtgaaatgtgtggcatgtgggccatggcacacagctgccattgtggaagtgatcagtgatttcaagagcaattcaccaagaagcaagctgttcacatggggcgatgcagatcgggggaagctgggtcatgctgacaaaaagatgaagcttataccaacatgtgttgattcactcacagactatgattttattca

SEQ ID NO: 35241 - DNA, 73 bp, Zea mays
acaagagtcagttgaggatgttccttgtggtaacactgttgctatgggtggtctggatcagttcatcacgaag

SEQ ID NO: 35242 - DNA, 272 bp, Zea mays
cccacgcgtccgattcgcaatccctctccacctctcctcccaccgcagcagcaggcaagcgcgaggcggaggcggagagatggagtcggaccagggcaagctcttcatcggcggcatctcctgggaaacaacggaggagaagctgagcgagcacttctccgcctacggagaggttacgcaggccgtcgtcatgcgcgacaagacgacgggccgcccccgaggcttcaggtttgtcgtcttcgccgaccccgccgtcgtcgaccgatcgctgc

SEQ ID NO: 35243 - DNA, 269 bp, Zea mays
ggccggcgaggatgaggacaccggcgcccaggtcgcgcccatcgtgaagatggaggaggtcgccgttaccaccggagaggaggacgaggacgcgctcctggacatgaaggcgaactctaccggttcgacaaggaggggaaccagtggaaagagcgcggcacaggcactgtgaagctgctcaagcacaaagacaccgccaaggtccgcctcgtcatgcgtcaggcgaagacgcttaagatctgcgccaaccatctcgtggtggcgacgac

SEQ ID NO: 35244 - DNA, 275 bp, Zea mays
gcacagctttaggtggtagcgagcctcgattactcaaagcagctactgagcaattaaacaaactacccttctaccattccttctggaaccgtacaacaaaaccttcgttggatcttgcacaggagatccttagcatgttcactgcaagggagatggggaaagttttcttcacaaacagtggttcagaagcaaatgactctcaggtcaaactagtatggtattataacaatgcattggggaggccaaacaagaagaaatttattgcgcgatcaaaa

SEQ ID NO: 35245 - DNA, 271 bp, Zea mays
ctatcccttcgtaaacccttctctcttcttcccgcggcctgctcgttctatctgtccagcagacttgagggtccgagcggccggaaaccagcggcaaccgtcggcatggcgctcgtattgcattctggggctggaaacaaaaatgccttcaaggcacttattgctgcagaatacagtggggtcaaggttgagttgaccaaggattttgagatgggtgtctcgaacaagacccctgagtttctaaagatgaacccccttgggaaggttcctg

SEQ ID NO: 35246 - DNA, 278 bp, Zea mays
gtgcattattaaatcgcttgatgattgagctgagcaaacttgattgtgatgtacttgtgggacacaatatttcagggttcgacttggatgtgcttctacaccgttgctcagacatgcaaagtgccaagcagcatgtggtccaagattggtcggctcaggcgatcattaatgcccaggcttaccagaggaagcacactctatggttctggagcaagtccaggaattatgtcctgtgttgctggccgtcgtctctgtgacacctatttatgctctcgtga

SEQ ID NO: 35247 - DNA, 148 bp, Zea mays
ctggtgcgcatcaacaccctcctccagggctactccggcatccgcttcgagatcctcgaggccatcacgaagctgctcaacaccggtgtcagcccctgcatgacgctccggggcaccatcaccgcgtcgggcgacctggtcccgctct

SEQ ID NO: 35248 - DNA, 264 bp, Zea mays
agcgcaaacgcgaccacagacagagcgcgcttcaaggccttttttttttgagataacaaggaggagaggaggagatggcggtcacgatcacctgggtgaaggcgaggcagatcttcgacagccgcggcaaccccaccgtcgaggtggacgtgggcctcagcgacggcagctacgcgaggggggccgtacccagcggcgcatccactggaatatatgaggccttggagttgagggatggaggatctgattatcgtggcagaggtg

SEQ ID NO: 35249 - DNA, 268 bp, Zea mays
ttatcaatcaccctgctgagattgtgaatatgcttgccaagagcctgcctggaagcgcaacgttcttcctcacgtttgttgcactgaagttcttggttggctatggccttgagctctctcgcctggttcctctcatcattttccacctgaaaaggaagtacctatgcaagacggaggaagaagtgagagcggcatgggctccagtggatctgggatataacaccagggtaccaaatgacatgctcatcgcaacagttgttctgtgcta

SEQ ID NO: 35250 - DNA, 265 bp, Zea mays
gtgctggtcagaatgggtaccaccaccgcactgagatgaacaagaaggtttacaagatcggcaaggctggacaagagacccacgatgcctccacagagtttgacaggactgagaaggacatcactcccatgggtggcttcccccattatggtatcgtgaagggtgactacctgatgatcaagggctgctgtgtgggtccaaagaagagggtggtgaccctccgccagtccctcctgaagcagacttcccggctggcgctggagga

SEQ ID NO: 35251 - DNA, 268 bp, Zea mays
gcctgatccatccaagacagggatcgccatgtcggactcggaggagcaccacttcgaatcgaaggccgacgctggggcgtccaagacctacccgcagcaggctggcaccgtccgtaagaacggcttcatcgtcatcaagaaccgtccctgcaaggttgtggaggtttctacctccaagactggtaagcatggccacgccaaatgccactttgtcgccatagacatattcaatgggaaaaagcttgaagatattgttccttcatcacac

SEQ ID NO: 35252 - DNA, 257 bp, Zea mays
gccacgcgtccgcccacgcgtccgtggtgttctagtcatgatgccaccatcagtgaaatggcaattgccatgagtcagaaaattgagaaatattgggaacattctaacttggctcttgctgtggcatgctttcttgatactcgatacaacaaaaaagttatagagtattacatgaagagattccacggtgatcggtaccatgtggaacttgaaaaaattgtcaatgtggtaagagggctctattgttattattccag

SEQ ID NO: 35253 - DNA, 258 bp, Zea mays
atcagtaactaataattactttagattagaaagcaagaatcgagtcgagaagatggtgcagttcggcaagtggctgaggaggcagatcgagcggacctcccggagtggcaggaccagttcctgcgctacaaggagctgaagcggtgcgtcaaggcccgctccggcggctgcccgccgttgcccgcggaggaggccgagttcgtggccgagatcgacgcggagaccgagaagatcaacgccttcttcctcgaccaggag

SEQ ID NO: 35254 - DNA, 260 bp, Zea mays
ccggagcctctccttcccggtctcctccgcccgttgccttcgtcccctccatctccggctgcgtcgccggcgagcccgacaccgcgaatcggatccgccgacaaggcgagagggaaaagatggggcttacgttcaccaagctgttcagccggctgttcgccaagaaggagatgcggatcctgatggtgggactcgacgccgccggaaagaccaccatcctctacaagctgaagctaggcgagatcgtcaccaccatcccc

SEQ ID NO: 35255 - DNA, 262 bp, Zea mays
cactctactcctatccactgcggcctggacgcgtgcgagagacttgaccaagcagcagcagcagggatggcgcctctgaagctgtacgggatgccgctgtcccccaacgtggtgcgcgtggccaccgtgctcaacgagaagggcctcgacttcgagatcgtccccgtcgacctcaccaccggcgcccacaagcagcccgacttcctcgccctcaaccctttcggccagatcccggctctcgtcgacggagacgaatcctctt

SEQ ID NO: 35256 - DNA, 261 bp, Zea mays
gttcggagccgccggcccgtccgcctccctctccgcctcccgtccccaagggtgagtcttgcgtcccaccaggcttctctcccgtcctctgtccccgatttaaggcccatgctctcgttcctatttgtggcgattggtccggcatgcgtgctgtttgtggtagatagatctgctctgcacgtctgcgttcgtcacgtataggttggattgttcgtgtggtagcctcggccgttggtgctcattcagatcggtgcttcctgc

SEQ ID NO: 35257 - DNA, 260 bp, Zea mays
gcaccttcccaaaaaaatcccccattttcttcgaggcgaggagatcgtgaaagacagggcaccggcagcgacgatgtcggggcgcggcaatggcggcaaaggtctgggcaagggcggacaaagcgccaccgtaagggctccgtgacaacatccagggcatcaccaagcccgcgatccgtatgctggctcggaggggcggcgtgaagccatttcggggcttatctacgaggagacccgcggcgtcctcaagatcttcctcg

SEQ ID NO: 35258 - DNA, 264 bp, Zea mays
cgtgcatgaagatcgcagaggacgttgcggcggggctggtgcacctccaccagtggagcatcgtccacggcaacctgaagccctccaacgtcctcctaggccccgacttcgagtcgtgtctcaccgactacggcctgctgccgacgctgctaccctccaacgccgagctccactcctcgagctccctgttctaccgcgccccagaggtacgcggcgcccacgccacgtccttggaattattcacgcccgcgacagacgtgtaca

SEQ ID NO: 35259 - DNA, 260 bp, Zea mays
cggacggtggggcaaaagagcaaaggccgtgtttaaggagcttgagttgaagaaagagccatatgttgaggagcttgatcagcgagaggatggctcagagattcaggatgccttacttgagatagttggcaggcgtactgtccctcaagtttttgtccatggaaagcacctgggtggttctgacgatactgttgactcctacgaaagtggaaaactggctagacttctaaacatcggagtcaaggacgacctttgagtga

SEQ ID NO: 35260 - DNA, 266 bp, Zea mays
gcatccgcagttcccccgcgcccgagacgcaaccccgcgccaggagtaagtttgttcttgtatcgatattatcgatatggcgagggaggagaatgtctacatggccaagctggctgagcaggccgaaaggtatgaagagatggttgagtatatggagaaggtggctaagactgtagatgtggaagagctcactgttgaggagcgtaacctcttgtcggtcgcatacaagaatgtgattggggctcgccgtgcttcatggcgcattg

SEQ ID NO: 35261 - DNA, 265 bp, Zea mays
gccgttgctgctgccgcgtccacagaatggggggtttcgtgaagacccataagaccaatgcgtatttcaaacgtttccaagtgaaattcaagagaaggcgggctggcaagacagactacagggccaggataaggctgattaaccaagacaaaaacaagtacaacacacccaaatacagatttgttgtgcgatttaccaacaaggacatcactgcacaaatcatatctgctagtatagcgggtgatatggttcttgcttctgccta

SEQ ID NO: 35262 - DNA, 205 bp, Zea mays
cccacgcgtccggggcaatgtcgcagagaggtgcccaaggacttcccattgatctcacaggtagaagagcatttatagctggagttgctgatgataatggttatgggtgggcaattgctaaggctcttgctgctgctggtgctgagattcgtgttggtacatgggtgcctgcgttgaaccatatgtgagaccagcttggaacgtg

SEQ ID NO: 35263 - DNA, 261 bp, Zea mays
cccacgcgtccgcatcaccatgtcttttgcgccaagggattcacatgaggcacaggtacagtttgcattagagcggggggtaccagccatgattggagtgatggggactgagagaatcccatatccggctagagcatttgacatggcacactgctcgagatgtttgatcccatggaataagcttgatggtgtctatctaattgaagtagacagggttcttaggcctgggggctactggatcctctctgggcctccaatcca

SEQ ID NO: 35264 - DNA, 266 bp, Zea mays
gcacagctttaggtggtagcgagcctcgattactcaaagcagctactgagcaattaaacaaactacccttctaccattccttctggaaccgtacaacaaaaccttcgttggatcttgcacaggagatccttagcatgttcactgcaagggagatggggaaagttttcttcacaaacagtggttcagaagcaaatgactctcaggtcaaactagtatggtattataacaatgcattggggaggccaaacaagaagaaatttattgcg

SEQ ID NO: 35265 - DNA, 267 bp, Zea mays
gtactcgagcccttgcaaataaaatcagaggtaccatcctacgagatgcttggcattccaaaacatgaggaagaagcgcctccccctccacaaccgcagcgccctctctctcccatgggtgaagcctgttctaggacggatctgacagctatccatcaaattctagtgaacacgcattacagggacgatgaagggagcaacgagctatcgttccaggaatggacgccacagatgagggacatgctggaagctaggacacgtggggac

SEQ ID NO: 35266 - DNA, 263 bp, Zea mays
caaactactcaataaccctagctaaacccccacgccgccgcggcgacctcctccgccggcgggatggacagcctcaggggagccaagttgccgggcgtgccgaaggcgggagtgcgctcgtgaaggtggcgctgctcggcggcgcggggctctacgccgtcctcaacagcttctacaacgtcgagggcggacaccgcgccatcgtcttcaaccgcctcgaggggatcaaggacaaggtgtaccccgacagaactcacctgatg

SEQ ID NO: 35267 - DNA, 261 bp, Zea mays
cggacccgtggcgagacgcgtgggttgcagtatacaacacttaagcccttggctgatagagtgcttagaaagattaacacttccgagaagaagacaactggtggaatcttgctccctacgactgctcagtccagacctcaaggtggcgaggtagttgctgttggagaaggaaggataattggggataagaaagttgatgtcagcattcaggttggagctcaggttgtgtattctaagtacgctggaaccgaggtcgcgttg

SEQ ID NO: 35268 - DNA, 258 bp, Zea mays
tgacattgtttctgagaaaccgatggtgcagaacaatcttaaccaaggggtggcagaaaagttgactagggatagaaatgacattgttcctgagaaacaggtggtgcagagcaatcttaaccaatgtaataatgaagatatcccgctttctggaacagaaattgagatggagtcttacgaacaagaatcatctgaaagcagtgatgaagagtggtccacacttagcacaccacgaaaaacaaaattacaaggcaacga

SEQ ID NO: 35269 - DNA, 260 bp, Zea mays
gacacctctaaaggcagcagtcagcctaacgaccattactgctggatgaggccagaggacatcgactacaagaggccggttaccgagtgccactcctgctcagatctagcgtcggaaatggctgccgcactggccgcagcttccatagtgttcaaggacagcaagacctactccgacaagctcgtcaagggcgccaaggccctgtacaagttcggcaggctgcagcgtgggcgatacagccccaacggatctgaccaggc

SEQ ID NO: 35270 - DNA, 265 bp, Zea mays
cgaactcgagacctcgcccgcccaaatacgaaagcctcagatctcagtgaccagcgccgccgcttcgttcgtgtcgaggggagaagaggaaatggcggcgagcgagggcgtgctcctggggatgggcaaccccctcctcgacatctccgccgttgtcgatgacgccttcctagcaaagtatgacatcaagctgaacaatgccattctcgctgaggagaagcacttgcctatgtatgatgagttggctagcaacagcaatgttgaa

SEQ ID NO: 35271 - DNA, 236 bp, Zea mays
ggaccgtggagcagttcggcatcggcggcgcgttgcctcccaagacggacctgcaccgattcgacaagtggcccaaggtcgtgcgcatccagcgccaggggcgcatcctcaagcagcgcctcaaggtgcctccggcgctcaaccagttcacccgcaccctcgacaagaacctcgctaccaacctgttcaagatgcttcttaagtaccggcccgaagacaaggctgccaagaaggag

SEQ ID NO: 35272 - DNA, 103 bp, Zea mays
ggcccgtcggcaccttctgactactggatggagcacgtttgtcacatcaaagaagctgattgctggtgacgcgtttgtctacctgaggagcgagaccggacag

SEQ ID NO: 35273 - DNA, 249 bp, Zea mays
tgctcttgtatctgaggaactttcttacaaactgaaagaaattcccaaggtccgctgggttcttcctgattcatacttggatgtcaaaaacaaggactatggaggcgaacccttcataaatgggcaagctgttccttatgatcctaaatatcatgaggagtgggtgagaaacaatgcccgtgccaatgacagaaaccggcgcaatgataggccccgcaactttgacaggtcaaggaactttgacaggag

SEQ ID NO: 35274 - DNA, 255 bp, Zea mays
attgaagcagcatttcagtacaaagctaaagagtggcagtcttaaaagtgcaacgctgaagaagcatgttaagaagggcaagaatgtttcaatgggatttggttttgttgagtttgactctgttgaaactgctaccggtgtgtgcaaggatctacagggaacggttctggatggacatgctttgatcttgcaactgtgtcatgtgaagaaagatggtcaagcggcaaagaagaatggcaaggataaaagttcaac

SEQ ID NO: 35275 - DNA, 253 bp, Zea mays
tgctttcagatatttcaggctcttgcttacatgcatcagaggggctactttcatcgtgacctcaaacctgagaatctgttggttagcaaagatgtcataaagctagcagactttggtcttgcaagggaagtttcatctttgccgccatatacagaatatgtctcaactcgctggtatcgggcaccagaagtattgctccagtcatctgcttatgattctgcagttgatatgtgggcaatgggtgccataatgg

SEQ ID NO: 35276 - DNA, 252 bp, Zea mays
cccccactcagaaaacccagccgccgccgcatcggcctcccaggtaagcagtagcgtccaccccagccgccgccatgaagcgcaacccccgcgtcacgagctcccgccggaagtgccgcaagcgcacttcacggccccgtcctccgtccgccgcgtgctcatgtccgcggcgctatcgacggagctccgccacaagtacaatgtgcgttccatcccgatccgcaaggacgacgaggtgcaggtcgtgcgcgg

SEQ ID NO: 35277 - DNA, 238 bp, Zea mays
tgtcactcttgggaaataatgactgtctttgctattgacacggtagacttagctggtgttgaatggtcaccatatgatagtgctattgttgtttgggattcacttcttgaatataaggttctgatatattcgccagacggaaggtgcttgttcaagtatctagcttatgaaagtgggttgggtgtgaaaactgttgcttggtcaccatgtggacagtttttagcagtgggaagctatg

SEQ ID NO: 35278 - DNA, 254 bp, Zea mays
tgcgcattcgcatccgggcatcccaccccacccacctccttcctcttcccgcccgctaaaacccacgccaccgccgcgcgccgccggcggcgcaagggacgcacgatggccatgcaggtggtgcgcaacctcgacctggagcggtaccgaggcggtggtacgagatcgcgtgcttcccgtcccggttccagcccaagacgggcaccaacacgcgcgccacctacacgctgaacccggacggcactgtgaaggtg

SEQ ID NO: 35279 - DNA, 256 bp, Zea mays
ctgcgagtgttatccataaggtctatgcattctgggctccgaaaataattgggggattaaatgcacctacgccagttggtgaactggggatgagtcaaatgactcaggcaataaatttaattgatgtctcgtacgagcagattgacagggacatgctcatgagtggattcatcgaacccattcctgatctttcacctgttataccatccgtggaagaaataccttccattgatccagaagtatctccatatgaaac

SEQ ID NO: 35280 - DNA, 258 bp, Zea mays
gaagtacgagctgctcaaggacatcggctccggcaacttcggcgtggcgcggctcatgcggaacaaggacaccaaggagctcgtcgccatgaagtacatcccgagggggctcaagattgacgagaatgtggcgagggagatcataaaccaccgctcgctgcggcaccacaacatcatccgcttcaaggaggtcgtgctcacgcccacgcacctcgccatcgtcatggagtacgccgccggcgggagctcttcgaccgg

SEQ ID NO: 35281 - DNA, 261 bp, Zea mays
agcaaaccggactgatgcttgtttcatccgtgtaattggaagtgagctagttcagaagtatgttggagaaggtgctcggatggtcagggaactgttccagatggcccgctcaaagaaggcatgcattgtattctttgatgaagttgatgcaattggtggtgctcgttttgatgatggggttggtggtgacaatgaggtgcagcgtacaatgttggaaatagtaaaccaacttgatgggtttgatgcaagagggaacatcaa

SEQ ID NO: 35282 - DNA, 257 bp, Zea mays
gttgcaagaaacattttgaaaaatccgaaactccttcctggaggtggtgatacagtcagctctgtagcaccacctccaggaaggagttcgttcagttcgaaggcgtggaaaagtggccctatgaagctgctgctttagcatttgaggcaattccaaggactttggcccaaacttgcggtttgaatgttattaggataatgacacaacttcagggaaagcatgctaatggtgaaaatgcgtgggttggcattgatgga

SEQ ID NO: 35283 - DNA, 250 bp, Zea mays
ggacctggcgcctacatcggttgcacactttatgggacttgatgtgttgatcaaggattgatactccaagctctcatctaacctcaagtttctaaacatgatacaaagcaaattcctactgactactcaattgtccgttgagggccccatcaggatgaaagaggaatatgttgagggccttatagcgattcccagaatcaatgaagaatcattgcctgaacagttgaagggcttgcttggccaaactgca

SEQ ID NO: 35284 - DNA, 254 bp, Zea mays
ctcgaactcgaatccctcatccagcctgtcgctggcgtcgccggtcgccgccgctcgattgcctccgcctgaatatcccttgccccataaggcctgaccttgaaagcctcgccacttgatcccggcggcggcggaggggagggcgatgccgaagcggacgacacacacctactcgagcgaggacgcactgccggagggccccgagtccgaccttttcgtatactactgcaagcactgcgcctcacatgtcctca

SEQ ID NO: 35285 - DNA, 252 bp, Zea mays
aattgggtgtgttcattccgtatgttggtggtgtagaacatgctcatgttttgctcccacctttggagacattgtgtacagtggaggaaacttgtgtccgtgataaagcagttgaatctctgtgccgtattggtgcacaaatgaaggaaactgacattgtcgactggttcattccagtagtaaagaggctagcagctggagagtggtttacagctcgcgtatcgtcctgtggtcttttccacatagcctatc

SEQ ID NO: 35286 - DNA, 247 bp, Zea mays
atcttggcaagacatgggataaactccagcttgcagcgagggttatcgttgccatcgagaacccgcagacatcatcgtccagtctgcccgcccatatggccagcgtgctgtcctcaagttcgctcagtacactggcgcccatgccatcgctgggaggcacacccctggtacattcactaatcagctccagacctccttcagcgagcctcgactgctcatccttactgacccaaggactgaccatcag

SEQ ID NO: 35287 - DNA, 249 bp, Zea mays
ggacctgggatggatgtttgcttgagaggatcatcgtcacagtaccacgaatggtcaagcgtgtgagagtaagagcctagctctcttgccagcacaggtcttggcacgcccttttcggtttggcttcgcgtctggaatgtgtatacaggattactggtcagaattctgagaataacgagaagattctctgctgggatagtgggattccctgcatatttatgtgaaaccagctgtcggtatttatgcaca

SEQ ID NO: 35288 - DNA, 251 bp, Zea mays
gtcacatttgcaactatcttcagtgtctgcactaatcatgcatttcttgtacttggtaaaagtgtgcaagccctacagatgagaatgggttttgattcgtatgtgcatgtgtccaatgcattgatatcgatgtatgcaaagtgcggcagtattggtgaagcacgagctgtatttgagagcattagatgcaaagacctggtctcttggaactccttgatctttggatattcacagcatggccttgctgagca

SEQ ID NO: 35289 - DNA, 255 bp, Zea mays
aagagagagaagaccaatggagaagtagagcgtcgtattgtttcacagctactgactcttatggatggactgaaatctcgttcccatgttattgttatgggtgctacaaaccgaccaaacagcattgatcctgctcttcgaagatttggaaggtttgatcgggaaattgacattggagttcctgatgaagttggccgtctcgaggttctccgcattcacactaagaacatgaaactagctgaagatgttaatttg

SEQ ID NO: 35290 - DNA, 253 bp, Zea mays
aaagttttcctgaatatctcagtttatctggaagaaaattcgatcaaaatcaggcaggggcacgggttgcttttgatacacgaaagcgtaatcctgcagactttgcactctggaaggctgcaaaggagggcgaacctttttgggatagcccttggggccgtggaagaccgggatggcatattgaatgcagcgcaatgagtgctcactatttaggacatctattcgatattcatggtggggggaaagatttgat

SEQ ID NO: 35291 - DNA, 250 bp, Zea mays
gtcagagagagctgaaagggcaactcttgttacccaggagaaacttcagattggaagcaacagaatgaagatgatgaggctttctgatgtgtggatacgacctgcatttggtggtcgtgggaggaagctcacaggaaatcttgaggctcatttcaatggtttcagatattctacttcaaggtctgatgagcgtgtggacatcatgtttggaaatataaagcatgcctttttccagcctgcagagaaagaa

SEQ ID NO: 35292 - DNA, 249 bp, Zea mays
tggcgatctcgtgcacctcaccatcttggacctgtcaagcaatctgttgaggggaacaataccggcctccatcggaagcctcactcaccttcgcttcctgaacctgtctactaatttcttctccggagagatcccaaatgtcggtgtcctcggagccttcaaaagcagctcgttcgttggaaatctggagctctgtggcctgtccatccagaaagcttgccgtggaaccctcggctttcctgccgtgct

SEQ ID NO: 35293 - DNA, 253 bp, Zea mays
acaacatcgagggcatgatcctcttctccgagctctcccgccgtcgtatccgctccatctcctccctcatcaaggttggtcgccaggagcccgccatcgtgctccgtgtcgaccgcgacaagggctacatcgacctttcaaagcgccgcgtctccgaggaggaggcgcacgcatgcgaggacaggtacaacaagtccaagctcgtgcactccatcatgcgccacgtcgccgagacgctcgaggtcgacctcga

SEQ ID NO: 35294 - DNA, 245 bp, Zea mays
ggtggtctctattcaaggaatggtggaaaaaactggataaaggctatgatccttacagcatcactttttccattcttgtgtttctcgattggattgttgttaaacactattgctatcttctaccgatcattagcagctataccatttggcacaatggttgtcatgtttattctttgggctttcatctccttcccgttggttctattggggactgtagttggtagaaattggagtggtgctcccaa

SEQ ID NO: 35295 - DNA, 247 bp, Zea mays
cccacgcgtccgcccgaggttgatcctacaattgtgacacatgatgcaaaggatttgtacaaagctggtgagaaaaggctgggtacggacgagaagatttttatccgtgttttcactgaacgcagttgggcacacttggcatctgtttcttctgcttacaatcatatgtatgaccggaaattagagaaggttatcaagagcgaaacttctggaaactttgaatttgcacttttgactatcctcagat

SEQ ID NO: 35296 - DNA, 244 bp, Zea mays
aaacctgcttcggaatttcttgctattgtgttgactgatcttggaactagcttgaagcttgcgggtaatacagaggaggggattcaaaaatattgtgaagctctggaagtagacaaccactatgcgccggcttactacaaccttggagttgtttattcggagatgatgcaatttgatatggctcttagttgttacgagaaagctgcactggagagaccattgtatgctgaggcctattgcaaca

SEQ ID NO: 35297 - DNA, 254 bp, Zea mays
agcgaggctgccgctgctgcgaaggagcagcgcaagaacgacaagagggagaagaggaagaagcacaaggatgccaaggaggatgactgcggcgcctcgatggccgaggaagaagcacccaaagagaagaagcagaagcagaagcagaggaaggataaggacgagcgggaggagaagaaaaagctgaagccgacggttagcatagccgttgccggctccatcattgacaacgcccagtccctcgagctcgccac

SEQ ID NO: 35298 - DNA, 247 bp, Zea mays
cggacgctggggaaggcctgaaaagcaaaaccgtagaagatcactacttcactagctagggttttcatccgtgacgaatggtctatataaaaggtcagaaccgaaaccttaaccttattcggcgactatggcggcggcaccggcaggcggcggccctcgggcattgtcccagcgggagcaggacatccagatgatgctcgccgccgatgtccacctcggcaccaagaactgcgacttccaggtggag

SEQ ID NO: 35299 - DNA, 242 bp, Zea mays
gtgcagcgtgccgtgtgcatgatctccaactccaccagtgttgtggaggtcttctcccgcattgaccacaagttcgacctcatgtacgccaagcgcgccttcgtgcactggtacgtcggtgagggtatggaggagggcgagttctccgaggctcgtgaggatctggctgcgctcgagaaggactacgaggaggtcggtgctgagtttgacgagggtgaggacggcgacgagggtgacgagta

SEQ ID NO: 35300 - DNA, 243 bp, Zea mays
tggagatcatccacctgctcactgacgccaatcccatccaggtggtcgtggacgccattatcaacagtggaccacgtgaggatgccacccgtattggttctgctggtgttgtgagaaggcaggctgtggatatctcacccctgagaagggtgaaccaggccatctacctcctcaccactggtgccagggagagcgctttcaggaacatcaaaaccattgctgagtgccttgcagatgagttga

SEQ ID NO: 35301 - DNA, 241 bp, Zea mays
gctgactgcttctctgaggttcgatggtgccctcaatgtggatgtgaacgagttccagaccaacctggttccttacccgaggatccacttcatgctctcctcctacgcaccggtgatctcttctgcgaaggccttccacgagcagctgtctgtggcggagatcaccagcagcgcgttcgagccggcttccatgatggtcaagtgcgacccacggcacggcaagtacatggcttgctgcctg

SEQ ID NO: 35302 - DNA, 243 bp, Zea mays
aagagaagctgaggcctagcgccgcacccgccgccgcatcagccatcagccatggcgatggccgctcgcctcgtctcgcgctcccgtcagctacattcggttcaagcagcttttgcgaatggaggtgccactcaagttcgctcctttgccaaggatgcagctccagctgaccgtcctcctgttggtggggatgatctcctgaagggcatattctttgaggtaaagaagaagtttgagacagct

SEQ ID NO: 35303 - DNA, 248 bp, Zea mays
cgcttcggtcaccgagagctcgtcggcctccgtccccgcgagaagcgagagcatggacacccaggtgaagcttgctgttgtggtgaaggttatgggcaggaccgggtccaggggtcaggtgacccaggtcagagtgaagttcttggatgaccagaaccgtctcatcatgaggaacgtcaagggccctgttcgtgagggtgacatcctcaccctgctcgagtctgagcgggaggccaggaggctgcgct

SEQ ID NO: 35304 - DNA, 268 bp, Zea mays
gcagggcctcttgaggactcctgaaactgttgcgaaatttcagagtgttcctgtgcaagctgggcaaacacccccactcttgcagtactttggcacattgctaactcgagggaagctcaatgcctttgagtctcttgagctatctcgacttgttgtcaatcagaacaaaaagaaccttctggaaaactggttggctgaagacaaactggagtgcagtgaagaactaggagatcttgtcaagactgtggacaatgatcttgcactgaaa

SEQ ID NO: 35305 - DNA, 264 bp, Zea mays
ctatgagccaatcaagcaaatcatcaagacctgcatgaatgaccagaaggagaaattgtggcccatgctgcaaaagctcaatgttaccatgaaggctgatgagaaggagttgattggcaaagctttgatgaagcgtgttatgcaaacgtggcttccagctagcactgctctgcttgagatgatgatattccaccttccttcaccagcaaaggctcaaaagtatcgtgtggagaacttgtacgagggaccccttgatgatgtgta

SEQ ID NO: 35306 - DNA, 266 bp, Zea mays
attccgctacccaacgagcaatcaagaatggaagttctaaaaatccatgcagctggtattgccaagcatggggaaattgattatgaagcagtcgtgaaactagctgaaggtttcaatggtgctgatcttcggaacgtgtgcactgaagctggtatggctgcaattcgtgcagagagagattatgtagtccacgaagacttcatgaaggctgtgcggaagctaaatgatgcgaaaaagctggaatcaagtgcgcattacagcgcaga

SEQ ID NO: 35307 - DNA, 264 bp, Zea mays
gggaaaatcaaggataccccggttatcaaagtctcattcataatctagtgctgtgtgttatcaattactatggacttaagtggatatatttgcagagtgtatcgcaattggattatgatattctaagtgtagctcttcgagtagtatatgtttgtacatggggactctgaatatcactggcacgtaccgccagctcttccaccctgagcagctcatcagtggcaaggaggatgccgctaacaatttcgcccgtggccactacac

SEQ ID NO: 35308 - DNA, 263 bp, Zea mays
ccgcagaccgggagtagtcgacgcgccgtcactgaatcctcagatcacggctagccgtaatcacgccactctgctgactcccggcgagcagtgtaacattttccttcagccatgggcaaggagaagactcacatcaacattgtggtcattggacatgtcgactctggcaagtcgaccaccactggccacctgatctacaagctcggcggtattgacaagcgtgtgattgagaggttcgagaaagaggccgcggagatgaacaa

SEQ ID NO: 35309 - DNA, 263 bp, Zea mays
aaacgaggaggtccaaaaggctgcagctgctttgaagggttctgaccaccgccgtgctaccactgttgctgctagattggatgctcagcagaaaaagctcaaccttcctgtccttcccacaaccacaattggttcattccctcagactgtggaactcaggagggtccgtcgtgagtacaaggcaaagaagatctccgaggaggaatacatcagtgccatcaaggaagaaatcagcaaggttgtcaagatccaagaggagcttg

SEQ ID NO: 35310 - DNA, 263 bp, Zea mays
gccgcggcgcttgccccacctctcccccgcccggtagtagcctcgccgccgttgccgagatggggttcgtgtccttcgtcgggagggtgctcttcgtcgccgctttcctcctctccgcctaccaggagtttaatgaattcggtgctgatggtggaccagcagctaaggcccttcggcccaaattcaacgtgtttgtcaaaaatgtatctgctcatctgggagtagctgtgccacacattgagttgaagcatgtgattgctgct

SEQ ID NO: 35311 - DNA, 263 bp, Zea mays
cggacgcggggggaaaatggtgaggaagatgaggaagaaccagaagatcaggagggtggcggcgaatacgatgatgacgacgatgacgatgatgagaacggggatgacgaggacgacgacaatggggatgacgatgaggagggtgtagatgaagaagatgatgaccaggacgaggatgaggaggaagatgatgatgaagactcgctccagcccccaaagaagaggaagaagtgaagatcttctgcggctttagttaccgtgcg

SEQ ID NO: 35312 - DNA, 262 bp, Zea mays
gcagcagatctgaggtcccgggcgaccgtgaagcagcttcaatcgtcggcatggcgctcgtattgcatagtggggctggaaacaagaatgccttcaaagcacttattgctgcagaatacagtgggatcaaggttgagttgaccaaggattttgagatgggtgtctccaacaagacccctgagtttcttaagatgaacccccttgggaaggttcctgttctggagactcctgatggccctgtttttgagagtaatgctatcgc

SEQ ID NO: 35313 - DNA, 257 bp, Zea mays
acaaggaggccgtccgctcctacttcaactccacggggttcgatcggtggcgcaagatctacgggtcggcgacggatggcgtgaaccgcgtgcagcttgacatccgcgatgtccacgcgcagacggtggctgctgcgctggccatgctccgcgactccccgctggagctgtcgggcgccaccgtgtgcgacgccggctgcgggacggggtcgctggccatcccgctcgcggcggcgggcgccgacgtcctggcctcc

SEQ ID NO: 35314 - DNA, 259 bp, Zea mays
tgaatcgaaccgtcagcatcagaaggttccaaatgaactgttggagcaggccaaagctgctgctcaggcagctcttgaggagatggatgctgactaagaaacaggacgatttgcccagacttggtgtttttggtgctgttgaaatctccgatccctttggggtgacccactggacatggccaatttgtcacaatttattattttgacccatgtcatgtgaaactcctttcgttgaagtctggtatctagattgacttgt

SEQ ID NO: 35315 - DNA, 259 bp, Zea mays
cttctcacaaggctgtttctgagtacaaggaggcaaaggcgctcggcattgatacagtcccagtgcttgttggaccagtgtcatacttgctcctctctaagcctgccaagggtgtggagaaatctttctctcttctttcacttcttggtagcattcttcccatctacaaggaggttgttgctgagctgaaggcagctggtgcttcatggattcaacttgatgagcctacccttgttaaagaccttgatgctcacgaatt

SEQ ID NO: 35316 - DNA, 257 bp, Zea mays
  unsure (1)..(257): unsure at all n locations
cggacgcggggcgccgcccccggccaaccacccgaaacctacctccgccgccgttgtcgccaccgtcaacatggcgagccaaggggagccctcggcctctgcttccgatccganagagaagaaggacttctcgacggcgatcctggagaggaaaaagtcaccgaaccgccttgtcgtcgacgaggccaccaacgacgataactccgtcgtcgcgctgcaccctgacaccatggagaggctgcagctcttccgcggcg

SEQ ID NO: 35317 - DNA, 258 bp, Zea mays
gcttgagtagcgaacgctgagagcaatggcgtcgctgtcgtgcgcctccacgctgccctggacccccgcctcctacccgcggccctcggcggggcgctgcctcacggcctctcgccgggctccgtcgctggtcatcgtcgcccaggggaaggtcaagaagtaccgccaggtcatattgacagacgacttagaagaggtggggaagaaaggggatacactgaaggtgcgagctggattctaccgcaacttcctccttcc

SEQ ID NO: 35318 - DNA, 255 bp, Zea mays
cggacgctggtcttgactggatttaagatgcactgccatggttggcggtctatttactgcatcccgatgcggcctgcattcaaaggttccgcacctcttaacctttcggaccgtcttcaccaggtccttcgttgggctcttgggtctgtcgaaatcttcttcagcaagcactgcccactctggtacggatatggcggcgggctaaaatttctggagaggttttcttatatcaactctatcgtatatccctggaca

SEQ ID NO: 35319 - DNA, 259 bp, Zea mays
caaaaggggatgcaattgcaagaagtcgtcatgtctaaaaaaatactgtgaatgttttcagggtggtgtgggatgctccataagttgcagatgcgagggctgtaagaatgcttttggaaaacgggagggggctgccgtgttaagcatagaggaacctaagcagggattggaagaaaaggatgtttgtgtgaaagaagagaaaagtgaaatcgagaaacagcttgttgtctaccaaactcctgatgatgctcctgctgaa

SEQ ID NO: 35320 - DNA, 260 bp, Zea mays
aaacaagtgagtgagaaatagagagagaggagggaaaatgctgcgccacgccgcccgccgcctcgtttcccgcgccgtcgctccgcccaccgcgcgccgggcgctcgccacggcggaggtgcccgctgaggccgtcgaggactccacgttcgtcgaggcctggaaaaaggtctcccccaacatcgagcccccagcgacgcccctctccctcatgcagccgcgcccgcacacgccagctaccatccctaccaagctcaccg

SEQ ID NO: 35321 - DNA, 259 bp, Zea mays
ccaagacagggatcgccatgtcggactcggaggagcaccacttcgaatcgaaggccgacgctggggcgtccaagacctacccgcagcaggctggcaccgtccgtaagaacggcttcatcgtcatcaagaaccgtccctgcaaggttgtggaggtttctacctccaagactggtaagcatggccacgccaaatgccactttgtcgccatagacatattcaatgggaaaaagcttgaagatattgttccttcatcacacaa

SEQ ID NO: 35322 - DNA, 258 bp, Zea mays
caaatagtcaagaggcaagagcaaaagttcaagaaaagataaaagaattacaaagagaaagagaacaaaagcttactcagagtctgaaggaccgacttcaatcatatgtagatgggagaaatgatgaatttgtgagctatgcaagcgcagaagctaggcgtttatccgaagcagcatttggcgaggctatgcttcacaccattggttatatttatgtccggcaagcagcaagagaactcgggaaaagtagaatttaca

SEQ ID NO: 35323 - DNA, 255 bp, Zea mays
tcgagacagtacttccaccaaggccttcatccaagctgacagacatggagatagatgaatgcgaggagacgactatgcatgatgtgaacaacatcgaggaagagatgcgcaggaagcaagctcacgctgcccaggaggcgtacgaggaggacgacgagatgccgggcggagccagagagtgcagtgcgcgcaacagtaagcagactatcatcaaggcaattgggaggggtggtgcccttaaagcatgggagtgat

SEQ ID NO: 35324 - DNA, 255 bp, Zea mays
cccacgcgtccggctactactacatcctgaatctgatgattcagctcaactttcccagattgagactgaaaagctgctagcccagttagttgagactgagatgaacagacgtttgaaggagggcacttacaaaggatagaagtttaatgcaatctgtcacttctttggctaccaagctaggggagcactgccttcaaagtttgattgcgattatgcctacgttttggggcatgtgtgctaccacatcatagctgc

SEQ ID NO: 35325 - DNA, 282 bp, Zea mays
actggatgtgttttcagacggcaggcactgtatggttatgatgctcctaaaacgaagaagccaccatcaagaacttgcaactgctggcccaagtggtgcctctcttgctgctgcagcaggaacaagaataaaaagaagactacaaaaccaaagacggagaagaagaaaagattatttttcaagaaagcagaaaacccatctcctgcatatgctttgggtgaaattgatgaaggtgctccaggtgctgatatcgagaaggccggaatcgtaaatcaacagaaa

SEQ ID NO: 35326 - DNA, 279 bp, Zea mays
ggatgaacttgacaccgtatgaatacgttgtctgtaggcagggtgcaccaggatctcagtcggtatcagaggtgagtgggccaaagaagagcatgctggttgtgtcagagtttattggctgctcaccgtcactgagcggtgctattagggttaacccatggaatatagaggcaaccgcagaggcgatgaatgaggccatttcaatgccagaacaggaaaaacagttgaggcatgagaaacattaccgttatgtcaggagccatgacgtcgcttattggt

SEQ ID NO: 35327 - DNA, 281 bp, Zea mays
gttggaagagagacgacggcggccatggcgacctccttccaggggacgaccaccaagtgcaccgcctgcgacaagacggtgtaccttgtggacaagctcaccgccgacaaccgcatctaccacaaggcctgcttccgctgccaccactgcaagggcaccctcaagctcgccaactacaactccttcgagggagtgctctactgcaggcctcacttcgaccagctgttcaagaggacagggagcttggacaagagcttcgaaggaactccgaaggttgtcaa

SEQ ID NO: 35328 - DNA, 279 bp, Zea mays
agggacgcgtggcagccgccgccgccgcctaaggagaagagggtccggccgtctccttgccccgataggcgtccgagaagaagcagtccaacccgatgcgggagatcaaggtgcagaagctggtcctcaacatatccgtacgggagagcggcgaccgcctcacccgcgccgccaaggtgctggagcagctcagcggccagacccccgtcttctccaaggcgaggtacacggtgcgctcgttcggcatccggcgtaacgagaagatcgcctgctacgtca

SEQ ID NO: 35329 - DNA, 280 bp, Zea mays
cagatcacacacactcgagaactccatttcgatcccatttgaaatcaacccatcctcgtttcctccgtctagcagcctctcaccctcatggccaagatcaagatcgggatcaatgggtttggcaggatcggaaggctggtggccagggtggccctgcagagcgacgacgtcgagctcgtcgccgtgaacgaccccttcatcagcaccgattacatgacctacatgttcaagtatgacactgtgcacggacagtggaagcaccatgaggtcaaggtgaagg

SEQ ID NO: 35330 - DNA, 274 bp, Zea mays
cggacgcgtggcggacgcgtgggcggacgcgtgggcaaggcgcccaggatcacatctaagaaccacatcagtgtcaacttctgtgaggatgttgcaatttatggtgtaattgtggcaatcatcctccagacaaagcttgaaagtgtgccaacatcccaaatgtacgatccggagtctcttcgagctggctatgcgatctttgcatctggtcttatcgttggcttcgctaatcttgtttgcggggtatgtgtggggataatcggaagcagctgtg

SEQ ID NO: 35331 - DNA, 277 bp, Zea mays
tgaagggttataatggcaacaaagaaatgcttgggaaatgtgaacagttcttcctggagctgatgaaagttccacgtgtagaggccaagctaagagtttttgctttcagaattactttctcaacacaggtagatgaactaagaactaacctaaccaccataaacgatgcaacgaaggaggtcaaagaatctctgaagttacggcagataatgaagaccattctcacattggggaatgcattaaatcaagggacagcacgaggatctgctgttggctt

SEQ ID NO: 35332 - DNA, 279 bp, Zea mays
gggcatccatagacgctgggacaatggcttccgtattactgcaatggctaccacgatggatcagtctgcgctgatcctaagcaagccaaggcgtcgcccaagagacgagacacaagagactctgcggactacacagtttcccagtcaacatgtcaaggacaagtgggccaagaatctctaccttgctgggatatgctatgggcgaaccgtggcctaacatcgtccgttgctgacctagctgttgtttgatgtatattttgagttttttatcagctgcta

SEQ ID NO: 35333 - DNA, 276 bp, Zea mays
ctaatggaactagaagatgaagatcttgcttcacaaatgttaaaacaccaggaacgagcaattgacttttggcaaaagcattgggacaaaccaattcctctaaagctgaaacgccttgcacgtgaccatgagagatttctctgggcactgagtatagtacagtctcgttctgtcaacttgaagttgagaatgggagccttcatccaagatgcaaatgtgctagctccttatgctgatatgttgaaccactcacccaatgctaattgcttcctgcat

SEQ ID NO: 35334 - DNA, 272 bp, Zea mays
gcctggcaatggctatccctgatagatggattgactacctgaagaataaagatgactctgagtggtcgatgggtgaaatagcgcatactttgactaacaggagatatactgaaaaatgcatcgcatatgctgagagccatgatcagtctattgttggcgacaaaactattgcatttctcctgatggacaaggaaatgtacactggcatgtcagacttgcagcctgcttcacctacaattgatcgagggattgcactccaaaagatgattcac

SEQ ID NO: 35335 - DNA, 272 bp, Zea mays
ttttgtccagtatcttatggacgttgttggccccgagttatcagagccagcaaataggattagctccttccaattggctggcttgcttgagactgcaatccgagcatccaatgcacaatatgatgactgttatatcttggaccggataaaggtaaagatgatggatcatggggatggtgatcgtggctgggatgtcttctctttggagtatgatgctagggtcccctggacactgtgttcacagcttcagttatgaagatgtatctcaaggt

SEQ ID NO: 35336 - DNA, 275 bp, Zea mays
cctcagactcctctccgcacacaccctccctacctcgccgtcgccgtcgcatctgccatgggggcgtacaagtacgtctcggagttatggagaaggaagcaatccgacgtgatgcggttcgttcaacgcgtgcgctgttgggagtacaggcagcagccggccatcgtccgcctcacaaggcccacccgccccgacaaggcccgccgcctcggcttcaaggccaagcaggggtatgttgtttaccgcgtccgtgtgaggcgtggtggcaggaagag

SEQ ID NO: 35337 - DNA, 270 bp, Zea mays
gttgctgttcagtgcaaggttgcctctgaccttcccaagctagtcgaaggtttgaagcgtctagcaaagtccgatcctatggttctctgtacaatggaagaatctggtgagcatatcattgctggagctggtgagcttcatcttgagatttgcctgaaggatctgcaggaggacttcatgggtggtgctgaaattattgtttccccacccgtcgtctccttccgtgaaacgttcttgagaagtctgccgtactgtcatgagcaagtctcc

SEQ ID NO: 35338 - DNA, 268 bp, Zea mays
cggacgcgtggcggacgcgtggggaacaaaggaactgctctgaacctccctggaatccctattgcaattggattgtatgcttattgctactcagggcatggggtgtttccaaacatctactcttctctgaagaagcgcaatcagttcccttcaatcctttttacttgcattgggctgtctaccattttatttgctggtgcagcggtgatgggatacaaaatgtttggtgaagcacacagtctcagtttacactgaacttaccagagaa

SEQ ID NO: 35339 - DNA, 268 bp, Zea mays
ctccactccagcactgaacacttgattgattcagtaggtagctagctagctgaatcacaatggatcctaccaagttccgtccgtccagtagccacgacacgacggtgacgacgacgaacgctggcgctcctgtgtggaacgacaacgaggcgctgactgtggggcctcgcggtcccatcctgctggaggactaccacctgatcgagaaggtggcgcacttcgcgcgggacgcatcccggagcgcgtggtgcaacgcgcggggcctccg

SEQ ID NO: 35340 - DNA, 271 bp, Zea mays
cccacgcgtccgcccacgcgtccgcggacgcgtggcgcgtggacgggtgcgcctgggcggccaacgccacggacggcgacgccgcggaggagcgccggtgatgccagtcctcgtggggcaaggaatgccgctactggtggaaggagaaggagatgtcggagctgagcgtgcaccagagccaccagctcgtgtgggcgcgcgcgcaccacctcgtctacgactactgcgtcgacaccgaccgcttccccgtgcagccgccagagtgcgccgg

SEQ ID NO: 35341 - DNA, 264 bp, Zea mays
cggacgcgtggcggacgcgtgggcggacgcgtgggcaagttcgtgctgaaggacaagaagaagccgatacatcttctcgatggcgcgtctcgaccgcgtgaagaacatgacaggcctggtggagatgtacggcaagaacgcgcgcctgagggagctggcgaacctcgtgatcgtcgccggtgaccacggcaaggagtccaaggacagggaggagcaggcggagttcaagaagatgtacagcctcatcgacgagtacaagttgaa

SEQ ID NO: 35342 - DNA, 267 bp, Zea mays
tcccaacaccacctcgcctgcgatcttcgtagcctccgtcgcgtcgagcatcgatcatgtcggcctactgcggaaagtacaaggatgagctcatcaagaatgctgcctacattggcacccccggcaagggtatccttgctgctgatgagtccactggcaccattggcaagcgcctttccagcatcaatgtcgagaacgttgaggagaaccgccgtgccctccgtgagctcctattctgctgccctggtgctctccagtacatcagcg

SEQ ID NO: 35343 - DNA, 267 bp, Zea mays
  unsure (1)..(267): unsure at all n locations
ctcgagctctactccatcccctcgatctcgaagcgcacagcagcagtcaggcggccatggacgcgagcgcaccgngagccggcgggaaggcgaagaagggcgcggccgggcgcaaggccggcgggccgaggaagaagtcggtgacgaggtccgtcaaggccgggctgcagtttcccgtcggccgcatcgggcggtacctgaagaagggccggtacgcgcagcagtcggcacgggcgcccccgtctacctggccgccgtcctcgagta

SEQ ID NO: 35344 - DNA, 269 bp, Zea mays
cccacgcgtccgcccacgcgtccgcgctacaaggaagacgtcgatctcatgaaaagtttgaactttgatgcctaccggttctcaatctcatggtccaggatcttcccggatggcgaagggaaagtcaatccagaaggtgtagcgtattacaataatttgataaactatctgcttcagcaaggcatgactccttacatcaacctttaccactatgatcttcctcttgcgcttgagaagaaatatggagggtggttaagcgcgaagatggc

SEQ ID NO: 35345 - DNA, 267 bp, Zea mays
cggacgctccgcccacgcgtccgctgctcctgccctcggtttctgatcagcgaacatgggaacccgcggcgtcgccctgctgctcctcgcatcggtgctgctcctccaggcgctcctccccgcgtcgtcggagggcctggtgcgggtcgcgctgaagaagctgcccgtcgaccagaacggccgcgtcgccgcgcgcctctccgccgaggagaggcagcgcctcctcctccgcggctccaacgctctgggctcaggcggcgacgacga

SEQ ID NO: 35346 - DNA, 264 bp, Zea mays
ggcttcttcaagctcaaccccaaggagggcctggccatcgtcaacggcacgtccgtggggtcggcgctcgccgccatggtgtgcttcgacgccaacgtcctcgccgtcctgtccgaggtcctgtccgccgtcttctgcgaggtgatgaacggcaagcccgagtacacggaccaccttacccacaagctcaagcaccacccggggtccatcgaggccgctgtcatcatggagcacatcctggatggcagctccttcatgaagcac

SEQ ID NO: 35347 - DNA, 266 bp, Zea mays
cactgatgtgcacgaaagccaccagtgtgaagctgttggaagagttgctgacatcatacagattccagccttcctctgtcgccagactgatcttctagtggctgctgctaagactggaaaaattatcaatatcaagaaaggacaattctgtgcgccttctgttatggtgaactctacagagaaagtaaggcttgctgggaatccaaatgtgatggtctgtgagcgtggtaccatgtttggctacaatgatctatttgttgacccaa

SEQ ID NO: 35348 - DNA, 267 bp, Zea mays
ggcgttctgcaaggagtacaatgccaagacggccgacaagcccggctacatcatccccgtcgagatcaccgtgtttgatgataagagctttatcttcgtcttgaagacccctccggcttcagtcctgctactcaaggctgcaggtgtcgaaaaaggttcaaaagagccacaacggcagaaggtgggaaaggtaacagtggatcaagtgcgtgcaatagctcaagagaagttgccggacttgaactgcaagagcatcgactctgctat

SEQ ID NO: 35349 - DNA, 274 bp, Zea mays
cggacgcgtgggggcgtccctctccccttccctccacctcccttgcaattcaagaactggcttccttggaaagacacgtgggattcgtccttgtgttttccctgctggaagagttggatttgtcagaacagtagtggaatgcaaggaatctagaattggaaagcagcccatcgaagttccatcaaatgttactctcacattagaagagcagtttgtcaaagctaagggtccgctgggggagttatctctgagctttccaggtgacttgaagatc

SEQ ID NO: 35350 - DNA, 274 bp, Zea mays
cagtaaggaggttagctgttgatgccacgcttagagcagctgcaccataccaaaaactgcgcagagagaaagaacgtgacaaaacaagaaaggttttcgttgaaaagactgacatgagagccaaaagaatggctcgaaaagcaggtgctctagtcatatttgttgtggacgctagtggtagcatggctctgaatcgtatgcagaatgctaaaggtgcggcgttgaagttgcttgcagaaagctacaccagcagagatcaggtttcaattattcc

SEQ ID NO: 35351 - DNA, 270 bp, Zea mays
attcagcagctatgaaagttcctgttgccgctattgaggtatacctggatgtgaggagccaaattgaagatcaaattcggggatttagcgaaccagtatcagacaaacttcttccagatcttgctcctcaagagcagcatgtattgactctagttctggatctgaacgagactcttgtatactcagattggaagcgtgagagaggatggaggacctttaagaggccaggagtggatgcttttcttgaacatctcgggaggttttatgaaa

SEQ ID NO: 35352 - DNA, 265 bp, Zea mays
cgcattcctcccatctcccaagacctcctcagacccgagaagcgcactgcggccatggacgccaccggcactggagctggagggaaggcgaagaagggagcggccggtcgcaaggccggcgggccgaggaagaagtcggtgacgaggtccgtgaaggccgggctccagttccccgtcggccgcatcgggcgctacctcaagaagggccgctacgcgcacgcgtctggcagcggtgcccccgtctacctcgcggccgtcctggagt

SEQ ID NO: 35353 - DNA, 269 bp, Zea mays
cccacgcgtccgcccacgcgtccgcccacgcgtccggcaaccatggccgcggggggcaccgccgacttcatctaccgcgagtcgcagcgtctgggctacgtcgcccgctctgcgtttaagctgatccagatgcagaagcagcacaagctcatcgcgccgggcgccgctgtgctcgacctcggctgcgcccccggcgcgtggcttcaggtggcttgtcagaacctgggtcccctcgagaagggtggcattgtcgtcggcgtcgatgttaa

SEQ ID NO: 35354 - DNA, 266 bp, Zea mays
gcgagggggatgcgaggaggccggagaagggagacagtggcgggatcgatccggagctcagcgtccgaaggatctggctcgggagaattggtgctggattggaaaatcttgggaatacctgctatctcaactcagttctgcaatgcttgacgtacacggagccgttcgctgcctatttgcagagcgggaagcacacgtcctcatgtcgcacatccggattttgtgcattatgtgctcttcagatacatgtcaagactgctctagaa

SEQ ID NO: 35355 - DNA, 266 bp, Zea mays
atcaagcctcctggagtagaggttcactttatagtcgctgcctgtgaaaatatgatcagtggcacaggcatgagacctggtgacattgtaactgcttccaatgggaagacaattgaggtaaataacactgacgcagaaggaaggctaacacttgctgatgctttggtctatgcatgcaaccaaggtgttgaaaagattattgatttggcaacgctgaccggcgcttgcgttgtcgcactcgggcctagcattgccgggattttcac

SEQ ID NO: 35356 - DNA, 268 bp, Zea mays
cgcaccaacacgattggagcggttgctaggattaggcaccagttagcctatgcatcacacaggttctttgatgagaatggatttctctatgtacatacaccaataataactacgagtgactgtgaaggtgctggtgagatgtttcaagtgacaactttatttagccaggctgagaaaactgagaaggaattgagagagaacccaaaaccttctgattctgaaattgaggcagctaaagttcttgtcaaggaaaaaggtgatgtggtcg

SEQ ID NO: 35357 - DNA, 264 bp, Zea mays
aagagaaaagagacctgatccatcagttcttggggttgaggtttggggaaggaagttttcaaacccaatcggtcttgctgctggctttgataaaaatgctgaggcagttgaaggtctcttaggcctgggatttggctttgtggaagttggctctgtgacacctcttcctcaagagggaaatcccaagcctcgaattttcagattaaaggagcatggtgctgtaatcaaccgatgcggattcaacagtgaaggaattgtagttgt

SEQ ID NO: 35358 - DNA, 266 bp, Zea mays
agacatgctgtcttaggagcttctgaatctcgtcctgatctgatattaacgggacaccaggaaaatgcagaatttgcgcttgccatgtgtccagcagaaccatatgtcctgtcaggaggaaaggacaaatttgttgtcttgtggagcatccaagaccacatatctgcccttggggattcctcgtcttctcccggagcatctggcagcaagcagtctggcaaaattgcaaatgaaaaggagagtcctaaagttgatcctagaggtat

SEQ ID NO: 35359 - DNA, 264 bp, Zea mays
gacgcccatctgctccaccctccacccagccgccgccgccgccgcctaaggagaagagggtccggccgtctccttgccccgatggcgtccgagaagaagcagtccaacccgatgcgggagatcaaggtgcagaagctggtcctcaacatatccgtacgggagagcggcgaccgcctcacccgcgccgccaaggtgctggagcagctcagcggccagacccccgtcttctccaaggcgaggtacacggtgcgctcgttcggcatc

SEQ ID NO: 35360 - DNA, 264 bp, Zea mays
gccggaatgagcgataagaagattgtgcaatgggatatgaagtcagggcagattacacaagagtatgatcagcatttaggggctgtgaacaccataacttttgtggataacaacaggagatttgtgacctcaagtgatgacaagtctcttcgtgtgtgggagtttggcatccctgtggtgattaagtacatcagtgagccgcacatgcattcaatgccatcgatgtcactgcatcccaactccaattggctggcagcacagagt

SEQ ID NO: 35361 - DNA, 264 bp, Zea mays
gggtcctttgacaactgatattgcacctggttatgatcacatcacttcagccattggtgctgccaacattggagctcttggcactgcacttctttgctatgtaacaccaaaggagcaccttgggttgcccaatcgtgatgatgtcaagactggtgtaatatcctacaaaatttctgctcatgctgctgatttggcgaagggtcatccctatgcacaagcttgggatgatgcacttagcaaggcaaggtttgagtttagatggct

SEQ ID NO: 35362 - DNA, 254 bp, Zea mays
aaccccgctcgcgggcgccgacccggagatctacgacctcctggagcgcgagaagcggcgccagcgtcgcggcatcgagctcatcgcctccgagaacttcacctccttcgccgtcatggaggcgctcggctccgcgctcactaacaagtactccgagggcatgcccggcgcccgctactacggcggcaacgacgtcatcgacgagatcgagaacctctgccggtcacgcgcgctcgctgccttccaccttgacg

SEQ ID NO: 35363 - DNA, 262 bp, Zea mays
gcgcgcttcgcggtcgcacgcgtaccatcgccgtgggctgtgtgccatcaaggccaagaacggcggcgccttccccaaggccgacaaagccgccgccgccgtggaacccaagttctaccctgccgacgacgtcaagccccgcgttcccagcacccgcaagcctaagcctaccaagctcaggtcgagcatcacgcctgggacggtgctgatcctcctcgcagggcgcttcatggggaagagagtggtgtttctcaagcagctc

SEQ ID NO: 35364 - DNA, 258 bp, Zea mays
cagatccaaatactaacagtgtgcatttgtagtcaatattttatatggttgtctgcatgcattctaggatgatgcactgaagtactatgtcaatactggttataatgctgtaggtatatgttggtgggcttgaccccaatgttagtgaagatgaactgaggaaagcatttgcaaaatatggtgatcttgcctctgtcaaaattccttttgggaagcaatgtgggtttgttcaatttgtaaacagagttgatgctgaag

SEQ ID NO: 35365 - DNA, 259 bp, Zea mays
cccacgcgtccgaacaaaaccaggaattcagcattcagaatgaagattttccagctttaccaggaaataaaggtagttcctcagattatcctatggatattcatcacaaggaccaccttcatgagaatataaatattatgcaagcacaacattatcctatggctagaccatctggctttagcttgggaagcagttatccaccccgtcaacatcagcagagtgctaattcagttcaaaatgctgggctggaaactattgg

SEQ ID NO: 35366 - DNA, 255 bp, Zea mays
aacaagcttattagaattttgaagtatgggtcattgctctttgcgttgtcaagtgattcagctaatgcctttgaggatgacacgtccagatttaggccaatcgaagaggcagtacggagtaatggctcaagcatctcttttgttgggctaggatggcgccttagcaatgaacataaggggaaatgcttcaaaatcttctcagcaacagaaacattagctgaatcacttgacaacgccaagagccatgacccatac

SEQ ID NO: 35367 - DNA, 258 bp, Zea mays
atgatcctgagatgaagcaacactcgtttctttttgaaattggttacccggaaatcgaagataattgcaagccaaggcaccgtttcatgtcatcatatgaacagaaagtccaaagttgggataagggttatcagtacctactttttgctgcagagccctatgaaattattgcattcaagataccaagtacagagattgataaatcagcgaacaaattcttctcttactgggatcctgacaagaaggaatatctactgc

SEQ ID NO: 35368 - DNA, 260 bp, Zea mays
cccacgcgtccgcggagaagaccgacgtgtttgggttcggggttctgttagtcgagctgatcactgggcagaaggcgctggatttcggaagggtggcgaaccagaagggtggagtgctcgactgggtgaagaaactccaccaagaaaagcagctaggcacgatggtggacaaggacctgggcagcagctacgacagggtggagctggaggagatggtccaggtgtccttgctgtgcacgcagtaccacccgtcgcaccgg

SEQ ID NO: 35369 - DNA, 282 bp, Zea mays
ggtggatatcatgtcttggatgagtcaacacattacagtagtgatttaaggccaactgcaaagcccctgtggaaacctagcattggcattcttgaactgggtatattgacagcacagggcctgttgccaatgaagaccaaggatgggcgtggcacaactgatgcatattgtgttgcaaagtacggacaaaaatgggtgcgtaccaggactataatcgacagtttcactcccaaatggaatgaacagtacacctgggaggtgtatgatccatgcactgtggtc

SEQ ID NO: 35370 - DNA, 274 bp, Zea mays
cgtcgctccgccgccgccgaaacagcacatcgctctctcgatctcagccatggcggaggtggagcagccccaggacgcggtgaagctcttcaaccgctggaccttcgacgatgtccaggtgaacgatatctcgctgaacgactacctggctgtgactgcggcgaacacgcgacattcctgccgcactccgcggggcgctactccaagaagcggttccgcaaggcgcagtgcgccatcgtcgagcgcctcaccaactcgctcatgatgcacgggc

SEQ ID NO: 35371 - DNA, 279 bp, Zea mays
gttagagagaggtgtggaaatcctggtggcaactcctggtcgcttgatggatctgttggagagggctagagtctcacttcaaatgataaagtatttagctcttgatgaagctgatcggatgcttgatatgggtttcgagccacagatacgtaaaattgttgagggcatggacatgcctcaacgtggtgagaggcagacaatgttgtttagtgcgacattcccaaaagagatacagaggatggctgcagatttccttgctgattacatctttcttgctgt

SEQ ID NO: 35372 - DNA, 283 bp, Zea mays
gaagaacttagatgataacattgatgatgaaaagttgcgtgaaatctttgctgagtatggcaatattacttcttgcaaggttatgcgggattcttatggtgttagcagagggtctggatttgtttctttcaaatctgctgaagatgctaaccgagctcttaccgagatgaatggcaaaatggttggaagcaagcccctttatgtagctcttgcacagcgtaaagatgacagataggcaaagctacaggcacagttttcacaaatgcgtcctgttgcaatggca

SEQ ID NO: 35373 - DNA, 286 bp, Zea mays
ctccattctcagccgccgccaatcccttcccgtgctccgcaaccgctgagtgataagaagagatggccggcaagggcgatggcccggctatcggcatcgatctcggcacgacgtactcttgcgtcggcgtgtggcagcacgaccgcgtcgagatcattgccaacgaccagggtaaccgcaccacgccctcgtacgtcgccttcaccgactccgagcgcctcatcggagatgcggccaagaaccaggtcgccatgaactccatcaacaccgtctttgatgctaagcg

SEQ ID NO: 35374 - DNA, 289 bp, Zea mays
cccacgcgtccgatgtttgacttgtgcttgaatgcacttgcagtccatgggcatctcattgtaattggtatgatctcccagtatcaaggagaggatggctggaagcaaagaactacactggactatgtgagaagattctagctaaaagtcaaactgtggctggatttttccttgttcaatatgctcacttgtggcaagatcatcttaacaaactttttgacctgtatgcctctggaaagctaaaggtttccctagaccccaagcaattcttgggtgttgcttcagtcgt

SEQ ID NO: 35375 - DNA, 270 bp, Zea mays
cccacgcgtccggctggttcttcttggagatgtaggcgctggcaaatctagcttggttcttcggtttgtcaagggacagtttgttgaattccaggaatcaacaatcggagcagctttcttttcccagaccttagcggtaaatgatgagactgttaagtttgaaatctgggatactgctgggcaggagaggtatcatagcttggcccccatgtattataggggtgcagcgccgccattgttgtctatgacatcacaaatccggcctccttc

SEQ ID NO: 35376 - DNA, 268 bp, Zea mays
ccattcctcgcgcggcgaccacccgattcgaagcgtgcggagagaccgaagaagcgggagagatggctcgtaccaagcagactgctcgcaagtccacgggagggaaggctcccaggaagcagcttgccaccaaggctgcccgtaagtctgcccccaccactggtggagtgaagaagcctcaccgctaccgccctggaactgttgccctccgtgagatccgcaagtatcagaagagcactgagctgctgatcaggaagctgcccttcca

SEQ ID NO: 35377 - DNA, 280 bp, Zea mays
ctctggctcttgcacaagcccatgaaactcgggaaaaactgaaagccgcacactctgagttagctgaggagggggctattgagatcgtcatcataaagaccacaggagacatgatcttggacaaaccccttgcagatattggaggcaagggtttattcaccaaggagatagatgatgcactcttgcagggaaggattgatatagctgtgcactctatgaaagatgttccaacatatctacctgaaggcacaatattgccctgtaacctcccacgagaaga

SEQ ID NO: 35378 - DNA, 284 bp, Zea mays
aggcatcactgatgacctgatccgggaggcggcatccaggacccagggcttctctggaagagagatagcgaagatgatggcaagcgtccaggccgctgtctatgggagcaaggactgcgagctcaccccaggcctgttccgtgaggttgtggactacaaggtcgctgagcacaagcagcggagaagattagccggtgaggagccaaagcaggatgcctagtttaccaatttttttgattcacccccattttgccgtgggatgtactgtgtttccccccgggata

SEQ ID NO: 35379 - DNA, 268 bp, Zea mays
ggtatgtcgatatcggcatcccagcgaacaacaaggggaggaacagcattggatgcctgttctggcttttggccaggatggttctgcagatgaggggcactatcctccctgggcacaagtgggaggtcatggtggatttgttcttctacagggacccagaggaagataaggagcaggaggaggaagctgctgttgccactgagtttgccgcaatcactgattaccaaggagctgatcagtggggtggtgaccagtggacctctgatgt

SEQ ID NO: 35380 - DNA, 260 bp, Zea mays
ctgtcgtccgtatcgggctccccagcaagggccgcatggccgagcaaaccctaagcctcctcaagagttgccagttgtcggtgaggcagctcaacccgcggcagtacactgcagatatcccgctgattccaaatttggaggtttggtttcaaaggcctaaggacattgttcgtaaacttcagtcaggcgatcttgaccttggtgttgtgggttttgacatagttagtgaatatggaaacggcaatgaggatttagtggtc

SEQ ID NO: 35381 - DNA, 268 bp, Zea mays
gcgcggagtcaaagaggtagtcaagagcattcgccgcgggaacaaaggattgtgtgtgatcgctggaaatatttctcctattgatgtgattacacatgttccgatactatgtgaggaagctaatgttccttacgtatatgttccatcaaaagaggatcttgcgaccgcaggaaccactaagaggccgacttgttgcgtcttggttctgaccaaaccaaacaagggggagctcagtggagaggtgaaggataaactgaagtcggactat

SEQ ID NO: 35382 - DNA, 271 bp, Zea mays
cttttctgcttccagacattgtccacgagctagtgcactggtgtcgctcgcaaccaaattaaggactgaggcatggcatccaagggcgtcctcttcttggctctcaacctcctgttcttcacagtggccaacgcctgcggcagctgcccgaccccaacgcccccggtcgagccaccgccgccgcctcctgctaccccacccccttcatcctccagtgggaagtgcccgctgaacgcgctcaagttcggcgtgtgcgtcaatgcgctcggct

SEQ ID NO: 35383 - DNA, 268 bp, Zea mays
aaggcaatgactggtttgagaagcagacggcaggcacgctcgacatcctgtgctctccttggatggattggttccacggtggcctgcagttccagattgagcaccatctgtttccccgcctacctcggtgccaccttcgcaaggttgcaccggccgtccgcgacctttgcaagaagcatgggctcacttattctgcagccacattctggggtgcaaatgtgcttacatggaagacactcagggctgctgcattgcaggccaggaccgc

SEQ ID NO: 35384 - DNA, 271 bp, Zea mays
gtcgcttccagccgccgccgcgtccgcctcgccaagcgcacagccgccgcagcacatcgctctcttgatctcagccatggcggaggtggagcagcaacaggacacgccgaagctcttcaaccgctggaccttcgatgatgtccaggtgaacgacatctcgctgaacgactacctcgctgtgaacgcgacgaagcacgcgatgtacctgccgcacaccgcggggcgctactccaagaagcggttcctgcaagcgcagtgcccgatcgttgag

SEQ ID NO: 35385 - DNA, 272 bp, Zea mays
ggccatgatggaccttcaggagaggaacgagaggcttttctacaagcttttaattgataacgtggaggagctgcttcctgtggtttatacaccaactgtaggtgaggcctgccagaagtatgggtccatctttcgacaaccacagggtctgtatgtcagcttgagggacaaggggaaggtcctagaagttctaaggaactggccacataggaacattcaagttatctgtgttactgatggtgagcgaatcttgggacttggagatttgggtt

SEQ ID NO: 35386 - DNA, 275 bp, Zea mays
ctgctttcaaacctttatgcttctataggaaaatgggatagtgtgtctgaaattaggagaaagatcagagggctcatgattgaaaaggagcctgggcttagctggattgagattgagaaaatggtacatgtgttttctgcagacgatgaatgccacacacgcattgatgattgtcgtgatgagttacttagaataatggaaaacatggtactgttggatagttatgaaaatgaaatagtgttaaatggttaggttgcctttgttgttaatggaaa

SEQ ID NO: 35387 - DNA, 210 bp, Zea mays
ggcggccatgagttgctgatgtttgaggcccttcgtgaagccttgatagaagagatgaatttggatccaacagtgtgcgtcatgggtgaagatgttggtcattatggaggttcatacaaggtgaccaaagggttggctgagatgttcggagatctccgggtccttgatacccctatcgccgagaactccttcactggcatgggagttgga

SEQ ID NO: 35388 - DNA, 308 bp, Zea mays
gaagctgcagtacggtcggaattccgggtcaccacgcgtccgggacgctggcagaaaaagcttcagttggatcaaaaatattttccactttcattggtttcctcaaaagcaaagatccaagcgatggaacagaagaggcactacttaatgagcttacttcatttgatagttatctaaaagacaatggtccatttattaatggtggaataatttctgctgctgatctctctctgggtcctaaactatatcacatggagataactctgggccactacaagaattggtctgttccagattcactttcttat

SEQ ID NO: 35389 - DNA, 274 bp, Zea mays
cacagctctcgccttctctctcccatcggcacacccgagctcgctccctccttccacgtcgaggtccgagtcctgctttgatggcgaccgacgtggctgagactcccgcgccgttggtggatgcggccccagatgcgcccgccgacgccccggcggcgcctgctgccgacgcgaaccggccaaggccaagaaggccaccgcgccgaagaagcgcgccacgccgacccatccgccgtacgccgagatggtctcggaggcgatcacgtcgctcaag

SEQ ID NO: 35390 - DNA, 266 bp, Zea mays
cacagctctcctcatcggcgcacccgagctcgccctctccttccacatcgaggcccgagtcctgctctgatggcgaccgacgtggctgagactcccgcgccgttggtggatgcggcccctgaagcgcccgcggacaccccggcggcgcctgctgctgacgcgaaccggccaaggccaagaaggccacagcgccgaagaagcgcgccagcccgacccatccgccgtacgccgagatggtctcggaggcaatcgcgtcgctcaaggag

SEQ ID NO: 35391 - DNA, 260 bp, Zea mays
cccaaaagtgagccttgacttctactcacgtgtgatgggcatgtcgttgctgaaaaggttggattttgaagagatgaaattcagtttgtattttctaggttacgaggatgtgaccttagcccctgatgatcatatcaagcggactgaatggacttttaggcaaaaagctactcttgagctcacccacaactggggcacggaaaatgaccctgaattcaaaggttaccataatgggaactcagaccctcgtggttttggtc

SEQ ID NO: 35392 - DNA, 266 bp, Zea mays
gtatatttaaccctgcaatagtgtatgatcacttgggggagatatactctgctcttgtttttggaagctttgtattctgtatttttctctacataaagggccatgtatttccatcttcatctgactctggatcctctgggaatgtgataattgacttctactggggtatggagctgtaccctcggattggcaagtactttgatatcaaagtcttcaccaactgtcgtttcggtatgatgtcctgggctgttcttgccgtaacctat

SEQ ID NO: 35393 - DNA, 266 bp, Zea mays
gtgaaggatggaggagggggagacggggaaaccgatctcaacgaggctcttacctcgcaggtgcgtcgccttgccatggaggtccggcaacttggtaattcacgttcaataactgttctcaatggaggttctgcacaatcaggagtatcaggcctgatagtacctgcagcaactgtaggagcactgggttacggttatatgtggtggaaggggatctcgttctcagatctaatgtatgtcaccaagcgcaacatggcaaatgctgt

SEQ ID NO: 35394 - DNA, 266 bp, Zea mays
ccgcgagatgacccgtcgctacatgacggacatgatcacctacgccgacaccgacgtcgtcatcgtgggcgccggctccgcggggctgtcctgcgcgtacgagctctccaaggaccccgccgtgagcatcgccatcgtggagcagtcggtgtcgccgggcggcggcgcgtggctgggcgggcagctgttctcggccatggtggtgcgcaaccggcgcacctgttcctggacgagctgggcgtggcgtacgacgaggccgaggacta

SEQ ID NO: 35395 - DNA, 259 bp, Zea mays
acgacttctgccacaaccatccggagtggatagcggacgggagcagtggggatgttggagcaaactcctactatctgtatagggaggacttcagattgctgaaggaaatgggtatggacgcctacaggttctccatctcttggcccagaatattgccaaaggggacactcgagggaggcattaaccataaaggcatcgagtactacaaaaagctgatcaacttgttgaaagagaacggcatagaaccatatgtgacact

SEQ ID NO: 35396 - DNA, 260 bp, Zea mays
gcaaactaagctccatagcttttgtcagtcaactggtgttcatctaactgcttactcaccactaggttcacctggtacaacttggatgaatggtaatgtccttaaagaaccaataatcatctcaatagctgagaaactcgggaaaacttctgcacaagtggctctgcgctggaacattcagatgggtcacagtgttcttccaaagagcacgaatgaagaaaggataaagcaaaaccttgatgtttatgattggtcaattc

SEQ ID NO: 35397 - DNA, 262 bp, Zea mays
ggttcgcactggctcgtaccgccagctcttccacccagagcagctcatctcggggcaggaggacgcagctaacaactttgcccgtggccactacacggttgggaaggagattgtcgatctatgcctggaccgtgtgcgcaagcatgcagacaactgcactgggctgcagggattcttggtgttcaatgctgttggtggtggtactggctctggacttggttcactgctgttggagcgcctttcagttgattatggcaagaag

SEQ ID NO: 35398 - DNA, 262 bp, Zea mays
cagttcttgctgttaaaaagatagatagcgccgcactttctttacaggaagaagacaatttccttgaggctgtatcgagcatgtctcggctaaggcatccaaacatcgtgccattgacaggatattgtgttgaacatgggcaaagacttcttgtctatgagtacattgtaaatggaacgctgcatgatatgttgcacttctctgttgaaataagcaggaagcttacatggaacatccgcgtaaggatagcactaggcactgc

SEQ ID NO: 35399 - DNA, 259 bp, Zea mays
ggtagggatgttggacttaatcagattgcactatttgaaggaaaagttgctggtggaaatggtgaacaagttcttagccgagacatatatagactcggacaactttttgactttttcaggatgttatctttctacgtgacaactgttggattctacttctgtactatgctaaccgtgctgaccgtgtacatatttctctatgggaaaatgtatctggccttatctggtgttggagaatcaattcaaaatagagcggata

SEQ ID NO: 35400 - DNA, 201 bp, Zea mays
gtcaatggcgctggcatcaactctagcgttgctgtgcaccaggatgttgatggaagggcgactgatgctgctttagcatggtcagttgcacttggatcccccttcacgtttgctactactttgggacaggagtacaagcgtgatatctttggagagcgaggcatcttgctgggtgctgtccatggtatcgtggcggctctg

SEQ ID NO: 35401 - DNA, 262 bp, Zea mays
ctctagctagctagcagggggggaaatggctccacttctcgccgcagccatgaaccacgctgcccatccagtccttagaagccatctaggacccaacaatgagagtttctcacgacaccacctatcttcttcaccgcaaagcagtaagcgaaggtttaaccttagctttacgccacgatctgcaagagtaggcaatcaaaatggagtccaattgttgagcccttcggaaatccctcgaagggactggttcccctccgacttc

SEQ ID NO: 35402 - DNA, 279 bp, Zea mays
cccacgcgtccggtttcgcttctcgtcgcgacgactgggcgagaccgccgccgccgcctgagttctgtagaaatggctgatggtgaggacatccagcctcttgtctgcgacaatggcactggaatggtcaaggctggttttgctggcgacgatgcaccaagggctgttttccctagtattgttggccgtcctcgccacactggtgttatggtagggatgggacagaaggatgcgtatgttggcgacgaggcacagtccaagagaggtattctcacgctc

SEQ ID NO: 35403 - DNA, 273 bp, Zea mays
acgttgttgatggacgcctgttagctgctctaagggtgcttcttgccgatgatacagaggctgtgcacaagcatgacctgaatacattgatgtctcttgacgtgcaagttcctttaggtcccactgttgaagcatcagcactccgtacagttctcgcgctctggcatctgctctccaacactttcacacaaaaataatggacgaccaggccattctaggctgttggcctcctcttatcacgcaactggccgtccagtttagattgcagaagaa

SEQ ID NO: 35404 - DNA, 275 bp, Zea mays
cccacgcgtccggttgctgctgatatccgatgctgcacaggctgacaactatgagaagatcttctctcacatgaaaccaaacagtatccttggtttatctcatggatttcttctgggacatttgcaatcactcggactcgatttcccaaagaacatcagtgtgattgctgtatgccccaagggaatgggtccatccgtccgcacgctttatgttcagggcaaggaaatccatggcgctggcatcaactctagctttgctgtgcaccaggatgttg

SEQ ID NO: 35405 - DNA, 276 bp, Zea mays
cctgttctctctccccacttcgagacttcctccattcgcggtttgcctctctgcctgcctccctcagatcctccctaagattgccatggcggaccagctcaccgacgaccagatcgccgagctcaaggaagcattcagcctcttcgacaaggacggcgacggctgcatcaccaccaaggaacttggaactgtgatgcgctcgttggggcagaaccctactgaggctgagcttcaggacatgatcaacgaggttgatgctgatggcaatggaaccat

SEQ ID NO: 35406 - DNA, 268 bp, Zea mays
cggacgcgtggcggacgcgtgggcgtctggtcgcgtcggcagcagacacccagagccggagggagcgacatggccgcgtaggatctggagagcaaagccaaggaggccttcgtcgacgacgacttcgagctggccgccgaactctacacccaggccatcgacgccgggcccgccactgccgatctctacgccgaccgcgcccaggcgcacatcaagctcggcaactacactgaggctgtggcagatgctaacaaagcaattggtcttg

SEQ ID NO: 35407 - DNA, 267 bp, Zea mays
aaagtgttgaagctgcattgatggagataaaccggatccttggatttaaactggtgctggagtgcttagaactaaggttctgttgctaccttgcccttgaggattatagggctgccttatgtgacgtgcaggcaatcctcactcttgccccagattatcgtatgattggtggccgggttgctgccaagcagctgcgaatgctagtgctagagaatgtagagcagtggacacctgctgactgttggatgcaactttatgatcgctggc

SEQ ID NO: 35408 - DNA, 265 bp, Zea mays
gtcgccacttctttagattccttaataaggtccgattattcaccttgatggattggcctatattggatgcaatatgtgacaaattaagacaaaacttgtatattagtggaagtgacattctttaccaaggtggtactgttgaaaagatggtcttcatagtgagagggaagctggaaagcatcagtgcagatggcagcaaggctccattacatgatggagatgtatgtggagaggagctcctcacgtggtacttggaacactcttc

SEQ ID NO: 35409 - DNA, 266 bp, Zea mays
ggctcaggaagcgtattgcaaaccgtcttaaggattctcagaacacctttgcaatgctatctacatttaatgaagttgacatgaccaatttgatgaagcttcgttctgattataaagatgaatttgtcacaaagcatggtgtcaaattgggtcttatgtcttgctttgtcaaggctgctgtttctgcacttcaaaaccagccaattgttaatgctgtcattgatggcgatgacatcatatacagagactacgtagacgtcagtgtt

SEQ ID NO: 35410 - DNA, 266 bp, Zea mays
cgcctgcgctccctcgccgccccagttcgccaccccctgctcatccacccgtcccctcctgctcgcccatggctcccatcgctgtcggcgacgccctccccgacggccagctcgggtggttcgacgagaacgaccagctgcagcaggtctccgtccacgcgctcgccgccggcaagaaggtcatcctcttcggcgtccccggcgccttcactccgacctgcagcaaccagcatgtgccaggcttcatcacacaggctgagcagctc

SEQ ID NO: 35411 - DNA, 264 bp, Zea mays
cggctcagtccgccgcgtcttcgatttccttgaggaatgggggcttatcaactacggtgctttgccatcggggtcaaagcaagctcaaagagaagagggaagaggctgcacaacagtcctcgttgccttttggggcaattgcacccaggaagctctgtaccggttgccgcaccgtgtgtgggcttgcttactacgcctgcgacaaggcagatataagtctttgtgctagatgctatgtaaataataactaccggccgggcctgt

SEQ ID NO: 35412 - DNA, 263 bp, Zea mays
cacaaacgcaagccccaatctcgccgtcaccacccccaatccagcaaacgcaaaccccatctcgccgccgccgccgccgcgatgtctcgccgctatgacagccgcacgacgatcttctcgccggaggggcgtctctaccaggtggagtacgcgatggaggcgatcggcaacgccgggtcagccctcgggatcctagcggccgacggcgtggtcctcgtcggcgagaagaaggtgacctccaagctcctccagacctcgcgctc

SEQ ID NO: 35413 - DNA, 263 bp, Zea mays
gacaaaaacgctggataggtaacagcacttttgcagatgtcctcatcattttggctaggaatgcagatacaaaccaactaaatggatttattgtaaagaaaggagctcctggtctaaaagccacaaaaattgaaaataaaattggactcagaatggttcaaaatggagacataattctaaataaagtatttgtccctgaggaagacagattaacaggcatcaattcatttcaggatataaacaaggtcctcgctatgtctcga

SEQ ID NO: 35414 - DNA, 267 bp, Zea mays
cccacgcgtccgcgcagagacaggcgtcttcgtactcgcctatctccgcgactcaaagctttccccaattcccccccatctcacatttctcaccaccgccgccgctccccccgttcaacaacaccatgagggagtgcatctcgatccacatcggccaggctggtatccaggtcggaaacgcgtgctgggagctgtactgcctcgagcatggcattcaggctgatggccagatgcccggtgacaagaccattgggggaggtgatgatg

SEQ ID NO: 35415 - DNA, 277 bp, Zea mays
aacaaggtcgttaagcttcaagaagagcttgacattgatgtgcttgtgcatggcgagcctgagagaaacgatatggttgagtacttcggtgagcagctctccggttttgcgttcactgccaatggctgggtgcagtcttatgggtcaaggtgcgtcaagcctccgatcatctacggtgacgtgagccgccccaaccccatgaccgttttctggtcgaagcggcacagagcatgacgtctcgcccaatgaaggggatgctgactggcccagtcacaat

SEQ ID NO: 35416 - DNA, 273 bp, Zea mays
cccacgcgtccgcatcaacacatgatcaagatgtcttctgtttctctcctgacgagaaaccttgtaatggatttgaagaagctctcgatcgatatagggaacttgtaccacatttgcgcttagctggaccaacatcctttgcaccaattattgagatggctatgaccattgtggagcaaagtggcgggcaataccacgtcctattgataattgcagatgggcaggttacgaggagtgtagatactgcatctggacagctgagttcgcaagagc

SEQ ID NO: 35417 - DNA, 281 bp, Zea mays
ccctgatctcagagccgtagacttgtgtggttgtgttcttataacagatgagagtgtggttgctcttgccaacggatgtccgcacctgcgctcgctgggcctctacttctgccagaacatcacggaccgcgccatgtactccctcgcaaacagccgcgtgaagagcaagcgtgggaggtgggatgcagtgaaagacgggctcgcgaacctcaacatcagtcagtgcaccgccctgacgcccccggcggtgcaggccgtctgcgactccttcccggcgctgc

SEQ ID NO: 35418 - DNA, 277 bp, Zea mays
cccacgcgtccgcccacgcgtccggtcgccgggagctgtcggcgtggctcagcccctcccgaccacgtcgctctacgtgggcgccctggagggggccgtctcggactcgcagctgtacgaactcttcagccaggcggggcaggtggtgtcggtgcgcgtctgcagggatgtcacctcgcgccgctcgctcggatacgcctacgtcaactacagcaatcccttggatgctgcgagagcattggaagtgctgaactttgctgctcttaacaacaagcct

SEQ ID NO: 35419 - DNA, 276 bp, Zea mays
gagagcctcaccctctccgactccagggggatcctccgccacatctcccacaagtacgcgaatcagggcaacccgtacctgattggcacgggcgcgctggagcgggcgtccatcgagcagtggctgcagacggaggcgcagagcttcgacgcgcccagcgccgagatggtctacagcctcgccttcctgccgcccaccctgcccaagcagatcgacaacggcaacggcggcgcgttcaacgccagggacgccaccgtaggcagcaacgccgacgcg

SEQ ID NO: 35420 - DNA, 278 bp, Zea mays
ggacggtccgcgatggcgcagggtcgtcttcttctcctcgtatgacctagatttcgtctcctgggggagagaccttagggtgctccaggtcagcaggtcacccggggcgtctccagatgacgtagagtcacctagaaattaagagatcaattcgaagaagagatcttgattgaagtacacgaagtagatcttgcccctcaggaggggtaaagatcatagagttgtcctggggtcggcaggccaccccaggacgaatctagacgacgtagagtcgaata

SEQ ID NO: 35421 - DNA, 279 bp, Zea mays
cggacgcgtggcgtgacgcgtgggaaaggatgtgcacctggaaccagtaccgtttgacatggaccagagatttgatcaacccgacatacaaaaagaagcgtccgcaactgctcaagtactaccagggcgtgattgacaacatgtacaaaagtgctaagtgaactcactctacagtacacatcccgatgaagattcccaacgttgaatcttgtttgagcagccagaagttctgctttgtatatgctcgtagtttgtatgcgagaattctttcctgtatca

SEQ ID NO: 35422 - DNA, 271 bp, Zea mays
ggacacactgtgtgacctgtatgagaccctggccattacccagagtgtcatatttgtcaacacccgccgcaaggtggactggctcactgacaagatgaggagcagggaccacaccgtttctgccactcatggtgacatggaccagaacactagagacatcatcatgagggagttccggtctggctcctcccgtgtgctcatcaccactgacctgcttgctcgtggtattgatgttcagcaggtgtccctggtcatcaactatgatcttccc

SEQ ID NO: 35423 - DNA, 269 bp, Zea mays
ctaatgatgtcaccatagaggtttggcatcactagcgatctatgtgctggtttgattgggggcttgggcctaacacccagttgcaatattggtgaaggtggcatttgtctagcagaagctgttcatggttctgctcctgatattgctggcaagaaccttgcgaacccgactgctcttatgctgagtgctgtcatgatgttgcgccacttgcaattcaacgacaaagcagaccggatccacaacgccatcctccagactattgctggggg

SEQ ID NO: 35424 - DNA, 262 bp, Zea mays
  unsure (1)..(262): unsure at all n locations
gatgctcgtcgtcaccgacggggacaagggatgcaggtacttcaccaaggacttcaagggcagcgtgcccggcttcaaggtcgacaccgtcgacaccaccggcgccggcgacgccttcgtcggctccctcctcgtcaacgtcgccaaggacgactccatcttccacaacgaggagaagctccgcgaggctctcaagttctccaacgcctgcgaggncatctgcaccaccaagaagggcgccatcccggcgctgcccacggtc

SEQ ID NO: 35425 - DNA, 268 bp, Zea mays
gtctcgacatggcctccgagacggagacgttcgccttccaggcggagatcaaccagctgctatcgctcatcatcaacaccttctactccaacaaggagatcttccttagggagctcatttcaaactcctccgatgccttggataagatcaggttcgagagtttgacggacaagagcaagctggatgcccagccggagctgttcatccacatcgtccctgacaaggccaacaatactctgacaatcattgacagtggcattggtatgac

SEQ ID NO: 35426 - DNA, 269 bp, Zea mays
gtcggaaggtttcgaggaactcccgggctcgaggagatcgggacgatgatgggagggcgcgctctgctgctgctcctggtctcggcgctgctcgttcagatccgcgcctctgacccgctgctgtacgagccgtttgatgaggacttcgagggtagatggatcgtctccaagaaggatgaataccaaggtgtatggaagcatgccaagagtgatgggcatgaggactatggcctccttgttagtgacaaggcaaggaaatacgccataat

SEQ ID NO: 35427 - DNA, 270 bp, Zea mays
ctttgctttacagtaggagtctattcgagaggtttcagcaggctggttgtcctaccattttattgtcagtgcaatacaggatgcatccccagatccgtgaatttccatcaaaatacttttatcaaggccgtcttacagatagtgagagtgttgttaaattacctgatgaagcctattacagagatgcacttatggcaccttatatcttctacgacttgtcacatggccgtgagtctcataggggtgggtcatcttcatatcagaatattc

SEQ ID NO: 35428 - DNA, 293 bp, Zea mays
tccatttccacaagaaatcatcgagtttccatctgtcttggttaacagtgcaactggaaaactcgaagaatgcttccaaacatatgttcggccgacgtatcatcaatttttgactgatttttgcaaggagcttactggcatacaacagattcaggtggacagaggtgtgcctctaggtgaagtcttactcatgcacgataaatggctagaggacaagggcatcaagaacacaaactttgctattgtgacctggtctaactgggactgccgtataatgctggagtcggaatgca

SEQ ID NO: 35429 - DNA, 291 bp, Zea mays
ggcatgggaaggacacaccgagtggaaactacattccctcggctggctgatccattgggttatgttccaaaagaagatatattatatgctataaaggccatcgtcgtcacacagagggaaaatggaagaagggatgaccgcaagtatagtaggatgaagtatttgattgaccgttggggaatagataggtttcgggctgaagttgaaaaatattacgggaagaagtttgaaagtttccgaccattgccagagtggcagtttaatagctaccttggctggcaagaacagggt

SEQ ID NO: 35430 - DNA, 285 bp, Zea mays
gttaaccctagtctacttgggcatatgccagtcaatgtgtggaagaagtgtgtcaataatatgcttcttgtgcttgatatactccagcagtatcctaacattgtagtagacacctcgtttgagcctgatgagaatgaaactcaaaagggtgcagactacaatggaacaatacatgttgtgggtgacctggttgcattccttgagagactggactctgaatttttgaagaccttacagtgcacagatccgtacacaaaagattatgttcagaggctcagagaggaa

SEQ ID NO: 35431 - DNA, 289 bp, Zea mays
gtaacacctaaatcacctgattttcctgagagtccatgggaaaaatatgtcatacagtataaggaggatggttctgatcacgctcatagcccctgggaacttcatgagacaggcagtttatgggatccatggaaacatccacatatggatctcacggttcgagataaattgttatcagaaatggaaaatttacaggaaatgtcacacagggatcaggatcattatggtgttttaaaactggacaaggttgcagaaaagtcagatttcatcaacaggtttcctgttcaat

SEQ ID NO: 35432 - DNA, 287 bp, Zea mays
gaattttgcatctacaccagaatataagcacatggcttctaggatgggatctgaatatttaggaaagatgctttcaaagcatttggaacaagtgatcaaatcaaggattccggggatccaatctcttataacaaagacaattgcagagctggaaactgaacttaatcggcttggaaagcccattgctaatgatgctggggggaagctgtacacgatcatggaaatatgccgtatgtttgatggtatttacaaagagcatctggatggagtgcgcctggcggagagaa

SEQ ID NO: 35433 - DNA, 240 bp, Zea mays
atcaaagctgttgcatctatctctgctggcaatgatgaatttatcggatccatgattgctgaagcaattgacaaagtggggcctgatggtgttctatcaattgaatcctcctcgtcttttgagaccactgttgaagttgaagaaggaatggagaatgaccgcgggtatatttccccacaatttgtgaccaaccctgagaaatccattggggagtttgagaattgtaagggtcctaatact

SEQ ID NO: 35434 - DNA, 280 bp, Zea mays
cgctgtttcacggtatgccagcgcaacaccatgccctccttccgtcatgagccgtggcatcgggtggcagggagttggcattttgctgggtggattatttggaactgccaatggaaccactgtatctgtcgaaaatgctgggctgctcgctttgacacgcgttggtagtagacgtgttgtgcagatttctgctggatttatgatattcttctcaatccttggtaaattcggggctgttttcgcatcaattcccggcccagttatcgcagctgtatactgt

SEQ ID NO: 35435 - DNA, 286 bp, Zea mays
cgctgatcgtatgagcaaggagatcacttcccttgcaccaagcagcatgaagatcaaggtcgttgcaccgcctgagaggaagtacagtgtctggataggagggtcgatcctagcctcgctcagcactttccaacagatgtggatatcgaaggaggagtacgacgagtctggcccggcaattgttcaccggaagtgcttctagggtttcacaagttcctcgtcgttacctagtctcaaattatgtcccctccatttctcgagatatgtgtggcagatttgcatgata

SEQ ID NO: 35436 - DNA, 282 bp, Zea mays
caccattttggacattgagttctgggacccggtactcaatgtccaaaatggtgttctgaagtcactctctttcctctttgagtatattggtgagatgggtaaagattacatatatgctgtcacacccttacttgaagatgctttaatggatagagatctggttcaccggcagactgctgcatctgctgttaagcacatggctctaggtgttgctggcttgggttgtgaggatgctcttgttcatctgcttaactatgtttggcacaacatatttgagacatc

SEQ ID NO: 35437 - DNA, 280 bp, Zea mays
cgcccctgccccacatgttcgtcgtcaaggacctggtggtggacatgaccaacttctacagccagtacaagagcgtcgagccatggctcaagcgcaaggaccagcccccgcagcagggcaaggagatcccgcagaccaaggccgaccgggccaagctcgacggcatgtacgagtgcatcctctgcgcctgctgctccacctcctgcccttcctactggtggaaccggaggagtacctcggcccggcgcgctgcttcacgccaacaggttccgctgtgggg

SEQ ID NO: 35438 - DNA, 250 bp, Zea mays
cggacgcttggcaaatcgcggtgatcgagtttgcccgctcggtgatgaagctacgaggcgccaatagcacggagttcgatccagctacgacgtcaccctgtgtcatcttcatgccagagggctcaaaaacccaaatgggagccacgatgaggctttggtcgaggaggacctatttccatgtcagtggctgcaaatctgcgaactgtacggcaacgcagctctgtagatgaaagacatcgccacagatacg

SEQ ID NO: 35439 - DNA, 283 bp, Zea mays
gctaccagatcgctcttgcgatcaagaaggaagtcgaggatcttgaggctggtggtattcaggttatccaaatcgacgaggctgcactgagagaagggctgccgctccgcaaggctgagcatgcattctacttggactgggctgtccactccttcagaattaccaactgcgagatccaggacaccacccagatccacacccacatgtgctactccaacttcaacgacatcatccactcgatcatcgacatggacgcggacgtgatcaccattgagaactcgcg

SEQ ID NO: 35440 - DNA, 280 bp, Zea mays
cccacgcgtccgtaaatctgaggcttgtttctctacattcgcagttgccgcctaagagctttcgccttgccaggcttgagagctagtgctgctaaatccttccttggatgtctgatgcgattcaaatccaattcttttgtgctttggttgtagagggttccgtaggtttcggtctaaaatcgtgtgctttgcaagatcagcttcttgtttggacttcgaaactgaaacctggtccaggcaatcggcaaatcatcctgccatcttgcgatactgtatccaa

SEQ ID NO: 35441 - DNA, 279 bp, Zea mays
ccaccatttgttatagttctgccacctccaaatgtgactggagctcttcacatcggtcatgcacttacagtggctatagaggatgctatgatacgatggcgtcggatgtcaggctacaatgctctgtgggtccctggagtggaccatgctggcattgctacacaggttgttgtagagaagaagcttatgcgtgaaaggaagttgacaaggcatgacatagggcgtgaaaaatttgtttctgaagtactcaaatggaaagatcaatatggtggtaccata

SEQ ID NO: 35442 - DNA, 263 bp, Zea mays
accaaccctaaaaccgcttccgcaaccacgtataaaaacaccgcacgcgccgccgccgccgtcctattcctcggagaggagaagccgccgtcgcagcaatcacagcagcccggagaacggccaggtccgacaagatgcagatcttcgtgaagacgctgacagggaagaccatcaccctcgaggtcgagagcagcgacaccatcgacaatgtcaaggccaagatccaggacaaggaagggatccgccggaccagcagcggctga

SEQ ID NO: 35443 - DNA, 287 bp, Zea mays
cggacggtgggcagagcccgatcccgatccagcgaggcggcgaccctccctcctccccttgcttcgctcgtccagccctgaccacccgcatccccgtcagtcatggcagcggcagcaggcggaggcgcggtgcgtgcgctgtcccagaaggagcaggacatacagatgatgctcgccgccgacgtccaccttggcaccaagaactgcgatttccagatggagcgctatgcctttaagcgccgcaccgacggcatctacatcatcaaccttggcaagacatgggagaa

SEQ ID NO: 35444 - DNA, 274 bp, Zea mays
caatcaactggtgcttctggccctggagcaatcgctggaggtgttgctgctggtgctgcattggtttttgctgttccagcaattgcatttgcaatgtggcgccgtcgtaaacctgaagagcatttcttcgatgttcctgccgaggaggatccagaagttcatcttggtcagctcaaaaagttttcgttgcgggagcttcaagttgctactgatacttttagtaacaagcacattttaggaagaggtggttttggaaaagtgtacaagggaaggc

SEQ ID NO: 35445 - DNA, 280 bp, Zea mays
cccacgcgtccggcgtcttcgtactcgcctatctccgcgactcaaagctttccccaattcccccccttctcccatttctcaccaccgccgccgctccccccgttcaacaacaccatgagggagtgcatctcgatccacatcggccaggctggtatccaggtcggaaacgcgtgctgggagctgtactgcctcgagcatggcattcaggctgatggccagatgcccggtgacaagaccattgggggaggtgatgatgctttcaacaccttcttcagtgaga

SEQ ID NO: 35446 - DNA, 275 bp, Zea mays
  unsure (1)..(275): unsure at all n locations
gttatattccagacattatccgatgttatagccaggatgtactaccccatagatggttgtttttcagtatgctgtttgatttccaatgacttcgctaaacttttctgtgcttcagtggaggtcgaaccatcatcttcactaagacaaaggattctgcatcatagctttctggtttgattcctggatcccatgccttgcatggagatgtagcgcaacgcacgtngaagtatgtgaattcttcttcgatttaataaccttggcaatcatttgatttt

SEQ ID NO: 35447 - DNA, 207 bp, Zea mays
agcgagatctccatggctaactcccgccagaacatccggaagttggttaaggatgggtttatcatcaggaagcctcagaaggttcactctaggtcccgtgcaagaagggcacatgaggccaagcagaagggaaggcactctggataccgcaagcgcaagggtacccaggaagctaagcttcccaccaagattctgttgatgaagaag

SEQ ID NO: 35448 - DNA, 276 bp, Zea mays
ctcgtcaggcaacaagtgtggaaggaaaggagatcgctgcacctcatggtagcatattgggtgctgtgggaaggagcagtagcttgcagggtggggaggcagtaagcagcatgggcattggcggaggatggcagttggcgtggaaatggaccgagagagagggcgaagatgggcaaaaggaaggtggcttccagcgtatttacttgcatgaggagggcgtacaaggcaacaggggttctatattgtcattaccaggcggggatgttcctcctggtg

SEQ ID NO: 35449 - DNA, 278 bp, Zea mays
gtccttcgtccgcgcattcgtatgggactctggcagcacagttggtgagtttgatgggcactcaaagagggttctgagctgtgacttcaagccaacacgtccatttcgcattgtgacatgcggtgaagattttctggctaacttttatgaaggaccgccattcaaattcaagcattccataagggatcactcgaattttgttaactgtatccggtatgctcctgatggtagtaagtttatcactgtgagttctgataagaagggtttgatatatgatg

SEQ ID NO: 35450 - DNA, 281 bp, Zea mays
attgctaagtctggcacttcagcttttgtcgaaaagatgcagtctggaggtgacctcaatcttattggacagtttggtgttggcttctactcggtgtacttggttgctgactatgtcgaagtggtcagcaagcacaatgatgataaacaatatgtttgggaatcaaaagctgatggatcgtttgctatctccgaggatacatggaatgaaccccttggccgtggaaccgagataagattacatctgcgagatgaggccaaggagtacttggaagaggataa

SEQ ID NO: 35451 - DNA, 143 bp, Zea mays
cacaccttcaacaagagttgctcttcggaatgacagttatatgctccatctgatcctaccaagcaaagttgatccattactcaatctcatgaaagttgagaaggttccggattctacctatgatatgattggaggccttgacc

SEQ ID NO: 35452 - DNA, 263 bp, Zea mays
caaagtgcggaaccgtgctattactgcactgatgaaagcaacttttgatggtttcttgctggtgcttcttgctggtgggcctttgcgtactttcacccgtcaagactctcagataatagaagatgacttcagggccctcagagatctgtacttagcagatggggatggtttgccagaggaattagttgacaaggcatcctcccaggtcaagaatgtcctgcccctctttcgagcagactctgaaagtctcattgagcgattca

SEQ ID NO: 35453 - DNA, 259 bp, Zea mays
cggacgcgtggcgagacgcgtggggtactggtggcacgacaagtatcgaccaagaaagagtaagtacttcaatcgggtgcacactggatatgaatggaataaatacaaccagactcattatgaccatgataacccaccaccgaaaattgtccaaggctacaagttcaatatattttaccctgatcttgtggacaaatcgaaagcaccaacgtacagtatagagaaagatggaagcgccggagagacttgcttcataaga

SEQ ID NO: 35454 - DNA, 260 bp, Zea mays
ggacgcgtggctcacggagaagaagttgacctttaggaggaacgtggtgtcattggatgctgagctcaaggatgcgaggaacaagcttgcctcccaggagcagctgtttgtaaaggaatctcaaactagaaaggttgttgagacaaaggcaaggagcatggaagaggaagtaagcaagctgcagaaatgcttgcaggacaaggatgagcaactgcgttcatccgcaagtagcacggaacagtacctccatgagttggatg

SEQ ID NO: 35455 - DNA, 256 bp, Zea mays
  unsure (1)..(256): unsure at all n locations
cggacggtggncgtgacgcgtgggcgtgacgcgtgggcggacgcgtgggcgcgagcggcagttcgatcggagcgcgtgggcggactcgtggggttggatctgggacaccatggctccgatgaagctgtacggggcggtgatgtcgtggaacgtgacgatgtgcgcaacggcgctggaggaggctggctccgactacgagatcgtgcccatcaacttcgccaccgccgagcacaagagccccgagcacctcgtccgc

SEQ ID NO: 35456 - DNA, 263 bp, Zea mays
cactcacacagcaaataccccacaaggccactccaaagagctagtagtggaaccgaagatgttcgggaacatcggaaagatccccatcatcggcgacctgacgggcagcaacaagaatgcgcacctcaagggcaacgtggtgctcgtgcgcaagaccgtgctcggcttggacgtcaccagcatcgccggctccctcctcgacggcgtcggcgagttcctcggccgcggcgtcacctgccagcttatcagctccaccgtcgtcg

SEQ ID NO: 35457 - DNA, 256 bp, Zea mays
cgcaaccgcaagcaagcgaacgcagagcctgcctgaccagagctagctgagctacagccaacagcagctggtctgactgacatggcgaaggacatcgaggcatcggggcccgaggcgggcgagttctcggccaaggactacaccgaccctccgccggcgccgctggtcgacgcggaggagctcacccagtggtccctgtaccgcgcggtcatcgccgagttcatcgccacgctgctcttcctctacatcaccgtgg

SEQ ID NO: 35458 - DNA, 259 bp, Zea mays
gggtccttcggtgctttggcccctcggagttttccgttgccgtgaccatcttcggcgggcgtggccatgccgggacatggggaaaggcacttggtgcagaggtctatgactgcaacaacatggtggagcaggagctgcctggaggcgggctcctcgtgtaccagagcttctgtgctgctgaagacgctgttgctacctcgcccaaatctgttttccactgctttgacggcgagaacgtggagagtgctcctcctcctat

SEQ ID NO: 35459 - DNA, 262 bp, Zea mays
cccacgcgtccggcgccaccaccgccgccgcagtttgccaagcacttcgctgctgggccgcccccgccgccccaagctggtgctgggcgccgcacgccgaccccgccctcgtctggatccggcgggaacgggtgcgaagaaaatcaaaccatttgggtcggtgacctccagtactggatggatgaaaactacctacataactgcttcgggcccagcggcgaggtggttacaataaaagttatccgcaataggcaaacaggac

SEQ ID NO: 35460 - DNA, 245 bp, Zea mays
cggacctggtgctggtaaattgcgacttctgcttaggttaatattgattttgagaaagaaccacttggcatctcgaaagatgggaaagaggtttacttccgggatgtttggccatcaacagaagagattgccgaggttgtcaagtcaagtgtgcttcctgagatgttcaagagcacatatgagtccatcacccaaggaaatcctatgtggaatgagctgccagtctcaacaagcactctctatcc

SEQ ID NO: 35461 - DNA, 249 bp, Zea mays
cggacgcgtggagcgtgtgatcgagaggtttgagaaggaggccgctgaaatgaacaagcgatccagtcaagtatgcttgggtgcttgacaagctcaaggctgagcgtgagaggggtatcaccattgatattgctctgtggaagtttgagaccaccaagtactattgcaccgttattgatgcccctggacaccgtgactttatcaagaacatgatcactggtacctcccaggctgactgtgctgtcctta

SEQ ID NO: 35462 - DNA, 248 bp, Zea mays
ctggtccacggggatcatctactacgtcgccgtggtgcagcagtccacgtacgtggtgctctcggcgctgcagtccgaccgccacctcggccgcgccggcttccagatccccgccgcgtccttcaccgtcttcgccatgctcgcgcagacgctgtggatccccttctacgaccgcctcctgctgcccaagctccggaagataaccggcaaggaggaggggttcacgctgctccagcgccagggcatcg

SEQ ID NO: 35463 - DNA, 246 bp, Zea mays
cccgattatcaatagtcttattggaactaaggtggagtgggtttatcatatgttacaagcattcaacagcggcaaccttgccctctaccaagaactttgcagggttcacaatgctgctcttactgcacaaccagctttggtgcagaatgagcggaagctgcttgagaaaatcaatattctttgtctgatggagataatctttagtcggccatctgaagatagaactattccattaagtgttattgc

SEQ ID NO: 35464 - DNA, 248 bp, Zea mays
agaagagcggcggcgcgggcggacaaggagcaggcggaggaggagctgtgccaagccacaatgggtatctcgcgtgactcgatgcacaagcgccgggccaccggtggaaagcagaaggcctggaggaagaagcgaaagtatgagcttggtcgccagccagccaacaccaagttgtcaagcaataagacagtgaggagggtccgtgttcgtggaggtaatgtgaaatggagggctcttcgccttgatac

SEQ ID NO: 35465 - DNA, 252 bp, Zea mays
cttctgcctcggcctgctcttcaccaacagaatgtggacgctgcctgaggcaagtgagattgctaggccgaatgcgaatgtggaggaaggcaccgtgccgattgccgcggagtgtggttctaaaaaggtccaagaaaagcaggattacagagatattttacaggttcaagatagccatcatgatgtacaaacactggataagacgatagcaagcctagagacagagctctcagctgcaagatcgctgcaaga

SEQ ID NO: 35466 - DNA, 272 bp, Zea mays
ggcagctggggcttcatggattcagtttgatgagcccactcttgtcctcgaccttgattctgacaaattggctgcattctctgctgcatacgcagaacttgaatctgtactttctggattgaatgtgcttgttgagacttactttgctgatgttcctgctgagtcctacaagaccctaacatctctgagcagtgtgactgcttatggttttgatcttgtccgtggaacccaaactcttgggcttgtcacgagtgctggtttccctgctggaa

SEQ ID NO: 35467 - DNA, 273 bp, Zea mays
gggatgaacgtgactccccagaagtatggtcacatatttgtgtccaaaagcttgcagaactggccagagagagtacaaccatgcgtcgcattctagatccgatgctttcatactttgatatgaagaaacagtgggccccacgacatggcttggctttgcttgttttgtctgatatggcttatctggaaaagagttcaggcaatgaacagctgattctaaccaccatcatccggcacttggatcacaaaaatgttttacacgatcctcagacaa

SEQ ID NO: 35468 - DNA, 269 bp, Zea mays
ctcctcgcattttccttgcaaccgattgcctatccccctcccaaccaaagaccgatggcgcccaaggccgagaagaagcccgcggcgaagaagccggcggaggaggagcccgcggccgagaagacgaccgccgggaagaagcccaaggcggagaagcgggtccccgcgggcaagtccgccggcaaggagggcggcgagggcaagcgtggcaagaagaagggcaagaagagcgtggagacgtacaagatctacatcttcaaggtgctgaa

SEQ ID NO: 35469 - DNA, 263 bp, Zea mays
ggattttcatgttgttgatattgaactcccagggcagtacttcacagatcaggaaatcgcaccggaccacactgttaagttggacagagttggacctgacattccaattgtccggaggcatggcagtagctttcgacggttgacactcattggttctgatggttcacagcgccattttattgttcagacatcactgactccgaatgctcggagtgatgaaaggatgctgcagctattccgtgtgctaaataaaatgtttgaca

SEQ ID NO: 35470 - DNA, 265 bp, Zea mays
ctgacctgcaagtttatatgcttgatggtatgaagggataaatctcctcttcttcatctgcacaagaggagatttatcccttcataccatcaagcatatcccacgcgtccggctcggtatctacgggctcatcatcgccgtcatcatcagcacggggatcaaccccaaggccaagccctacaacctctttgatggctacgcccacctttcgtccgggcttgcctgtggtctcgctgggcttgcagctggcatggccatcggcatt

SEQ ID NO: 35471 - DNA, 269 bp, Zea mays
attgataatttcaggatggctcttttacagaactgtactgatgctatgaaagaatctagaacacttgagatcttgaatgcgctggagccactcgcgtataggagaatggactttgaggagttccgtgcagctacaataagcccttaccagcttgaggctgtgccgcgctgggaagaaatcgccagtactgcattcgagtactttgagcaggaaggcaaccgtgctatcacaatcgaggagcttgctcaggagatgaatctttctgcagc

SEQ ID NO: 35472 - DNA, 257 bp, Zea mays
ggcgtacaccaagtccggcgaccgcctcgttggccagatcgccaagcgccaggccgtggtcaacccggagaacaccttcttctccgtcaagcgcttcatcggccgcaagatgaacgaggtcgacgcaggagtccaagcaggtctcgtatctcgtcatcagggacgacaacggcaacgtcaagctcgattgcccggcgattggcaagcagttcgcagctgaggagatctccgcacaggtgctgagaaagctggtggat

SEQ ID NO: 35473 - DNA, 254 bp, Zea mays
cccacgcgtccgggtccacttcaagaacacaagggagacagcctttgcgcttcgcaagttgtctttgaccaaggctaagcgataccttgaggatgttattgctcacaagcaggcaattcccttccggagatactgtgggggtgttggtcgcaccgcgcaagctaagtcgcgccactccaatgggcagggccgctggcccgttaaatcagccaggttcatcctggatttgctgaagaatgctgagagtaacgctg

SEQ ID NO: 35474 - DNA, 252 bp, Zea mays
ggagttcaacgccaacaacatcagggacaccttccgcgtcctcctgcaaatgtccgttgtgctcatgttcggaggccagatgcctgtcgtcaaggtgggaagaatggcaggtcagtttgcgaaccaaggtcagatggttttgaggagcgggatggattgaagttgccaagctatagaggggacaatatcaatggggatgcattcaatggggagtcaaggttgccagatccacaccgcatgataagggcgtac

SEQ ID NO: 35475 - DNA, 255 bp, Zea mays
caattttgagaatccagatgcagcttcccatgctgttcaggaacttaatggtaagaagataaatgacaaagagtggtatgttggaagagctcagaagaagtcagaaagagagatggaactaaaaaggagatttgagcaaagcttgaaagatgctgctgacaaatatcaaggactgaacttatacctcaagaacttggatgatagcattggagatgatcaactttgtgaattgttctctaactttggcaaaattac

SEQ ID NO: 35476 - DNA, 262 bp, Zea mays
cgacctggatgcgacgggggagacggaagacgacaggcggcggcttcgcaaggagcaggaggccctgcacgccagcagcctcagagtccccaggcgaccgccatggcatagtcagatgactgtggaggagcttgatgtgaacgagcgtcgggcctttctggtgtggcgcaggaatcttgcaagattggaagagaatgataagcttatcctgactccctttgagaagaatattgacatttggagacaactctggagagtgctg

SEQ ID NO: 35477 - DNA, 258 bp, Zea mays
ctcatcggctgcggttccttcggcgacgtctataaagggtttgacaaggaactgaataaagaggttgctataaaagtcattgatttggaagaagctgaggatgacattgaagacatccaaaaggagatatctgttttgtcacaatgccggtgcccatatattaccgattattacggctcttatcttcaccagactaaattgtggatagtaatggaatacatggctggtggttctgttgctgatcttcttcaagctggt

SEQ ID NO: 35478 - DNA, 257 bp, Zea mays
acggaaatcaacctgcgccgctgccttctccgttctcgccgtcgcctccgcctccgctgccgccgcgcaggtcagggtcatgtcgatcttcgagtacaacgggagcgccgtggtggcgatggtggggaagaactgcttcgcgatcgccagcgaccgccgcctcggcgtgcagctgcagacgatcgccaccgacttccgacgggtgttcaaggtccacgacaagctctacatcgggctctcggggctcgccaccgacg

SEQ ID NO: 35479 - DNA, 255 bp, Zea mays
atccgcttcgccaccaagtccatcgagcgcgagatcaactccgtcaacgacaacccgctcatcgatgtgtcccgtggcaaggcgctccacggcggcaacttccagggaactcccatcggcgtgtccatggacaacacccgtctcgcccttgccgccatcggcaagctcatgttcgcgcagttctcggagctggtgaacgactactacaacaacggcctcccgtccaacctgtccggcgggcgcaaccccagcttg

SEQ ID NO: 35480 - DNA, 247 bp, Zea mays
ggtgggctggcttctcctccccctcttatcaagtcctcctcgggttagggttccttagggttttgtggaggggcgatggcggcggctgatgtggagtaccgttgcttcgtcggcggacttgcctgggccaccagcaacgagtcgctggagaatgccttcgcctcctacggcgagatcctcgactccaaggtcatcaccgaccgggagacggggaggtcccgcggcttcggcttcgttaccttctcct

SEQ ID NO: 35481 - DNA, 249 bp, Zea mays
cccacgcgtccgcccacgcgtccgcccacgcgtccgcggacgcgtgggtgtctgtctgtcgctctcgctctcagacgactgggccgccgccgcttggtgctgaggctttggttggtctctttggcggcgacgagcacccaccagcagttctgtagaaatggctgatggtgaggacatccagcctcttgtctgcgacaatggcaccggaatggtcaatgctggttttgctggcgacgatgcaccaagggc

SEQ ID NO: 35482 - DNA, 248 bp, Zea mays
cggacggtgggcgctagccttccctctcacctccgagattataggcgccgtcatgtttgacatattcggaggatccaccacaaccctagggtccacgatggagtgggctatgtcagagctaataaagaaatcagagacgatgagaaagacacaagaggacattcgtcgcgtgctaggtgggtcacgacgaggtgtcatcacgaacactgacctcgttggcctcacctacctaccaatggttatcaagg

SEQ ID NO: 35483 - DNA, 253 bp, Zea mays
agcatactgttagggagaaagaggaactaaagaaagcaaaaacccacgataagaaagagcagctttgtaatatcagtcaagcattggctgtgcttgcatctgtttcttctgttaccaaggagcgacaagagtttttaagccttgtcaacaaggagatagaactatataataacatgctcgcaaaggagggtacagatggtgaagaagaagccaggagagcgtacaaggctgctagggaggaatcagaccatgc

SEQ ID NO: 35484 - DNA, 253 bp, Zea mays
gggcaggaacctcttcttcagcactgatgttgagaagcacgtcgctgaggctgacattatctttgtctcggtgaacacccccaccaagacccgtgggcttggagctggcaaggctgccgacctcacctactgggagagcgctgcccgcatgattgcggatgtctccaagtctgacaagattgttgttgagaagtccactgtccctgtcaagaccgctgaggctattgagaagatcttgacccacaacagcaag

SEQ ID NO: 35485 - DNA, 269 bp, Zea mays
tggaaatgcaaatgtgtggaagtactttacagacttgtttgattatttgcctctcacagctcttatagaaaaccagatcttctgcctacatggtggtctctctccatcactggatacattggataatatccgcgcccttgatcgcatacaagaggtcccacatgaaggacctatgtgtgatcttttgtggtctgacccagatgaccgatgcgggtggggaatttcaccaaggggtgctggatacacatttggccaagatattgcacaac

SEQ ID NO: 35486 - DNA, 268 bp, Zea mays
atcggaaccagccagtgaagcgtggggaagccctagaactgttgtatcagatctgcaaaggcttggatttcatgcacgaacgtggcatagcacaccttgatgtgaagcctgataacatatatgtcagaaatggtatttataagctcggggattttggctgtgctacacttgttaaccggagtctagcaattgaagatggagattcacgctatatgcctccggaaatgctgaatgataagtatgagcatcttgacaaggttgatatctt

SEQ ID NO: 35487 - DNA, 268 bp, Zea mays
gccgcgccgccaccccctacaggtaaggaagaggagggcaggatgtcgcaccgtaagttcgagcacccgaggcacggctccctcggcttccttcccaggaagcgctcctcccgtcaccgcggcaaggtgaagtcattccctagggatgaccccaagaagccttgccatctcactgccttccttggctacaaggctggcatgactcacattgtccgtgaggttgagaagccaggatccaaactccataagaaggaaacttgtgaggctg

SEQ ID NO: 35488 - DNA, 189 bp, Zea mays
gtttttagtggccatcggttcaaactaacaattcccaaggagacttgtagtatcgccttctcattatctggtgtccgttgtcctggtaaaggcgagccatactcagacgaagctattgctttgatgaggagaaggatacttcaacgagatgtggagatagaggttgaagcagttgataggacaggaacg

SEQ ID NO: 35489 - DNA, 259 bp, Zea mays
gtagtctgtaccccaagcaccggcgcggcggcggcggctaccatggcagtcgggaagaacaagaggatctccaagggaaagaagggtggtaagaaaaagaccgtcgatcccttctctaagaaggactggtatgacatcaaggccccatcggtcttcagtgtgcgcaacattgggaagactctcgtgtccaggacacagggtaccaggattgcctctgatggtctgaagcacagagtctttgaggtttgtctagctgatc

SEQ ID NO: 35490 - DNA, 191 bp, Zea mays
gagctctcggcgagagggcgagcgatggcggcaatgccggcgctgctgctgctgctggtggccacggcgatgatgttctcccccgccgccgcccgcattcccggcgtgtacggcggcggaggctggcagagcgcgcacgccacgttctacggcggcagcgacgcctcgggcaccatgggcggcgctgcggc

SEQ ID NO: 35491 - DNA, 264 bp, Zea mays
ttcaactttggtactcagaaggatgtctccaactggggcttgttcttctgtgttgcaattggcctgtgggctggtctgattattggttttgtcacagaatactacactagcaatgcatacagtcctgtgcaagacgttgcagattcctgcagaactggtgctgccactaatgtcatttttggtcttgctcttggatacaagtcagttatcatcccgattttcgctatcgctgttagcatctatgtcagtttctccattgctgca

SEQ ID NO: 35492 - DNA, 264 bp, Zea mays
gagctggaacgtaacattactataaagctgggctatgctaatgcaaaaatctacaaatgtgaggatgacagatgtccacgaccaatgtgctacaaggcctatggaagcggaaaagaagatagccctctatgtgatgtgcctggatttgaaaacactagaatgaagctcctgagacatgtttcttttgttgattgcccgggacacgatattctcatggctacaatgcttaatggagctgctatcatggatggagctcttcttttg

SEQ ID NO: 35493 - DNA, 264 bp, Zea mays
gcgtgcccgacaccccgctggtgcgcacggcgggggacgccgcgcgcatggtctgggacgagtccaagcgcctctggggcatcgggctgcccatcggcgtgggcatgctgagcatgtacgccataagctccatcacccagatattcatcggccacctcggcaacctcccgctggccgccgcctccatcggcctctccgtgttcgccaccttcgcgctcggcttcctcctcggcatgggcagcgcgctcgagacgctctgcggcc

SEQ ID NO: 35494 - DNA, 263 bp, Zea mays
gtccttgtaggcaacagcttgggaggcttcacgacgctgttcacggccaccgaggtgccggagctggtccggggcgtcgtgctcctcaactccgccggccagttcgccgaccccaacaagccggccgccgcgccggccgagtgaggaggaggggggcagcgcgctgtccaggtacatcgtgcagccgctcaaggaggccttccagcgggtggtgctggggctcctcttctggcagtccaagcagcccgccagggtcgagaaag

SEQ ID NO: 35495 - DNA, 263 bp, Zea mays
catatatacagatttcttgagaattgttctggaaataatcaatgcaatccttacatatgcattgcccagaaatcccgaggttgtatatgctgtattgcatcgacaagaggtttttgagccatttaaaaatcatccacgttttaatgaactgcttgagaacatatacactgtattggatttcttcaatagtcgaatggacatgcaacaattagatggggaatggtctgtggataaagtgcttgaagtcatcaataaaacttgcc

SEQ ID NO: 35496 - DNA, 263 bp, Zea mays
ccaaggttcccggcatcagtatccgcgctacatgtgaacagaacagtcatcagagcctgagacaattaatgagtaaggttggctgacagagacgcaagttatcttgcccgtgtgagcacacaaagccttctccattctcaggagacggcggatgccatccttcacaaatctccacactgcaacaactccatcatcaccaccagtgatgagaatgttgccatcatggctcactccagtgcactgaatttgactaccaccatgaa

SEQ ID NO: 35497 - DNA, 188 bp, Zea mays
ctcgagtccaagatcatcctcgatcgggagacgcagaggtcccgcggcttcggcttcgtcaccttctccacggaggaggcgatgcggaacgccatcgagggcatgaacggcaaggagctggacggccgcaacatcaccgtcaacgaggcccagtcccgcggcggccgtggaggcggcggcggcggcta

SEQ ID NO: 35498 - DNA, 259 bp, Zea mays
gagctgccccagtggaagagctccgccatcgccgacctcggcgtgggcaccgagaacaagatcgccatgcacttcgacagggtcttttggcccaacgtcgaggtgctgggaatggtcgggccgacgcccaaagcctgtgggtacttcctgaacctgcacaaagccaccggcaatccggtcctcgtgtacatggccgccggaaggttcgcccaggaggtggagaagctgtcggacaaggaagccgtcggcctggtcgttt

SEQ ID NO: 35499 - DNA, 261 bp, Zea mays
ggctagaccagaagagaggctctttcattatgttgctaaaaagaatgcatactgctctacaaacaagtatattctagaaaataccaaacaacttggaccaggtggttcgacagcagttactgctattgtagttgatggtaaggacatgtggatagcaaatgtaggcgactctagagctgttgtgtgtgaaagaggctctgctaagcagctcactgttgaccatgagccccatgaaactaatgaaagacagaggattgaaaa

SEQ ID NO: 35500 - DNA, 259 bp, Zea mays
atcacagcagtgggatttgatatggactacactctggcacagtacaagcctgaaaccttcgagtcccttgcttactatggtacaatagagaagcttgtgaaggatctccgctaccctgaagagctgttgacttgggaatttgattggaaatatatggtcagaggactagttctcgataagaagagaggaaatatcttgaagatggatcgacacaagtatgtaaaagttgcataccatggttttaaggaactatcgaaag

SEQ ID NO: 35501 - DNA, 259 bp, Zea mays
gcagttcatcgccgaggcggccaaggagggcatggtgcagctcaaggggcacaggtctgtcggcggcgtccgcgcctccatctacaatgccatgccgctcgccggcgtcgagaagctcgtcgccttcatgaaggacttccaagccaggaacccttgattgcctcgtgcttatgatcatttggtattgctactcagtctttcttcctagcataagtgagctcgtgcaagagctgtctcgcgttgcgcactgggatctatc

SEQ ID NO: 35502 - DNA, 258 bp, Zea mays
gtctgtctgtctgtcgctctcgctctcagacgactgggccgccgccgcttggtgctgaggctttggttggtctcttcggcggcgacgagcacccaccagttctgtagaaatggctgatggtgaggacatccagcctcttgtctgcgacaatggcaccggaatggtcaaggctggttttgctggcgacgatgcaccagggcggtttttcctagcattgttggccgtcctcgccacactggtgtcatggtagggatggga

SEQ ID NO: 35503 - DNA, 188 bp, Zea mays
gtgcattacacgggcacgctccttgatgggacaaaattcgactcaagccgtgatcgtggagaacccttcaagttcaagcttggacaaggtcaagtgataaagggttgggatcaaggaatcaagaccatgaagaaaggagaaaatgctatttttaccattcctccagagctggcttatggagcatctgg

SEQ ID NO: 35504 - DNA, 267 bp, Zea mays
gaacaaatcccttgaggggctgcaggccaatgtccagaggcttaagacatacaaggccaagctggttatcttcccaaggcgtgctcgcaaggtcaaggctggtgactctactctggaggagcttaccactgctacccaggtacagggtgactacatgccaattactcgcggtgagaagcgctctgtagaggttgtgaaggtcacagatgagatgaaggcgtttgcggcctatggcaagctccgccttgagcggatgaacaagaagca

SEQ ID NO: 35505 - DNA, 273 bp, Zea mays
gtgaagagagacgagctgacccttgagggtatcaagcagttctatgtgaatgtggacaaggaagactggaagctggacacactgtgtgacctgtatgagaccctggccattacccagagtgtcatctttgtcaacacccgccgcaaagtggactggctcactgacaagatgaggagcagggaccacaccgtttctgccactcatggtgacatggaccagacactagagacatcatcatgagggagttccgtctggcttctccgtgtggtcatc

SEQ ID NO: 35506 - DNA, 284 bp, Zea mays
cagaggaagagtggtagccgagtcctttctgtgtctattgaggatgtgcgtgatctagaggagctgcaagctgttgaagcatttagacaagcactactcttggatgagctgttgcctgcaagacacgatgactatcatatgatgctgagatttctaaaagcaaggaaatttgatatcgacaaagcaaagcaaatgtggatggatatgcttcattggcggagggagtatggcactgatacgattttggaggacttcgaatacactgagttggacgctgttttgca

SEQ ID NO: 35507 - DNA, 284 bp, Zea mays
gccgcccgcatcctgacgctggctgccgtcgtcggcttcatcgtgctcgtcatctacctggcgctgcgcccctccaagccgtccttctacctgcaggacgtgcagctgcgctccatcgacctcagcgacacggcgctctccctcgacctccaggtgacgatcgcgtcgcggaacccgaacgagcgggtgggcgtgtactacaagacgctggacgcgttcaccacgtaccgcgacgaggcggtgacggtacccgtgtcgatgccggcgatctaccagggccacaa

SEQ ID NO: 35508 - DNA, 282 bp, Zea mays
cctcctccttgtatcccgacctcccccgcgacagacccgtttccccgctaggctagagttatcgttcctctgcagcgatggcgatcaagcggaccaaggcggagaagaagatcgcgtacgacaagaagctgtgcagcctgctcgatgagtacaccaaggtgctcatcgccctcgccgacaacgtcgctccaagcagctccaagacatccgccggggcctcaggggcgactcggtggtgctcatgggcaagaacacgctcatcaggcgctgcatcaaggtcta

SEQ ID NO: 35509 - DNA, 282 bp, Zea mays
caacatcttagcgaagaagtgaggagaaggttctacaagaactggtgcaagagcaagaagaaggctttcacaaagtatgctctcaaatatgaaaatgatgctggcaagaaggaaattcagctgcagcttgagaagatgaagaaatatgcttctgttatccgtgtcattgctcatactcagattaggaagatgaagggtttgaagcagaagaaggctcacctgatggagattcaggtcaatggtggtaccattgctgacaaggtggactacggctataaattt

SEQ ID NO: 35510 - DNA, 279 bp, Zea mays
agaatctgcatgggatgctgttgtaacttgctttttcctggatacggcacacaatatcgttgaatacatcgagatcatatcaaaagttctcaaggatggtggggtctggattaacttgggtccccttctgtatcactttgctgattcatatgggccagatgatgatatgtctattgaattaagtttggaagatgtgaaaaaggttgcttaccattatggatttacaatggaggtggagaaaatgatcgagactacttacactgcaaacatgaaagcaat

SEQ ID NO: 35511 - DNA, 281 bp, Zea mays
cccacgcgtccggcgtcgcctcaaggatctggtcaagaagcactctgagttcatcagctaccccatctccctgtggactgaaaagacaacagagaaggaaatttctgacgacgaagacgaggaagagaagaaagatgctgaggaaggaaaggttgaggatgttgatgagaaggaagagaaagaaaagaagaaaaagaagatcaaggaggtttctcatgagtggtcattggtcaacaagcagaagcccatatggatgaggaagccagaagaaatcacaaaag

SEQ ID NO: 35512 - DNA, 275 bp, Zea mays
cattgcctcaaaactaaaacatgataattttgtggagatgcttggatattgtgtggaaggaaatcagcgtctagtggtctatgaatttgcgacaatgggttctctgcatgatatcttgcatggaagaaagggtgttccaggtgcacagcctggcccagcacttgattggatgcagcgggttaagattgctattgatgctgctaaagggctagagtatcttcatgaaaaggtgcagccttcaatagtccaccgggacatacggtctagctatattc

SEQ ID NO: 35513 - DNA, 275 bp, Zea mays
cagacgcgtagcgcgacctcacggaggcggccgacctcttcaacccgcagctggtgcagatgctctccgaactcaacgacgacatcggcgccgacgtcttcatcgccgccaacaccaaccgggtcagcttcgacttcatgttcaacccgcaagactacgggttcgtgacgtccaaagtggcatgctgcgggcatggcccctacaacgggatcgggctatgcacgccggcgtccgacgtgtgcccaatcgggacgtgtacgcgtactgtgacgcgt

SEQ ID NO: 35514 - DNA, 271 bp, Zea mays
gctgaacaagcagcaaaacttccagaagtgaacattaataatcttccagtccctggcgaagttgaattcataaatggtggtcctccgtgtcagggattctctgggatgaatagattcaaccaaagcccatggagtaaagttcagtgtgagatgattctagcattcctctcattcgctgagtatttccgtcccagattctttctgttagaaaatgttcggaactttgtttccttcaacaaagggcagaccttccgtttggcagttgcatctc

SEQ ID NO: 35515 - DNA, 263 bp, Zea mays
cagctcccatatccgctcccctacctctccagcatcctcccgtctccgtcgtctcgtctccgctcctcacctcgccagccatgggcaagatcaagatcggaatcaacggtttcggaaggatcggcaggctcgtggccagggtcgccctgcagagcgatgatgtcgagctcgtcgccgtcaacgtacgcttcatcagcacggattacatgacgtacatggtcaagtacgacatcgtgcacgggtcatggaaacacagcgacatc

SEQ ID NO: 35516 - DNA, 267 bp, Zea mays
cggacgcgtggcgcggatgaagctgctgcggaaccggagggaggcgcaggtgcgccagatgcgccgcgacattgccgcgctcctccgcgacaaacaggaggataccgcacgcatcagggttgaacatgtaattagggaacagaactttatggcagccaacgagatcattgagctcttctgcgagctgattgttacacgccttcctatcatcgcaaaacagaagggatgtccagcagactttataagaagtatctgcagtttgatatt

SEQ ID NO: 35517 - DNA, 269 bp, Zea mays
cccacgcgtccgcaaagcctccgacccccttcctctctccctccgccgccgctgcgcacgcagggaacaagcgacatgggcgtctacacctttgtgtgccgcaacaacggcggcgagtggaccgccaagcagcactccggcgagatcgaggcttccgccgctaccccatacgagctgcagcgccgcctcgtcgctgccgcctccgcggccgactctgcctacggcgtccagtcgtccttctccatggtcacccccagctccgccgtgtt

SEQ ID NO: 35518 - DNA, 261 bp, Zea mays
cgtcgcgtgtcgtcggagtacgggaccgagggcgcggacagcaggacggggagttctccgaggacctcaagctgttcgtcggtaacctgccgttcagcgtcgacagtgcgcactggccgggctcttcgagcaggcgggctccgtcgagatggtcgatggtgtatacgatagaatgactgggcggagcgtggatttggattcgtgacaatgtcttcagctgaagaagccggggctgctgtcgagcaattcaacggttataca

SEQ ID NO: 35519 - DNA, 268 bp, Zea mays
acgggcacctacatgccgtccacctccctcaccggcggctaccgcgtctgctcgtacctggacccctccgagcccacccacaccaaggtgaagcagctgctcttctccctcctgctctcccgcaaggacgacgtgatccccaccttccgctccaacttctcctcgctcctcgccaccgtggaggcggagctggccaagggcggcaaggccgagttcaacaagctcaacgacgtcacctccttcgacttcatcggcgaagcctacttcg

SEQ ID NO: 35520 - DNA, 268 bp, Zea mays
gaacgctgctgtggccacaatcaagaccaagcgcaccatccagttcgtggactggtgcccgactggcttcaagtgcggaatcaactaccagcctcccagcgtcgtccccggcggtgacctggccaaggtgcagcgtgccgtgtgcatgatctccaactccaccagtgttgtggaggtcttctcccgcattgaccacaagttcgacctcatgtacgccaagcgcgccttcgtgcactggtacgtcggtgagggtatggaggagggcgag

SEQ ID NO: 35521 - DNA, 271 bp, Zea mays
aggacttcaagaccggttacctcacactctcttcccctaggtccatgttcgtgtcgcagttgatcgggaccgcccttggttgtgtcattgctccactcaccttttggctctactggtcggctttcgatattggtaaccctgacggcgcattcaaagctccatatgctgtaatcttccgtgagatgtcaattcttggcgtggaagggttttctgcactgcctcagcactgcctagcgatctgctcgtttttcttcattgcatctctagtgat

SEQ ID NO: 35522 - DNA, 230 bp, Zea mays
cctggagtatgtttctggtggatctatacataagcttctccaagagtatggacagtttggtgaacaggccatttgcagttatactaagcaaatacttttgggcctagcttatttgcacgcaaagaatacagtacacagagacatcaaaggcgcaaacatattggtagaccctaatggccgcgtgaagctcgctgactttgggatggcaaaacatatcgatgggcagcagt

SEQ ID NO: 35523 - DNA, 269 bp, Zea mays
gtggatgtgaagctccaggagctcaaagacgccatttctggtggatcaacacagagtatgaaagatgccatggctgctctgaaccaggaggtgatgcagattggccaggcaatgtataaccagcctggtgccagtgctgctgggcctactcctggtgctgaggccggacctacgcctggtaccggaccaacgcagaatgatggggatgtcattgacgcagacttcacagatagcaattgaggggtgattgatgcatggccatgtgttga

SEQ ID NO: 35524 - DNA, 271 bp, Zea mays
caccacctccacctcgtcgtctcccaccaccgccgagcgcgagccctagcccgatctagccggcggcaggcaccagatcccgccgcccgcacgtcccgggacgcgccccgccgaatccgccgctcctcgcactgcaacacgcccggaccacggtgcatttgatccgtcccggccgcctacacgatgtccaagtcgggagcgctggatcttgcttctggcctcggagggaagatcaacaaggtggaagtcaagtcggccgtcgatgagtatg

SEQ ID NO: 35525 - DNA, 270 bp, Zea mays
atccgtttgcctcttctccctcttgccggtcccgaataaagagcagcagcgcaagaggtcggtagagcgagaagaaggcaatggcggccgagagcttccttttcacctcggagtccgtgaacgaggggcaccccgacaagctgtgcgaccaggtgtcggacgccgtgcttgacgcatgcctcgcgcaggaccccgacagcaaggtggcctgcgagacctgcaccaagaccaacatggtgatggtgttcggcgagatcacgaccaaggcga

SEQ ID NO: 35526 - DNA, 257 bp, Zea mays
aataattcgaccacttgacaatcctatcaaaccaactggccatattcaaatactttatggcaatcttgcaccagaaggttctgtagcaaaaataactggcaaagagggactatacttctcaggtcctgcattagtttttgagggtgaagagtccatgattacagctatctcagaaaacccagcaaatttcaagggaaaggtagtagtgatccgaggagaaggaccaaaaggcgggccagggatgcccgaaatgttga

SEQ ID NO: 35527 - DNA, 265 bp, Zea mays
cggtgccgcccaactacaaaggcactcccctcgaggtcggcaaaggcaggatcctgcttgagggcgaccgggtggcgctgctggggtacgggtcggcagtgcagtactgcctgactgccgcgtccctggtgcagcgccacggcctcaaggtcaccgtcgccgacgcgaggttctgcaagccgctggaccacgccctgatcaggagcctggccaagtcccacgaggtgctcatcaccgtggaggaaggctccatcggcgggttcgg

SEQ ID NO: 35528 - DNA, 267 bp, Zea mays
gaagaaggagcggctgcagctggcggagatcaagcacgcgcgcctcgccatggtcgccttcctcggcttcgccgtgcaggccgccgccaccggcaaggggccactcaacaactgggccacccaccttagcgacccactccataccaccatcttcgacacgttcggaggatcctcttaagcccgccattgatccgctccgtccatcgatcgaaacgtggtcttgaattaactatgatagatctctatgaccctggagatggatcaccc

SEQ ID NO: 35529 - DNA, 263 bp, Zea mays
gaaagatcgtcgacccgcgcctgcagctcaacaaggtggtgcgagagatcaagtattccccgggtggcgtcaccgtcaagacagaggacaactcggtgtacagcgcagactacgtcatggtttctgcgagcctgggtgtcctgcaatccgatctcattcagttcaagcccaagctacctacatggaaggttagggcgatctaccaattcgacatggccgtgtacaccaagatcttcctcaagttccccaggaagttctggcct

SEQ ID NO: 35530 - DNA, 263 bp, Zea mays
atggtccccatagtgatgaagaatatttagctagagtcaactggatgcataatagtgctcttgctgttcaagttctcaacaggtcacatacgaaacttaaattacttaagtttgatattagtacaggtgaaagagaagtcttactagaagagcagcatgatgtatggatcacattgcatgattgcttcactccactagacaaaggagtgaataataaacatccaggtggctttatttgggccagtgaaaaaacaggattcagg

SEQ ID NO: 35531 - DNA, 264 bp, Zea mays
cgagttctcctcaaccaaattcaaggtcacagcggcgaacctctcggctatcatgtctggccgcggcaagggcgggaagggtctgggcaagggcggcgccaagcgccaccgcaaggtgctgcgcgacaacatccagggcatcaccaagccggcgattcgcaggttggcgaggaggggcggcgtcaagcgcatctccgggctcatctacgaggagacccgcggcgtgctcaagatcttcctcgagaacgtcatccgcgacgccgt

SEQ ID NO: 35532 - DNA, 259 bp, Zea mays
gtacttgacagtttaagacattgggttaaggagtatcacatagatggatttcggtttgaccttgcgagtgttctttgtcgtggaccagatggcagtcctcttgatgcacctccacttattaaggaaattgccaaagactctgtattgtctagatgtaagatcattgctgaaccttgggactgtggtggcctttatctagtagggaggttccctaattgggacaggtgggctgaatggaacgggaagtacagagatgata

SEQ ID NO: 35533 - DNA, 263 bp, Zea mays
gagccttcccctccgctccccagtcccacccgcaccctagccctcagcaaaccctaaccgctcgtcgccatgaaggacacctcgttcaaggccaccggcgccaagcgcaagaaggtcggcggcgccaagcgcgggctcacccccttcttcgcgtttttggctgagtttaggccgcagtacctggagaagcaccctgagctcaagggcgtaaaggaggtgagcaaggcggctggggagaagtggcgctctatgtcggatgagga

SEQ ID NO: 35534 - DNA, 259 bp, Zea mays
ggctgagcttctgattggtcagcctttgtttcctggtgaaagtggtgttgataaactggtggaaatcataaagattttgggtactccaacaagagaggaaatcaggtgcatgaatccaaattattctgaattcaagttccctcagataaaagcccatccatggcacaagctttttggtaagcgcatgccacctgaagctgttgatctcgtgtcaaggctacttcagtactcaccaaacctgcgctgcactgctgttgat

SEQ ID NO: 35535 - DNA, 258 bp, Zea mays
gtcagcggcctcggcaagggcgtcaccgccagcagcatcggcgtcgtcctcaaggcctgcgggctccgcgtcacttgcatcaagatcgatccatacttgaacacagatgctggtacaatgtccccctttgagcatggcgaggtgtttgttcttgatgatggtggagaggttgacttggatttggggaattatgagcgtttcatagatgttactctgacaagggataacaacattaccactggaaagatataccagtct

SEQ ID NO: 35536 - DNA, 266 bp, Zea mays
ctcttctcctgttctctctccccacttcgagacttcctccattcgcggtttgcctctctgcctccctccctcagatcctccctaagattgccatggcggaccagctcaccgacgaccagatcgccgagttcaaggaagcattcagcctcttcgacaaggacggcgacggctgcatcaccaccaaggaacttggaactgtgatgcgctcgttggggcagaaccctactgaggctgagcttcaggacatgatcaacgaggttgatgct

SEQ ID NO: 35537 - DNA, 281 bp, Zea mays
acaagacctgcaatgctctcctcttgaaggtgaaccaaatcgggtctgtgaccgagagtatcgaagctgtcaggatgtccaagcgcgccggatggggagtgatggcaagccacaggagtggcgagacagaggacaccttcattgctgacctctcagttggcctgtctacgggccaaatcaagacgggagccccttgccggtctgagcgcctggccaaatacaaccagctgctcaggatcgaggaagagctcggtgatgccgcggtctacgccggagcaaag

SEQ ID NO: 35538 - DNA, 284 bp, Zea mays
  unsure (1)..(284): unsure at all n locations
ccgccaacatcaaggtcgagtcctactggccggcgctcttcgctaagctcctggagaagcgcacgnctgaggatctaatcctctccgtgggatctggtggtggcgctgctccagttgctgcttccgccccagctgggggtgctgcagctgctgctgcccctgctgcagaggagaagaaggaagagcccaaggaggagtctgatgacgacatgggcttcagcctgttcgattgagaccctcgcataccagccattagcaaattcgcttatgctgtccaagactta

SEQ ID NO: 35539 - DNA, 277 bp, Zea mays
atacgacaagagtcgggacggtgggcgaggtggcgaagaatgaaaaggagtcgaaagaaaaggggaaggggtcatttgctcttgcatggaccatggatgagagcagtgaagaaagggaacggggtgtgacaatgactgtggctgtggcttatttggagaccaagaaattccgtgtggttttgcttgactcacctggtcacaaagattttgtgccaaatatgatatctggtgcaacacaagctgatgcagctattcttgtcgttgatgcttcaactgg

SEQ ID NO: 35540 - DNA, 279 bp, Zea mays
gtcatggttaatggacttttattccagctttcattacctctgaacttccttgggagtgtgtatcgagaatctagacaaagcctcattgacatgaagtcgatgtttcagttgcttgaggaaaaacctgcaataaaggatgagcctcatgcacaacctttgcagttcaagggagggtgcattgaattcgagaatgttcattttgggtatgttccagaaaggaagattcttgatggtgccactttcaccgtacctgcaggaaagagtgtggccattgttgga

SEQ ID NO: 35541 - DNA, 283 bp, Zea mays
cggacgcgtggggacgtcggcaagctgcccaactggcacgagtacccccagtggaagccgacgaagctgtacgctcttgtgcccggcctcgacgctgatggctacgatcttcttgagaaattgctggaatacgagccggcgaacggatccccgcgaagaaggccctggagcacccctacttcaaagatgtgaggaagggagatgcgcactgactgaagcgatccaccaagggcccgccctcacgagttgacatatatatacgtgtgtgtcgtcgtgtcgagca

SEQ ID NO: 35542 - DNA, 275 bp, Zea mays
atggacttgagcaacaactacttgcacgattcaattccttaccagctgccatcaaaccttacctatctgaacctggcgaaaaacaacttctctggtaatcttccgtactccatatccaacctagtctcgcttgagtacctcaacctcagccacaactcgttgtttcaggaaatcggagaactgtttggaagcctcagttcactctcggaactagacatatctttcaacaacctcacggggaatcttccttcctcaatgggctttctgtcaaaact

SEQ ID NO: 35543 - DNA, 275 bp, Zea mays
acgctctgccaggtggacagcagcgtgccccaggaagcccatgcctcgatgatctcgcgcgagctcaccagcttctgcgacgagtggaagcaggcgctggaccgcctcccggacgccgtcgcctcggaggcgatcaagagcttcgtgaacgtggtccacgtcatctacaccaagcaggtcgaggagatgaagatcaagaagcgggcggagacgtactccaaggagctggagaagaaggccaactcactcaggtccatcgagaagaagtactacca

SEQ ID NO: 35544 - DNA, 275 bp, Zea mays
  unsure (1)..(275): unsure at all n locations
gcacaccaaggagagtacgtggaggagcagccatggcttcatcggtggccgccgcggcgagcacattcctgggcacccgcctggcggacccggcgccacagaacgggcgcatcgtggcccggttcgggttcgggttgggcggcaaggcgaagctngctccgaagaaggtggcgaagacatcgacctcctctgaccggccgctgtggttccccggcgccgtggcgccgactacctggacggctcgctggtcggcgactacgggttcgacccgttcg

SEQ ID NO: 35545 - DNA, 271 bp, Zea mays
ggaccgtgggagaaagcggatgagttcaaaaagggtgtcgagggtgcaaccaagtttctccttagcaaaccgaaggacctccaattttttgttggtgagtccatgaaggatgatgcgtctgtggtattcgcctattacaaggatggtgccactaatccgacattcctctatttctctcatggtcttaaggagatcaagtgctaggcgtgcggcgaaattagttacccatgttgggtactatctatgtactattattatatccaaaactata

SEQ ID NO: 35546 - DNA, 276 bp, Zea mays
ctccagttagatcctgatgatcttagtgaacaattgaagcggcaaggtgcttcgataccacttgttagaccaggaaaaagtacagctgcttatattaaaacagttcttagtcgcatatctgtcttgggatctgcatttctggctgtgctagctgctggaccatctttagttgaacagacaagtcacttgacagcattccgtggatttgctgggacttcagtgcttatccttgttggatgtgcaacagacacagctcgaaaagttcaagcagaaata

SEQ ID NO: 35547 - DNA, 274 bp, Zea mays
cactgtgtgactgcggcgacaaggccatcgcggacgggagcctcctggacctcctgcgccaggtgttcacgttcgggctctccctggtgaagctggacatccggcaggagtcggagcggcacaccgacgtgatcgacgccatcaccacgcacctcggcatcgggtcgtaccgcgagtggtccgaggacaagaggcaggagtggctgctgtcggagctgcgaggcaagcgcctgctgctgcccccggaccttccccagaccgacgagatcgccga

SEQ ID NO: 35548 - DNA, 260 bp, Zea mays
caccaccgctccacacacaagaagagagccgagagctagctacctagcgcgcgatggcgatgtccgcttccaagatgatggcggtcgccgccgctgccctgctagccctggtcctggccgcgtcgaccgcggaggcgaggaacatcaagacgacgacgacgacgacggagaagaaggacgatgcggtggtgcagccgcagaccttcccgcccttcgaccgcctcggcggctgcgcgtccccggctgccggtggcctcccc

SEQ ID NO: 35549 - DNA, 266 bp, Zea mays
ctccaaggcccttgagtctttttacgagaaattcgatccagatttcattgatattaggacaaaagcacgtgaggtgttgcagagggaggacgatctgaatgaaattgtgcagcttgttggtaaagatgcgctggcagaatctgacaagattacgctggagacagcaaagcttttgagagaagattatttggcacgaaatgcattcaccccatatgataagttctgcccattctacaaatccgtttggatgatgcgcaacattattc

SEQ ID NO: 35550 - DNA, 269 bp, Zea mays
gcccaggccaccatggcggaggatgctacgagcagccacccgtcacgctacgtcaagctcaccaaggaccaggacgcccccgccgaggacatccgccccggcgagctcaaccagccagttcacgtcccgcagctcgaaggccggaggtgtagcgagtgcggtcaggtcctgcccgagagctacgagccgcccgccgacgagccctggaccaccgggatcttcggatgcaccgatgacccagagacctgccgaactggattgttttgccc

SEQ ID NO: 35551 - DNA, 267 bp, Zea mays
gtgtcaaagagagaaccagcacacagcagagtagcacctgatcgatcgatctcctactactagctcgttcgctttcacaaccagggagcagcaatggcatctgctgctactactctcctcaagtcgtcattcctccccaagaaggctgaatggggatccaagccccagctggttgccgctcatcccaggccggcgaccgtcgtcgtctccatggttgcccgcgctacgcctacgctgacgagcttgtccagaccgcgaaaaccatcg

SEQ ID NO: 35552 - DNA, 270 bp, Zea mays
ggaaaggaaatcttttgatcaaaatatgacacagaagcaagcggatttattgaaaaaggagaaagatgttaaatctttggaggctaaactttctaaaagtgagcaggcattgaatgataagaagaaatcaatggaaaacttgcagaatgatcttgatgccaaatctaaggctctgaagagttgggatgaatcattgaaaaatgacgagaaaaggttactgaaagaaaagcagcaaatggatcatgaaagagaacaattggagacatacaa

SEQ ID NO: 35553 - DNA, 268 bp, Zea mays
aggacatccgccggggcctcaggggcgactcggtggtgctcatggggaagaacacgctcatcaggcgctgcatcaaggtgtacgccgagaagaccggtaaccacacctttgacccgctcatggacctcctggtcggcaacgtaggcctcatcttcaccaagggagacctcaaggaggtgcgcgaggaggtcgccaagtacaaggtgggggctcctgctcgtgttggtctggttgctccagttgatgttgttgtgccccctggcaacac

SEQ ID NO: 35554 - DNA, 267 bp, Zea mays
cccacgcgtccgtgacaagaaggctaccagtgtcggtgagaagaatgtcctcatctttgatcttggaggtggtacctttgatgtctccctcctcaccattgaggaaggaatctttgaggtcaaggccacagctggtgacacccatcttggtggtgaggactttgacaacaggatggtcaaccacttcgtccaggagttcaagaggaagaacaagaaggatatcactggcaaccccagggctctccggaggctgaggaccgcttgtga

SEQ ID NO: 35555 - DNA, 264 bp, Zea mays
ggacgcggccgagagtatcgaagctgtcaggatgtcaagcgcgccggatgagcgagtgatggcaagccacaggagtggcgagacagaggacaccttcattgctgacctctcagttggcctgtctacgggccaaatcaagacgggagccccttgccggtctgagcgcctggccaaatacaaccagctgctcaggatcgaggaagagctcggtgatgccgcggtctacgccggagcaaagttcagggcaccagtggagccctacta

SEQ ID NO: 35556 - DNA, 266 bp, Zea mays
ggccgggctgcagttccccgtcggccggatcgggcgctacctcaagcagggccggtacgcgcagccgtgggcaccggcgcccccgtctatctcgccgccgtgcttgagtacctcgccgccgaggtgctggagctggccggcaacgcggcgaaggacaacaagaagacgcgcatcgtcccgcgccacgtgctcctggcgatccgcaacgacgttgagctcggcaagctgctggctggcgtcaccatcgcgcacggcggtgtcctccc

SEQ ID NO: 35557 - DNA, 261 bp, Zea mays
gagctccatctccataacccgcctggcttcagctaccaaacgcccctctcaggtgataggcatgcacttcttcaaccctcctccggtaatgaaactgatcgagattatccgaggagccgatacgtcagatgaggtgtttgctgcggtcagatctttctccgaaagactcgggaagtccgttatatgctcgcaagattacccaggattcatcgtgaaccgcatcctcatgccgatgatcaacgaggccttctgggctctgta

SEQ ID NO: 35558 - DNA, 266 bp, Zea mays
caactgaacaactctaccgcgcctaccttataatccagcgcttcaagaacaccatcattagcgaccccaagaacgtcactgccacctggattggtcatgatctctgcggagaaacgacctatgtggggttctactgcggatcgccggcaggaggagataagaagttgacagtcacaggtgtcattttgaatgggtataatctacatgcaccaacgttggaaggtttcgtcaatcagctccctgatctagctcttttccatgctgct

SEQ ID NO: 35559 - DNA, 266 bp, Zea mays
ctgattctatccagctagtcgctgagcatgctgcagcaaataacaaggtgttcctgatgaacctctctgctcccttcatttgtgagttcttccgtgatgcccaagagaaggtcctcccgtatgctgactacatcttcggcaacgaaactgaggcaaagatctttgccaaagtcagaggatgggagactgagaatattgaggagattgctttgaagatctctcaacttcctttggcttcaggcaagcaaaagaggattgctgtgatt

SEQ ID NO: 35560 - DNA, 269 bp, Zea mays
aatttggggtcacaagggttcacatggaagaagatgctggcaagctgcttcattctgaatccagcagctactctcaggttgacctaaacagggctggcgtacctttgctcgaaattgtctcagagccagacatgagaacagggatagaagctgctgagtatggtgctgaactgcaaaggattgttaggtacctgggagtgagtaatggtaatatgcaagaaggttcccttcgttgtgatgtgaacgtttctgttcgaccagttggacaa

SEQ ID NO: 35561 - DNA, 252 bp, Zea mays
actagttctattgccgcaccccagatctccaggagggactcgttctttcagctaactacactgcacgcaatggccaccacggcgaccgaggcggcgccggcgcaggagcagcaggccaacggcaacggcgagcagaagacgcggcactccgaggtcggccacaagagcctgctcaagagcgacgacctctaccagtacatcctggacacgagcgtgtacccgcgggagccggagagcatgaaggagctccgc

SEQ ID NO: 35562 - DNA, 260 bp, Zea mays
ccgccgccgccgccgcagttgtcttcggtcttccgtgctcaccttcgagagatcaagttgctgctgcggtagtccccaaccatcatcatgcagaacgaggagggtaagacggtggacctctacgtccccaggaagtgctcggccacgaataggatcatcactgccaaggatcatgcctctgtccagatcaacattggccacttggatgcgaatggcctgtacgatggtcacttcaccacgtttgctctctctgggtttgt

SEQ ID NO: 35563 - DNA, 261 bp, Zea mays
cctagctcccgcaactgccgccgccactcccacgcccgcagccatgccgcccaagctcgacccgtcgcaggtggtggaggtgttcgtccgtgtgaccggcggcgaggtcggcgcacgatcttcgctggcccccaagatcggcccgcttggtctttcccccaagaagatcggagaggacatcgccaaggagacggccaaggactggaagggcctccgcgtcaccgtcaagctcaccgtccagaaccggcaggccaaggtctc

SEQ ID NO: 35564 - DNA, 259 bp, Zea mays
gaagaagtacagcaaggacatcagcaaggacaaccgtgctcttggaaagctgaggagggaagccgagcgcgccaagagagccctcagcaaccagcaccaggtccgtgttgagatcgagtccctctttgacgggaccgatttctcggagccactgacccgtgccaggtttgaggagctgaacaacgacctcttccgcaagaccatgggccctgtcaagaaggccatggaggatgctggccttgagaagagccagatccac

SEQ ID NO: 35565 - DNA, 263 bp, Zea mays
cctgtacagccaggggtacggcgtgaacaacgcggcgctgagcacggcgctgttcgacgaggggctccgctgcggcgcgtgcttcgagatcaggtgcgaggagcagcccgggtggcggtggtgccggcccgggaggccctccatcctggtcacggccaccaacttctgcccgcccaactacgcgctcctctccgacgacggcggctggtgcaaccgccccgcccgcacttcgacctcgccatgcccatgttcctccacatcgc

SEQ ID NO: 35566 - DNA, 264 bp, Zea mays
agagcgcgctctgccgccagcaccgcgtccgccatggccgcctcctcccgccgcgcgtctcaagtgctggggtccgcggcctcccgcctcctcctcgggcggggcttcgccgcggcagccgccgggcgccctcgccggcggtcttcgtcgacaagagcacccgtgtgatctgccagggcatcacggggaagaacggcaccttccacaccgatcaggccatcgagtacggcaccaacatggtagctggagtgactcccaagaaag

SEQ ID NO: 35567 - DNA, 267 bp, Zea mays
acgctcccctcctcgacggtcgacgccgcggcttctcctcatcctcgtcccctccgtccgctgactggaagtggtctacacagaaggttaccatattgttaagttaaagttggatcattggaacaatgccgccccataagattgagactgggcatcaagatgtggtccatgatattgccatggattactacgggaagcgcctagctacagcctcctctgataacacaataaagatcattggcgtaagtggaacctcacaccagcagc

SEQ ID NO: 35568 - DNA, 259 bp, Zea mays
  unsure (1)..(259): unsure at all n locations
cggagcgtggnncggacgcgtgggcggacgcgtgggcttctgtttacaagagggacttaagcaaagtgagctacgtgtcttcttcaccaataaccactttaacaccatgttcaagtacaacggaagtctatatctcctagcaactgatcaaggttttataagccaaactgatttggtatggcaaaggttggatgaggtgaatggagatggcgtttttcttactagcaacttcacaccatttaatgctgaaactccaaga

SEQ ID NO: 35569 - DNA, 258 bp, Zea mays
catgatgatcgtcaagctcgtcccgcacaagcgcccgccgccgccgccgcccgaccagtacacgcaggcgctgcacaaggcgctcatgttcttcaacgcgcagcatccggtccgctgccgaagcacaacggcgtcactggaggggcaattcctgcatgaaggatggcctctccgacagcaccgtccgccggagcttggtcggaggcttctacgatgcgggggacgccatcaagttcaactaccccatggcctggtcca

SEQ ID NO: 35570 - DNA, 255 bp, Zea mays
agaagctctaaatggaacacacaaaatagagggttcaagtgttcccttggttgtcaaatgggctgacactgaaaaggaaaggcaggctcgaaaagcacaaaaagctcaattccagtcttctaacatgttgaatgcaaatgctatgcagcagaattcagtgtttggaggtttacatatgggttatgtgccgcagtacaatggatttggctaccagccacaaggaacctacgggcttatgcaataccctcctctatc

SEQ ID NO: 35571 - DNA, 256 bp, Zea mays
cccacaccccccgagctcagcttagctccactccagctccaatcacagtcgtgaccagagcgcgagagctagctagagggccgtgaaaatgccgatcaataggatcgccctggggagccaccaggaggtgtaccacccgggcgccctcaaggcggcgttcgctgagttcatctccaccctcatcttcgtcttcgccggccagggctccggcatggccttcagcaagctgaccggcggcggcccgacgaccccggcg

SEQ ID NO: 35572 - DNA, 245 bp, Zea mays
atacgggacctggcccacggtcgacgggcttttgcacaggagtggtgcaaagactacttctagatgaaagaagccgattaaacatggcatttgatgtggccaaaggaatgaattaccttcatcgacgcagcactcctattgttcatcgtgatctgaagtctccaaatcttctagttgacaagaagtatactgtcaaagtatgtgactttggcctttcaagactgaaagctaacactttcctgtct

SEQ ID NO: 35573 - DNA, 260 bp, Zea mays
cccgcctcccggttcaaccaaatccctctcgcctcatccccaccagcgcaaagccgccctatcgtcctgtcgtgagaagcaatggcgggccgtggcaaggcgattggcgctggtgccgcgaagaaggcaacgtcaaggagctccaaggctgggctgcagtttcccgtcggcaggatcgctcggttcctcaaggccggcaagtacgccgagcgcgtgggcgccggcgcccctgtctacctcgcagctgtcctcgagtacct

SEQ ID NO: 35574 - DNA, 274 bp, Zea mays
caaaggcccgttatgatgagattgtgaaggaagtctcttcctacctgaagaaggttggatacaaccctgataagatccacttcgttccaatctctggttttgaaggtgacaacatgattgagaggtccaccaaccttgactggtacaagggcccaaccctacttgaggctctggacttgatcaatgagccaaagaggccttcagacaagcccctgcgtctcccccttcaggatgtgtacaagattggtggtattggaactgtccctgttggacg

SEQ ID NO: 35575 - DNA, 270 bp, Zea mays
atcccatacttcgttacggcggtatgtatgcattggctctagcatacagagggactgcaaataacaaagccatccaccagcttctgcattttgctgtgtcggatgtgagcgatgatgtgcgaaggactgcagtgttggctcttggctttgtcctgtacaatgagcctgaacagacacccagaattgtgtccctactatcagaatcatacaatccacatgtccgttacggggcagccctggccgtcggaatctcctgtgccggatcaggat

SEQ ID NO: 35576 - DNA, 266 bp, Zea mays
ggacgtgggcagcggcggacacggaggcgaaggaggaggagcagcagcagcaagcggcgccgaggagcggcatcccactcagtgcttgcaaccatggctaggggattgaagaagcacttgaagaggctcaatgcgcccaagcattggatgctcgacaagcttggcggagcttttgctcccaagccatcttctggacctcacaagtccagggagtgccttcctctgatcctcatcatcaggaacaggctcaagtatgctctgaacta

SEQ ID NO: 35577 - DNA, 267 bp, Zea mays
cccacgcgtccgcccacgcgtccgcccgatccagcgaggcggcgaccctccctcctccccttgcttcgctcgtccagccctgaccacccgcatccccgtcagtcatggcagcggcagcaggcggaggcgcggtgcgtgcgctgtcccagaaggagcaggacatacagatgatgctcgccgccgacgtccaccttggcaccaagaactgcgatttccagatggagcgctatgcctttaagcgccgcaccgacggcatctacatcatca

SEQ ID NO: 35578 - DNA, 267 bp, Zea mays
tgccacacttgtaggaacgttgccctgcttatttttgatacctggcctattcttcattccggaatctccaagatggctggcaaggatgaataggatggatgattgcgagacttctctacaagttctcaggggattcaatgctgacatcactgcagaagctaatgatataaaggcgtgcactttactttcattcatttagactgattgaatacagtttatttgaatagtcttcactttgtgtattattatctttaacatttggcatat

SEQ ID NO: 35579 - DNA, 266 bp, Zea mays
attctgttcctccattcagactgaagagatatccggttgctgcttttcttatcattgcaacggttcgtggtttccttctcaactttggcgtgtactatgctactagggctgcactaggtcttacattccaatggagctcccctgttgctttcattacatgcttcgtgacactatttgctttggtcattgctataaccaaagatctccctgatgttgaaggagatcgcaagtatcaaatatcaactttggcaacaaagcttggtgtc

SEQ ID NO: 35580 - DNA, 240 bp, Zea mays
cccacgcgtccgctgagtttgacgagggtgaggacggcgacgagggtgacgagtactagacgctctactggcgcggcgtcgtcgggcttgtgtgccactgctatcctgtgatctgccctgagtggctcctatcgtgttatgtttctgtcggttcttatctatctgtcgttgtgtggtttacaacttacgttgtaagactttattcccccgctttgctactgggttattaagtttggcgtt

SEQ ID NO: 35581 - DNA, 265 bp, Zea mays
ggttctacgtccgagtcgtcgcatcaggtcccctcgattcgccggcgggccaccaaccaagctcatacatctgaattgactagtcaaactcagtgatctctttggggactaatcaaactcaagaactaagtttcatgtctgatctcgacgtccagcttccatctgcttttgatccgtttgcagaggcaaatgctgaggattccagtgctggtgctggatcaaaggactatgtgcacgtgcgtattcagcagcgcaacggaaggaa

SEQ ID NO: 35582 - DNA, 265 bp, Zea mays
attgcagatagcaaagcaagctattgggaacgacgctccgacaaccaccacacgcctcaggtttggctagtagacagcatcgacgacgaggaacagaagatggcaccgaaaggagccgtattcgtctcaatctcacagttccccatcaagaaaatccgcaaggattgcacctacctgagcactccagcaatgaagatccctgaaaccatgcaaaatatccatgcctgcgagaactggctgccaagacgggtgatgagcgcctggc

SEQ ID NO: 35583 - DNA, 263 bp, Zea mays
agaaccacttgatcaagaaggatgtgccttgtgagactgatcagttgactcatgtttacactttgatcatccgtcctgatgcaacatacagcattctcattgataatgaagataagcaaactggcagcatctacgagcactgggatattcccccctaagaaaatcaaggacccagaggctaagaagcctgaggactgggatgacaaggagtacattcctgaccctgaggacaagaagccagagggctatgatgatattcccaa

SEQ ID NO: 35584 - DNA, 263 bp, Zea mays
ccagcctcgcccgcccttcgctcgccgccgccatggggaggggaaagttcaagggaaagcccaccggccgccgcaacttctccacaccggaggagatcgctgctggtacttcaggtcgccctcgcacctttaagaagaaggaggaagaggaagaggaggaagaagaaagagaagagtcagaggaggaagaatctgaagacgagtctgatgacaaacctaaacataaaggtactgagggtattattcagattgaaaatccgaac

SEQ ID NO: 35585 - DNA, 257 bp, Zea mays
gaaggatctgggcgcaccggtgttcgagccgctggtgcggacgtacgccgccgccgggaagaagttccccgggatgcggcacggctgaagatcgagaacgtggaggtcggggaggggacggcccagctgcttgactctatctgcgccgatcaataggtggttttcttttgtcctcgccgtttgtgtttgtctcaataacagcaggaccgtttcgagcgctcggctatttgctctgcaagcgctgtgatgcctgtatg

SEQ ID NO: 35586 - DNA, 254 bp, Zea mays
gcggacgtgatcttgttaatgtacagataagaagatatcgacagtagcagctgtcacaagctgcttgttttgcttcatctatagtacctgccgctttgatgcatgggaacagagaaatccttgaagcaggtgagcgaaactttaataggtttggtggatggttgggtaagtactcgactactaacaaaaacagaaggctactggaagatgtccacagtcatattcttgcctcccagcaagcaaacttggacagg

SEQ ID NO: 35587 - DNA, 258 bp, Zea mays; identical to SEQ ID NO: 34969

SEQ ID NO: 35588 - DNA, 255 bp, Zea mays
gctcgttcgatctgtgcagcagatctgaggtcccgggcgaccgtgaagcagcttcaatcgtcggcatggcgctcgtattgcatagtggggctggaaacaagaatgccttcaaagcacttattgctgcagaatacagtgggatcaaggttgagttgaccaaggattttgagatgggtgtctccaacaagacccctgagtttcttaagatgaacccccttgggaaggttcctgttctggagactcctgatggccctg

SEQ ID NO: 35589 - DNA, 255 bp, Zea mays
cccacgcgtccggatgattactgtcatagccaccagccaccaattgctttcattaagtcagaagtttgtggcctttttggcagtgttttctgtgattttggtcctgcgtttactgttttggatgttgatggtgaggaaccacatacaggaattgtggcatcaatcagcaatgacaatccagcacttatttcttgtgtggatgatgagcgtctggagttccaggatggtgatctagttgttttctctgaagtgcat

SEQ ID NO: 35590 - DNA, 257 bp, Zea mays
atcaactatcagccaccctctgttgtccctggaggtgacctggcaaaggtccagcgtgccgtgtgcatcatcagcaacaacaccgccgttgccgaggtgttctcacgcatcgaccacaagtttgaccttatgtacgccaagcgcgcattcgttcactggtatgtcggtgagggtatggaagagggtgagttctcagaagcccgtgaggacttggctgctcttgagaaggactatgaggaagtcggtgcagagggtgc

SEQ ID NO: 35591 - DNA, 257 bp, Zea mays
gccgtgtccccggcacgcctgctcgcgcggttcccgggctcgagtcgctcgcggtgaaggggaagccccgcgcggccatgtacgggctcatacccgacgactggggcgcctacgcccgcccgtgggtcaccgagctcgccgcgccattcgagtgcctcaaggcgctccacctgcgacgcatggtcgtcacagacgacgacctcgccgagctcatccgtgccagggggcacatgctgcaggagctgaagctcgacaag

SEQ ID NO: 35592 - DNA, 255 bp, Zea mays
cggagtctatgaagaaggcattgatgagatctgcttggtcattccctaaaatggcggacaggtctacatggacggggctaacatgaatgctcaggttgggttaacaagccctggttttattggagctgatgtttgtcaccttaaccttcacaagacattttgcattccacatggtggaggcggtcccggcatgggtcctattggggttaagaagcatttggcaccatttttaccatctcacccagtgattcccac

SEQ ID NO: 35593 - DNA, 257 bp, Zea mays
cggacgcgtggcgagacgcgtgggcggacgcgtgggggggtcaggtgacccaggtcagagtagcgttcttggatgaccagaaccgtctactcatgaggaacgtcaagggccctgttcgtgagggtgacatcctcaccctgctcgagtctgagcgggaggccaggaggctgcgctgaagccctggtggccttggatgtaattctgttaattttgttctatgtttgtcgaacttgccgtgtcccttgcaacatctgctt

SEQ ID NO: 35594 - DNA, 278 bp, Zea mays
agattgttgagtccgcagatgcctacctctttgcaggccccattttcaatgactacagctctgttggctactcattcctcctcaagaaggaaaaggccatcatcgtccagcctgagcgtgtgatagtggggaatgggccggcattcggatgtgtgatgatgaaagagttcttgtctgaattggctaagagggttaataagaacaccactgcctatgagaattacaagaggatctttgtacctgagggccagccgctggaaagcgagccaaatgagcca

SEQ ID NO: 35595 - DNA, 268 bp, Zea mays
ctcagattcctaatcaacttcatgctgacatcaaagcagattcagagcggttttgtgtgcaggaagccgggaagccgtgcgatccccgtgtgagcctgctgcttgaggttgctgctgggttcatgtacccgaagcacttgctacggattggaaggggaatgatccgtgtgtgtttccgggcgttagttgcatacaaggtaacattactgagctaattttcaccaataagggtctcagtggtagtatctcaccgtccatcgggaagatt

SEQ ID NO: 35596 - DNA, 275 bp, Zea mays
cccacgcgtccgaagaccagaataatcacaaggacctcgaggagggaattaaccgtctagttctttgctctggaaaggtgtactacgaactggatgaagaaagaaggaagacggagcgcactgatgttgctatatgtagagttgagcagctctgcccattcccctatgacctcatccagcgcgagttgaagagatatccaaatgctgagatcgtgtggtgccaggaggagccgatgaacatgggagcgtacagctacatcaacccccggctgctg

SEQ ID NO: 35597 - DNA, 271 bp, Zea mays
accgcgtcctcgtcggggcggtcgactggaccgatcgccgcgggatgatcgaggatgtcttcgagcggagatccgaggttgtcgacccgcctgtcgccaacgtcgaccgacttgtcgtgctcttctcgctcgaccagccgaagcccgagccggccacgctcacccggttcctcgtcgaggccgagtcttcaggaattccgtttgtgctcgtcttcaacaaggtcgagctcgtcgacgagcagacaatagcatactgggaagataggttgag

SEQ ID NO: 35598 - DNA, 270 bp, Zea mays
gtgtcggtgagaagaatgtcctcatctttgatcttggaggtggtacctttgatgtctccctcctcaccattgaggaaggaatctttgaggtcaaggccacagctggtgacacccatcttggtggtgaggactttgacaacaggatggtcaaccacttcgtccaggagttcaagaggaagaacaagaaggatatcactggcaaccccagggctctccggaggctgaggaccgcttgtgagagggcgaagaggactctgtcttccactgccc

SEQ ID NO: 35599 - DNA, 269 bp, Zea mays
attaatggtattggtgaaagggctggaaatgcttcattggaagaggttgtcatggcaattaaatgtcgtggggagctcttagatggtctatatacgggaataaattcccaacatattactttgacaagcaaaatggtacaagagcacagtggacttcatgtacaaccacataaagctattgttggtgccaatgcctttgcccatgaaagtggaattcatcaggatgggatgcttaaatataaaggaacatatgaaataatatcgcctga

SEQ ID NO: 35600 - DNA, 266 bp, Zea mays
cttcaagaaagctccaagatcaaccagtcattgtttgcgttgtccaatgtcatttcagctctaaataagaatgagcatcggataccatatagacagagtaaactgactcggttacttagagattctctaggaggcggtagccgcactgtgatgatagcttgcctgaatcctgcagaataccaggagtcggccaacacagtaagtctggcggctcgttcatgccatattgagaatttcaccagttcaagcaaacaagaaactcccaa

SEQ ID NO: 35601 - DNA, 269 bp, Zea mays
cctccctcactctcgttccatttccccatctcccagatccaattcgcgagttctccctcctctgcggccatggcgctctctgtggagaagacctcgtctggacgggagtacaaggtcaaggatctctcgcaggcggacttcggccgcctcgagattgagctggccgaggtcgaaatgcccggcctcatggcgtgccgcgccgagttcggcccgtccaagcccttcgccggcgctaggatctcggggtctctccacatgaccatccagac

SEQ ID NO: 35602 - DNA, 267 bp, Zea mays
cccacgcgtccgctcggcagtcggcacgcaggctagcagcacagcagcagccagagccatcccctctcctcgctacgcttcgcttcctcggcgccgattcctcctcctcctcctccaccctcgtccgtcccgttccggcgcgcgagctcgcccgagatggcgaacgcgagatcgggtgtcgctgtgaacgatgagtgcatgctgaagtttggcgagctgcagtcgaagaggctgcaccgcttcataactttcaagatggacgacaag

SEQ ID NO: 35603 - DNA, 260 bp, Zea mays
ggctgcgtcttcatcctcggccactgcctctcctggtccggatggatggaccttcaggtgccggtgctgaagaggtacccagccaggctctcggttctgtcactgacctgcattttcgggctcctccagttcctggccattgccgccttcaccgaggaggacctgagcaggtggaaggtccgctcaggaggggagctcttcaccatcctatacgctggccttgtggcatccggggtagcgtttgctctgcagatctggtg

SEQ ID NO: 35604 - DNA, 257 bp, Zea mays
cggacgcgtggcgtgacgcgtgggtgagtctctactccaccccctcgatctcgaagcgcacagactgcagtcaggaggccatggacgcgagcgcagcggagccggcgggaaggcgaagaagggcgcggccgggcgcaaggccggcgggccgaggaagaagtcggtgacgaggtccgtcaaggccgggctgcagtttcccgtcggccgcatcgggcggtacctgaagaagggccggtacgcgcagtcgtcggcacggg

SEQ ID NO: 35605 - DNA, 262 bp, Zea mays
gtttatttaagaacttaaagttctacttgagtcgagaggagcctagggagtccctgttatttataattccagcgtttggagggactgtttcaagggaaggagaaggagctccatttaaagaaatagacgaagatatcactcaccagattgttgataggccgacacaaagccatgttttcctctccagggattatgttcaaccacagtgggtctttgattgtgtaaatgctcgtatcatattgccaacagaaggttatcttgt

SEQ ID NO: 35606 - DNA, 263 bp, Zea mays
gcgcaacatcagtatttcttactcaaggatctcccttgctgacattgctaagaagctaagactagactctgagaaccctgttgctgatgcggagagcattgtagccaaggccataagagatggcgcaattgacgccaccatagatcatgcaaatggctggatggtatcgaaggaaactggtgatgtgtactctacaaatgagccacaaattgcattcaactccaggattgcgttctgcctcaacatgcacaatgaggcggtca

SEQ ID NO: 35607 - DNA, 288 bp, Zea mays
cgcggtctgctcgttcgatctgtgcagcagatctgaggtcccgggcgaccgtgaagcagcttcaatcgtcggcatggcgctcgtattgcatagtggggctggaaacaagaatgccttcaaagcacttattgctgcagaatacagtgggatcaaggttgagttgaccaaggattttgagatgggtgtctccaacaagacccctgagtttcttaagatgaacccccttgggaaggttcctgttctggagactcctgatggccctgtttttgagagtaatgctatcgcacg

SEQ ID NO: 35608 - DNA, 289 bp, Zea mays
caacgctctatctctttcgccgagctcctcgaaaccctaggagcgtgcttgaccggcggcggcgaggtgatggcgatggaccctgacgcggtacgaaggccttcgtggagcattactaccgaacgttcgacaccaaccgcgcggcgctggttgggctgtaccaggagacctccatgctcaccttcgagggccagaagttccagggcccctccgccattgccggcaagctcggatctctccctttccaggcctgcgagcatcagatcgtcaccgtagactgccagccatc

SEQ ID NO: 35609 - DNA, 286 bp, Zea mays
ttcctctatgttgtttaacaagtttctgatgatttttttgctctgataatacagaatgataatggtccgtgctgtgaaatgggtagatgacatcattccagatgcaccttatgccataactgaagaattcatgaacaagctgttcaatgagtataacatagattacatcatccatggagacgatccttgtttgctaccagacggtactgatgcatatgctcttgccaaaaaggctggtcgatacaagcagattaagagaaccgagggagtgtcacgacagacattg

SEQ ID NO: 35610 - DNA, 290 bp, Zea mays
agcaagctcaaaccctaaccgccggcgacgccagcacgatggcccgctacgaccgcgcgatcaccgtcttctcccccgacggccacctcttccaggtcgagtacgccctggaggccgtccgcaagggcaacgccgccgtcggcgtccgcggcacggacaccgtcgtcctcggtgtggagaagaagtcaacccccaagctccaggactccaggtccgtgcgcaagatcgagtgcctggacacccacatcgctctggcatgcgcggggctgaaggcggacgcacgcgtgctc

SEQ ID NO: 35611 - DNA, 250 bp, Zea mays
agtctcggctgtactaacaaatgcgccatatgtgttaaacgtggagtgtgagcactacatcagcaatagcaaggctataaaggaagcaatgtgatttatgatggaccctatacgaggaaagaaggtttgctatggacagttccctcaaagatttgatgggatagatcgccatgaccgatatgctaaccggaatggaggcttgtgtgttatctacatgaaaggtttggatggtattcagggtctcaattat

SEQ ID NO: 35612 - DNA, 286 bp, Zea mays
gccaaaacctttgcagtcatgggtctgattttctcagcagctgaatgtaccatagagaaggttcgggcaaagcatgacactaccaatacagcagtagctggctgtgtcactggaggagctttagctgtaaaaggtggccctaaagctacatgctttggatgtgtggggtttgctgcgttctcagtggcaattgaaaagttctttgatcggcatacttgaaatgggtgttgtgaatttgaacgctttttggccatgttcgtttgatgcccaaaccatagggattgag

SEQ ID NO: 35613 - DNA, 283 bp, Zea mays
ctccaagaagaagtacatctacaccatcgacgacgactgcttcgttgccaaggacccatctggcaaggatatcaatgctcttgatcagcacatcaagaacctcctcagcccatccaccccgttcttcttcaacaccctgtacgacccctaccgtgagggtgctgactttgtgcgtggataccccttcagcctcagggagggtgctcacaccgccgtctcccacggcctgtggctgaacatccctgactatgatgctcccacacagctggtcaagcccaaggag

SEQ ID NO: 35614 - DNA, 284 bp, Zea mays
ggtcacttgaattttggggagagcaactctagtccacccatatagggtcttagtggctctggaaccacaatcgacccatcgccctgctgaaaattctctagaatgcaaactatcagacgaggcaccgccactgctgtagcgttgagcgtgtggacgaactgcgtagggcctgaggcagctcccttccctttcttggtgctcgttgatggaggctccgagggtgatgggcggtaacggatgcctagtcgcctactttggtagtcggtacaatttgatgcactgga

SEQ ID NO: 35615 - DNA, 279 bp, Zea mays
cccacgcgtccgaatgaaactgcggatgaaattggcaatttagtgaagactaggggccccccgttggaagttttgatggagttgagaaaggagggcagcaagtttatgaataatgtagggtctgttgctgcactgaatgagctggagatattattcaaagctctggataaagcaaatgcaataagcaagataacttttgatttaagtttggccaggggccttgattactacactggtgtcatatatgaagccgttttcaagggtgcagctcaggttggc

SEQ ID NO: 35616 - DNA, 279 bp, Zea mays
cggacgctggttgttaatggacgcaagcaaagtgtcttgtgcaatatgatctagatcagcagagctgtgtttttttcctagattctgccaacctttctattgattatcacattgctatttttctaatgttcataacattttctgatgtgcagattagtaattatgctggaatgttcttcattcttctttttgcctccattttcgcaactggtatattggagctcagatggagtggtgttggcattgaagattggtggagaaatgagcagttttgggtta

SEQ ID NO: 35617 - DNA, 278 bp, Zea mays
gcgcctccatttcggcctctgtcccttgcaagttcaatctcacctccaaccatgggtaaagagaagtcccacatcaacattgtggttattggccatgtcgactctggcaagtcgaccaccacaggacaccttatctacaagcttggaggcattgacaagcgtgtgatcgagaggtttgagaaggaggctgctgaaatgaacaagcggtccttcaagtacgcgtgggtgctcgacaagctcaaggctgagcgtgagagaggtatcaccattgatattgc

SEQ ID NO: 35618 - DNA, 274 bp, Zea mays
gggaggagacggtgcgggcgtcgcacatcctcatcaagcacgagggttcccgccgcaagcctcctggaaggaccctgacggccgcatcatctccgccaccacgcgcggcgacgccgcagcgcgcctcctggacctccgcaaccagattctctccggccaggccaacttcgccgacctcgccgctcggcactccgactgctcgtccgcgcgacgcggtggggacttaggtactttgggatgagcagatgcagaaccttcgaggacgcacatatgc

SEQ ID NO: 35619 - DNA, 275 bp, Zea mays
gatttctgagagacttaatgtccaagttagtgatgtgaagaatgttatcatctggggtaaccactcgtcctctcagtaccctgatgttaaccatgccacagtgaagacttccactggggagaagcctgttcgtgagcttgtctctgatgacgagtggcttaatggtgaattcatcacaactgtccaacagcgtggtgctgcaatcattaaagcgagaaagttctccagtgctctctcggctgctagctctgcttgtgaccacattcgtgattggg

SEQ ID NO: 35620 - DNA, 275 bp, Zea mays
agaaagttgatgtcagcattcaggttggagctcaggttgtgtattctaagtacgctggaaccgaggtcgcgttgaacgatcacagccatctggttctcaaagaggatgacgttataggtatcttagaaactgatgacgtgaaagacatgaagcctctgaacgaccgtgttctaatcaaggttgctgaagctgaagacaaaactccaggaggcctactgcttacggaaactgccaaggagaagccatctatcggaacggtcgtagcggttggccca

SEQ ID NO: 35621 - DNA, 278 bp, Zea mays
cacgcctagtttctctgtcgattcctattcgtcgtctcttcagggctggtgctcactgctgcgccgttctgttaaggttcgtcaagtggcccaaggtcgtgcgtatccagcgccaggccgcatcctcaagcagcgcctcaaggtaccaccggcgctcaaccagttcacccgcaccctcgacaagaacctcgctacgaacctgtttaagatgcttctcaagtaccggcctgaagacaaggctgccaagaaggagaggcttctgaagagggcccaagctg

SEQ ID NO: 35622 - DNA, 262 bp, Zea mays
aggcaatcgtacgtgaacaagtgaatcatccagtttggggagcatatgctcagcgacttctaaatcctgaagcaagactttggaggaatcccagtaatggtggtcatgatgacaaggcacatcctcctattcatccaaccaaattttcagaaggtgaaagaaactggagtccagaccacactagattgtatgagtttgttgtccgacatttccttgcatgttgctctcaaccggctgttggagctgaaacaactgtggaaat

SEQ ID NO: 35623 - DNA, 257 bp, Zea mays
ggacctggcgaggtttgctccggacggtagcctcccggcggatatgatctaccggtagcgccgccacctccttctcccggacttcggggtcgaaggccagcggaagctgtcacagtcgtcgattttagttgttggagctggaggtttgggctctcccctggcattgtatctagcagcttgtggtgtcggttgcttgggcattgtggatggtgatgatgttgaattgaataatcttcatcgacagataattcataaag

SEQ ID NO: 35624 - DNA, 260 bp, Zea mays
cccacgcgtccgcccacgcgtccggataaatccttagacttcgaaagtttgaaccctggtgagcagatatatgaaaagatgatttctggaatgtatcttggagaaattgtccggaggatcctgctgaaactggctcatgatgcttcattgtttggggatgttgttcctccgaaactggaacagctatttatactgaggacgccagatatgtcagccatgcaccatgacacctcacatgatctcaaacacctgggagctaa

SEQ ID NO: 35625 - DNA, 255 bp, Zea mays
ctcgccggtgctgctgcaattaacgccgcctccggccaaccacccgaaacctacctccgccgccgtcgtcgccaccgtcaacatggcgagccaaggggagccctcggcctctgcttccgatccgaagagaagaaggacttctcgacggcgatcctggagaggaaaaagtcaccgaaccgccttgtcgtcgacgaggccaccaacgacgataactccgtcgtcgctctgcaccctgacaccatggagaggctgcag

SEQ ID NO: 35626 - DNA, 257 bp, Zea mays
gtaatggctggttttgtactttcaagtgttgctaatcctgttggtgccgttagtgaattcattgctcagttgcagattttagagttgcttgacaatgctattttcactgccggctacaaagctgtgttgcatattcactctgttgtcgaagagtgtgagattgttgagctcatagaggaaattggcatgaagaaaaagaaagaagaagatccaaagaagaaaaagccaaagaggaagcctctttttgtgaagaacgg

SEQ ID NO: 35627 - DNA, 255 bp, Zea mays
cacacactcgggtaaagctatctcgagctagctagctgctgtaagccgttgccatggccaaaatggtattgctctgcgtgctcgtctccttcctcctgatgcccttggcctccctagccctgacgcaggacttctgcgtcgccgacctgacctgcagcgacacgccggctgggtacccgtgcaagtccagcgtcaccgccaacgacttctacttccacggcctggccggccagggcaaaataaacccactcatca

SEQ ID NO: 35628 - DNA, 254 bp, Zea mays
cccacgcgtccgctttgtaggtggtctaccatattatttcactgaggctcaagtgcgggagttgctcgagtccttcggacctctgcgtggattcgatcttgtgaaggatagagaaactggtaactcgaagggatatgccttctgtgtttaccaggatcttaatgtcaccgacattgcctgtgctgcccttaatggcatcaagatgggggacaagactcttactgttaggagggcaaaccaaggagcttctcagc

SEQ ID NO: 35629 - DNA, 256 bp, Zea mays
ctaaatttccactgtcacggtttagtgagcccctatattatgaatggggtttttggcaccgactcttctatcagtacatgtcaggctttaccgctcgttggaaatattactttatatggtcaatttcagaagcctcaattatcatatctggtctaggctttactggttggtcggaatcttctcccccaaaagccaaatgggatcgtgcaaaaaatgttgatgtattaggtgttgaattagctggaagttcagttca

SEQ ID NO: 35630 - DNA, 258 bp, Zea mays
gcagaggcttcaatgatgctgtgagtggctttccagatgatggctggtcttgtttgttgaacaccgatggtgctgaggatattacagttacaatcaactcatctccaaataaacttgttgggtctcatgtcagcgcttccccattattttctgctatggggggtggaatcatgtgcgcaaaagcatcgatgctgctgcagaatgtgccacctgctctacttgtgcgatttttgagggagcatcggtctgaatgggctg

SEQ ID NO: 35631 - DNA, 254 bp, Zea mays
cccacgcgtccgcggtaccgtggctagttctagatcgcgggcggccgctcgcgatctagaacccacgcgtcatgaatgtttcgtgggcgttcttcggcttcattgtcacaaggttcgagttcgtcaccgtctagtacgactgtgcgagggaggaagaggcgaggagaagatgcagatcttcgtgaagaccctgacggggaagaccatcaccctcgaggtggagagcagcgacaccgtcgacaacgtcaaggcca

SEQ ID NO: 35632 - DNA, 252 bp, Zea mays
cccacgcgtccgatcttttctcgtttagaacctctaaaatttcccccactcgccagtcgcagcagcacctgtagcagccatggacgccagcggaccggtagcatggggaagaagggggcggccgggcgcaaggcaggcggccccaggaagaagtcggtgacgcggtccgtcaaggccgggctgcagttccccgtcggccggatcgggcgctacctcaagaagggccggtacgcgcagtcgtgaggcactggc

SEQ ID NO: 35633 - DNA, 251 bp, Zea mays
cccacgcgtccggttattttatctggagctgctccacttgctacccatgttgaagaatacttgcgtgtggtcacatgtgcacatgtcgtacaaggatatggcctcacggaaacttgtgctggatctttcgtctcgctaccaaatcaaatgtccatgataggaactgttggccccccagtgccaaacatcgatgttcgtctggagtcggtcccagaaatgggttatgatgcacttgcgagcaaacctcgtgg

SEQ ID NO: 35634 - DNA, 255 bp, Zea mays
caaaatctccttgggattttgtaccagcagggcacagaatagggaagcctgcacctatgttcaaggaattgaaagatgaagacgtagctctccatagagaaaaatatgcagggagtcaagctgagagaagctcaaaagcagcagctgatgctgaagccaacaaagtcgctaagcagctcaagggcacaaaattatctgatggaggaacaaaaaaggaaccaaagaaacaatctggtggttcaaaagcgaagacag

SEQ ID NO: 35635 - DNA, 253 bp, Zea mays
ccctccgccgccgtctctgctctcaagatcgccatggcgtcagaaaagaagcagtcgaacccgatgcgggagatcaaggtgcagaagctcgtgctcaatatctccgttggagagagtggagatcgactcacccgcgccgccaaggtgttggagcagttgagtgggcagtctccggttttctccaaggcaaggtatactgtgaggtctttcggtattcgtcgtaatgagaagattgcatgctacgttacggtca

SEQ ID NO: 35636 - DNA, 249 bp, Zea mays
cagttcttgtggattcttcgagaacaatcccctcgggtgcaagaactcttctctggcatcaataatgggatgatactgccatggtgtgagcagcttgaggtgttgtgccatcattcagttgggggcttcatgacccattgcgggatgaactcgacacttgaaggcgtcttcgctggtgtgcctatgcttgccttaccactgttttttgatcaaccgattgatgggcgattaattgtggaagagtggaag

SEQ ID NO: 35637 - DNA, 248 bp, Zea mays
gttagattcactggcacaatagttggaataggtgcttctgatccatctggttgggctgactcaaaatggcgttcccttaaggtgagatgggatgaaccttcttctatttctcgtcctgaaagagtttctccttggcaaatagaaccttctgttagcccatgtcatgtgaaccctcttccagttagattcaagaggtctcgatcaagcgttaatgctttgccatctgacgtgtctactgtaaccagaga

SEQ ID NO: 35638 - DNA, 244 bp, Zea mays
cggctctagaagacgatgggcaaggacgacgtgatcgagagcggcgctggcggcggcgagttcgctgccaaggactacacggaccctcccccggcgccgctgatcgacgcggcggagctggggtcctggtcgctgtaccgcgccgtgatcgccgagttcatcgccacgctgctgttcctgtacatcacggtggccaccgtgatcgggtacaagcaccagacggacgcgtcggcgtcgggcgccg

SEQ ID NO: 35639 - DNA, 249 bp, Zea mays
gtttgcaagaagaaaatggctacctctccagatctattatgctgtttttgcccaactccattcaaacttttcctggagactgtgacaaacatgaaatttgatgaagaaccaaattactcaaagcttatttcccttttcgatgaattgattgagccccagcatttgaggcctattagaattgatggtgcattgaaggctggacaaaaacgtggaagattacatgtaaatccagaagaagatgagcaaccg

SEQ ID NO: 35640 - DNA, 288 bp, Zea mays
ggacggtgggtggaatatcactggagggaacgatctaaccttgacagaggtgaatgctgcagctgaagtaatctatgatcttgttgaccctggtgcaaatctgatttttggctctgttatagatccgtcatacactggtcaagtgagcataactctaattgcaactggtttcaaacgccaggaggaaagtgagagccggtcttcacaggctggaggagacagcaaccgcggtcgctcgggctggttttctcccacttcccaggaggaaggtcatgcattgcaaatccc

SEQ ID NO: 35641 - DNA, 260 bp, Zea mays
gaaaagataactagctggctgaagcgtcttgagattgcagaagattctgcgaaaggtatagagtatctccacacgggatgctccccaacaatcatccatagagacctgaagagcagtaacattctcctagacaagaacatgagagcaaaagtggcagacttcggtctttcgaaacctgcagtggatgggtctcatgtgtcaagtatagttcgagggacagttggatacctggacccagagtactacatctcgcagcagct

SEQ ID NO: 35642 - DNA, 287 bp, Zea mays
aaacaagaggctgatatttacagtgatcagtctggaggctgtgttgcattcttggcaaatattgattcagccaatgacaaagttgtcactttccgtaacaggcaatatgatcttcctgcttggtcagttagcattcttcctgactgcaggaatgtggtgttcaacactgcaaaggtgcaatctcaaacttcaatggtgaccatggttccagaaagtttgcaagcatcaaaacctgagcgatggagcattttcagggagagaactgggatttggggtaaaaatgactt

SEQ ID NO: 35643 - DNA, 279 bp, Zea mays
ctactactcgctgatgcagagcaagggcgtgatcccgctggacaacgcgctgttccggccgctgccgccgtcgatggagatggtggacccgaacacgctgctccggtacacgaacgtgttcgacgcgatgctggacgcggtgcgagtggccgtgcggaacctgaacgcgacgggcggcgcgggcgtgccgatcctggtgacggagacggggtggccgtcgtacggggaccggcgcgcggaccgtacgcgggcagggacaacgcggacgcgtacaactcg

SEQ ID NO: 35644 - DNA, 274 bp, Zea mays
ctcagaccctcaccaaccaggcaaccaaaccttctccgatggccgcgcccgtgtcgcagccgccggtgtccgccagggcgtccacacggtttctcccccgcgggataggcgcgctcccggagtccgcccccacgtccctccggttatccgtcggccgccgtcgccgcgcctccagcctagaggtgaaggcatcaggaaatgtgttcgggaactacttccaggttgcaacctatggcgaatcccatggagggggtgttggttgcgttatcagtgg

SEQ ID NO: 35645 - DNA, 283 bp, Zea mays
cccacgcgtccgcccacgcgtccgtgaaaagtggaaaaactggcgcatgtatgactacattgtgaaggaacttccaaaagttttaagtgataactttgaacaactcaacacgtcacaggcatcaatttttgggcactcaatgggagggcatggcgcgctgacaatttacttgaaaaacactgataaatacaagtcggtgtcagcatttgctccaattgccaatccgataaactgcccttggggtcagaaagcattctcaaattacctgggctcaactagatca

SEQ ID NO: 35646 - DNA, 281 bp, Zea mays
cagaagcggcggcggcggacaaacgcaggcgaaggcgagggtgtgagggaaggagcaccagccatggtgcacgtcaacttctaccgcaactatggtaagacgttcaagaaaccaaggcgtccttatgagaaggagcgtcttgatgctgaactgaagctggtcggtgagtatgggctgaggtgcaagcgtgagctttggagggtccagtatgcactgagcaggatccgtaatgctgcaaggcacttgctcacccttgacgagaagacccccgtcgtatcttt

SEQ ID NO: 35647 - DNA, 280 bp, Zea mays
aacacggtccgcggacgcgtggcgcaacgactacaacgcggcgctcttctcggggcggtccatggcggaggtgagagggtacgtgccacatggtggtgagcaagctcgtccgcggcctggaggcgatcgtgaggagcggaccgtggacgtggtggtgcccggggtgctccccatcggctgcttccccatctacctcaccctctacggcacctccaacgcagccgactacgaccgcgacggctgcctccgcggctacaacggcctctcctcctaccacaac

SEQ ID NO: 35648 - DNA, 289 bp, Zea mays
caattaagcaaaagaagggtgtttcttgtcatcactatgtggtggcaggaagaagggaagcaaatcaaagaagggctcagacaagaaaaagtcacagaagcatgtggacagttctgtgccagtattcaatcttgaaggtatagaggagggagttgaaggcgctggatttgatgatgagaaatcacttcttatgtctcaaatgagcttggagaagagatttggccaatctgcagcttttgttgcgtccactctgatggaatatggtggtgttcctcagtctgcgactcca

SEQ ID NO: 35649 - DNA, 285 bp, Zea mays
gggctgtccactccttcagaattaccaactgcgagatccaggacaccacccagatccacacccacatgtgctactccaacttcaacgacatcatccactcgatcatcgacatggacgcggacgtgatcaccattgagaactcgcggtccgacgagaagctgctctccgtgttccgcgagggcgtcaagtatggcgcgggcatcggccccggtgtctacgacatccactcccccaggatcccgtcggctgaggagatcgccgaccgcatcgacaagatgctggcgg

SEQ ID NO: 35650 - DNA, 282 bp, Zea mays
cgcagaaggaggaggagatgctgaagctgttcgagcagaggaagaaggacctggagaagctgctggacatctacgagcagcgcctggaggaggccacgttcctggccggcgacaacttcaccatcgccgacctgtcgcacctgccctacgcggaccacctcgtctccgacccgcgctcccgccgcatgttcgagtcccgcaagaacgtcagcaggtggtggcacgacgtctccggccgcgacacctggaagtacgtcaagaccctgcagcgcccgccgtcca

SEQ ID NO: 35651 - DNA, 281 bp, Zea mays
cgcaatcagggacaggtagctcgagcgcgcgctccacctgctccgacgcgatgcgggccaagtggaagaagaagaggatgcggaggctcaagaggaagcgccggaaaatgaggcagagatctaagtaggcgcatcttgtgaccgaggatggcgagcttctcctgcaccatggctgagacgcgttgggatgattgtctccctttgtagacgtgctttgctgtagacgtaggcgatgtaaaccgtcctttttgattaattctagtatgttctgagactgggtt

SEQ ID NO: 35652 - DNA, 282 bp, Zea mays
tctccggggcagcgtggaacggctgggcccctcggatcgccggagatgctgccctacgcgacggcggcggaggcggaggcggcgcttggccggcccatgacgcccgccgaggcgctgtggttccggtacaccgcgggggtgtccgactaccacctctactgctgcatcatcctcttcctcttcgtcgtcttcacggtggccccgcttcccatcgcgctcctcgagctccgggccccggccgcggtctcgccgtacaaactgcagccgcgggtgcggctctcc

SEQ ID NO: 35653 - DNA, 277 bp, Zea mays
ccaggaagagtctggatggaagtatatccatggtgatgtcttcaggttcccaaagaataagtcgctattttccgctgctcttggcacaggaactcaactatttgctctcacaacctttatattccttcttgcacttgtcggagtattctatccttacaaccgtggtgcactatttactgcattggttgtcatttatgcactcacttcaggaattgctggatacattgctacctctttctattgtcagttggaggggacaaactgggtgaggaattgc

SEQ ID NO: 35654 - DNA, 282 bp, Zea mays
gaagggcaagaagagcgtggagacgtacaagatctacatcttcaaggtgctgaagcaggtgcacccggacatcggcatctcctccaaggccatgtccatcatgaactccttcatcaacgacatcttcgagaagctggccggcgaggccgccaagctcgcgcgctacaacaagaagcccaccatcacctcccgcgagatccagacctccgtgcgcctcgtgctccccggcgagctcgccaagcacgccgtctctgagggcacaaggccgtcaccaagttcact

SEQ ID NO: 35655 - DNA, 285 bp, Zea mays
cccacgcgtccgcccacgcgtccgcggacgcgtgggcgaaacttaaattacttaagtttgatattagtacaggtgaaagagaagtcttactagacagagcagcatgatgtatggatcacattgcatgattgcttcactccactagacaaaggagtgaataataaacatccaggtggctttatttgggccagtgaaaaaacaggattcaggcatttatatgttcatggcaatgatggagcatgcttaggacctctcacacaaggtgattggatggttgagcacatt

SEQ ID NO: 35656 - DNA, 278 bp, Zea mays
ggacgcgtccgcccacgcgtccgcttgacgccggcatgatcagcgccgtgcccgggatgaaggcgctcgacatgaacgccgccgaggacgagatcgtgcgcctcacgcgcgaggtcgtgcccggcatgatcgtcaccgggatggaggtcgccgagatcgacggcgccccgaggatgggcccgacgttcggcgccatgatgatctccggccaaaaagcggcgcacctggcgctgaaggcactggggcagcccaacgccgtggacgggaccatcccgagg

SEQ ID NO: 35657 - DNA, 275 bp, Zea mays
ctagcatccgcagttcccccgcgcccgagacgcaaccccgcgccaggagtaagtttgttcttttatcgatattatcgatatggcgagggaggagaatgtctacatggccaagctggctgagcaggccgaaaggtatgaagagatggttgagtatatggagaaggtggctaagactgtagatgtggaagagctcactgttgaggagcgtaacctcttgtcggtcgcatacaagaatgtgattggggctcgccgtgcttcatggcgcattgtctctt

SEQ ID NO: 35658 - DNA, 210 bp, Zea mays
gcggacacggaggcgaaggaggaggagcagcagcagcaggcggcgccgaggagcggcatcccactcagtgcttgcaaacatggctaggggattgaagaagcacttgaagaggctcaatgcgcccaagcattggatgctcgacaagcttggcggagcttttgctcccaagccatcttctggacctcacaagtccagggagtgccttcctct

SEQ ID NO: 35659 - DNA, 271 bp, Zea mays
gccatggtctgggagggcaagagcgtcgtcacaactggccgcaagatcattggcgccaccaaccccctggcttctgagcccggcaccatccgtggcgactttgctgtcgacattggcaggaatgtcattcatggaagtgacagcattgagagtgctaataaggagattgccctgtggtttcccgagggccttgctgattggcagagcagccagcacccctggatctacgagaagtaaacagtgaaagtttcacatgaaaccttgagagcta

SEQ ID NO: 35660 - DNA, 274 bp, Zea mays
gatgaagatacccaagtaccagacaccagggctcaatacccaggacaccatccagcgagggccgatgcataccgcccttctgatcaacctcccaagggtcctcagcctgtgaaaatgcaaccaatcgcagtccctgctattcctgtggatgagattagggaggtgaccaagggttttggtgatgaagctttgattggtgagggatcttttgcagaaaaaacttggggtcccaaaagataggttaggattcccgcgttcaaaaagttggattcta

SEQ ID NO: 35661 - DNA, 271 bp, Zea mays
cggaccgtggcggggatcctaggggagcaggacaacatggtcaccatgcacgatgtgatggacgcgatgcggtctctcgacaactacaaggatgagtcatacttgaggcgtgtcgtgatgccactagaggtactgcttactagctacaagaggcttgttgtgaaggactccgctgtgaatgctatctgctatggtgctaagcttatgattcctgggttgctccgatttgagaatgatattgagaccggggaggaagtggttctcatgacga

SEQ ID NO: 35662 - DNA, 291 bp, Zea mays
gcggtgaccgtgcaccgactgaaatggcgcctctgttccctggttgcgactacgagcactggctcatcgtcatggacaagcccgggggagagggcgccaccaagcagcaaatgatcgattgttacatccagacccttgcgcaggtggtagggagtgaagaggaggcgaagaagaggatatacaatgtgtcctgcgagcgctattttggattcggatgcgaaattgacgaggagacctccaacaaactcgaaggccttccaggggttctttttgtgcttcctgactcttacg

SEQ ID NO: 35663 - DNA, 288 bp, Zea mays
catgatttcactgggatgtgctacccactccttgttagctctgttggtatcattgtctgcttgatcaccaccctttttgctactgatttctttgaagtcaaggctgtgaaagaaattgagcctgcacttaagaagcagctcatcatctccaccgtcctgatgacttttggtattgctctaatcagctggttggcgcttctagctaagttcagcatctacaacttcggtactcagaatgaagtttccaactggggtttgatcttttgtgattcaattgggctgtgggcc

SEQ ID NO: 35664 - DNA, 280 bp, Zea mays
cccacgcgtccgtcgacaagcacgcgcggacggcgctggccttcgtgacgctcaagcacgacggggagcgcgagttcatgttctacaggaacccgagcgcggacatgctgctgacggaggcggagctggacctgggcctggtgcggcgcgccagggtgttccactacggctccatctcgctcatctccgagccgtgccgctcggcgcacatggccgccatgcgcgcagcaaggccgcgggcgtgctctgctcctacgaccccaacgtgcgcctcgcgctc

SEQ ID NO: 35665 - DNA, 288 bp, Zea mays
cctgagacagtcagacgtcccgtgctcgtcatcaccacccacatctcagttcaccccggcgtcgtcctcttcccccggcgctactctcccgctccacgttccaaaggaaagatggcgtcccatattgttggataccctcgcatgggccccaagagagagctcaagtttgccttggagtctttctgggatgggaagagcagcgccgatgatttagagaaagttgcctctgacctcaggtctagcatctggaagcaaatgtcagaagctgggatcaagtacattcccagc

SEQ ID NO: 35666 - DNA, 282 bp, Zea mays
aaatttagtgggatgactctattccacatattaatactaaacaactaactatgagaatgaggtggtgatggattaactcacttcattccacaaaccaaacaaaaaaagtgagtgagaagatgatggactatatcattcctcaaaccaaacactccattaatgagctcagctatcggctgccctcagcagctgcagcagagacaggaacaagttgatgacgtcgaggtagagtgaaacagctgcccatatgtattgatcatatgtgtggcgcttgatgatatt

SEQ ID NO: 35667 - DNA, 284 bp, Zea mays
ttattgtccatctcctctccaaccaattgcctcagctggtcagcactctgaaagcagcgctgcatacttttcttggcctacatctactctaatgcacgggtcagctgaaggccgtgctaattactttgggaacctacagaagggtgtactaccaggacatcttggtcgcttgccaaagggccagcaagctaccaccttacttgatttaatgattataagagcattccacagcaagatcctccgccggtttagtcttggtacagcaataggctttagaatcagga

SEQ ID NO: 35668 - DNA, 135 bp, Zea mays
ccgtccacgcgtccgcggacgcgtggcgacctgggcacctaccgccagctcttccaccctgagcagctcatcagtgggaaagaggatgccgacaacaactttgcccgtggtcactacaccattggcaaggagatt

SEQ ID NO: 35669 - DNA, 286 bp, Zea mays
caactctttagggcgcttggtgtattcgcacagaggaaaatcaacctcacaaagatcgaaagtcgtccacacaaggagaggcctcttcgagtatctgatgactgttcctcactcttaaagaattttgattacctcttttacgttgaccttgaagcatcaatggctgatccaaagattcagaatgctcttggaaatctgaaggagtttgcaacctttttaagagtcctcggaagctatcctacaaatgtgaatgaaccttagaaaacactgcagattacatgatgga

SEQ ID NO: 35670 - DNA, 289 bp, Zea mays
gttgcttattttgattctcgtgctcttgatatgtattttcaagagaaagggacacactgaacctaccacagcttcgtccaaaggaaaggctattgcaggtggcagggcagaaaaccctaaggaagactacagcagtggtgttcaggaagcagagaggaataaattggttttcttcgagggcagttcatttaattttgacttggaggatttgttgagagcttctgctgaagtccttggcaaaggaagttatggaactacctacaaagctgttcttgatgatgcaaccata

SEQ ID NO: 35671 - DNA, 286 bp, Zea mays
caagaactcctcctacttcgtggagtggatccccaacaacgtcaagtcgacggtgtgcgacatcccgcccacggggctgaagatggcgtccaccttcatcggcaactctacctccatccaggagatgttccggcgcgtgagcgagcagttcaccgccatgttccgcaggaaggccttcttgcactggtacacgggggagggcatggacgagatggagttcaccgaggccgagagcaacatgaacgacctcgtgtccgagtaccagcagtaccaggacgccaccgcc

SEQ ID NO: 35672 - DNA, 283 bp, Zea mays
acacactcgggtagagctatctcgagctagctagctgctgtaagccgttgccatggccaaaatggtattgctctgcgtgctcgtctccttcctcctgatgcccttggcctccctagccctgacgcaggacttctgcgtcgccgacctgacctgcagcgacacgccggctgggtacccgtgcaagtccagcgtcaccgccaacgacttctacttccacggcctggccggccagggcaaaataaacccactcatcaaggccgccgtctacccggccttcgtgggc

SEQ ID NO: 35673 - DNA, 282 bp, Zea mays
cccacgcgtccgcccacgcgtccgacaaaccctcctccagtgctcttttcttctagccgccgccgcaaccgcttgctagcgctctgcgtctcatcctcgcgtccgtggaaggtcgtctcgacatggcctccgagacggagacgttcgccttccaggcggagatcaaccagctgctatcgctcatcatcaacaccttctactccaacaaggagatcttccttagggagctcatttcaaactcctccgatgccttggataagatcaggttcgagagtttgacgg

SEQ ID NO: 35674 - DNA, 277 bp, Zea mays
tctcctcgcattttccttgcaaccgattgcctatccccctcccaaccaaagaccgatggcgcccaaggccgagaagaagcccgcggcgaagaagccggcggaggaggagcccgcggccgagaagacgaccgccgggaagaagcccaaggcggagaagcgggtccccgcgggcaagtccgccggcaaggagggcggcgagggcaagcgtggcaagaagaagggcaagaagagcgtggagacgtacaagatctacatcttcaaggtgctgaagcaggtg

SEQ ID NO: 35675 - DNA, 272 bp, Zea mays
gcgctactcctcatcctgctcgcttcgcggccaagaggaggatgctccggttggttaacgtcagcgtcagtgcagcgccgaggcgctgcgctccgacggcgctggcgcgaccggcggtgccgcggtctgtgccggtgcgcgtcgcctacgagctgcaacaggccggccaccgctacctcgacgtcagaacggagggcgagtttagcgccggccaccctgaatgacctgtgaacatcccatacatgaacaaaaccggctcaggttaaaaagaa

SEQ ID NO: 35676 - DNA, 273 bp, Zea mays
cgagaactacgtcttcgggtgcttttcgaacactggggaggttcaaaatgtgaagctcatccgtgacaagaattcagggcagcttcagggttatggttttgttgagtttacaagccgtgcagctgcagaacgagttcttcagacatacaatggacaaatgatgccaaatgttgacttgacatttcggctgaattgggccagtgctggtgaaaagcgcgatgatactcctgaatatactatttttgttggggatttggctgcagatgttacaga

SEQ ID NO: 35677 - DNA, 276 bp, Zea mays
gcggacaagaaggagaaggcgctcgcggacaggaagaaggcgctcgagagccgcaagatcatcttcgcccgcgccaagcagtacgccgaggagtaccacgcccaggagaaggagcttgtgcagctcaagcgtgaggcccggttgaagggtgggttctatgtgagcccagaggccaagcttctgtttgtggttcgcatccgtggtatcaatgccatgcaccccaagacccgcaagatcttgcagctcctgcgattgaagcagatcttcaacggtgtc

SEQ ID NO: 35678 - DNA, 279 bp, Zea mays
cagacgcgtccgcccacgcgtccgtctttagcagcacttctttcagcaaaaggttcctctcatagcaattcacattcacggatgatattccttggcatcaacttttatgggaatgattttctactgtctggaggtagtggtggcggtgctatcaccggaagagattttgttcatttacttgagaagtacaagccatctttgcagtgggatgaaaaaagtttggagcacttctttatctattcagatgaaggcgcgaagcatgctgtattttatccaaca

SEQ ID NO: 35679 - DNA, 277 bp, Zea mays
cagcacgctggcgacccacgcgtccgcccacgcgtccgcccacgcgtccggcaagctcgtgaaggtcaaggctacgtacaagctctcggacgccgccaagaaggcatcccccaagaccaaggctaagccggcaaaggccgccgctgccaagaccaccgcccccaagccggccaaggccgccgccgccaagtcaaagaaggcagcggctgccaagccaaagaaggccgctgctgctgggaccaagcgcaaagtgcccgagaagaaggtcgtggcgaac

SEQ ID NO: 35680 - DNA, 274 bp, Zea mays
gcacgtaccgccagctcttccaccctgagcagctcatcagtggcaaggaggatgcagctaacaatttcgcccgtggccattacacaattggcaaggagattgttgatctgtgccttgaccgtatccgcaagcttgctgacaactgcaccggcctccagggcttcctggtcttcaatgccgttggtggtggcaccggctctggccttggttctctcctccttgagcgcctgtctgtggagtacggcaagaaatccaagctgggcttcactgtgta

SEQ ID NO: 35681 - DNA, 272 bp, Zea mays
cggacgcgtgggtgcggagggtgcagcaactctccgaatgaagcaggatatgcaaaatgagaacaaaaatatgtactgacttaatagcatatagaataaaattcacccctcatccacatgctggtgataattggtgtatctatccgagctatgactatgctcattgcatggtggattctcttgaaaacatcacacattcgctgtgcacacttgagtttgacatacgccgcccttcatactactggctacttgttgccttgggcctttatcaa

SEQ ID NO: 35682 - DNA, 271 bp, Zea mays
cggacgctgggtaccgatggaggtgatcctccggaagcagaggctgctcgcgaatccgtccatgaagcaggccatgctgttcccgcagcccgcccaggctggggacgccttccaccagatcctgaacgggctggcgcggaagctgccgcacggcgaggacgtgttcctcaagcccgggcagaaggtgctcaactggaccgagggcccccgtggtgacctgaagccatggtaggtgcactggaaaaaaaaatgccatggcaccgtcagcgtg

SEQ ID NO: 35683 - DNA, 263 bp, Zea mays
acgcgtccgcggacggtgggcgaccgtgggatcgaagccgagatacggccatggactccaccggcaccggagcaaggggtaaggggaagaagagagcggccgggcgcaaggtcggcgggccaaggaagaagtcggtgtcgaggtccgtgaaggccgggctccagttccccgtcggccgcatcgggcgctacttgaagaagggccgctacgcgcacgtgtcggcaccggcgcccccgtctacctcgccgctgtcctcggatacc

SEQ ID NO: 35684 - DNA, 272 bp, Zea mays
ggacccgaagccatctttagcctgaagtacatgctcttgtgtaagataatggttaaccaagctgacgatgttgcaggaataatctcgtctaaggctggcctaaaatatctgggtcctgatgttgatgctatgaaggctgttgctgatgcatactctaaaagatctctcaagtattttgaaactgcccttcgtgattataagtcccagctggaggaggaccctattgtccacaggcatctttcttctctgtatgatacactgctggagcagaa

SEQ ID NO: 35685 - DNA, 280 bp, Zea mays
tgctgttaagcaaatctatggcgagaaagtcctcattcagtttgaggacttcgcgaatcataatgcttttaatttgcttgcaaaatatagcaagagccatcttgttttcaatgatgacatccagggcacagcatcagtggtccttgcaggtttgttagcggcactcaaggtggttggtgggaccttggcagagcacacttatttattccttggtgctggggaggctggaactggtattgcagaactcattgctcttgagatttcaaaacagacgtcggct

SEQ ID NO: 35686 - DNA, 279 bp, Zea mays
ccgagagtatcgaagctgtcaggatgtccaagcgcgccggatggggagtgatggcaagccacaggagtggcgagacagaggacaccttcattgctgacctctcagttggcctgtctacgggccaaatcaagacgggagccccttgccggtctgagcgcctggccaaatacaaccagctgctcaggatcgaggaagagctcggtgatgccgcggtctacgccggagcaaagttcagggcaccagtggagccctactaagaaaggaagaggatgaggatgt

SEQ ID NO: 35687 - DNA, 278 bp, Zea mays
cccacgcgtccgcgcgtccgctagccctagccgccgtccgccgacttcatcgtcgccgtcgtctagacctcttcacgcactggaaagcttaaagtccgacatcaatggcgaacatcatcctgatctcatcatgtgccggaagcagcctggcatcgcgattggccgcctttgcgagaaatgtgatggcaagtgtgttgtctgcgactcgtacgtgcgcccatgtacgcttgtccgggtctgcgacgagtgcaattatggttccttccagggaaggtgtg

SEQ ID NO: 35688 - DNA, 278 bp, Zea mays
acccgtcagcccctctcgtttttcatccgccttcgcctccaaccgcgtgcgctccacgcctcctccaggaaagcgagagcttctgcataagaacaacaaatcaaaagcgtgatcagctcggtgccaacaaaacctcaacaaccaagtttcatgtctgatctcgacgtccagcttccatctgcctttgatccgtttgctgaggcaaatgctgaggactctggtgctggtcctggaacgaaggattatgtgcatgtgcgcatccagcagcgcaacggcag

SEQ ID NO: 35689 - DNA, 276 bp, Zea mays
ctgggtttagcgccgaactaatgccaaaaggacatgagaaggaaagccaggctaagattaagcgctacatgacaatgatggattccatgactgatgcagagcttgacagcacaaatcctaagctgatgactgaatcacggatcattcggattgcacgggggtctggtcgtcctgtcagggatgtcatcgacatgctggaagagtataagcggcttgctaaaatctggggcaagatgaagggtctcaagatcccaaagaaaggggagatgagtgcac

SEQ ID NO: 35690 - DNA, 277 bp, Zea mays
gttgttttgcagatgagctcatcaagaatgctgcctacatcggcacccctggcaagggtatccttgctgctgatgagtcaactggcaccattggcaagcgcctttccagcatcaatgtcgagaacgtggaggagaaccggcgggctctccgtgagctcctgttctgctgccctggtgccctccagtacatcagcggtgtgatcctcttcgaggagaccctctaccagaagaccaaggatggcaagccttttgtcgatgtcctcaaggagggaggcgt

SEQ ID NO: 35691 - DNA, 275 bp, Zea mays
gagaagcgcactgcggccatggacgccaccggcactggagctggagggaaggcgaagaagggagcggccggtcgcaaggccggcgggccgaggaagaagtcggtgacgaggtccgtgaaggccgggctccagttccccgtcggccgcatcgggcgctacctcaagaagggccgctacgcgcacgcgtcggcagcggtgcccccgtctacctcgcggccgtcctggagtacctcgccgctgaggtcctggagctcgccggcaacgctgccaaggac

SEQ ID NO: 35692 - DNA, 273 bp, Zea mays
cagcagctattgtggtcgtccctcagccgcgtcgcaccgcatcgcattctacgattcgaagctctctctgctcgcagccatggcgaagaattacccaaccgtgagcgccgagtacagcgaggccgtcgagaaggccaggcgcaagctccgcgccctcatcgccgagaagagctgcgcgcccctcatgctccgcctcgcgtggcactccgcggggacgttcgacgtgtcgtcgaggaccggcggtcgcttcggtactatgaagtgcccggcgga

SEQ ID NO: 35693 - DNA, 272 bp, Zea mays
agattggaaagctgctgaccttgataagtcaatgaagaggagcaatgataagcagctcaaaattgagcatgaattatgtgagagggtcataggccatcttgaggaagggaaagatgtccgtttaggagattggaaagctgctgacattgagatcttgaatacattccagctactttcagctaagccagttgtctatttggtgaatatgagtgagaaggatttccagagaaaaaagaacaagtttctacccaagatacatgcttgggtgcagg

SEQ ID NO: 35694 - DNA, 273 bp, Zea mays
cttcgccacgaacaaaagcgcatcgatctcgctgtcgtcactcctcgtcacccagccacgaacagaggcaccacccagcatggccctgcaggcggcgctcctcccatccaccctctcatccgtccccaagaagtgcagcctcgccgtcgcggcgaaggacacggcattccttagcgtatcccagaagaaggtgcaggcggcgtcgctgtcggtgagaacgcgggtggcgacgacggcgcctgtggccacgccggggtccagcacggcggccaa

SEQ ID NO: 35695 - DNA, 275 bp, Zea mays
ctctttcgcgacccatttgatcgattcctgatggcgcccaaggccgagaagaagcccgcggagaagaagccggcggaggagaaggccgagaagaagccaagggcggagaagcgcgtgccgagtaaggagggcggcgagaagaagggaaagaagaaggcgaagaagagcgttgagacgtacaagatctacatcttcaaggtgctcaagcaggtgcacccggacattggcatctcgtccaaggccatgtccatcatgaactccttcatcaacgacat

SEQ ID NO: 35696 - DNA, 272 bp, Zea mays
cccacgcgtccgcaggtattcgcagtcgaccgtgtcctcggagcacgatgaaggttgttgctgcctacctgcttgctgtcctcgctgggaatgccagcccctccgctgaggatttgactggcattctggagtcagttggctgtgaagttgacaatgaaaggatggaactgctgctgtcccaactgagcggtaaggacatcaccgagctcattgccgcgggcagagagaagtttgcttcagtcccatgtggcggcggcggtgtggctgttgcg

SEQ ID NO: 35697 - DNA, 272 bp, Zea mays
caccccccgagctcagcttagctccactccagctccaatcacagtcgtgaccagagcgcgagagctagctagagggccgtgaaaatgccgatcaataggatcgccctggggagccaccaggaggtgtaccacccgggcgccctcaaggcggcgttcgctgagttcatctccaccctcatcttcgtcttcgccggccagggctccggcatggccttcagcaagctgaccggcggcggcccgacgaccccggcgggcctgatcgcggcggcggt

SEQ ID NO: 35698 - DNA, 268 bp, Zea mays
cggacgcgtggtcaggtttcgggaggatcagcgagctcgtggcagggtccccctccagagcgaggatgtccagctcgtcaccgcatgagacatgccagtgagcagcagtttcgccggttctttctttatgaagtggatgcaattagaaaggcgtgtgccagcttggaagagggctaccttcctccagttacattcattgtggtgcaaaagcgccatcacacacggttttgtcctaaagatcatcattcacacaaacagacagatcgac

SEQ ID NO: 35699 - DNA, 269 bp, Zea mays
gttcttgcagaggatcgcgtacctgaacgtgggtatctacccgttcacgtccatcttcctgatcgtctactgcttcctgccggcgctgtcgctgttctcggggcagttcatcgtgaagacgctgaacgtgacgttcctgacgtacctgctggtgatcacgctgacgctgtgcctgctggcggtgctggagatcaagtggtcggggatcagtctggaggagtggtggcggaacgagcagttctggctgatcggcggcacgagcgcgcacc

SEQ ID NO: 35700 - DNA, 269 bp, Zea mays
cccacgcgtccggtgggctcgtccgagtctgccctgctcgccaagctgggtatccgccccttctcgtacggcctccaggtcaccagtgtctacgaggatgggtccgtgttcagccctgaggtgcttgacctttccgaggaggacctgattgagaagtttgccactggtgtctccatggttgcctccctgtcactggcgatctcgtacccgacccttgctgctgtgccccacatgttcatcaatgggtacaagaatgtgcttgctgttgg

SEQ ID NO: 35701 - DNA, 266 bp, Zea mays
ctcgcggaccgcgacctcttcgcgcgccccttccgcaagaagggctacatcccgctcaccacctacctccgcacctacaagatcggcgattacgtcgatgtcaaggtgaacggcgccgtccacaaggggatgccgcacaagttctaccacggccgcaccggtcgcgtctggaacgtcaccaagcgcgccatcggcgtcgaggtcaacaagcaggtcaatgggcgcatcatcaggaagcgtatccatgtccgtgtggagcatgtgca

SEQ ID NO: 35702 - DNA, 262 bp, Zea mays
ggaccgtggcggacgcgtgggggctttcacaaagtatgctctcaaatatgaaaatgatgctggcaagacggaaattcagatgcagcttgagaagatgaagaaatatgcttctgttatccgtgtcattgctcatacccagattaggaagatgaagggtttgaaacagaagaaggctcacctgatggagattcaggtcaatggtggtaccattgctgacaaggtggactacggctacaaattttttgagaaagaggtccctgtt

SEQ ID NO: 35703 - DNA, 265 bp, Zea mays
tcactctgctggtctccctcttccacctctggtcttggccatggcctccagcgcctcccggttcatcaagtgcgtcacagtgggggacggcgccgtgggaaagacctgcatgctcatctgctacaccagcaacaagttccccactgattacatacccactgtcttcgataacttcagtgcaaacgtggtagtcgacggtaccacggtgaatttgggcctttgggatactgcagggcaggaagattacaacagactgaggccactg

SEQ ID NO: 35704 - DNA, 264 bp, Zea mays
cccacgcgtccgggggtttcacacatagcttcgtcgatttgaatttgatgtactaatggagtctaagggtggcaaaaagtctagcagtagtcgttctatgatgtatgaagctccccttggctacagcattgaggacgttcgacctgccggaggcgtgaagaagttccagtctgctgcttactccaactgcgcgaagaagccatcctgatatcccttttggcttcctcattctagtagtttaggatttcttttctgacactttga

SEQ ID NO: 35705 - DNA, 262 bp, Zea mays
ggaccgtggcggacgcgtgggtgcagctggaatggtgaagaagagtggtgctagtcttcctgttggtgcaggggtgggaaggaagaccggttggctctcaaggtgggtgagctcatgctcagatgatgcgaagaccgtctttgccgctgtgaccgtgccactgctctataaatcatccctagctgagccgaggtccatcccatccaggtcaatgttcccaacatttgatgttggtgatcggatccttgctgagaagatttcg

SEQ ID NO: 35706 - DNA, 269 bp, Zea mays
caccaccggcgtcacctccaaagatgtcgttgtagacagcgacgccggcgtctacgttcgcctgtacctcccggacacggctacggggtccgatgattccaagaagctcccggtgctagtctacttccacggcggcggctttgtcacccactcggcagcgtctccgccctatcagtccttcctcaacaccctggccgcgaaggccggcctgctcatcgtctccgtgaactaccgcctcgcgccagagcacccgctgcctgcaggctacg

SEQ ID NO: 35707 - DNA, 266 bp, Zea mays
cccacgcgtccggaagtcaccaacgcacccagcacagacataagaccctcgccggacgctcgctctcgccggggacaactcaatcacgaggccaggatggcccgctacgatcgcgcgatcaccgtgttctcacccgacggccacctcttccaggtcgagtacgccctcgaggccgtccgcaagggcaacgccgctgtcggcgtccgcggcgtcgacaccgtcgtcctcggcgtcgagaagaagtccacccccaagctccaggactc

SEQ ID NO: 35708 - DNA, 267 bp, Zea mays
cccacgcgtccgcgcctgccgctgcttcggctacatggtctccaagaagaagtacatctacaccatcgacgacgactgcttcgttgccaaggacccatcaggcaaggatatcaatgctcttgagcagcacatcaagaacctcctcagcccgtccacaccgttcttcttcaacaccctgtacgacccctaccgtgagggtgctgactttgtgcgtggataccccttcagcctcagggagggtgcccacactgctgtctcccacggcct

SEQ ID NO: 35709 - DNA, 265 bp, Zea mays
cccacgcgtccgcccacgcgtccggtgtaattcatgcggaagttgaagtttgtgatagtgattttcactctccagtaatccttgtagttgagcttcacatgccagtggattcttatcgggcaccatcaggtttggttcggtagaaaactgcaagaagttcaaggagttggttgaggagattgctgagtcacttacagagaacgaggacaaggaaggtcaagatggctcttccacggccggattgctggagaagctcactgtgagc

SEQ ID NO: 35710 - DNA, 266 bp, Zea mays
cgactccgccgccgctccgcctcagcgcatcgcccgccgcgacctcatcgatcaccttcagctttcaatcatggcggacgtcgatgtcgaaccggaggttgccgccggagctcccaagaagaggacgttccgcaagtacagctaccgcggcgtcgacctagatgcgcttctcgacatgtccacggacgaccttgtccagcttttccccgcgcgcgccaggagaaggttccagaggggtctgaagaggaagcccatggcgctcatca

SEQ ID NO: 35711 - DNA, 253 bp, Zea mays
ggcgtcgtgtaccgggacctcaagccggagaacgtcctcatccaggacagctgccacatcatgctcgtcgacttcgacctctccacgcggctcccggcgcatcgcatgagccggacgctccggctaccagtcccaagccggcgcctccggtcgccgcgccgtccccgatccgcggcagatcaaggataccggcgggctccgccctgtgcttcccattccgcatcaccggcagctctgcgaacctgccgcggac

SEQ ID NO: 35712 - DNA, 279 bp, Zea mays
gcctgagggatgccaagatggacaagagcaccgtccatgacgttgtacttgttggtggctccactaggatccccagggtgcagcaactgctccaggacttcttcaacggcaaggagctgtgcaagaacatcaaccccgatgaggctgtcgcctatggtgctgctgtccaggctgccatcctgagcggtgagggcaatgagaaggtgcaggacctgcttctgctggacgtcacccctctgtccctgggtctggagactgctggaggagttatgacagtgc

SEQ ID NO: 35713 - DNA, 248 bp, Zea mays
tcttcctcgagttctcctcaaccaaattcaaagtcacagcggcgaaactctcggcgatgtctggccgcggcaagggcgggaagggtctgggcaagggcggcgccaagcgccaccgcagagtgctgcgtgacaacatccagggcatcaccaagccggcgatccgcaggttggcgaggaggggcggcgtcaagcgcatctccgggctcatctacgaggagacccgcggcgtgctcaagatcttcctcgag

SEQ ID NO: 35714 - DNA, 134 bp, Zea mays
cggacgcgtgggcggacgcgtggggctggggtgttgctgtgctggtgggtgtgccacataaggacgctgaactcaagacccacccgatgaacttcctgaacgaaaggaccctgaaggggaccttctttggcaac

SEQ ID NO: 35715 - DNA, 130 bp, Zea mays
gtcgaacgatgtcgggcttgacgctgaccactgcaaggtgcttgtgaacattgagcagcagtcccctgatattgctcatggtgtgcacggccacttcaccaagcgcgccgaggagattggagctggtgac

SEQ ID NO: 35716 - DNA, 125 bp, Zea mays
cggacgcgtggggggcggctcacgctgaagaccacggacatggagactgtgtacgagctcgggggaaagatacttgaggctcttgtgaaggagaaagtgcagagtggagatgtaattgcgcttga

SEQ ID NO: 35717 - DNA, 271 bp, Zea mays
gtggtgatgagctgaccagcctcaaggactacgtgaccaggatgaaggagggacagaatgacatctactatatcactggtgagagcaagaaggcagtggagaactcccccttccttgagaagctgaagaagaggggctatgaggttctgtacatggttgatgccattgacgagtatgctgttggtcagctcaaggagtttgagggcaagaagcttgtctctgccaccaaggagggtctgaagcttgatgagactgaggacgagaagaagag

SEQ ID NO: 35718 - DNA, 127 bp, Zea mays
ggaccgtggttcatgtcgcaagccttctgcatgatgatgttcttgatgatgctgatactaggcgtggtatcagttcattgaatctcatcatggggaacaagctttctgtgctggctggtgatttcct

SEQ ID NO: 35719 - DNA, 277 bp, Zea mays
gatcaagatcccatattacgttatggtggtatgtatgcattggctctagcctacaggggaactgccaacaacaaagccatccaccagctgctgcattttgctgtatcagatgtcagtgatgatgttcggaggactgcagttatggctcttggttttgttctgtacaatgagcccgagcagactccaagaattgtatccctgctctctgaatcatacaacccacatgttcgctatggtgcagccttagctgttgggatatcatgtgcagggtctggat

SEQ ID NO: 35720 - DNA, 262 bp, Zea mays
cccacgcgtccgggtagagggagaggagaggagaggagaggagaggagaggttgggtctgggacaccatggctccgatgaagctgtacggggcggtgatgtcgtggaacgtgacgaggtgcgcaacggcgctggaggaggctggctccgactacgagatcgtgcccatcaacttcgccaccgccgagcacaagagccccgagcacctcgtccgcaacccgtttggtcaggttccagctctgcaggatggtgacttgtacctc

SEQ ID NO: 35721 - DNA, 265 bp, Zea mays
agcaccttcccaaaaaatcccccattttcttcgaggcgaggagagcgtgaaagacagggcaccggcagcgacgatgtcggggcgcggcaagggcggcaaaggtctgggcaagggcggagcaaagcgccaccggaaggtgctccgtgacaacatccagggcatcaccaagcccgccatccggaggctggctcggaggggcggcgtgaagcgcatttcggggcttatctacgtagagacccgcggcgtcctcaagatcttcctcgag

SEQ ID NO: 35722 - DNA, 249 bp, Zea mays
cccacgcgtccgcatcgaagaagatagagttggatcacaaggacatggtccatgattctgccatcgactactatggcaagcgccttgccactgcctcttcagacttcaccgtgaagatcgtcaacattggtgctgcaaatgccccatcccaggtccttgcaacgctaagtggccactatggtcctgtgtggcgtgttgcttgggcccatccaaagtatggtgcaatccttgcatcgtgcagttatgatg

SEQ ID NO: 35723 - DNA, 276 bp, Zea mays
accacgagcagctgtccgtggccgaaatcaccaacagcgccttcgagccatcctccatgatggccaagtgcgacccccgccatggcaagtacatggcatgctgcctcatgtaccgtggtgatgtggttcccaaggacgtgaacgctgctgtggccacaatcaagaccaagcgcaccatccagttcgtggactggtgcccgactggcttcaagtgcggaatcaactaccagcctcccagcgtcgtccccggcggtgacctggccaaggtgcagcgtg

SEQ ID NO: 35724 - DNA, 271 bp, Zea mays
cggaccgtggatgctgactacgacccgatgactcatgttgtgaagagaaatcaacggaacacaacatatgtggatgctgtgatgacggttccgcttggtgccatgctgcctgtgagcgggataaatgttgcattcaaccgcgatgtgctggggcctgctatgttcccaggcctgcgtctacgaaacgaagggaagcacagatgggatacccttgaagacatatggaatggcttatgtgctaaagtagtctgcgacagcttgggatatggtg

SEQ ID NO: 35725 - DNA, 272 bp, Zea mays
gttttgttggtgatggcccaaaaagttaccagatctggctgggtggaacaccaaaccagagtacgctagcagaatcatttatggacaaagtgaagcttgatgacatcgagaaggttttggaacctctctttacctattggaatggcacacgccaggaaggcgaatcttttggaagcttcacaaaccgaacaggattcgacaaattgaaagaggtagtgaataagtgggcagagtcaccatcagccgcatgaagatttcgctttcgttggata

SEQ ID NO: 35726 - DNA, 276 bp, Zea mays
attatttcaggttgctaatgcaatggctgctaaagcaaaacttgtactccgtgaactaaaatctgttaaagcagatctagcctttgcgaacagctgatgcgctcagctggaggaagagaacaggctcttgcgagaaacaaagcagaaagggagcaaaactgaagaagacgatgacttggtaatcttccccccccccccctgatcaaacgtatctgttgtcaggttcaatgtctttttcgtggattacatgcatataccttggccttcaattcatca

SEQ ID NO: 35727 - DNA, 275 bp, Zea mays
cggacgcgtgggcctcccttggtcacagcgaacactgtcctttccatcctttccgtggattatccggttgacgaaggtctcctgctatgtttctgatgatggtgctgcaatgcttacgtttgaagcattgtctgaaacatctgaatttgcaaagaaatgggttcctttctccaaaaagtttaatattgagcctcgtgctcctgagtggtacttccaacagaagatagactacctgaaagacaaggttgccgcttcatttgttagggagaggaggg

SEQ ID NO: 35728 - DNA, 275 bp, Zea mays
gcaagaaaatcctgaggatgttccaacaggtgagcttccaaggaatatgctgctttctgtagatagacacctagttcagactatcgttccagggaccagattaactgtcgttggcatctacagcgtgtaccaagcttccacaacccagaagggtgcagttggtgttaaacaggcttacattagagttgtaggtttggagcaatctcgagacaataactcaaatggtccctcaaattttactctcgatgaggaaatggaattcaaagaatttgcac

SEQ ID NO: 35729 - DNA, 279 bp, Zea mays
cccacgcgtccgagaggtttgagaaggaggctgctgaaatgaacaagcggtccttcaagtacgcatgggtgctcgacaagctcaaggctgagcgtgagagaggtatcaccattgatatcgctctgtggaagtttgagaccaccaagtactactgcacggtcattgatgcccctggacaccgtgacttcatcaagaacatgatcactggtacctcccaggctgactgtgctgtccttatcattgactccaccactggtggttttgaggctggtatctcca

SEQ ID NO: 35730 - DNA, 272 bp, Zea mays
cccacgcgtccggtctctgcatcagcttcccgtgaacaaatgagctgtacctatgatgcattgaagagctatacaccagaaatggttgaagttctcattgacagtgtgaggaatccagcattcctcgattgggaggtcaaagagcagctccagaacataaaatctgaaatagctgatgcgtctgctaatcctcaaggtctacttctggaggcccttcattcggttggatattccggggcactggcaaaacctttgatggcttcagaatctgc

SEQ ID NO: 35731 - DNA, 268 bp, Zea mays
ggtacactagcccatgctttgctctccacagtcagtgttatcgtctacttctgctgcttcgttatgggatttggtcccatccccaacattttatgtgcagagatctttccaaccagggttcgtggcctctgtattgccatttgtgcctttacattctggatcggagatatcatcgtcacgtggagtcgtgctgtgatggcgtatgctattggactggcgggtgttttcagcatatatgcagtcgtatgcttgatttccgttgtgttcg

SEQ ID NO: 35732 - DNA, 268 bp, Zea mays
cagcttagctgcactccggctccaatcacagtcgtgaccagagcgcgagagctagctagagggccgtgaaaatgccgatcgataggatcgccctgtggagccaccaggaggtgtaccacccgggcgcgctcaaggcggcgttcgctgagttcatctccaccctcatcttcgtcttcgccggccagggctccggcatggccttcagcaagctgaccggcggcggcccgacgaccccggcgggcctgatcgcggcggcgggtggcgcacg

SEQ ID NO: 35733 - DNA, 269 bp, Zea mays
ccagtttcagatccttcgatcgcgcagccgcccgccgctctcgcagctctctccgatggcccgcacgaagcagacggcgaggaagtcaactggcggcaaggcgccgcggaagcagctggccaccaaggcggcgcgcaagtcggctccggccaccggcggcgtgaagaagccgcacaggttccgccccggcaccgtcgctctccgcgagatccgcaagtaccagaagagcacggagctggtcatccggaagctgcgcttccagcggctgg

SEQ ID NO: 35734 - DNA, 267 bp, Zea mays
caaggagatcatcgcccagggtgacaaacgaggaggtccagaaggctgcagctgctttgaggggatctgaccaccgccgttctaccactgtttctgctagattggatgctcagcagaaaaagctcaaccttcctgtccttcccacaaccacaattggttcattccctcagactgtggaactcaggagggttcgccgtgaatacaaggcaaagaagatcaccgaggacgaatacatcagtgccatcaaggaagaaatcagcaaggttg

SEQ ID NO: 35735 - DNA, 266 bp, Zea mays
cggacgcgtgggatgctgactacgacccgatgactcatgttgtgaagagaaatcaacggaacacaacatatgcggatgctgtgatgacggttccgcttggtgccatgctgcctgtgagcgggataaatgttgcattcaaccgcgatgtgctggggcctgctatgttcccaggcctgcgtctacgaaacgaagggaagcacagatgggatacccttgaagacatatggaatggcttatgtgctaaagtagtctgcgacagcttggga

SEQ ID NO: 35736 - DNA, 261 bp, Zea mays
gcattctttaaaagattggatagctttcagccatgtgacatacatgaactgaaacctggaacacacttctttgctgtctacggtgacaacttcttcaagagcgctagttatactatagaggttgtatgtggtgaatcttttcctgccgaaaaggagatgctacgaaatgtggaggccaagatactcacaaaacgagctgaactttccaaatttgagtcagagtatagggaggttttggcgaagttcactgaaatgaccagc

SEQ ID NO: 35737 - DNA, 264 bp, Zea mays
  unsure (1)..(264): unsure at all n locations
cccacgcgtccggcatctaacatggattacgacgaggagatcaatgctgtgctcaagaaggtggagcctaatgctcacaagatagtggaacatcgcatgaagtatgagaggttgagaaaagagagggaggaaaagagagcgcactngtatcggcttcgtcaacgtgcagaggcgcaggctgcttacgacaaggccaagaggaaggagcaatcgtcaagtcgctcatcaggaggtgcatctcccagaggctttccatgagggatg

SEQ ID NO: 35738 - DNA, 263 bp, Zea mays
cggacgcgtggctagcgccggcgcctccatttcgttttcctcactctctcctccagctcagggtccggcggacaagggaaggcaagatgtacaccgcgaggaagaagatccagaaggagaagggtcttgagccctccgagttcgaggactccgttgcccaggctttctttgatctggagaacgggaaccaggagctcaagagcgacctcaaggacctgtacatcaacaatgctatccagatggatgttaccgggagtaggaag

SEQ ID NO: 35739 - DNA, 264 bp, Zea mays
cggacgcgtgggcggacgcgtggggtttgcaacaactatctaatcacaagatatgatgggacaataattgatgcaaaaccatggagttttggtggtgaaacaagagcattatgggatggttcagatttggtggattacaatgctatggcacctaaaggctcagagaacaactctgatcgggtgtggagaatgctaagcaagcctctagaaaaaggtgtaagagaaaattttggtgaagtgcttgaacgacgaaatccccttgct

SEQ ID NO: 35740 - DNA, 264 bp, Zea mays
cccacgcgtccgcccacgcgtccggtctgcagcccccaactacccccagcctcggaaggaaccttccagaagcgcaagactctaaggccgtcgccttcccattcttcctcgccgcgggggtcgcctgagatcacataaacaatggtgaaggctgttgctgtgcttggtagcagcgatggtgtcaagggcaccatctttttcacccaagagggagatggccctaccgctgtcaccggaagtgtctctggcctcaagcctggcctc

SEQ ID NO: 35741 - DNA, 261 bp, Zea mays
cccacgcgtccgcaagtacaatgatgagaacaccgtctcctttgtgaccctgaacaaggttggtggattcctgcagcggatggacctgtgccgcaagtacgcctttgggaagatgctcgtgataggctctgagccacccttcaagctgaagggcctttggctcttccgtggccaggatgttcccaagtttgtaatggacgaggtctatgacatggagctctacgagtggaccaaggtggacatctctgatgaggcccagaa

SEQ ID NO: 35742 - DNA, 262 bp, Zea mays
gaagaacttaaaaaagttggtgatcctattgagctgcgcttcaaggaatgggagattagaagttctgctgttagccaactggtatactgcatcaatagcttcagagaagctgcacagtctaccgaccagaagtttgaacacatagacatgtcagaaaagcgaaaggtcattaatgagtgttcggaagcagagacttggctaatagagaaaaagcagcagcaggatgctctgccaaagcatgctaatccggtactccttgctg

SEQ ID NO: 35743 - DNA, 271 bp, Zea mays
gttatgatgagttggcctggcagtaaattgagggagaaagctctggagacagccatgcaacatgttcactatgaggatgagaacactcggtacatttgcattggtcctgtaaacaaggtattaaatatgcttgcttgctggattgaagatccaaactcagaggccttcaaactccacatcccacgagtctatgactacttgtggcttgctgaagatggcatgaagatgcagggttataatggtagccaactttgggatacagctttcatag

SEQ ID NO: 35744 - DNA, 277 bp, Zea mays
cggatcttctctctgattctcaaaggattaaatataccattgagaccttcaccaagggcatccctgatgcacggacttacttgaatactcttcaacagctcagaataaagagtggtcttatagatcatcttggaattgagcctttgatgatggaagctcttgagaagattgagaaggacattaagaaaccacttttgaggagcgacaagaagaacatggccaccctcttggcagagtttgacaagattaacaaaaagcttggctttcggaaggagga

SEQ ID NO: 35745 - DNA, 275 bp, Zea mays
cgctggcgcacgcgccattgttgcggagggctacgcgcgcatcttttttcgcaactccgtggccactggagaggtgtaccctctggagctcacggacgttggggcctggaaggagtgcaagacaggggatgtggtcaccgtggaccttgctaactccgtttttattaaccacacctctggcaaggagtacaagctgaaaccaattggtgatgctggccctgtaattgaggcgggagggatctttgcctacgcccggaagacaggaatgattgcgt

SEQ ID NO: 35746 - DNA, 277 bp, Zea mays
ctaacaagggaaacaaggaagatgcttccagacatcaccttatcagtaacagttcctcacacacttagtttgccagatcagatgagactagcagagctactcgaagaggaaggagctgatataatccaaactgagggtgggaaatgttctagcccgacaaaacctggagtgcttggattgattgaaaaggcaacaccaacactcgccgcagcatactccatctctcgggctgttagtattccagtgatgtgctcgtcagggttaagctcggtgactg

SEQ ID NO: 35747 - DNA, 274 bp, Zea mays
ctcctcaccatttcccaaaccctacccatacccccgccgccgccgccgccatgccgcccaagctcgacccgtcgcaggtggtggaggtcttcgtccgggtgacgggcggcgaggtcggcgcggcgtcgtccctggcgcccaagatcggcccgctcggtctctccccgaagaagatcggcgaggacattgccaaggagacggccaaggactggaagggcctgcgcgtcaccgtcaagctcactgtccagaaccgccaggccaaggtctccgtcgt

SEQ ID NO: 35748 - DNA, 272 bp, Zea mays
gtaggttccaaacctgatgaaagaaattactgttgtcatctcaaacgggagcagtcccattcatgttgatcagaagttaattgatggtccaaaccctaacaatcgccgaaagttgttcataccacttatccttgctgtggagtacttcttggtggtaaaaggaatccggagggcgatccatgcagatatcgcaaacgggaaggtagatgactgggagcagcgttaccgggacttggtgggaagcagggacctcgtagagcagaaaggttcta

SEQ ID NO: 35749 - DNA, 273 bp, Zea mays
cccacgcgtccggagcaggtcaatggtgcaatggctagttgccaggctttgaagttggatgctctggttataattggaggtgtcacttccaacactgacgctgctcaacttgctgagacttttgctgaggcaaagtgtgcaacgaaggttgtaggtgttcctgtaactttgaatggggacctcaagaaccagtttgttgagactactgttggctttgacaccatatgcaaggtgaatgcacaacttatcagcaatgtctgcactgatgctcta

SEQ ID NO: 35750 - DNA, 274 bp, Zea mays
cttcttccaggaggaagaagtctgctaagaaagtcacatataggaggggaaggtaaagagaatgatagcatacttcttccaggaggaagacatgctcctagagaacgtctactattctgaaatgaaggatgctgggttcttcgatgctgactgggattaatccgtggctactgtgctgtatgacccatcccatatgaagtacgctgtatttgtttttattttatctgtgtactctcaacgtagaacaggaaatgtatgtagctagtcgtggtag

SEQ ID NO: 35751 - DNA, 278 bp, Zea mays
cggaccgtgggtactcatggcgccgccgcagccaaagtcgggccttttcgttggcatcaacaagggtactgtcgtcaccaagcgcgagctgcctccccgcccgtgccaccgcatagggaaatcaacgaagagggtgtctatggtcaggggcctgatcagagaggttgctgggtttgctccttatgagaagcgtatcactgagcttctgaatgttggcaaggacaagcgtgccctgaagcttgctaagagaaagcttggaactcacaagagggcaaaga

SEQ ID NO: 35752 - DNA, 270 bp, Zea mays
cccacgcgtccggccatgaacattaccgaaaagggaagagccatagacaccttcacccatgatgcagactgcagggtcttcttgatgagcttaaaagctggaggagtcgctctgaatctcactgtagcatctcatgtgttcctgatggacccttggtggaatccagcggtcgagaaccaagcgcaggaccgtatccaccgaattgggcagttcaagccaatcaagagcactaggtttgtgataaaggacacggttgaagagcgcatactg

SEQ ID NO: 35753 - DNA, 265 bp, Zea mays
cccacgcgtccgcggacgcgtggtggcaaccagaaacttcaagaaagctgccagcttatttttagactcgatttcgactttaccaacttatgagatattcccatatgatacgttcatcttctatacagtcctcacaagtgtcatcacattggatcgtgtatctctgaaacaaaaggtggtagatgcaccagaaatcctggctgtaattggcaaagtacctcacctctccgagtttctcaactccctgtacaactgccagtataag

SEQ ID NO: 35754 - DNA, 262 bp, Zea mays
atctgcaagtttagggttaaagccgctgtacatgcaagagaaacttgacaagggagtgcagttcctggccctgaacagctacccacagttctcacatcgaggtgacaaggtcggactggctcctcattccgactatggcttcctcacaatcctgatgcagagctccccggggctggaagtgatgccccatgaccgtgacacctggacgcccgtccccgcgatccccggggccctccatgtccatgttggggaccacctagaa

SEQ ID NO: 35755 - DNA, 264 bp, Zea mays
ccgactcccagccgtcgtctgctgcgtactccgcctccagtttggtctgtttcttgcaagttgctcttgcggtagttcccccaactgtcaccatgcagaacgaggagggtaagactgtggacctctatgttcccaggaagtgctcggccacaaacaggatcatcactgccaaggaccatgcctctgtccagatcaacattggccacttggatgcgaatggcctgtatgatggtcacttcacaacatttgctctctctgggtttg

SEQ ID NO: 35756 - DNA, 252 bp, Zea mays
gcgcgtaccgtacacagccccgatccgaatcgtcctcctcgcgagcctcgccgatcccccactcccctcccctcgcttcaagatgcagatctttgtgaagaccctcaccggcaagactatcaccctcgaggtggagtcttctgacaccattgacaatgtcaaggctaagatccacgacaaggagggcatccctcctgaccagcagcggcttatcttcgccggcaagcagcttgatgactgcagcacacttgc

SEQ ID NO: 35757 - DNA, 264 bp, Zea mays
ccaacctgttcatttacttgttgggactcctggccgaatacttgatcttaccaggaagggcatttgtgtgttgaaagactgttcaatgcttgtcatggatgaggcagacaagctattagctccagagttccagccttctgtggaggcacttattcatttccttccacctagtcggcagctgttgatgttttcagcaacctttcctgtaactgtcaaggaattcaaagataaatatctgcctagaccttatgtgattaatctaat

SEQ ID NO: 35758 - DNA, 264 bp, Zea mays
gttttcaatgatgacatccagggcacagcatcagtggtccttgcaggtttgttagcagcactcaaggtggttggtaggaccttggcagagcacacttatttattccttggtgctggggaggctggaactggtattgcagaactcattgctcttgagatttcaaaacagacgtcggctccaattgaagagtgccgcaagaagatttggttggtggactcaaagggtttgattgttgactctcgtaaaaactccgttcaatcattc

SEQ ID NO: 35759 - DNA, 258 bp, Zea mays
gcaagatctcgtgaaggagaggctgcccaggttcactcctgagcaggctaaactggtgaagggctcggcagactacatcggtatcaacgagtacacatccagctacatgaaggggcagaagctggtccagctggcgcccagtagctactctgccgattggcaggttcaatatgtttttgcacgcaatggcaaaccgattggaccacaggcgaattctaagtggctctacatcgccccgacggggatgtacgggtgcgt

SEQ ID NO: 35760 - DNA, 257 bp, Zea mays
agggtctgggaaagggcggcgcgaagcactcggaaggtgctccgcgacaacatccagggcatcaccaagccggcgatccggaggctggctaggaggggtggcgtgaagcgcatctcggggctcatctacgaggagacccgcggcgtgctcaagatctttctcgagaacgtcatccgcgacgccgtcacctacaccgagcacgcgcgccgcaagaccgtgaccgccatggacgtcgtctacgcgctcaagcgccaggg

SEQ ID NO: 35761 - DNA, 254 bp, Zea mays
cccacgcgtccggcttgaacttctaaaccagcttgatggttttgaagcttcaaacaaaattaaggttttgatggcaacaaacagaatagacattttggatcaagcccttttgaggcctggccgcatagacaggaagattgagtttccaaatcctaacgaggactcacgtttcgatattctgaagatccattcaaggaaaatgaacttgatgcgtggtatcgatctgaaaaagatcgcagaaaagatgaatgggg

SEQ ID NO: 35762 - DNA, 250 bp, Zea mays
atcgatacagcgtccgcgacgctggcgacctggcgccggtggcatgcaccaccaccgtatcctcttcgacaagtaccatcagggctacttcaccaaggttggcatgcgttacttccataagctccgcaacaagttctactgccccgcggtcaacatcgagcgcctctggtcgatggtgcccgccgacaaggcggcggaggccggcctcgacaaggccccgcagatcgacgtcacgcagttcggctacttc

SEQ ID NO: 35763 - DNA, 298 bp, Zea mays
cactggttgaatcattgagagacagggctgttaggcacatagcttgtggttcaaacttcacttcagctatctgtcaacataagtgggtttctggagctgagcagtcgcaatgtgcctcatgtcggcaaccatttgggttcaccaggaagaggcataattgccataattgtggtcttgtccattgtaatgcgtgcacctcacataaggtcctgagagcagcattggctcctaatcctgcaaaaccataccgtgtttgtgattcatgttttatgaaattgaacagtgcagcatactcaag

SEQ ID NO: 35764 - DNA, 205 bp, Zea mays
ctcaggcgccaagccacgaacattgtctcgacaaggctgggccgcgcagagccaccgctgcgaaatgaaatcgtggagtacatgctcgacgtagactcgcacatgtggagcatgaggaagagcaaggcgaatttcttccgcatcatgagcgtcttgagccccttggtcgcggtgacaaagtggttcgatcagatctgccgctgga

SEQ ID NO: 35765 - DNA, 287 bp, Zea mays
ggaacacagactaggagcttctgctatgtcgccgatatggttgatggtcttattaggctgatgaacggaaacaacactggaccgattaacttggggaacccaggtgaattcaccatgctggaacttgctgagaatgtgaaggagttgattaacccagatataacagtgacgatgaccgagaacactcctgatgatccccgccagaggaagccggacatcaccaaggcaaaggaagttctagggtgggagcccaagatcgtcctgaaggacggcttggtgctcatgga

SEQ ID NO: 35766 - DNA, 290 bp, Zea mays
cttgatactggtaactactcatggggaagtgaagctgttacccgcaagacccgtatcctcgacgtggtctacaatgcatcaaacaatgagcttgtgaggacacaaacccttgtgaagagtgccattgtgcaagttgatgctgccccattcaagcagtggtacctcactcactatggagttgacattggtaggaagaagaaaacccctgctgcaaagaaggataatgctgagggacaagaggttgaggcagcagctgaggaaacgaaaaagagcaaccatgtcacgaggag

SEQ ID NO: 35767 - DNA, 286 bp, Zea mays
cagataagcttcaacttgaagctcaaagtattcctaacactacccatccagatgttcctgttgggggtgaggaaagctctgtcctcaggaaagaggcagtcagaggagcttcaattttgcaatcaaagatcatcttcagctggggaaggaacttgatttgtttgactttgatgcagcagccgaggtcagtggttcgaagttctactacttaaagaatgaagctgttttgttggagatggccctagtaaactgggctatttcagaggtctccaagaagggtttcaca

SEQ ID NO: 35768 - DNA, 199 bp, Zea mays
cggacggtgggtcgaaccaactctttcccgaatccaccgccggctcggctcgcccagcttcgcgccaagcaacgaatctccgatggcccgcacgagtcagacggcgcgcaagtcgacgggcggcaaggcgcgccgcaagcagcttgccaccagggcggcgcgcaagtcggcgcctgcaaccggtggcgtgaagaagcct

SEQ ID NO: 35769 - DNA, 282 bp, Zea mays
cgtggggtgttttccctggcaaggagattatccagcctacggttgtggatcatgcaagttttatggactggaaggacgaagcatttgaaatctggactcgggggtggggttgcatgttccctgagggtgattcatcgagggagctactagagaaggttcggaagaccgactacctggtcagcctcgttgacaacgactacgtccagggagacctgtttgctgccttcaagatctgattatgctctcagggtctgtattgttgtatggttggaccaacaatat

SEQ ID NO: 35770 - DNA, 274 bp, Zea mays
ctcatcttttctcgtttagaacctctaaaatttcccccactcgccagtcgcagcagcacctgtagcagccatggacgccagcggagccggtagcaaggggaagaagggggcggccgggcgcaaggcaggcggccccaggaagaagtcggtgacgcggtccgtcaaggccgggctgcagttccccgtcggccggatcgggcgctacctcaagaagggccggtacgcgcacgcgtgggcactggcgcccccgtctacctcgccgccgtcctggagt

SEQ ID NO: 35771 - DNA, 279 bp, Zea mays
gttaaaagaatatattatgaagagaaaaggagaaaataagagtgaagttggtgcttctgaacgtctcattgctggtggtttagcaggtgcagtggctcaaacagcaatttatcctatagagttagtaaagactcgtctacagacttattcaggtgaggttggttatgttcctagaattggtcagctctcaagggatattttggtgcatgaaggtcctcgagctttttatagaggtcttgttccatctttgcttggtatcgtaccttatgctggaattga

SEQ ID NO: 35772 - DNA, 280 bp, Zea mays
cgccgctgcgccgtctcctccgctcccgtcgtccggaaagatggcgtcccacattgttggataccctcgcatgggccccaagagggagctcaagtttgcacttgagtctttctgggatgggaagagcaccgctgaggatctggagaaggttgctaccgacctcagggccagtatctggaagcagatggctgatgctgggatcaagtacatccccagcaacactttctcgtactatgaccaggtccttgacaccactgccatgctcggcgctgtccccgaa

SEQ ID NO: 35773 - DNA, 275 bp, Zea mays
gcagagaccatgaacatgcatgtgccagctgccagggtttacagttgttttgattctctctgtcttctgtttccacagcggatgttgccggccttcgccgcgtgctgcacggacctggtggagaggtgggaaggcctggtcgcggatgggcagcagccgtgcgaggtggacgtgtggcctgagatgcagaacctgacgggggacgtcatctctcgcggcgcgttcggcagcagctacctcgaaggcaggaggatcttccagctccatggggagca

SEQ ID NO: 35774 - DNA, 276 bp, Zea mays
cccacgcgtccgcccacgcgtccgcccacgcgtccgagaaaaggtcggttttgtccatccaagctaaaaggagagagagtgattgaattaggagctggctgtggcctggctgggttcggaatggccttgttgggttgtgatgttacaacaactgaccaagtcgaggtgcttccgctgcttatgagaaatgttgaacgcaacatatcttggatttcgcaatcgaattccgactcagataccatcggctcaattacagttgcagaattggactggggg

SEQ ID NO: 35775 - DNA, 280 bp, Zea mays
gtggtgatggtggtgtactgcgcgaaatagccagacatgattcagtggaaactattgatatatgtgagattgatcaactagttattgatgtttgcaaagaattcttcccaaacttatccattggattcaaagatcctcgtgtccgacttcatgttggtgatgctgttgatttcctgaggaattctcccgaacgaaaatatgatgctattattgtagattcatcagatccaattgggccagcacaggcactcgtggagaaaccgtttattcagacaattgc

SEQ ID NO: 35776 - DNA, 177 bp, Zea mays
acgccatcccaatctccattgctgggcgggatctcatggcctgcgcacagactggatccggaaaaaccgccgcattctgttttccaatcatcagtgggatcttgaagtcaccaaagccacaccagaggtcacggagtacaaggaccgcatgcccgctagctctgatcttatcaccca

SEQ ID NO: 35777 - DNA, 189 bp, Zea mays
caaacctaggctgaagccacctttcccagccaatgctgggctctacggctgccccacaactgtgactaatgtagaaactgtggctgtatccccaacaattcttaggcgcggtccagaatggtttgcaagctttgggcgcaagaacaactctggaaccaagctctattgtatctcagggcatgtgaacaa

SEQ ID NO: 35778 - DNA, 189 bp, Zea mays
gtcagtcacagctcacagcaaacaccgcgaaccgcccccgctcccaaacccgaccgagcaaagcgcaaagccccccaaccgcggatcaatccgcagcatcgatggcgcccaaggcggagaaaaagccggcggcgaagaagcccgcggatgaggagcccgcgaccgagaaggcggagaaggctccggcag

SEQ ID NO: 35779 - DNA, 262 bp, Zea mays
ccttgactccaaagagtgtaaatgacattcacaaaaggggtggaactgttctcggatcatctcgaggaggtcatgacaccgtgaagatagttgacagtatccaagatcgtggcataaatcaggtctatgtaattggtggtgacggtactcagaggggtgctggagtgatattcgaagaagttagaagacgcggcctcaaagtttctgttgctggcattccaaagactattgataatgacatccctgtaattgacaagtcatt

SEQ ID NO: 35780 - DNA, 267 bp, Zea mays
cgactggctcttggaggcatgggcactgatgaggatgacctcaccagggtcgtaactactcgcgccgaggtcgacctgaagctgataaaggaggcttatcagaagagaaacagtgtgccgctggagcgtgctgtggccaaagatacaactagagattatgaggatattatgcttgccctccttggggcggagtgaggaggcgtgcctcaactcgatctcatctgctcctacttgtttgatggggccaaaaaaactgcatcgacgtgg

SEQ ID NO: 35781 - DNA, 274 bp, Zea mays
cccacgcgtccgcccacgcgtccgggaagatcatgtctgaagtcttgggttattcgttctttgatagtgacaaattagtggagcaagctgttggaatgccttcagttgctcaaatattcaaagttcacagtgaagccttctttcgggataatgagagtagcgtcttgagggatctgtcctccatgcgacgattagttgttgccaccggagggggtgctgtcatccgaccagttaactggaaatatatgaagaagggcctatccgtttggttaga

SEQ ID NO: 35782 - DNA, 187 bp, Zea mays
attcagcacgaccacctacaccgggttccagtgcaccgtggacgaggagacgtcggagaagttcaagggtctgcctggggtgctgtgggtgctccctgattcctacatcgacgtgaagaacaaggactacggaggtgacaagtacgtgaacggcgagataatcccctgcacgtacccgacgtaccag

SEQ ID NO: 35783 - DNA, 272 bp, Zea mays
gtacttttgggatgtgcttctggatgcagacctagaaagtgatattcttggttggcagtacatatctgggagtttgcctgatggacatgagctcagtcgtcttgataatccagaggttcagtgtcaaaagtacgatccggacggtgaatatgtaagaacttggattcctgaacttgctagaatgccaacagaatggatccatagtccatgggctgcgccaaactctatattacaagttgctggagttgagctgggctttaactacccaaagc

SEQ ID NO: 35784 - DNA, 190 bp, Zea mays
acaagctcccgcccaacttccgcaagcttctgaacgttcagctcaagaagctcgtcgccggcggcaagctgaccaaggtgaagaactcgtacaagctgtcgtccgccgccaccaagccgaatcccaagcccaaggccgccccgaagaagcccaagaccggcgctaagaagcccaaggccgctgccaagac

SEQ ID NO: 35785 - DNA, 266 bp, Zea mays
tgcgaaggcgaccctccctccttcgctccttccgcgccgcctcccggccgtcgccgccatggtgaagtactcgcaggagccgggcaaccctaccaagtcggctaaggccatgggcagggatctgagggtccacttcaagaacacaagggagacagcctttgcgcttcgcaagttgtctttgaccaaggctaagcgataccttgaggatgttattgctcacaagcaggcaattcccttccggagatactgtgggggtgttggtcgca

SEQ ID NO: 35786 - DNA, 188 bp, Zea mays
ccaccaggaccgtgctgttcctgcgcggcgacggcacgctggtgccggtggccatcgagctgagcctgcccgagctccgggacggcctgatcaccgccaagagctccgtgtacacgcccaagtcgaccaccggcgcggaggcgtgggtgtggcacctggccaaggcctacgccaacgtgaacgactac

SEQ ID NO: 35787 - DNA, 241 bp, Zea mays
ggacaacagaggggcagcttgctggagacaattgctaatcagaaaaagtttctgtcaagcctgccatcacatttgaaatcattgaagaaagcatcactgccagtgcagcaacagttggggatgcaacataccaagaaactaaagcagcaccatgctgctgagttacttcctactccgctttatatagcatacactcagctgctagggcagaaagaagcatttggagagaatattgaagtag

SEQ ID NO: 35788 - DNA, 262 bp, Zea mays
accgcttgttagatatgggattccgatcagatattgaaaaaattgtggctgcactaccaaaacagcgtcaaacacttctattttctgcgacagttccagatgaggttcgtcaagtatgtcatattgccatgaaaagagatcttgaattcgtcaacactgttcaagaaggaagtgaggaaacacactctcaggtgaagcaaatgcatttaattgcaccactggacaaacaattctccaacctatatggtcttctaactgatca

SEQ ID NO: 35789 - DNA, 258 bp, Zea mays
gaagcgcctcgagatcacgttctctgacgcgcctgtctttgaggacccttgtggtcgtggcctgcgcgccctctcccgtgagcagatcgactcgtttctggatctcgcacggtgcaccatagtgtcacagctctccaacgagagcttcgactcatatgttctgtccgagtccagcctctttgtgtatccccacaaggttgttctgaagacctgtgggacgacgaagctgctgctcgccattcctcgcatccttgagct

SEQ ID NO: 35790 - DNA, 256 bp, Zea mays
ggagagaatttacgaaaaaagttacataatacaattcttgagttgaagggaaatatcagagtattttgtagagttaggcctttgctgccaaatgattcaggagcagtatcatatccaaagaatggagaaaacttaggccgagccattgagttgttacataatgcacagggatattcatttacttttgataaagtatttgatcattcggcgtcacaagaacatgtgttcatagaaatatctcaacttgtccaaagtg

SEQ ID NO: 35791 - DNA, 251 bp, Zea mays
aggcatcggtgtgggtggctttcagaagatctacggtggccgccagaggaatggctcccgcccaccacacttctgcaagagcagtggtgctgttgcacgcaacatcctgcagcagctgcagattatgggcatcatcgatgtcgatcccaagggtggacgcctcatcaccaaccagggaaggcgtgatctggaccaagtggctggaagggtcgctgttgaagcgtgagcagtgtcatctttggtttcaatgg

SEQ ID NO: 35792 - DNA, 256 bp, Zea mays
gtttggtgattatttcccaggaacaggggatatccgtgacattgggcactcaaaagggaagtactactccctgaatgtccctctagatgatgggattgatgatgaaagctaccagtccctttttaagccaatcatgggcaaagttatggaggttttccgccctggtgcagttgtgcttcagtgtggtgctgattccttgtctggggataggttgggctgcttcaacctctcaatcaaaggtcatgcggaatgtgtt

SEQ ID NO: 35793 - DNA, 257 bp, Zea mays
gttccggaggccatctattggggatatagtgtttttcaaagtaccgactgctgtgcagaattatggtgtcaataaggatgttgtctttattaagagagtattggcaacaccaggagacttcattgaggtccgacaagggcagcttattgtaaatggtgtcgcactaaaggagcattacgcagcagcaacgtcattgtacacaatggaagcaatggttggtttgtgcatacatctctaaacctggctgtgagcattgt

SEQ ID NO: 35794 - DNA, 257 bp, Zea mays
gtggcatgcagggacccattgtgacaactgtcagggctttgttaacaccacacccaatgagagagcttcgagttaagggcacctacatacatcataaggagatcagagctgcacaaggagtcaaaatatctgctcagggtctcgaacatgcaattgcagggacagccctttacgtgttaggacctgatgatgatttagacaaactgaatgaagctgttatggaagagatgacacgggttaggagccggattgacagg

SEQ ID NO: 35795 - DNA, 253 bp, Zea mays
gaatcttgcaaggacttcaacaacaggattcgtactttacacaacgggttgacgcaactggtatgccaggtctaggtcccctccaaaaagtatgtgcggcaatgcgggtacttgcatatgggttaccttctgatgcagtagacgagtacattcaaattggcgagtccacagctagggaatgccttcagcatttttgtcgaggaatcattgcatactttagtgggtggtatctacgaactcctaatgaagcgga

SEQ ID NO: 35796 - DNA, 251 bp, Zea mays
cgctctcggcgctgcgccggagcctcagggaccccggcggcgttctgcagagctgggaccccacgctcgtcaacccctgcacctggttccacgtcacctgcgaccgcgacaaccgcgtcacccgcctagatcttggtaatttgaacttatctggtcatctggtgcctgagcttgggaaactggagcatcttcagtatctggaactttataagaataacattcaaggaacaatcccttctgagcttggcaat

SEQ ID NO: 35797 - DNA, 250 bp, Zea mays
gtcgtacctgccgccgctgtcgacggacgacctgctgaagcaggtggactacctgctgcgcaacggctggataccctgcctcgagttcagcaaggtcggcttcgtgtaccgcgagaactccacctccccgtgctactacgacggccgctactggaccatgtggaagctgcccatgttcggctgcaacgacgccacccaggtgtacaaggagctgcaggaggccatcaaatcctacccggacgccttccac

SEQ ID NO: 35798 - DNA, 246 bp, Zea mays
agaatgctcatctcaaggtgctggaaggagctggggaaaggttgcagcttgtcaaggctgatttgttggactacagcagtgttgcttcagcaattgccggctgtgagggtgtcttccatgtagctatccctggcccttccggtcggtcctccaaccctgaggtggaggtcataggtcctgctgtaacaggtacaaccaatgtgttaaaggcttgctatgatgcaaaagttgggcgagttgtggtgg

SEQ ID NO: 35799 - DNA, 244 bp, Zea mays
cccacgcgtccgcccacgcgtcagagctatctcgagctagctagctgctgtaagccgttgccatggccaaaatggtgttgctctgcgtgctcgtctccttcctcctgatgcccttggcctccctagccctgacgcaggacttctgcgtcgccgacctgacctgcagcgacacgccggcggggtacccgtgcaagtccagcgtcaccgccaacgacttctacttccacggcctggccggccaggg

SEQ ID NO: 35800 - DNA, 244 bp, Zea mays
cagccactggctcaacacccacgccgtgatggagccgttcgtgatcgccaccaaccggcagctcagcgtgacgcaccccgtgcacaagctcctcctgccgcactaccgtgacaccatgaacatcaactccaacgcgcgccagatgctcgtcaacgccggcggcatcttcgagaccaccgtcttcccgcgccagtacgcgttcgagatgtcctccgtcatctacaaggactggaacttcacagag

SEQ ID NO: 35801 - DNA, 235 bp, Zea mays
gtttagtacggcgtgtgcagcgccgtattctgctggagccacagaggatcaattgccgctcaatgagaagatgaatagctccactgttggaatgtccccagtttctgaaaaattgaagttgctctctggttcatgttacttgcctcaccctgctaaggaggcaactggtggtgaggatgcacatttcattagcattgatgagcatgtgataggcgtacagatggtgttggtggtt

SEQ ID NO: 35802 - DNA, 240 bp, Zea mays
gtggaggggtatgtacgagtgccatcaagttcagacccacatcgtgcagcagctggagtacctgaacaatgctcggaataccaacccgacttccaatggccaccggcaagcagctcttcagctcgagatagaggttgacaggtgttattcagccttctgtagtctggtgaaatcccagagagactacgtctactcattgaccggctggcttcgtctatccctgttctgccaccacgaccc

SEQ ID NO: 35803 - DNA, 241 bp, Zea mays
acgccatcaaggcgctggtgaacgccgtcatcccggcaatccgcacctacgtcgacctgtcgcccggcgagttcgactccttcaaggacatcatgaagctgtacgagggcgggatccagctgcccaaaataccagccctcgaggacctgcggaagcagttcccactcgagctcgtcaaggatgtcctcccggtcggcggcgactacctcctcaagctccccatgccgcagatcatcaaaga

SEQ ID NO: 35804 - DNA, 241 bp, Zea mays
tggagatcatgcgccacctccccaagcaccccaacgtcgtcacgctcagggacacgtacgaggacgacaatgccgtgcacctcgtcatggagctctgcgagggcggtgagctcttcgaccgcatcgtggcgcggggacactacactgagcgtgctgccgccttggtcttacgcactatcgttgaggtcgtgcagatgtgccataagcatggagtgatgcacagggatctcaaaccagaaaa

SEQ ID NO: 35805 - DNA, 242 bp, Zea mays
ttcttctctctctactcctccgcctccgcctgatccatccaagacagggatcgccatgtcggactcggaggagcaccacttcgaatcgaaggccgacgctggggcgtccaagacctacccgcagcaggctggcaccgtccgtaagaacggcttcatcgtcatcaagaaccgtccctgcacagttgtggaggtttctacctccaagactggtaagcatggccacgccaaatgccactttgtcg

SEQ ID NO: 35806 - DNA, 269 bp, Zea mays
gcaaagcagctcaaaaaactttagccatctatcaagacatggctccacttgttgctgctgccacgaatcacactgcccatagaagccacatagtaggacccaacaatgagaattttccaaggcaccaaccttgttcatcacaaaacagaaacaagagactcaggcttaggtcacgagcacaaaggataagcagtcagctgcttgcaagccgaaagcttatgccatggcaaatccctaaaagggactggtttcctcctagcttcatcttt

SEQ ID NO: 35807 - DNA, 266 bp, Zea mays
gcgctccagtcatttctgctgagaaggcctaccacgagcagctgtccgtggccgaaatcaccagcagcgccttcgagccatcctccatgatggccaagtgcgacccccgccatggcaagtacatggcatgctgcctcatgtaccgtggtgatgtggttcccaaggacgtgaacgctgctgtggccacaatcaagaccaagcgcaccatccagttcgtggactggtgcccgactggcttcaagtgcggaatcaactaccagcctccc

SEQ ID NO: 35808 - DNA, 264 bp, Zea mays
atcttgtcatataatgaagagcctgtgaataaagaggctgacgacatcagctcaatgtggcaaggtgatgacatgtagggattgatgcgcccgtgagcacggtaggtgcggcgcctctgcgtctgggcgtgagtcacctggatgtgtgaaacatagagctgatcttgtcagagaaggaagatcctgtgaagaaagaggctgacaacattgtcgcagcaaggaagcagtgaagtatatcagcatgctgagcgaggccattttgtc

SEQ ID NO: 35809 - DNA, 250 bp, Zea mays
ggcaaaaggattaagttgcagatctgggatactgcaggccaagaacgtttccgcacaattaccactgcctactacaggggagcaatgggcatcttacttgtgtatgatgtcacagacgagtcatctttcaataacataagtaattggatcagaaacattgtgcaacatgcttcggataatgtgaacaagattctggtggggaataaagctgatatggatgtaagcaaacgggctgtgcccacttcaaagg

SEQ ID NO: 35810 - DNA, 259 bp, Zea mays
caaacactcggagcctcaaggaaatggccttgcttttacgctaatttggattgcaccgagtggtggtagagatcgcccaaatccttcaacaggagagtggtacccggcaaatgaaacgagatggtacagacagttgtagaggttcgctcacaagaattatcctttttttttttgcctaagacaatgcttgagaagtccgctgcatggtggacaatatgaggaggcttctggagcatgctggtgttcctgggcacatata

SEQ ID NO: 35811 - DNA, 254 bp, Zea mays
gtgctaagcttatgattcctgggttgctccgatttgagaatgatattgagactagggacgaggtggttctcatgacgacgaaaggggaggctattgctattggtattgctgagatgactactgctgtgatggcgacctgtgatcatggtgcagttgcaaagatcaagagggtggtgatggacagagatacatacccgaggaagtgggggcttggcccggtggcactcaagaagaaaaaactggttgctgagggt

SEQ ID NO: 35812 - DNA, 194 bp, Zea mays
gtgctcacaaacttttggggtatgaattttaccactgataaactgagatccctagtgaagaagtggcagacattaatcgaagcccatgttgatgtcaagacaaccgacaactacatgttgcgtttgttctgcatcggcttcacgaagaggcgcccaaaccaggtcaagagaacctgctatgctcaggcatccca

SEQ ID NO: 35813 - DNA, 282 bp, Zea mays
tggtcctgtgacgcgccctccctgcatgacgacttctatctcaacctcgtcgactggtcctcgcagaacgtgctcgctgcctgcctcgtgcacctgcgtctacctctggtccgcgtccaatagcaaggtcaccaagctctgcgatttggggcctagggacagcgtatgcgcagtgcattggtcacgggaaggctcttatctttccattggcaccggccttggagatgtccagatttgggatagttctcgctgtaagcgattagaaatatgggatgtcccaaa

SEQ ID NO: 35814 - DNA, 279 bp, Zea mays
agattcacgagatatgcaatgtcatcggtagtccagatgagcaatcttggcctcaaggattgtcacttgcagaagcaatgaagtatcagttcccacagatcaaaggcagtcaactggccgaggtgatgacaacagccagtagcgatgcaattgatctcatctcatcactatgctcatgggatcctagcaagagaccaaaggccgcagaagtcctccagcataccttttgtcagggttgtacatgtgttccacttcctgtccgtccagaagcgtcatcac

SEQ ID NO: 35815 - DNA, 281 bp, Zea mays
gtgtaattggaagtgagttagttcagaagtatgtcggcgaatgtgctcggatggtcagggaacttttccagatggcccgctcaaagaaagcgtgcattgtattcttcgatgaagttgatgctattggtggtgctcgttttgatgatggggtgggtggcgacaatgaggtgcagcgtacaatgttggaaatagtaaaccagcttgatgggtttgatgcaagagggaacatcaaagttctcatggccactaataggcctgatacattggatcctgcacttctg

SEQ ID NO: 35816 - DNA, 277 bp, Zea mays
gtacaaggcaaaaaagatctctgaggaggaatacgtcactgccatcaaggaggaaatcaacaaggtcgttaagctccaagaagagcttgacattgatgtgcttgtgcatggcgagcctgagataaacgatatggttgagtacttcggtgagcagctctccggttttgcgttcactgccaatggctgggtgcagtcttatgggtcaaggtgcgtcaagcctccgatcatctacggtgacgtgagccgccccaaccccatgaccgttttctggtcgaag

SEQ ID NO: 35817 - DNA, 284 bp, Zea mays
cttcctcgagttctcctcaaccatattcagagtcacagcggcttaactctcggcgatgtctggccgcggctatggcgggaatggtcggggcaagggcggcgccaagcgccaccgcaaggtgctgtcgtgacaacatccagggcatcaccaagccggcgatccgcaggttggcgaggatgggcggcgtcaagcgcatctccgggctcatctacgaggagacccgcggcgtgctcaagatctgcctcgagaacgtcatccgcgacgccgtcacctacaccgagcac

SEQ ID NO: 35818 - DNA, 274 bp, Zea mays
gtgaagtcattccctagggatgaccccaagaagccttgccatctcactgccttccttggctacaaggctggcatgactcacattgtccgtgaggttgagaagccaggatccaaactccataagaaggaaacttgtgaggctgttaccatcattgaaacccctcctcttgtcattgttgggctcgtggcatatgtgaagactcctcgtggcctccgcacactcaactctgtttgggcccaacatcttagtgaagaagtgaggagaaggttctaca

SEQ ID NO: 35819 - DNA, 272 bp, Zea mays
cggacgcgtgggagtcagctccaggggttcgagtactgcatcgactccaaccctccctggggcgaggcgatcatactgggcttccagcactacatactggcgcttggcacggcggtgatgatcccgacggtgttggttcccatgatgggcggcgacgatgtgagctatcctgtgccatgccgccttccgcttcttgaccacagcaccggctccgtgccggcagcatcggtccgtgtggtgatgtgatgttttgggtccttgttgttcgcttg

SEQ ID NO: 35820 - DNA, 260 bp, Zea mays
gtcgtcctcctagctcctctactcgccagtcgccatgggcaatattaagatcggaatcaacggcttcggaaggatcggcaggctcgtggccagggtcgccctccagagcgaggatgtcgagctcgtcgccgtcaacgaccccttcatcagcacggactacatgacctatatgttcaagtacgacaccgtccacggccactggaagcacagcgacatcacactcaaggactccaagacccttctcttcggttacaagccgg

SEQ ID NO: 35821 - DNA, 275 bp, Zea mays
cgcacgcgtccgggaaaccctagccgccatatctcacgatccactcgagcaccaagccgatggaaggtgaggagctatggcgcgcggcgtggtgtcggcgaagggcggcgcggtcgcgggcaagaagaaggggtcggtttcctgcacgatcgactgcaccaagccagtggatgacaagatcaaggaggtcgcctcgctcgagaagttcctgcaggagcgcatcaaggtcgccggcggcaaggctggcaacctcggcgactccgtcaccatctctc

SEQ ID NO: 35822 - DNA, 273 bp, Zea mays
cagcgactaatgttttccgtgttaaagaggatgttcgacctatattctgggccaacagaccaaagagctatcttaaaaggacattaggttgggatcagtatccccatggacggtggggtgattctcggaacccatcatatggagcacttactgaccaccagttcacaagaccacgaggccgtggtaagaagctccaagaggaatgggctgttccactgaaatctgtggaggacattagtgagcgcttcacaaacttctgtcaagggaaactca

SEQ ID NO: 35823 - DNA, 269 bp, Zea mays
gactctggcaagtcgaccaccacaggacacctgatctacaagcttggaggcattgacaagcgtgtgatcgagaggtttgagaaggaggctgctgaaatgaacaagcggtccttcaagtacgcatgggtgctcgacaagctcaaggctgagcgtgagagatgtatcaccattgatatcgctctgtggaagtttgagaccaccaagtactactgcacggtcattgatgcccctggacaccgtgacttcatcaataacatgatcactggtac

SEQ ID NO: 35824 - DNA, 266 bp, Zea mays
gcgcggcggcggcggcggcggcgaccatggctgtcgggaagaacaagaggatctccaatggaaagaatggtggcaagaaaaagaccgtctaccctttctctaagaatgattggtatgacatcaaggcaccgtcggtgttcagtgtgcgcaacatcgggaagactctcgtatccatgacacagggtaccaggattgcttctgatggtctgaagcacagagtctttgaggtttgcctagctgatcttcagggcgacgaggatcaagct

SEQ ID NO: 35825 - DNA, 267 bp, Zea mays
aagtggagtggccagttcccagtgaagtggcacataattaaggatgtaccgaacaaccttctgcggcacatcattcttgagaacaatgacaataagcctgtcacaaatagcagggacacccaggaggtgaagctggaacagggcctccagatgctaacgatcttcaagagccatgaggctgagacaacaattgtggaagatttcgacttctatgagcagcgggagaaagccttgcaggagaacagacgtcaacagcatgctgccagc

SEQ ID NO: 35826 - DNA, 267 bp, Zea mays
ctcccaaggatcagtgctttatgatgttgatgaagctactgtccgtagtcttaatgggtgcagagtagcagaccaaatcattagacttgttccaaattttgagaattttcgcacggcattaagatgtttgaagtactgggcaaaaaggagatgtgtttactctaatgttactggctttcttggtggtgtcaactgggctttactggttgcgcgtgtctgccagctctatcccaatgctgtgccaagtatgctggtctcacggttttt

SEQ ID NO: 35827 - DNA, 267 bp, Zea mays
cctcgctcagtacctggattaactgtggaggttcacaaattggatccgctagttcagcgtgctttagctgctgctttacgatccaaagatcttcgaggtttgtatgacaggattccccctcatctcgagtcaaagcttatgccatttcagcgtgaaggcatcaggtttgttttacagcatggtggcagagccctgattgcagatgaaatgggtcttggaaagacactacaggcaattgctgttgcttcgtgccttcgtgatgcctgg

SEQ ID NO: 35828 - DNA, 271 bp, Zea mays
cacaccccgagctcagcttagctccactccagctccaatcacagtcgtgaccagagcgcgagagctagctagagggccgtgaaaatgccgatcaataggatcgccctggggagccaccaggaggtgtaccacccgggcgccctcaaggcggcgttcgctgagttcatctccacactcatcttcgtcttcgccggccagggctccggcatggccttcagcaagctgaccggcggcggcccgacgaccccggcgggcctgatcgcggctgcgg

SEQ ID NO: 35829 - DNA, 264 bp, Zea mays
ataaagtgatagaggacaatcatgttatcaatggaaagcaagttgaaattaagagaaccataccaaaaggttcggtgcaatctagctctaaggatttcaagactaaaaagatatttgttggtgggcttccgtcaacactaacagaagacgaattcaagagtttctttgcaagatatgggactgtggtggaccaccagattatgtttgatcatgaaaccaaacgttcccgaggctttggatttatagtttttgcttctgagcaag

SEQ ID NO: 35830 - DNA, 263 bp, Zea mays
cggacgcgtgggtggggaagaaagtgtgctatgtacagttccctcagaggtttgatggtattgacaaaaatgatcgatacgctaacaggaacgttgtcttttttgacatcaacatgaaaggtttggacggtattcaaggacccatttatgtgggtactggatgtgttttcagacggcaggcactgtatggttatgatgctcctaaaacgaagaagccaccatcaagaacttgcaactgctggcccaagtggtgcctctcttgc

SEQ ID NO: 35831 - DNA, 247 bp, Zea mays
  unsure (1)..(247): unsure at all n locations
agagcacnaggtccgggacctggcgacggnattattgataagaacagttttgaacagttctgcattaattatgataatgaaaacttgcagcaacatttcaatcgtcatttgtttaagcttgagcaagaggaatatgtggaggatggcatcgactgggcaaaggttgacttcgaggataatcaagactgtttgagcctctttgagaaaaaaccactgggactattgtctctgctggatgaggaatcta

SEQ ID NO: 35832 - DNA, 232 bp, Zea mays
gccgcgcacccgaactggcctcctcggcgcccgtggtcagcgtcattaagtactgcgacatcttccgcggcgagtgggtgccggacgcggaggcgccctactacaaccacaagacgtgccacatgatccaggagcaccagaactgcctcaagtacggccgccccgacctgggcttcctcaagtggcggtggcgccctccggatgcgagctaccgcgcttcgacccgctgcag

SEQ ID NO: 35833 - DNA, 257 bp, Zea mays
aactgttcatgccatcactgccacccagaagactgttgatggaccctcagccaaggactggagaggtggcagggctgccagctttaacatcattcccagcagcaccggtgctgccaaggctgtcggtaaggttcttcctgaattgaatggcaagctcactggcatgtccttccgggttcccaccgtggatgtgtcagttgttgacctcactgtcagaatcgagaagggggcctcttacgaggaaatcaagaaagcta

SEQ ID NO: 35834 - DNA, 252 bp, Zea mays
cccacgcgtccggaggcctgaacgataattttgagattgatgatagatttgaaactcatgctgcagttctagatagaatgcttgcttgggagaaaaaactgtatgacgaagtgaaggctggggagcttatgaaaaccgattatcagaagaaggtgtctctattgcagaagcaaaagaaatggggtgttaaacttgaaaccttggagaagacaaaagctgctgttagccaattgcacacaaggtacattgtag

SEQ ID NO: 35835 - DNA, 253 bp, Zea mays
gagttgttgtgttgtccttccgcaatttgctggcaaagggtgcatttgctgcccagatgatcgatcttggattgccacaaatggtacaaaacttgaaagctcaagcatggactgatgaggatctgttagatgctctgaatcaactagaggtgggactcaaagaaaacctcaagaagttgagttcctttgataagtacaaacagcaagttcttcttggtcatctggactggtctccaatgcacaaagatccaag

SEQ ID NO: 35836 - DNA, 252 bp, Zea mays
cgccaagaaggccacgtccaggagctccaaggctggcctccagttccccgtgggaaggatcgccaggttcctcaaggccggcaagtatgccgagagagtcggcgccggcgcccctgtctacctcgctgccgtgctcgagtatcttgctgctgaggttcttgagctggccggcaatgcggcacgtgacaacaagaagacccgcatcgtaccgcgccacatccagctcgccgtccgcaacgacgaagagctctc

SEQ ID NO: 35837 - DNA, 260 bp, Zea mays
gaattagttcaccagaacagatggcgcgaacatttggatcgactacttgagacaaacaacttccctgaattcactggacgagtttgccctgctccttgtgaggggtcatgtgttcttgggattattgagaatccggtgtctatcaaaagtatagaatgtgcaatcatagacaaaggttttgaagagggatggatgattccacgacctccacttcaaagaacaggaaggaaggtggccattgttggcagtggaccatctgg

SEQ ID NO: 35838 - DNA, 247 bp, Zea mays
tttgcggtgatatccatgggcagttccatgacctaatgaagctcttcgcgacgggtggccacgtcccagagacgaactatattttcatgggtgattttgtggaccgtggcttcaatagtctagaggttttcaccatcctattgctactaaaagcgaggtatcctgcacacatcacccttctgcgtggaaatcatgaaagtaggcagttgacacaggtgtatggtttctatgatgagtgtcagagaaa

SEQ ID NO: 35839 - DNA, 248 bp, Zea mays
cccacgcgtccgcccacgcgtccgaaagagatctggcattgagtaaagaactgttggttgaaaaatacaaggacaggcttgaggaatcttacaagggtctaatacatgaggtatttaccaaagtccttcgtggtctatctggtgctaaagtcacaaggccaggttctttcagaagttgccaagatggatatgcagttaaatcatctctcaaagctgaagatggactgttgtatccactggaaaagggt

SEQ ID NO: 35840 - DNA, 247 bp, Zea mays
agctcaacggctatgctatgcaacttcattgtctttcggatcggagagggtgtacgtacgtggattgattgatgctgcgagatgcatgtgtgtcttttgtttcacgttgcattgcataggcaagtcgagatgatgagttggcgttgtacactaagatgaaccatgtttgtgcaatagtggtggtttttgtttcctgctggttaaaaaaaaaaaaaaaaaaaaaaaaaaaaaaaaaacaaaaaagaaa

SEQ ID NO: 35841 - DNA, 244 bp, Zea mays
cccacgcgtccggaatatccttctgaagagctacagcagatgtgaaatcaaagttattgatcttggaagcagctgcttcttgtcagataacttaaacttatatgtccaatcacgttcttaccgatctcctgaggtcatcttgggtttaccatatgatcagaaaattgacatttggtctcttggctgcatcttatctgaactgtacactggtgaagtactctttcctaatgaatcaatgccaatc

SEQ ID NO: 35842 - DNA, 245 bp, Zea mays
cgcgacgctccctctctccgtgctcaagcgggcgcaggcggactggtggactaccacggctccgggatgagcatcatggagatgagccaccgcgggaaggagttcgacgccgccatcaagaaggccgagtccgacctgcgcgcgctcctcgcggtgcccgacacccacgccgtgctcttcctccagggcggcgccaccacgcagttcgccgccgtcccgctcaacctctgcacggggccctccga

SEQ ID NO: 35843 - DNA, 241 bp, Zea mays
aataatatttggtctctctggcatgaaagcagctgaacttcatggcaaccttacacaggcccagcggcttgaggctctggaacttttcaagaaaaaagaagtagattttttgattgcaactgatgtcgctgctcgtgggattgatattgttggtgttcagactgtaataaatttcgcatgcccaagagatgtgaaaacttatcttcatcgtgttggccgcactgcgcgggcaggaagagaa

SEQ ID NO: 35844 - DNA, 244 bp, Zea mays
gaagaaaactgctggtacaaacgcaaaacaacgcatctacatgttgggtcgatttcggaaagcagttaaatgggcatcacttttttcacaattatgttctgtaaaaggagattccaggacatctctagaagctgaggcatatgcttcatatatgaagggtgctttgttttttgagcaagacaagaatatagatgccgcaatgataaatttcaagaatacgagggctatatatgaggagcttggg

SEQ ID NO: 35845 - DNA, 297 bp, Zea mays
atctgctgctgctttagcaaaggagcttgggcgctggaatgaagtatctgatttctatcacagagcttcagaattataccgtgaatgtggaaggccacaacctgcatctgatgctctagcaaagggtgccagtgcattggaggagaaatctccagaagaagctatcaaaatgtatgatgaggcttgttcagttctagaagaagatgggaaggaacagatggcttttgacttgtaccgtgccgcagcagctttgtatatcaagatggagaaatattcagatgccgctgctttgttttt

SEQ ID NO: 35846 - DNA, 295 bp, Zea mays
cttttggagagctagtacttgtgttccataagatggctataatgattctttcactcactgagagtgcctcgagatgtgaaaggaattggagttgctttgaagggattcataccaagaagagaaataggttaacttgtgaaagagttgaaaatcttgtctttgtgtgattcaattcacttcatacaaagaaaaaagctaaggccaacaataacaacaaagtagatcccctgctggcaactgatgctgcttctgctcaagggtggattattgaaggtggagatgaagaaagctctga

SEQ ID NO: 35847 - DNA, 286 bp, Zea mays
cggacgcgtggattagaaaggccgaagccgtctccgttcctcctcgacgcgtctcttccacagccgcaaactctatccctcgtctggtatcgtctcccacacccctctgccccaactcagaaaaaccctcgaaaagcggcggcggcgcgacattgcggaggtcgaggctccagctgctgcggttgcggcggcgacccctgaggtggcgacggtgaccgatggcggaccgctacggaggcgaagggccgcacaagctgcaccgccagtggaccttctggtacgacat

SEQ ID NO: 35848 - DNA, 290 bp, Zea mays
gcgaaggcgaccctccctccttcgctccttccgcgccgcctcccggccgtcgccgccatggtgaagtactcgcaggagccgggcaaccctaccaagtcggctaaggccatgggcagggatctgagggtccacttcaagaacacaagggagacagcctttgcgcttcgcaagttgtctttgaccaaggctaagcgataccttgaggatgttattgctcacaagcaggcaattcccttccggagatactgtgggggtgttggtcgcaccgcgcaactaagtcgcgcactcca

SEQ ID NO: 35849 - DNA, 295 bp, Zea mays
agcgcaggtggcttattgatgggtgctgtcctaaatatgaggcctgacttattcagggcagctgttgctggagtgccttttgttgatgttgtcacaactatgcttgatccaactatcccactgacaacagctgaatgtgaggagtggggtgatccaagaaaagaagaattctattattacatgaaatcgtattctcctgttgacaatgtgatggcgcaagagtatcccaacattcttgtcactgcaggcttaaacgatccacgcgtgatgtactctgagcctgcgaaatacgtgg

SEQ ID NO: 35850 - DNA, 294 bp, Zea mays
gcgatctctgatgagttttcagtggctcgcgacttgcttttaatgagtcatttgcaagatggtattcagctcatggacatatcatcgcagattttattcaacagagtcatggcccagttagggctgtgtgctttcagggctggtttgataaatgaagcccatggttgcttgactgagctctattctactgggagggtgaaagaattgcttgcacaaggtgtgcaacaaagccgataccatgaaaaaactcccgaacaggaaagacttgagaggagaaggcaaatgccttaccat

SEQ ID NO: 35851 - DNA, 285 bp, Zea mays
tcttcctcttgcgcttgagaagaaatatggagggtggttaagcgcgaagatggcggacttgtttacagactatgctgacttctgttttaagacctacggcgatcgcgtaaagcactggtttacattcaatgagccaaggatagtagcgctacttggctatgacacagggtcaaatcctcctcaaaggtgcaccagatgcgctgctggtgggaattcagcaaccgaaccttacatagttgctcataattttctcttggcacatgctactgcagttgcaagataccg

SEQ ID NO: 35852 - DNA, 283 bp, Zea mays
gcttgctccctgttgaccattgggtattctgaaccatcgagccatggctgccaagctgactcgcctccacagtcttcgcgaacgccttggtgccaccttctcctcccatcccaatgaactgatagcactcttttccaggtatgttcaccagggcaagggaatgcttcagcgccatcagctgcttgcggagtttgatgccctgtttgatagtgacaaggagaagtatgcaccctttgaagacattcttcgtgctgctcaggaagcaattgtgctccccgcatgg

SEQ ID NO: 35853 - DNA, 286 bp, Zea mays
  unsure (1)..(286): unsure at all n locations
cggacggtggngaggaaatcagggaagcactggaagagttatctcctacagggtggaaagaagaaatcagtaccaatattaaccttgaaatattgacctagttacttgaatcaggttcccaggacagacaataccttggacaaattttgcagtactctctggataagctgcgaaaactgtcttctcctgtgaaggaacacgagatgaagaagagtcatgatacattgttgggagaattggtcgaagctctaaatccaattataaagaccaaattcatttgttcttt

SEQ ID NO: 35854 - DNA, 281 bp, Zea mays
gctcaccgtccagaaccggcaggccaaggtctccgtcgtcccctccgccgcggcgctcgtcatcaaggcgctcaaggagccagagagggaccgcaagaaggtcaagaacatcaagcacagcggcaacatcagcctcgacgacgtcatcgagatcgccaggaccatgaggcacaggtccatggccaaggaattggccggcaccgtcaaggagatcctcggtacctgcgtcacgtcgggtgcacgtcgacggcaagacccaaggactgcacaggagattgcgc

SEQ ID NO: 35855 - DNA, 291 bp, Zea mays
cagaccgtccgcccacgcgtccggacccaaaccccaattccacaatgaggccgtcgctgatgagatccaccatcccagctcctccgccgccggaactactcctccgcatccgggcagcccgagcggaaggtggccatcctcggggcggcggggggcatcgggcagccgctgtcgctgctcatgaagctcaacccactcgtctcctccctctcgctctacgatatcgccggcacaccaggtgtcgcggccgacgtctcccacatcaactcccccgccctcggtgaagggttc

SEQ ID NO: 35856 - DNA, 208 bp, Zea mays
cgccgtggcggtttcgtcgtcgctgaacccggacgcgccgctcttcatcccggcggcgctgctgcaggtggaggacttctcgccgcagtggtgggacctcatcaccaccactgcctggttccgcgaccactggtcccgcgagcgcgcccacctggacgagatggccgagcagatcgacgcggccggcctcctccccgacgacgaggac

SEQ ID NO: 35857 - DNA, 287 bp, Zea mays
ggaaccacagccacgcgacgcaggacctgtacgactccatcgcggcggggagcttcccggagtggacgctgtacgtgcaggtgatggacccggacacggaggagcagtacgacttcgacccgctggacgacaccaagacgtggccggaggacctgctgccgctccgcaccgtggggatgctggtgctggacaggaacgtggacaacttcttcaacgagaacgagcagctggcgttcgggccggggctggtggtgcagggatctactactcggacgcaagatgctgca

SEQ ID NO: 35858 - DNA, 154 bp, Zea mays
gcacaacctgcggcagtaccaggtccctttgcagcgctatatggccatgatggaccttcaggagaggaacgagaggcttttctacaagcttttaattgataacgtggaggagctgcttcctgtggtttatacaccaactgtaggtgaggcctgc

SEQ ID NO: 35859 - DNA, 256 bp, Zea mays
cccacgcgtccgcagctcacagcaaacaccgcgaaccgcccccgctcccaaacccgaccgagcaaagcgcaaagccccccaaccgcggatcaatccgcagcatcgatggcgcccaaggcggagaaaaagccggcggcgaagaagcccgcggaggaggagcccgcgaccgagaaggcggagaaggctccggcagggaagaagccgaaggctagaaacgcctccccgcgggcaagtccggcgccggcgtaggcaagaa

SEQ ID NO: 35860 - DNA, 276 bp, Zea mays
cccacgcgtccgaagaaagatgttatgtctaaaaatgtttcaatctacaaaacccaagcatctgctcttgaagcccatgcggcccccaactgcaaggttctggtggttgccaacccagcgaacaccaatgctcttatcttgaaagaatttgctccatcaattcctgataggaacgttacttgcctgacccggctggaccacaacagggctcttggccagatttctgagagacttagtgtccaagtcagtgatgtgaagaatgttatcatctggggt

SEQ ID NO: 35861 - DNA, 282 bp, Zea mays
ggctggagcgcaacgtggaccccggcaagtcgcgggtgttcttcgtcaccgcttcgccgacgcacacggacggaagggcgtggggcgacgacgacgcggagggcagcggcaactgctacaaccagacgtcgccgatcagcgccgcctcgacctaccgtggcggcacgagccaggagatgctgcgcgcgacggaggaggtgctggccacgtcgcgggtgcccgtcgggctggtcaatatcacgcggctgtccgagtaccgccgggacgcgcacacgcagacct

SEQ ID NO: 35862 - DNA, 284 bp, Zea mays
cgcctctcgagtctcgtccacccgtcgtcctcctagctcctctactcgccagtcgccatgggcaagattaagatcggaatcaacggcttcggaaggatcggcaggctcgtggccagggtcgccctccagagcgaggatgtcgagctcgtcgccgtcaacgaccccttcatcaccacggactacatgacctacatgttcaagtacgacaccgtccacggccactggaagcacagcgacatcacactcaaggactccaagacccttctcttcggtgacaagccggt

SEQ ID NO: 35863 - DNA, 274 bp, Zea mays
gtcgccggacctgttcgaagtggaggccaccaacggcatgccgcgggcgtccatcgacaagctccccgagtcgtggatcaccgaggagtacaggcgcgacgccgtcggcgacctctccggctgctccgtctgcctccaggatttccaggtcggggagaaggtgcggacctgccggactgctggcacgtgttccacgtccgtgcatcgacggctggctcatcaagcacggctcctgcccgctctgcaggaggaagctgtaggcggatcgaccgga

SEQ ID NO: 35864 - DNA, 260 bp, Zea mays
actacatcctgggcgacaacccgcggggcaccagctacatggtcggctacggcgccacattcccgcggcaggtgcaccaccgcggcgcctccatcgtgtcggtcaggacggacccgtccttcgtcagctgtcaggaggggtactccgcctggtaccctcggcaggccggcatccctatcgtcctggatggcgccatcgtcggtgggcccgtctagtacgacgacttcgccgacgagcggaacaactacgagcagactgag

SEQ ID NO: 35865 - DNA, 272 bp, Zea mays
cttgtttaccattcctccccaaaacacatcctgcgatcctcgaagcctccgccgagcatcgatcatgtcggcctactgcggcaagtacgcggatgagctcatcaagaatgctgcctacatcggcacccctggcaagggtatccttgctgctgatgagtcaactggcaccattggcaagcgcctttccagcatcaatgtcgagaacgtggaggagaaccggcgggctctccgtgagctcctgttctgctgccctggtgccctccagtacatca

SEQ ID NO: 35866 - DNA, 276 bp, Zea mays
ggaatccatgagacaacatacaattcaatcatgaagtgtgatgtggatatcaggaaggacctctacggcaacattgtgctcagtggaggttcgactatgttccccggtatcgctgatcggatgagcaaggagatcacttcccttgcaccaagcagcatgaagatcaaggtcgtcgcgccacctgagaggaagtacagtgtctggataggagggtcgatcctagcctcgctcagcactttccaacagatgtggatatcaaaggaggagtacgatgag

SEQ ID NO: 35867 - DNA, 265 bp, Zea mays
ggtatacaaggggaagctcgatgcccagcgccgcattgctgtcaagcgctttaaccgctctgcctggcccgacccgcgccagttcctggaagaagctagatcagttggcctgctccgaagcaaaaggttggcaaatttgcttggttgttgctgtgaaggtgatgagagattgcttgttgcagaatacatgcccaatgatacgctagcgaacaccttttccattgggagtcacaatcaatgaaatggaccatgagattaagggttg

SEQ ID NO: 35868 - DNA, 263 bp, Zea mays
aggtgataaacgagtatctggtggagtaccctgaggttccgcagtgggcgccttggtgcatggagcagccgaagagtgttgactgggatgcactgatcaatagcatcttcagtgaggctgagaatgtgccggagattaactggtgcgagcctggggagtcctcagcgatggaggtccttcttgggagtaaggatgggttcttgacgaagaggattaagaactatgacactggccggaatgatcctacaaagccacatgcattg

SEQ ID NO: 35869 - DNA, 261 bp, Zea mays
ctaaaggcctattaccgggacaatggtttgatgcagtatgctcgctctgtgcttgtgatacacaacattgctcatcagggtcgtggccctgtagacgacttcgtcaattttgacttgcctgaacactacatcgaccacttcaaactgtatgacaacattggtggggatcacagcaacgtttttgctgcggggctgaagacggcagaccgggtggtgaccgttagcaatggctacatgtgggagctgaagacttcggaaggc

SEQ ID NO: 35870 - DNA, 267 bp, Zea mays
cacacgcgtccgcccacgcgtccgctcacttctgcgccgccacccactacaggtaaggaagaggaggagggcaggatgtcgcaccgtaagttcgagcacccgaggcacggctccctcggcttccttcccaggaagcgctcctcccgccaccgcggcaaggtgaagtcatttcccagggatgaccccaagaagccttgccatctcactgccttccttggctacaaggctggcatgactcacattgtccgtgaggttgagaagccagga

SEQ ID NO: 35871 - DNA, 266 bp, Zea mays
gaaaaaaaatatgcacgatttctcttacgcgcatatgttgaaggtagcaagaagactaaatggtgtccagctactgactgcacatgtgctgtggagttccttggtgatgaaaactatgatgtttcatgcaattgcatgttcagcttttgttggaattgcactgaggaagctcatcgaccagtgaactgtgagactgtttctaagtggatattaaaaaacagtgcagaatctgaaaacatgaactggatactggctaattctaagcc

SEQ ID NO: 35872 - DNA, 263 bp, Zea mays
ctcagctcccatatccgctcccctacctctccagcatctcccgtctccgtcgtctcgtctctgctcctcacctcgccgccagccatgggcaagatcaagatcggaatcaacggtttcggaaggatcggcaggctcgtggccagggtcgccctgcagagcgaggatgtcgagctcgtcgccgtcaacgaccccttcatcaccacggattacatgacctacatgttcaagtacgacaccgtgcacggccaatggaagcacagcga

SEQ ID NO: 35873 - DNA, 260 bp, Zea mays
gcaagttgcatggatggaaagtcagggagactccacgccgtgtctctgatgccgtgctcttcagcaatgagcttgacatccttgatatccgctggcacgagcttagcccgtatgtgtcagaatttgtgctgcttgagtccaattcaacttttaccggcataaagaaggaccttcacttcaaggaaaaccgccaacggtttggctttgcagagtcacggttgacctatggcatgataggtggaaggtttgtgaagggagag

SEQ ID NO: 35874 - DNA, 271 bp, Zea mays
ggtgatgatgctttcaacaccttcttcagtgagactggcgctgggaagcacgtcccccgtgctgtttttgttgaccttgagcccactgtcatcgatgaggtgaggactggcacctaccgccagctcttccatcctgagcagctcatcagtggcaaggaggatgcagccaacaacttcgctcgtggtcactacaccattggcaaggagattgttgacctgtgccttgaccgcatcaggaagcttgcagataattgcactggtctccagggct

SEQ ID NO: 35875 - DNA, 267 bp, Zea mays
agctgaaggatttcttcaagcagtaggtgtgaagacctgaagatcagctttatctctcttttgttcctgctagggccttctcggttattccaattccatgtggattgaagtgtattaaaatggattttgacttgttatggatttaaatcaacttaataccactcaatccacatggattattggtgaaacaaacaagccctagtcgaaattcttgttaagttggtagtttgtcagacccgaaatagagttttttgggtttcgaatgga

SEQ ID NO: 35876 - DNA, 264 bp, Zea mays
cgtacatctgtggtgaagagaccgccctactagagagccttgaagggaagcagggcaaacctaggctgaagccacctttcccagccaatgctgggctctacggctgccccacaactgtgactaatgtagaaactgtggctgtatccccaacaattcttaggcgcggtccagaatggtttgcaagctttgggcgcaagaacaactctggaaccaagctctattgcatctcagggcatgtgaacaaaccttgcaccgtggaagagg

SEQ ID NO: 35877 - DNA, 263 bp, Zea mays
agaatagtagattggcttgctagcaacttcaagaaagatgaacgtattgatcttctgaaggataaacaagcccttcagaggcttactgaggcagcagagaaagctaagatggaactgtcaacgctgacacaggcaaatattagcctaccattcattactgctactgctgatgggccaaaacacatcgaggcaaccctctcgagagccaaattcgaggaactatgttcagaccttatagacaggcttaaaactcctgttaataa

SEQ ID NO: 35878 - DNA, 263 bp, Zea mays
gaagtatgctactgtgtatggttgttctgatgctacggttgttcttggtgctgttggtaaggtagtaaaagtggagcattgtgaaagagtgcatatcattgcagctgcaaaacggatttgtattgccaactgccgggagtgcatcttctacctaggagtaaatcaccaacctcttgtattgggggacaaccataaattacaagttgctccattcaatacatgctacccacaactgcaggatcatatgatgcaagtgggtgttg

SEQ ID NO: 35879 - DNA, 266 bp, Zea mays
agcaaacatttcatatatatgctcacgttattaccgtgctccagagctcatatttggggcaaccgagtacacaacatcaattgatatttggtcagctggatgtgttcttgctgagctgcttcttggccagcctctcttccctggcgaaagtgctgtggatcaacttgttgagataataaaggttcttggtactccaacacgtgaggaaatccgttgtatgaatccaaactacaccgagtttagatttcctcagatcaaagctcacc

SEQ ID NO: 35880 - DNA, 267 bp, Zea mays
cccacgcgtccgcccacgcgtccggtgaacaccattcctggtattgaagaggtcaacatctttaaggatgatgttgttattcagtttgtgaatcctaaagtgcaagcttcaattggtgctaatacatgggtggtcagtggaactccacagacaaagaagctgcaagatctgcttccgtccattatcaaccagctcggccctgacaacctagacaacctgcggaggcttgcggacaattccagaagcagcccctggtgcttcaggtgc

SEQ ID NO: 35881 - DNA, 147 bp, Zea mays
cccacgcgtccgggccatgctgctgcaggcgttcgactggaagctgccgcaggtaccgagctggacctatccgagaagttcggagtcgtgatgaagaaggctacgccactgatggtcatacccaagtcaaggtttccttaggcccgt

SEQ ID NO: 35882 - DNA, 260 bp, Zea mays
gaacgagcccggttgcgcaagggagagagcgcgccagagcggcgccgaacaaccctcgtccaccgcactctcctggaccgtggccatggccatggccgccgcgtcccgatcccgggcgctgtgggcgtcccgcgccgccgcctacctcaggatctccaccttccccagggccttctccaccgtgctgaaggatctgaaatatgctgacactcatgaatgggtgaaggttgagggcgattcagcaaccgtggggattactg

SEQ ID NO: 35883 - DNA, 260 bp, Zea mays
gcgagaactacgagctaggccttccctgcatcaacaaggccggcgtgggccacaagatcgacttccgcgagggccccgcgctccccgtcctggacgacctcgtggcggacaaggagcagcacgggtcgtttcgacttcgccttcgtggacgccgacaaggacaactacctcagctaccacgagcggctcctgaagctggtgaggcccggcggcctcatcggctacgacaacacgctgtggaacggctccgtcgtgctccc

SEQ ID NO: 35884 - DNA, 258 bp, Zea mays
cgtttcctcagctagggagctagtaagactcaacggaacaacaaaggcacctgtaatgaactatgcatcagaatcaattctcggtgtggtgacgatcagggcatttgcagcaactgagaggtttatctacagcaacatgcagctcatcgacactgatgccacactgttcttccataccattgccgcacaagagtgggtactcataagagtagaggcactgcagtccttgacaataatcacagcagcattgttccttgt

SEQ ID NO: 35885 - DNA, 255 bp, Zea mays
caaaaatatcagaatatgtgccttccatgtttttaaggtatttgttgccaatccgaacaagcctcgatgtatcgttgtagctttgctagacaatcgtagagaagttctgaagctactccacaatcttccttcaagtaaaggcgacgatgaactcgatgaggagaaagacctaatcattcaggaaatccagaagttggcataacacaaaagcatcaagttatcgtttagcaatgcaagactctccttatagaggac

SEQ ID NO: 35886 - DNA, 257 bp, Zea mays
ctcgtttagaacctctaaaatttcccccactcgccagtcgcagcagcacctgtagcagccatggacgccagcggaccggtagcaaggggaagaagggggcggccgggcgcaaggcaggcggccccaggaagaagtcggtgacgcggtccgtcaaggccgggctgcagttccccgtcggccggatcgggcgctacctcaagaagggccggtacgcgcacgcgtgcggcactggcgcccccgtctacctcgccgccgtt

SEQ ID NO: 35887 - DNA, 258 bp, Zea mays
ccacactccgcaacctagctcgtaggcaggagtgtggtttgctcgttagagttattttcggacatccaaaaaacatgcttcctatgtgggatgatgggtatccttaaaattggaaggtaaatatagtctctttggtgttaaattccgtgaaagttggtcctgccgatggagtatcgagcagctccctttttgtgctctatcaactatgctgtaattctggctatgtatcggcaaaaacaattctatatgctgagttgg

SEQ ID NO: 35888 - DNA, 258 bp, Zea mays
aggacttggaggaggccccaatctccctcatggtgtcaaagtactgggtgaccaggaccatgtccatgatgtccttggcagtggtgcctggaacgttctctgagaaggcgagcacactgtccctcagcccatccacaatggcctggcgctgccttgcaatacccacgccagccaggtacttggattccgcctctccctcggctttcttgatctggagtatcttctcagcctccgctttctcactggctgccaccctca

SEQ ID NO: 35889 - DNA, 257 bp, Zea mays
cgcctctacatttcttctctctctgctcctccgcctccgcctccgcctgatccatccaagacagggatcgccatgtcggactcggaggagcaccacttcgaatcgaaggccgacgctggggcgtccaagacctacccgcagcaggctggcaccgtccgtaagaacggcttcatcgtcatcaagaaccgtccctgcaaggttgtggaggtttctacctccaagactggtaagcatggccacgccaaatgccactttgt

SEQ ID NO: 35890 - DNA, 240 bp, Zea mays
atcgatcctgctcttagaaggtttggtcggtttgatcgtgagattgatatcggtgttccagatgaagttgggcgccttgaggttcttcggattcacacgaaaaacatgaagctggctgaagatgttgacttggagatcattgcgaaggatactcatggttatgttggtgctgatcttgctgccctttgtactgaagctgctcttcaatgcattcgtgagaagatggatattatagatctt

SEQ ID NO: 35891 - DNA, 199 bp, Zea mays
cccacgcgtccgaggctataaaactcgtggaatggcatatgccatgcttggcaaatgggaggaagcagctcatgatctgcacacagtatctaacatggattacgacgaggatctcaatgctgcgctcaaaaaggtggacccaagtgcacataagatagtggaacatcggaagtattatgagatgatgaaagaaaagggg

SEQ ID NO: 35892 - DNA, 254 bp, Zea mays
gttctcggccatggtggtgcgcaactcggcgcacctgttcctggacgagctgggcgtggcgtacgacgaggccgaggactacgtggtcatcaagcacgccgcgctcttcacgtccacggtcatgagcctgctcctggcgcgccccaacgtcaagctgttcaacgccgtggccgtggaggacctcatcgtcacgggagggcgcgtcggcggcgtcgtcaccaactgggcgctcgtgtccatgaaccacgacacgc

SEQ ID NO: 35893 - DNA, 252 bp, Zea mays
ggtgggttggcttctcctccccctccggttcgggttcgggttcgtgaggttctccggggttcggtttcgtgggtgggcggatcgagatggcggcgtcggatgttgagtaccgctgcttcgtcggcggcctcgcctgggccacggacgaccactccctccacaacgccttcagcacctacggcgaggtcctcgagtccaagatcatcctcgatcgggagacgcagaggtcccgcggcttcggcttcgtcacct

SEQ ID NO: 35894 - DNA, 247 bp, Zea mays
cggacgctggtcgtcagcctgtgctctcttctcaaagacatggattgaagtttctggttcatcatcgaaggacgttgctaagcagctgaaggagcaacaaatggtgatgccaggccatcgtgagtcaaacctgcaacggttgggatgtatctgttcagttcccttttttttttttttttttttacaattttggcatatattaaccttgaagtaagcaagtacactactagcacagttactttccttc

SEQ ID NO: 35895 - DNA, 248 bp, Zea mays
gggaggcagtttatcatcctacatactgccagcagcagcagttggagcaatgggttattgctacatgtggtggaaggggttgtctctctcagatgtcatgtttgtcacaaaacacaacatggcaaatgctgttcagagcatgtcaaagcagttggagcaagtttcatcagcactagctgcaacaaaaagacatctaactcaacggcttgagaatttggatggcaaaatggatgaacaagtagaggtct

SEQ ID NO: 35896 - DNA, 246 bp, Zea mays
caacaccacctcgcctgcgatcttcgtagcctccgtcgcgtcgagcatcgatcatgtcggcctactgcggaaagtacaaggatgagctcatcaagaatgctgcctacattggcacccccggcaagggtatccttgctgctgatgagtccactggcaccattggcaagcgcctttccagcatcaatgtcgagaacgttgaggagaaccgccgtgccctccgtgagctcctattctgctgccctggtg

SEQ ID NO: 35897 - DNA, 242 bp, Zea mays
cgcctgtccactttccccgtgcttctccgccgtcgaggccgcgtcccagtgcgaagagactccgactcagatggccagccgctgggtccggcccgaggtgtacccgctgttcgcggcgacgggcgtggccgtcggcatctgcgggtttcagctcttccggaacatcactggcaacccggaagtcagggtaaacaaggcagggagggcagctggtgtgcttgagaaccatgaggaggggagac

SEQ ID NO: 35898 - DNA, 246 bp, Zea mays
gctgcagcagcggttcccggtgggggatgggaccatggacgtggtgcgggcggggcacgccgtgaaccgttggatcccggaggtggcgctggagttcctgtggtacgacgccgaccgtgtgctgcgcccgggctggcttctctgggtggaccacttctggtgccggaggagcgacctggagggcgtctacgccgccatgctgcggaggcttggctacaagaccatcaagtgggtcgccgccgacaa

SEQ ID NO: 35899 - DNA, 264 bp, Zea mays
cggacggtggtcgcgacgcgtggggtgaattgggacacctcaaaagtgaaggataagcttagtcgtgacattgagtctcatgtagcttcagttcgagctgctaaattatctgaactttgtgccaaatatgaggcacaacttaccaaagctctggcggaaccagttgaatctcttctagattcagccagtgaagatacgtggccagctattagaaagcttcttcaacgcgagacaaaaactgccgtttcaggtcttcaatctgct

SEQ ID NO: 35900 - DNA, 265 bp, Zea mays
  unsure (1)..(265): unsure at all n locations
gccgtctccactccgcgttccctggctccctgcgttgcgtcttgggggagagagagaagtgggagacccgcgagaggctgccgtgtagggactagggaccgtagagtaagcgacagganaggagggagagggggatggccgggatcgggccgatcaggcaggactgggagccggtggttgtgcggaagaaggcacccaccgccgctgccaagaaggatgagaaggccgtcaacgccgcgcgccgctccggcgcggagatcgagac

SEQ ID NO: 35901 - DNA, 266 bp, Zea mays
atttcgtttggttctcctttccgtcttgtccgtcgccgaggccttcttcccctcgctccccagctccagcaggcagatcagatccatccaaccacgaacaggaaggaaggtaggaggcctgaggggctgaagttgaaccatgagtgccgtcgcggtttcgtcgtcgctgaacccgaacgcgccgctcttcatcccggcggcgctgctgcaggtggaggacttctcgccgcagtggtgggacctcatcaccaccaccgcctggttcc

SEQ ID NO: 35902 - DNA, 268 bp, Zea mays
cagcagcttctcccgctacggcctcctcaacgacgccctcggcctggtgctgcactcgtgcctcctcgcgccctacttctcgtggaagtacagccaccagcgccaccacgccaacaccgcgtccctggagcgcgacgaggtgttcgtgcccaagcagaggcccgagatgccgtggtactccccgctcgtgtacaagcgcgacaaccccgtcgcccggctggtcctcctcgccgtgcagctcaccgtcggctggcccatgtacctggcg

SEQ ID NO: 35903 - DNA, 267 bp, Zea mays
gaaagatgtcgtggttcgggcaccaccaccacaaccagccggctcccccggcgtcgggccccaaccaggtgttcaagatcttctgccgcgccaacgagaactactgcctggccgtccgcgacggcgccgtcgtgctggccccggtcaaccccaaggacgaccaccagcactggtacaaggacatgcgcttcagcacccgggtcaaggacgaggaaggcatgccggcgttcgcgctcgtcaacaaggccacggggctcgcaatcaagc

SEQ ID NO: 35904 - DNA, 261 bp, Zea mays
gctttccaacttcttcatatggtccttgagcataatgtatggctagaagatgcatttaatagagcaactcagttgtatttgtcttactatcgctctatccccaaaagtttggagcgttctacagctcataagcttatgttagccatgctaaaccatgatgaaaggttcgtagagccgtcaccacattcactgcagaagttgactcttcagtcagttaaaaatgctgtcatgaaccagtttgtgggtggcaacatggaggtc

SEQ ID NO: 35905 - DNA, 261 bp, Zea mays
acctcaactaccacgagcggctgctgaagctggtgaagctgggcggcctcatcggctacgacaacacgctgtggaacggctccgtcgtgctccccgacgacgcgcccatgcgcaagtacatccgcttctaccgcgacttcgtgctcgtcctcaacaaggcgctcgccgccgacgaccgcgtcgagatctgccagctccccgtcggcgacggcgtcaccctctgccgccgcgtcaagtgaaaacatgccctggcctggcctg

SEQ ID NO: 35906 - DNA, 259 bp, Zea mays
aatacacatcaagagccgctgaactttacaggcagatgcttaccaaggaggtcgctaagagcgccacgaccgataatgccctgccatcgtcacctgtcgcatctgaggcttccaagccgccatccgatgacttccctgaattcaaactcccagatgtgccagcaccaccggcagaggatctgaatgggaagcatgagcccaagtcccccaaagctgctcctcgttcaccaaaggccgctactcatcccacctttgccac

SEQ ID NO: 35907 - DNA, 262 bp, Zea mays
gataaataagctgtcctttggggaagagttcccaggtgtagtcaatcctcttgatggagttgagtggatacaggataactccaatggattaacggggatgtaccagtattttgtaaaggttgttccaacaatctacacagatatcagggggcgcaagattcactcaaatcagttttctgtgacagagcacttcagagaggcaattggctatcctaggcctccacctggtgtatatttcttctacgaattttcaccaatcaag

SEQ ID NO: 35908 - DNA, 263 bp, Zea mays
gtcctctgtccgtcctaccaccacagctcaccgcggtttggctttctcccctcttccgcaccgcttctcgctccggattccggattccctctgctctttccctaacgaaggtagccatggcggggagaggtaaggcgatcggctcaggcgccgccaagaaggccacgtccaggagctccaaggctggcctccagttccccgtgggaaggatcgccaggttcctcaaggccggcaagtatgccgagagagtcggcgccggcgcc

SEQ ID NO: 35909 - DNA, 268 bp, Zea mays
cccacgcgtccgggagttggcaatggagacaatcacatgagaatcatccaggaggacatcatcgagacagtcaacaaccatcccagtgctgggtggacagcctcacgtaatccttacttttcaaactataccattgcgcaatttaagcacatacttggagtgaaaccagcaccacagaatgcactaagcaatgttcctgtcaaaacttattcaagatcactggaacttccaaaagagtttgacgctagatctgcatggtcccgttgca

SEQ ID NO: 35910 - DNA, 269 bp, Zea mays
caatcccatcctccacccaatcgaaggacctagcgagcggcacgccggcggcgatcggagaagatggtgcgcaaggcgaaggttgagttcgacgagcagccgccggataacttcgacccgaagaacccgtatgccgacccggtggcgatgctcgagtaccgggaacacctggtgcgagagaagtggatccagatcgagaccgccaagatcatccgggagcgcctccgctggtgctaccgcatcgagggcatcaaccaccaccagaagtg

SEQ ID NO: 35911 - DNA, 256 bp, Zea mays
gtctggcgctaagctgatcctggagaaggggtacaccggagccaaggtcatgaacgtgatctttgcggtcctcactggctctctggctctaggtcaagcgtctccaagcatgaaagcgtttgccggcgggcaggccgctgcatacaagatgttcgagacgatcaacagagcgccggaaatcgacgcgtacagcaccacaggaaggaagctggaggacatccggggggaaatcgagttcagggacgtccatttctcc

SEQ ID NO: 35912 - DNA, 255 bp, Zea mays
gttggcttctcctccccctccggttcgggttcgggttcgtgaggttctccggggttcggtttcgtgggtgggcggatcgagatggcggcgtcggatgttgagtaccgctgcttcgtcggcagcctcgcctgggccacggacgaccactccctccacaacgccttcagcacctacggcgaggtcctcgagtccaagatcatcctcgatcgggagacgcagaggtcccgctgcttcggcttcgtcaccttctccacg

SEQ ID NO: 35913 - DNA, 243 bp, Zea mays
tacttgaccaagcagcagcagcagggatggcgcctctgaagctgtacgggatgccgctgtcccccaacgtggtgcgcgtggccaccgtgctcaacgagaagggcctcgacttcgagatcgtccccgtcgacctcaccaccggcgcccacaagcagcccgacttcctcgccctcaaccctttcggccagatcccggctctcgtcgacggagacgaatcctcttcgagtcccgtgcgatcaaccg

SEQ ID NO: 35914 - DNA, 270 bp, Zea mays
cccacgcgtccgagcgagcgagggacccggggcggaagacgagagagaagacgtctctctcctctcggcgtccccgttcaccaacctctcgtctgctgcctgcctgcctgcctgcctgcaaaaaggagtttgtcatggcgtctaagcgcatcctcaaggagctgaaggacctgcagaaggactcccccacatcatgcagtgcaggtcctgctggtgaggacatgtttcattggctagcaacaattatgggaccatctgacagtccctatg

SEQ ID NO: 35915 - DNA, 267 bp, Zea mays
atccctgagcagtgtgactgcttatggttttgatcttgtccgtggaacccaaactcttgggcttgtcacgagtgctggtttccctgctggaaagtacctctttgctggtgttgtggatggacgcaacatctgggctgatgatcttgctacatctctcagcactctccagtctcttgaggctgttgttgggaaggacaagcttgtcgtatcaacttcctgctcgctcatgcacaccgctgtggatcttgtgaacgagactaagcttga

SEQ ID NO: 35916 - DNA, 253 bp, Zea mays
agttctagaatcgcgagcggccgccctttttttattttttttgccagcagaagaccccgtttctttggtcacatggaatggctgacaaagtagtattgtttgaagctggccaggctggtccaccgtttttgcaaagcgctggagttaactgtgagttcaaggcatatccagatctgggtcattcgctttcccaagaagagctactttatcttgagtcgtggatcaagagtcgtctaaatgccgctcaagagga

SEQ ID NO: 35917 - DNA, 263 bp, Zea mays
gtcctgccttgttaagcaacacagcgagacatcacgagagctagagagagatggcggccacggtttcctccttcccggtggtgaacatggagaagctggagacagaggagagggccacggccatggaggtcatccgcgacggctgcgagaactggggcttcttcgagctgctgaaccacggcatctcgcacgagctgatggacgaggtggagcggctgaccaaggcgcactacgccaccttccgggaggccaagttccaggag

SEQ ID NO: 35918 - DNA, 263 bp, Zea mays
ccgcctccgcctccgcctgatccatccaagacagggatcgccatgtcggactcggaggagcaccacttcgaatcgaaggccgacgctggggcgtccaagacctacccgcagcaggctggcaccgtccgtaagaacggcttcatcgtcatcaagaaccgtccctgcaaggttgtggaggtttctacctccaagactggtaagcatggccacgccaaatgccactttgtcgccatagacatattcaatgggaaaaagcttgaaga

SEQ ID NO: 35919 - DNA, 262 bp, Zea mays
agcaaacactgcccgagacatagacagcgggacgtcgagatggccgacggggaggacgccgccgccgcgcgccgccgggccgccatcacagactaccgcaagaagctgctcaactgcagggagctagagtcgcgcgtcggcaccgtgagagaaagccttaaaactgcaaagaaggattttaccaagactgaggacgacttaaagtctctgcagagtgtggggcaaataattggagaagtactccgacctcttgataatgaac

SEQ ID NO: 35920 - DNA, 260 bp, Zea mays
cgcgctaataataaggtcatcattggacctgcaacagttggaggaattcaagctggtgctttcaagattggtgatactgctggaaccattgacaacataattcagtgcaagctttacaggcctggatctgttggttttgtgtctaaatcgggtggcatgtcaaatgagatgtacagcaccattgccagagtgacagatggtatttatgcaggaattgcaattggtggggatgttttccctggatcaactctgtcagacca

SEQ ID NO: 35921 - DNA, 260 bp, Zea mays
actagttctagatcgcgagcggccacccttttttttttttttttttttttttttgattgacgcaggttttatttagcattacagagccacgttaggtccacacaggttacagatagagctctgagcacgggtacttaacgctattgggcttcacttcacgcacgccacccctgctcgccagcggggacccagacgatgctgagcttagagagaaaatgacacacgactgcgtcgtcccctggcttgagactgtgcgccac

SEQ ID NO: 35922 - DNA, 259 bp, Zea mays
gcagcgagagacgggcaggggaggaaaaaaatctaaccctagcatccgcagcgctagggttcgggggttgcgatggcggctgcggcgaggcagcgggggacggtgaagtggttcaacgacaccaagggcttcgggttcatctcccccgaggacagcagcgaggatctcttcgtgcaccagtcgtcgatcaagtcggagggcttccgctcgctcgcggagggcgaggaggtggagttttccgtctcggagggtgacgacg

SEQ ID NO: 35923 - DNA, 260 bp, Zea mays
tgctttcagacggaggttgttgatcaatcctgaagagcatcctatgctcattgctgaaccatctacaaacactgcacagcaaagagagaaagcagcggaacttatgtttgagaactacaaagtgccagcgctgtttctagccaaaaatgcagtgctcacatcttttgcgtctggacgagctacatctttggtggttgacagtggtggtgggtctactgtggtttctgctgtacacgatggttttgttttacagaagtctg

SEQ ID NO: 35924 - DNA, 264 bp, Zea mays
cgaaaccttttcttgtgctctgtctgtgtgtttccaaagcaaacgaaagagctcgaggatgtcttgcagctgcggatcaagctgcaactgcggatcaagctgcaagtgcggcaagatgtaccctgacctggaggagaagagcggcgggggcgctcaggccagcgccgccgccgccgtcctcggcgttgcccctgagacgaagaaagcggcgcagttcgaggcggcgagcgagtccggcgaggccgcccacggctgcagctgcgg

SEQ ID NO: 35925 - DNA, 266 bp, Zea mays
acgctgatatccgcatcccgttcgcgagcgcgacacacgctgacagctcacggctgaccttcccgagtcccgacggcctccagctccatcttgattcttgaggcgaactccggtgcgtaagagtctgccatggccagcgagaataaggtctttgggttcgaggaagtcgccaagcacaacgtcaccaaggactgctggatcatcatcgccggcaaggtgtatgacgtcactccgtttatggatgagcatcctggtggagacgaggt

SEQ ID NO: 35926 - DNA, 167 bp, Zea mays
cgaaaccttttcttgtgctctgtctgtgtgtttccaaagcaaacgaaagagctcgaggatgtcttgcagctgcggatcaagctgcaactgcggatcaagctgcaagtgcggcaagatgtaccctgacctggaggagaagagcggcgggggcgctcaggccagcgccg

SEQ ID NO: 35927 - DNA, 260 bp, Zea mays
agcggacgcgtggcgagacgcgtgggggcggtagtgacgaggaaaacgacgacgacgagtaaatagtatcgccgctgtcgtgaagtagcaaatcgattgttaggtccccaattagctcactggtttgctatctttaatgttaagttgtttggaacaggtgtttatgaaggggatctattagtttcgtgaggttgctagtttagtgcattagcaaagaaaaagccgaatgctgctagctattatgttgcttttcttttgct

SEQ ID NO: 35928 - DNA, 256 bp, Zea mays
gttcgatttagtgcaaagagagttgctgctagttgtgtttggctggcagggaagttggaggagagtcccaggaaatcaaagcatattatatttgtcttccatagaatggaatgtaggagagagaacttgccaattgaattcttagatgtcttttcaaagaaatattcagaactgaggcgtgacctgatacgacagaacgacatctgttgaaggagatggggtttatttgccatgtcgagcacccccataagttcat

SEQ ID NO: 35929 - DNA, 255 bp, Zea mays
  unsure (1)..(255): unsure at all n locations
cggacggtggntcagttacagaataaggagctgcttcgtaacatgccagagcatgcaccctcgcgtaatttcataaaatcacagggctcttaatgtaatatcttgaattgccgtgccatgtgtaataagtaatatcatgaataacagttgctattatgggttctaaaggtttattaacagccatccatgggccatggcagagttctcatattactttgttgaagtctttgttggaatatacatgacagaattctc

SEQ ID NO: 35930 - DNA, 253 bp, Zea mays
cagcgctcaagttctcgcgcccacagccaaatttttctccactcaatcgcggcataagctgcactgcagccatggacgccagcggaccggtagcaaggcgaagaagggggcggctgggcgcaaggctggcggccccaggaagaagtcggtgtcgcggtccgtcaaggccgggctgcagttccccgtcggccggatcgggcgctacctcaagaaggggcggtaccgcacgcgtgggcaccggcgcccccgtcta

SEQ ID NO: 35931 - DNA, 257 bp, Zea mays
gataaaccaatgcttgtgtatgagtatctctccaaagggagcctggatgatattcttcacggaagcagtggcgttctattaactttggagcaacgtttaaatattgctgcagaatcagcggaaggtctagcttatatgcattcgaaaacaggaaaaataatattgcatggtgatgttaaaccggccaatatacttttgaacgattgcttcacaccaaagatctctgactttggcatatcaaggctaattgttataga

SEQ ID NO: 35932 - DNA, 254 bp, Zea mays
ggaacgattcatcatgaagaggatcgggccaaagaactaccacatgttccgctatgtcgcaaggtatggatacaaggacatccacaagaaagacgacaacttcgagaagatgctcctggacaggctcttgatcttcgtcaggctggagagcatgatggacggctactccgactccgaggacctcaccgtgatggagcacaaggccgagaggtccaccagatcacttcagctgatcgagaaggctgggggtaata

SEQ ID NO: 35933 - DNA, 250 bp, Zea mays
caatcaaccagcaacactcttctcgtataacataatacagcgaaggtaactcacatggcaacttccatgggttgtctcgtcttgctctgccttgtttcttctctccttcccagtgccgtccttggccacccatggggtggcttgttcccacagttctatgaccattcgtgccccaaggcgaaggagattgtgcagtccattgtggcacaggctgtggccaaggagaccaggatggcggcatctttggtca

SEQ ID NO: 35934 - DNA, 249 bp, Zea mays
cggacgcgtggagagaaggagaaattatatgcacatttaaaaactgtgcattgtcgctttagtgtaaccatttgatatgtggacatcatgctcgaataaatcatacatgtgtgttactgttcattggataaatgatgattggtgtattcagaagaggattattggtttcttcaatgtcaaaggacgacacactggtaaaaagttgtcagagacctttactgaagctatggttagatggaatcttgataa

SEQ ID NO: 35935 - DNA, 249 bp, Zea mays
gctctctgctcaaccttgatgggatctatattgccacagccaagaatattgatggccatggcacgagatggcctgctaccatcattcttctctgatgtccataagacgacacaagttccagtcaaaagcacagtagtgactggcatctgtgcagctgctcttgctttcttcatggatgtctctcaactggctggaatggttagtgtaggcacgctactcgcgttcactatagttgctgtgtccatcttg

SEQ ID NO: 35936 - DNA, 250 bp, Zea mays
ccccattccgccgcccgccccgcgaccccgaggaggaggcaagatgaagacgatcctggcgtcggagacgatggacatcccggagggcgtcacagtgacggtggcggccaagctggtgacggtggagggcccccgcgggaagctcacccggaacttcaagcacctcaacctcgacttccagctgcaggagggcggccgcaagctcaaggtggacgcatggttcggcacccgccgcaccatggccgccatc

SEQ ID NO: 35937 - DNA, 249 bp, Zea mays
cggacgcgtgggacggaactaagctgttcttcagaggatcgcgcatctgggacgcagtcgtcgatgaacagtcatgggaaaaggaatggacgccgctgaacaggccttgctcgcaggctgctctgctggcggtctagctacgctactgcactgcgacgatttccgcgcgaggtttccgcaagaggtcccggtcaaatgccttcctgatggcggattcttcctggacataaaggatttatcaggagaacg

SEQ ID NO: 35938 - DNA, 243 bp, Zea mays
gcatttgttgcatctagcgcagggttataccgtttctgccccacaccggactgcacatccatttaccaagtagctgctgcaggcgcacaaggcgacagaccctttgtctgtggggcttgctctgtggagacctgcaccaagtgccatatcgagtaccatcctttcatctcctgtgaggcatacaaagagtacaaggcagacccggacgcaactctgcttgaatggcgcaaagggaaggagaac

SEQ ID NO: 35939 - DNA, 288 bp, Zea mays
cggcaaagcacttcctgatggccctgttgttatatctccagatggtctcttcccgtcactttacagagaagtcatcagaagagctccgcatgaattcaagatttcgtgtctagaggccatcaaagatttatttccacacgactcaaatccgttttatgctggatttggaaatagagacacagacgagcttagctacctcaaggttggtattcctatgggcaagatcttcataataaaccccaagggtgaagtcgcagtgaaccgacgggtcgatacaaagtcgtacac

SEQ ID NO: 35940 - DNA, 268 bp, Zea mays
caaccagcaacactcttctcgtataacataatacagcgaaggtaactcacatggcaacttccatgggttgtctcgtcttgctctgccttgtttcttctctccttcccagtgccgtccttggccacccatggggtggcttgttcccacagttctatgaccattcgtgccccaaggcgaaggagattgtgcagtccattgtggcacaggctgtggccaaggagaccaggatggcggcatctttggtcagactgcatttccatgactgctt

SEQ ID NO: 35941 - DNA, 289 bp, Zea mays
ctccaccctcctcgccgcctcactccctctgcagaggtcgcagatccgtccggttagacgaagccgcccgcacccatggcctccggtgagctcgcctgcacctacgccgccctcatcctcagcgacgacggcatcgccatcaccgccgagaagatcgccaccatcgtgaaggcggccaacatcaaggtcgagtcctactggccggcgctcttcgctaagctcctggagaagcgcagtgttgaggatctaatcctctccgttggatctggtggtggcgctgctccagttg

SEQ ID NO: 35942 - DNA, 183 bp, Zea mays
cggacgcgtgggcagacggacgcgtcggcgtcgggccccgacgcggcgtgcggcggcgtcggcatcctcagcatcgcgtgggccttcggcggcatgatcttcatcctcgtctactgcaccgccggcatctcaggtgggcacatcaacccggccgtgaccttcggcctgttcctggccaggaag

SEQ ID NO: 35943 - DNA, 280 bp, Zea mays
cggacgcgtgggcggacgcgtggggtttttgtgcgcatagcggatctgtacaataagtcagggaagctgaagggagtcaaaatcgtactgtgaaaacgctctcaaaatttaccaaaaacctattccagggacttctctggaagaaattgccactggtttaactgatgtttcagccatatatgagacgatgaatgagcatgagcaagcactcaagttacttcagaaggccttaaaaatgtacaacaattctgctggccaacagagcacaattgctggaatt

SEQ ID NO: 35944 - DNA, 279 bp, Zea mays
cggacacgctgggcctcccgttcgtgcgaccgtatctgagcggacggagcgcggaggacttcgcgagcggggccaacttcgccgtcggcggcgccacggcgctcagcccggactttttccgtgcaaggggtttcgacaccatgggaaacaaagtggacctcgacatggagatgaagtggttccgcggcctgctcgacctactctgtcccggcaatctcgccggttgctcagatatggatgaaccaatctctcttcttggttggagaaatcgggggcaat

SEQ ID NO: 35945 - DNA, 211 bp, Zea mays
gtcgattaaggaccttgtcgatgtaggcttgatgatcgaggaccctttaactggtcacatgcctcgtcatgggtaagccttgcctcgggcagactaaggccggaataagataacacgaaatgggagtggagcggtggcgagagtagcgtgtaccctccgtggcaagaggctggacggtggtgtatctgtgctctcggtttgcgtgaacctg

SEQ ID NO: 35946 - DNA, 281 bp, Zea mays
gggacctggaattcttggaaacatttttgacggtatccagcgacctctaaaaaccatcgctattaagtcaggagatgtgtatattcctcgtggtgtttcagttcctgcccttgacaaagatgtattgtgggaatttcagccaacgaagctaggtgttggagatgtcatcacaggtggagatctatacgcaatggttttggagaacacattgatgcagcaccatgttgctcttccaccgggttctatggggaaaataagttacattgcaccagctggccagt

SEQ ID NO: 35947 - DNA, 178 bp, Zea mays
agagacgattggcttgttgtcatgctacaacgtctaaagatactttggatcaagtcaagaccgatctccgcttccagtcctccgccgtcgccgcgctgcaggaggccgccgaggcctaccttgtggggctctttgaggacactaacctctgtgccatccacgccaagcgcgtcacaat

SEQ ID NO: 35948 - DNA, 282 bp, Zea mays
agaaaagaagcctaccaacatgaatgcatttgatataatatctctatcaactggtttggacctctctggtttatttgaagaatctaacaagaagagagaatccaaattcacatctaccaacacaagctcgacaatcatatcgaagatcgaagatattgcaaagaatttgcggttgaatttgacaaaaaaggatggtggcttgttaaagatggaagcttcaaagcccggaaggaaaggggtaatgggtatcgatgccgaagtatttgaggttagccccaactt

SEQ ID NO: 35949 - DNA, 159 bp, Zea mays
cccacgcgtccggctcctgcgggactacttcgacggcaaggagcccaacaagggtgtcaaccctgatgaggctgttgcctttggtgccgctgtgcagggaagcatcttgagcggcgagggtggtgacgagaccaaagatatcctcctccttgatgtggc

SEQ ID NO: 35950 - DNA, 243 bp, Zea mays
caactcgccgtctgccttctgcgcctccatttcggcctctgtcccttgcaagttcaatctcacctccaaccatgggtaaagagaagtcccacatcaacattgtggttattggccatgtcgactctggcaagtcgaccaccacaggacaccttatctacaagcttggaggcattgacaagcgtgtgatcgagaggtttgagaaggaggctgctgaaatgaacaagcggtccttcaagtacgcgt

SEQ ID NO: 35951 - DNA, 229 bp, Zea mays
agatttcaagtttcggcagccataccaacaagtcctatattattgttcgctaatactggaggaccaaacatggccatgggatgaggaattttctgcactttctcaccttgaagctagtgatctgggaatttttttgccccatttgctatcaaaaaccttcatcgagtgttattttgcaggtaatattgaacccaatgaagcaaacaatatcgttcaacatgttgaagat

SEQ ID NO: 35952 - DNA, 271 bp, Zea mays
acggtgccgtcagatcgaccagccggggatgatcggcaaggtcggcaacatactcggcgacacgaacgtgaacatcaacttcatgagcgtcggacggacgttcaggggcaagcaggcgatcatggccattggcgttgacgaggagcccgacaaggacacgctggagaagatcggggccattccggcgatcgaggagttcgttttcctcgaactatgatggctagcagcgagttttctctaggattgatattttgttatagtacgtactgaa

SEQ ID NO: 35953 - DNA, 160 bp, Zea mays
agaaggtgttcgtgcgcaccatcaccagccagttccaggccctcgtcggcatctcgctgctggagatcctgtccagccactcctccgacgaggtgtacctcggccagcgcgacaccaaggagtggacgtcggacgccaaggcgcaggaggcgttcaagcg

SEQ ID NO: 35954 - DNA, 217 bp, Zea mays
ggcggcgccggcgtgcttgtgatctcaacccaagtcgtgcctccgctccggtcacccgtcgctccacgcaaccatgtcgaggaggaagaccagggagcccaaggaggagaacgtcacccttggacccactgtccgtgaaggagagtatgtctttggtgttgctcacatctttgcatccttcaatgacaccttcattcatatcactgatttgtctggg

SEQ ID NO: 35955 - DNA, 272 bp, Zea mays
cgaaagaacacctctgttttctctgtttgaaagatgagcttaatcctataaacgcacacaagaagctaacttaagaagcgttcccatgcatacgcattagcttggctagatgagtcactatgacaatgaccgggtccagtgatgtgtctggtctaatcgggatcgtccggcaagaaaagaaatgaaatcaggtgcattgaacctgagcttgtcatatacccaccacatctcaaaatataaacatatattcatcaatcaatctacgaatgcaa

SEQ ID NO: 35956 - DNA, 278 bp, Zea mays
gtgaagggcaccgtcaggaacccagatgacccgaagaacgcgcacctcaaggcgctggacggcgccgccgagcggctgatcctctgcaaggccgatctgctggactacgacgccatctgccgcgccgtgcagggctgccagggcgtcttccacaccgcctcccccgtcaccgacgacccggagcaaatggtggagccggcagtgcgcggcaccgagtacgtgatcaacgcggcggcggtaagcggcacggtgcggcgggtggtgttcacgtcgtccat

SEQ ID NO: 35957 - DNA, 292 bp, Zea mays
ctggaagaggctatactcaaacacaaagaccaacttccgggaggttgccatcaaaggtttctgggacatgtatgacccagagggctactctctgtggttctgtgactacaagtacaatgacgagaacaccgtctcctttgtgaccctgaacaaggttggtggattcctgcagcggatggacctgtgccgcaagtacgcctttggcaagatgctcgtggtaggttctgagccacccttcaagctgaagggcctttggctcttccgtggccaggaggttcccaagtttgtaatg

SEQ ID NO: 35958 - DNA, 291 bp, Zea mays
agctcccctgcgcccacctctatcactccttctgcatcgtcacctggctcgggatgcacaactcctgccccgtctgccgcttccgcatcccccccgccgacgaccccgaccaggccgcaccgtcgcagcaggacccgccgcccacgcggatcaccatccgcttcagcaccaccacacgccgccgcgtccgcatcggcagcgatgcgccactggcgtctcatatctcggcgtcgcccacgcagctcgcacaggctattaccggggatggagctggtggacctgccaatagcg

SEQ ID NO: 35959 - DNA, 288 bp, Zea mays
ggcagcgcgggcgcggcgacaccgcgaggacagagcgagacgcagcggcggaggaggggcagaggcgagcgccgcctagagtccctgctaccatggacactttcttcctgtcgcacggctcgcacacgctctccatcgacgacaacatcccggcgcggcacttcttcaagtcgtgggtgccggcgaaggtcgcgggcgaccagcccccgcgcgccatcctcgtcgtgtcgggacactgggacacggccacgccggaggtcaacgtcatccagggcagcaacgacacca

SEQ ID NO: 35960 - DNA, 266 bp, Zea mays
acaccacctcgcctgcgatcttcgtagcctccgtcgcgtcgagcatcgatcatgtcggcctactgcggaaagtacaaggatgagctcatcaagaatgctgcctacattggcacccccggcaagggtatccttgctgctgatgagtccactggcaccattggcaagcgcctttccagcatcaatgtcgagaacgttgaggagaaccgccgtgccctccgtgagctcctattctgctgccctggtgctctccagtacatcagcggtgt

SEQ ID NO: 35961 - DNA, 268 bp, Zea mays
ggcgattcccaggtcccgcgagaatatgccgaagcagatccatgagattaaggacttcctcctcaccgcgtggaggaaggatgcccgctcagtgaagatcaagaggagtaaggatgttgtcaagttcaaggtgcgctgctccaagtacttgtacacgctctgcgtcttcgatgctgagaaggcaagcaagttgaagcaatctcttcccccaggtttgaccgtcgaggaggtctgattggatacatggcaacgccgagttgaactaccc

SEQ ID NO: 35962 - DNA, 281 bp, Zea mays
cccacgcgtccgatcagcatcagctagccacccgaccaggcttcagaaaacaaaaaaatgaagctctcggcggcagtcctctgcgcgcttgtggctgttcaggcggcggtgcttctcgccaccgtgctgacggcgcaggccagcgagctggaggtcgggtactacagcaagaaatgcaagggcgtggagaacgtggtgaagtggcacgtcatcaaggcgatcaaggccaaccgccgcaccggcgccgctctcgtccgccttatcttccatgactgcttcgt

SEQ ID NO: 35963 - DNA, 283 bp, Zea mays
gccgtgcccacggcgctgtcgatgccgcacctgccccagggcgcgcgcgcagatgacgcgctcaaggacttcctggcctttgtcgtcggcgaggccaacctcaagggcgtcgacgccatgcccgaggacgtcgcccaggcggtgctctacctggccagcgacgaggcgaggtacgtcagcgcggtcaacctcatggtggacggaggcttcacagccgtaaacaataacctcagggcgtttgaggattagttgaggcatgtatgccagctctgggattgggagg

SEQ ID NO: 35964 - DNA, 281 bp, Zea mays
ctttagatgttcctctaaagattgcccgtgtctactatcctggcttgcctagccaccctgaacatcacattgccaagagtcaaatgactggctttggtggtgtggttagttttgaggttgctggagactttgatgccacaaggaaattcatcgattctgttaagataccctatcatgccccttctttcggaggctgtgagagcataattgatcagcctgctatcatgtcctactgggattcaaaggagcagagggacatctatgggatcaaggacaacctg

SEQ ID NO: 35965 - DNA, 276 bp, Zea mays
cggacgcgtgggcgagacgcgtggggttctctcgtccagaggcctggccagctagctagcactgacactgacacgagaccctgcaactagcagctgatcgatccatatccatccatggccatgggctgctgctacggtgatttcttcgacaaggccaagccttacctcgccatgatctccctgcagttcggctatgcggcatgaacgtcatcacaaggtcccctcaaccaggcatgagccactacgtgctcgtcgtctacgcacgcttcgctacgt

SEQ ID NO: 35966 - DNA, 287 bp, Zea mays
cccacgcgtccgattgggtttgatgacttcggtactggtgtgccctgatggaaagacgatcgaagctgaagctgcccatggtactgttacccgtcattaccgtgttcaccagaaaggaggtgaaactagtacgaacagtattgcctcaatctttgcgtggacaagaggacttgcacacagggcaaagcttgatgacaatgctagactacttgacttcacccagaagcttgaggctgcctgcgttggagccgtcgagtctgggaagatgaccaaggaccttgcccttc

SEQ ID NO: 35967 - DNA, 179 bp, Zea mays
gagacacgcgtccaaacatacagctagatagcctctgcatgcctacgtacagcatggccaaggccgagctgctcctcgccctcgtggcttcgctcgtcgtgctgccattctcctccctcgccgtgtaccaggacttctgcatcgccgacctatccgctgccgccacgccgggcggctac

SEQ ID NO: 35968 - DNA, 154 bp, Zea mays
cggacgcgtggggaaggggaagctgtacatccatttcacggtggagttccccgactcgctggcaccagagcagtgcaaggctctcgagacagtacttccaccaaggccttcatccaagctgacagacatggagatagatgaatgcgaggagacg

SEQ ID NO: 35969 - DNA, 278 bp, Zea mays
  unsure (1)..(278): unsure at all n locations
cggacgcgtggnggggtgacattgagaagtttaaggattataagccgtcatcttcagctgaacctgtagctcatgctgaatcaaaggctcaaccagaaccttcacaaccaaaggtggaggaaaaaaagcttacccaggctcctgaggttaaggccccaaagattgaagaagcttctcaatctggagatcgcatatttgccagccctcttgctcgtaaactggctgaagataacaatgtcccactatcaagtgtgaaaggtactggtcctgatgggcgt

SEQ ID NO: 35970 - DNA, 277 bp, Zea mays
ctcttctcgcaggccactcctgcaagcaattcgttgtcccaagaagacattgaggccctcaccaagaggacacaagatggtgggacagaggtggttgaagcaaaggcgggaaaaggctctgcaacgttgtccatggcatatgctggtgctgtttttgcagatgcatgtttgaagggtctgaatggagttccagacattgtagagtgctcttttgtgcaatcaactgtgacagagttgccattctttgcctccaaggttcggctcggcaagaatggag

SEQ ID NO: 35971 - DNA, 239 bp, Zea mays
cgaaatccccaaggcgaggcgttgaaacccttaaccctcttccacctcgaagcggcgcgaggagggagagtgtgagtggactcaggaggcggcgggcgaaatgaagcttaacgtcaagaccctcaagggcaccaacttcgagatcgaggcgagccccgatgcgtcggttgctgaggtgaagaggatcatcgaaactactcagggtcagagtacctacccagcagaccagcaaatgctca

SEQ ID NO: 35972 - DNA, 283 bp, Zea mays
cggacgctggcggtgctgttcgtgcacggcttcccggagctctggtactcgtggcgccaccagaagggctacctcgccgcgcgcggctaccgctgcgtggcacccgacctccgaggctacggcggaaccaccgctccgccggaaccgacctcctacaccgtcttccatatcgtcggcgacatcgtcgcgctcctcgacgccctccacctcccgcacgtgttcgttgtcggccacgactggggcgccatcgtgtcgtggacctctgcctgctgcggccggatcg

SEQ ID NO: 35973 - DNA, 283 bp, Zea mays
ctaagctaagccgagctaagaagcacagcaagtctcaccagactagcggctagcgcgagaatggccaaggacatcgaggccgcggcgcacgagggcaaggactactcggacccgcctccggcgccgctggtggacgcggaggagctgaccaagtggtcgctgtaccgcgcggtgatcgccgagttcgtggccacgctgctcttcctctacatcacggtggccacggtgatcgggtacaagcaccagacggacgcggcggcgtcgggccccgacgcggcgtgcg

SEQ ID NO: 35974 - DNA, 276 bp, Zea mays
ggacatcaggccccagaaaaaagtccgaacgcatctcttctttctactttcttgtaacccaagacgaactcggtgaactctttctcctcgcgcacaccggagcacaatcaaggattccagtccagtcctgccaatggagtgcgttttgggcttggttggccgcgacttcgcggtggtggcggccgacacctccgccgtgcagagtatcctcgtccacaagactgacgaggacaaagtaatggtcctcgactcgcacaagctgttgggcgcttcagg

SEQ ID NO: 35975 - DNA, 254 bp, Zea mays
gcagcctccaaagccactcccaaacccccgcttccagaaccttctcgaagctccccgccgcctcctccactcgcaccgatggcgaaggaaccaatgcgcgtgctcgtcactggcgccgcaggacaaattggatatgccctggttcccatgattgctacgggtgttatgcttggtgcagaccagcctgttattctgcacatgcttgacattccgccagcagctggagcccttaatggtgttaagatggagttggt

SEQ ID NO: 35976 - DNA, 277 bp, Zea mays
ggggattgaacaggatgatggagaggtttaaggataacatggagttcaccaagttgaagccgaagatggcagggattgaccctgatgatgtttactctgaagtgccctatgagaaaggtttccagttcctttggagaattgagcgtgagattggcaggcctgctttcgacgagtttttaaagaagtacattgcaaccttcaagttccaatcgatagatacagagacatttcttgaattcctcaaaaccaatgtacctgggatagaaaacaaaattga

SEQ ID NO: 35977 - DNA, 269 bp, Zea mays
cccacgcgtccgcccatcagaggtggacacctcgggctgtatctatggggcgcctgggcagtactaccagagccttgatttttcgcaggtgctcaattgtgaccgcaagccggtgatccttgacctgcccctgtcccggtacaacgacactcagattgggaagattgacaattgctgcaggaatgggacaatcttgcccaagtccatggacgaggcacagtcgaaatctgcgttccagatgcaagttttcaagatgccaccagacctga

SEQ ID NO: 35978 - DNA, 262 bp, Zea mays
atcgatcctgctcttagaaggtttggtcggtttgatcgtgagattgatatcggtgttccagatgaagttgggcgccttgaggttcttcggattcacacgaaaaacatgaagctggctgaagatgttgacttggagatcattgcgaaggatactcatggttatgttggtgctgatcttgctgccctttgtactgaagctgctcttcaatgcattcgtgagaagatggatattatagatcttgaggatgagacaatagatgctg

SEQ ID NO: 35979 - DNA, 258 bp, Zea mays
acattatccaccgggactcctacacctgaagtgatcgagtcgaaacacgacaaccacaaccctgaagctaaagtttcagcaggaaactcggataggcgagtgaatgctgtgaaccacctagcaaaggagtttgaagacagacgacaggtgttcgaagacgatgcgggcttcctagttgcagtcaggtccggtcagattggttcaaatatgaacccagacgaggaactccggaagctgaaggaccgctttgcgacatgg

SEQ ID NO: 35980 - DNA, 273 bp, Zea mays
cccaccctctcctatgccgatttctaccagcttgccggagttgtggccgtcgaggtcaccggtgggcctgagatccccttccaccccggcagggaggacaagcctcagccgccacctgagggccgtcttcctgatgccaccaagggttctgaccacctgaggcaagtctttggcaagcagatgggtttgagtgatcaggacattgttgccctctctggtggccacaccttgggaaggtgccacaaagagcggtctggttttgagggggcctgg

SEQ ID NO: 35981 - DNA, 268 bp, Zea mays
ctccgacaagcccgtggggctcggcgtccggtcccgccgctacgcgctgctcgcggaggacggcgtggtcaaggtgattaacctcgaggagggcggcgcgttcaccaacagcagcgccgaggacatgctcaacgcgctctgaactcgcgacgccatggttggttcgtctcttccggcaagagttggtttcttttccctgaaaataatcgtgacggcaacggtggcttgtgttactgccgccactgttgtgaccggcgctgttactagt

SEQ ID NO: 35982 - DNA, 266 bp, Zea mays
cggaggagaacatgcgctacttcaacgttatgatccttgggccggcgcagtcgccctatgaaggtggagtttttaagcttgaactctttttacctgaggaatatccaatggctgccccaaaggttaggtttctgacaaagatttatcatcccaacatcgacaagcttggtaggatatgcctcgacattctcaaggacaaatggagcccagcacttcagattcgaacagttcttttgagtatacaggctctactgagtgcgccaaat

SEQ ID NO: 35983 - DNA, 263 bp, Zea mays
cggacgcgtggcggacgcgtgggcggacgcgtgggcggacgcgtgggcggacgcgtgggcggacgcgtaggcagtcacctgacaaagattactcacggaaaagttggtccctgagctgaacagatcaccaagcaaagctgcaaggatgttttcaggaacacaagacaagtgtgcgacttgtggtaaaactgcgtatcctcttgagaaggtaacagtcgaagagaagtcctaccataagtcatgcttcaaatgctcccacgggg

SEQ ID NO: 35984 - DNA, 262 bp, Zea mays
cggacggcagcctcaaaactttcttctgccaagacgagctcaggtcatccaaggcaaacgatctggttaagcgagtatacggaagcttggtccctgtgctagatggggagaatctctcggtcagaatactggttgaccactccatcgtggagagctttgcccagggcggacggacgtgcatcacgtcgcgcgtgtacccgacgcgggccatcaacgactccgcccgcgtgttcctcttcaacaatgccacgggtgtccacgt

SEQ ID NO: 35985 - DNA, 259 bp, Zea mays
cggacgctggcaactcgccgtcgtcttctgcggttctgccgtctacgcctccaatttggcctctctcacttgcaagtttaagcttcatcttcagccatgggtaaggagaagtcccacatcaacattgtggtcattggccacgtcgactctggcaagtcgaccaccaccggccacctgatctacaagcttggaggcattgacaagcgtgtaatagagaggtttgagaaggaggctgctgagatgaacaagcggtccttca

SEQ ID NO: 35986 - DNA, 266 bp, Zea mays
attgctttttggtccacctggcaccggtaagaccatgcttgccaaagctgttgcaacagaggctggtgctaattttatcaacatatcaatgtcaagcattgcttcaaagtggtttggagagggagaaaaatatgtgaaagctgttttttcacttgcaagcaaaatttctcctagtgttattttcgtggatgaggttgatggcatgctgggtagacgtgagaatccaggggaacatgaggccatgcgcaagatgaaaaatgagttta

SEQ ID NO: 35987 - DNA, 298 bp, Zea mays
  unsure (1)..(298): unsure at all n locations
atctgagacgagacgccgcccnnctcncctcaaccggaacttgttttaccccatctcatcccactgactcgctncanncanccgnccgccgnctccgccggatctcttcggactcggatccgcccgaccacgaccaccccgcgccgccgccgcgcagcagcagcagatcagagaagatggccggactcgacaccttcctcttcacctcggagtccgtgaacgagggacaccctgacaagctctgcgaccaggtctcagatgctgttctggacgcttgccttgctgaggacctgacagc

SEQ ID NO: 35988 - DNA, 299 bp, Zea mays
aggcagaccaagaagatccgcacgtctgtgacatttcaccgccccacgaccctgaagaaggctagggaccccaagtacccacgaatcagcactaccggaaggaacaagcttgatcagtaccaaattctcaagtacccccttaccacagaatcagcgatgaagaagattgaagataacaacactctggtcttcattgttgacctcaaggcagacaagaagaagatcaaggctgccgtcaagaagatgtatgacatccaggcaaagaaggtcaacaccttgatcaggcctgatgggaagaa

SEQ ID NO: 35989 - DNA, 296 bp, Zea mays
ctccgacatcctactttcgtcctcacgagtgaccgataatccgccggcgctaagatgttggtttatcaagatctcctatctggcgacgagctcctgtcggattcattcacctacaaggagctcgagaacggcgtcctgtgggaggtcgagggaaagtgggtcacccaaggtcctgttgatgtagacattggtgccaatccatccgccgagggtggtgaggacgaaagcgttgatgacacagccgtgaaggtggttgatattgttgacacattccgtctacaggagcaacctccttt

SEQ ID NO: 35990 - DNA, 293 bp, Zea mays
gctgaggatgatgatgaccttgatctttttggtgatgaaactgaggaggacaagaaggcagctgatgagcgtgccgccgctgccaaggcctcttctaaaaagaaagaaagtggtaaatcctccgtccttatggatgtcaaaccatgggacgatgagactgagatgaagaagctggaggaggctgtccgcagtgtccagatggagggtctgacttggggagcatcaaagcttgtgcctgttggatacggcatcaagaagatgactatcatgttgacaattgtcgacgatcttgt

SEQ ID NO: 35991 - DNA, 290 bp, Zea mays
atgaaatctaaacatgctctaatttgattgtatcaaagattgttgctattgttctcttcgttaccatgttcgtttcgcctgtctgaaacttcagagatcatgttttgccaagcaattttccaaaacccacgcgtccgcgtgacgcgtggggcaaattgtcataccgggttacagaggaagatgttatccgtgcacgtaatcagctgaagtcctcaatccaactccaccttgatggttcaactgctgttgtcgaggacattggccgccagctgctgacctatggacgaaga
